United States Patent Application Publication US 2005/0153317 A1 - sequence listing, part 20

SEQ ID NO: 88376 - DNA, 600 bp, Chicken  19866894393212_4
aggtttcatggtcactaactcactcctgtgtctgagtaggcaccytagtactctgctgtttgtgtgcagagctgggcacwtaaacaaagctttaaactatgaaaaaaacatctgactgtggtcttactagaccacggtcttactagaccacagtcagcagaaagaccatcagtagagagatcctctgtcacaaaagattgggaactgggaatttgatctggtgaatgttggtgacattaggctataaaagcctttcccaccatggcatctccactgtccaggaagttctggagctgacaygtgtgtcccacctttgataccttctgtccaccatgtgtggtagtttccacatttcaccctgcagaattcaggctctgcgaatgcaacacagccacaccttaaaattcagaaagttttaggatcagggcaacagcaactccctctttctgcacagcacaacacacctctcagcccagcacrcagctcmcagtttgtatactgttataagttacaaccctttgtgcctcaaggacaacacaacatagggcaagtgaaagagaaaggcctattgaatcatgtcttctgttgtgcactgaaaca

SEQ ID NO: 88377 - DNA, 600 bp, Chicken  19866894393212_5
tcctctgtcacaaaagattgggaactgggaatttgatctggtgaatgttggtgacattaggctataaaagcctttcccaccatggcatctccactgtccaggaagttctggagctgacaygtgtgtcccacctttgataccttctgtccaccatgtgtggtagtttccacatttcaccctgcagaattcaggctctgcgaatgcaacacagccacaccttaaaattcagaaagttttaggatcagggcaacagcaactccctctttctgcacagcacaacacacctctcagcccagcacrcagctcmcagtttgtatactgttataagttacaaccctttgtgcctcaaggacaacacaacatagggcaagtgaaagagaaaggcctattgaatcatgtcttctgttgtgcactgaaacaggatattaamtatcacagtacagactgtgataaagggctgaaagggtcagttgggttattgtracccattctctgcctctatttgtacctttcttcatctgaacaaactgactcaacagcaatcaaactctaggagggctgagacatcttttgggtgcattggccctaatccaccaatac

SEQ ID NO: 88378 - DNA, 600 bp, Chicken  19866894393212_6
tcacaaaagattgggaactgggaatttgatctggtgaatgttggtgacattaggctataaaagcctttcccaccatggcatctccactgtccaggaagttctggagctgacaygtgtgtcccacctttgataccttctgtccaccatgtgtggtagtttccacatttcaccctgcagaattcaggctctgcgaatgcaacacagccacaccttaaaattcagaaagttttaggatcagggcaacagcaactccctctttctgcacagcacaacacacctctcagcccagcacrcagctcmcagtttgtatactgttataagttacaaccctttgtgcctcaaggacaacacaacatagggcaagtgaaagagaaaggcctattgaatcatgtcttctgttgtgcactgaaacaggatattaamtatcacagtacagactgtgataaagggctgaaagggtcagttgggttattgtracccattctctgcctctatttgtacctttcttcatctgaacaaactgactcaacagcaatcaaactctaggagggctgagacatcttttgggtgcattggccctaatccaccaataccacaaag

SEQ ID NO: 88379 - DNA, 600 bp, Chicken  19866894393212_7
cctttgataccttctgtccaccatgtgtggtagtttccacatttcaccctgcagaattcaggctctgcgaatgcaacacagccacaccttaaaattcagaaagttttaggatcagggcaacagcaactccctctttctgcacagcacaacacacctctcagcccagcacrcagctcmcagtttgtatactgttataagttacaaccctttgtgcctcaaggacaacacaacatagggcaagtgaaagagaaaggcctattgaatcatgtcttctgttgtgcactgaaacaggatattaamtatcacagtacagactgtgataaagggctgaaagggtcagttgggttattgtracccattctctgcctctatttgtacctttcttcatctgaacaaactgactcaacagcaatcaaactctaggagggctgagacatcttttgggtgcattggccctaatccaccaataccacaaagcattgccatggcaaattgacacctttggatgtgccttgttcctggtaaacagtaaggcacacagtatgttgcagactgcatgtgctctcagacagatcagtacagtcactgggaaaaaacact

SEQ ID NO: 88380 - DNA, 600 bp, Chicken  19866894393212_8
gaattcaggctctgcgaatgcaacacagccacaccttaaaattcagaaagttttaggatcagggcaacagcaactccctctttctgcacagcacaacacacctctcagcccagcacrcagctcmcagtttgtatactgttataagttacaaccctttgtgcctcaaggacaacacaacatagggcaagtgaaagagaaaggcctattgaatcatgtcttctgttgtgcactgaaacaggatattaamtatcacagtacagactgtgataaagggctgaaagggtcagttgggttattgtracccattctctgcctctatttgtacctttcttcatctgaacaaactgactcaacagcaatcaaactctaggagggctgagacatcttttgggtgcattggccctaatccaccaataccacaaagcattgccatggcaaattgacacctttggatgtgccttgttcctggtaaacagtaaggcacacagtatgttgcagactgcatgtgctctcagacagatcagtacagtcactgggaaaaaacacttgccaaatccctggatgcagcctgaatattagggtaacaatgaaaggaaagca

SEQ ID NO: 88381 - DNA, 563 bp, Chicken  19866894393212_9
gtacctttcttcatctgaacaaactgactcaacagcaatcaaactctaggagggctgagacatcttttgggtgcattggccctaatccaccaataccacaaagcattgccatggcaaattgacacctttggatgtgccttgttcctggtaaacagtaaggcacacagtatgttgcagactgcatgtgctctcagacagatcagtacagtcactgggaaaaaacacttgccaaatccctggatgcagcctgaatattagggtaacaatgaaaggaaagcattgcccacataaaccagtaartatgctttcctctgtgtgtccgctaamagagaggaaaagaaattactgtaaggacaaccacaggttaaaccccataggcacctcaggacatgactgcaccttctgctgttagatgctctctggacaaatacagcctttgccttgtaaagtctgctttactcttgctcacagcctggttagcttcagggtccgccttcgggccacaactccacaatcagcaatttccagtctaggtatcctagtaaacattagggtgcatggag

SEQ ID NO: 88382 - DNA, 599 bp, Chicken  19866894393218_1
  misc_feature (1)..(8): n is any nucleotide
nnnnnnnntggggaaatggagtctactgatcttgttagggtacagagggctttactggcctattggatttcaagacattctctgctaggaagtaaacagagaccagtgtcatacacaaggtcaccaaaggcacagcatgaatatgcgcaggtctcaagcacaatactttaacagctacagtggctctctgaaggcctcctcttgtctgctctcttctaaggagctgccgcctccacagagggctgcaggctgaggtccacaactgggctgctgtggttattcagatactccagaacaaawtccactcactggaaatacacattccttgataccaggaatcagctttccatagatatcataactgcttgcatacataccagattcagatttattcaataggctcctaggctgctatgcaatctgtctgtacaggttttttttggtattatgtagaactttatttgtaatacaagacaggaggacacagaatctgtttcacggatcgtggccttcatagaatttggacagaaagtctttaggtcgtggggtttccgtctcatgaaaatacctcatgacgtgagtcctctgcttccatacat

SEQ ID NO: 88383 - DNA, 599 bp, Chicken  19866894393219_1
  misc_feature (1)..(48): n is any nucleotide
nnnnnnnnnnnnnnnnnnnnnnnnnnnnnnnnnnnnnnnnnnnnnnnnataaagaagaagtagcctgcatgggactgttggtccttacccctctgcacagacatatattgtacaaagcctttctcaggaaggtcctccattctgactaaaagtagcttgttctgtaagtgtacaagtaagcacgtgtgatttttttttttttttgaaactgccaaggaaatttaggttggtggaggttttcctacctgaactggaacttaacaggaaaataataaaatgtgcagtctttgtgtaggctgwtttttggtacagattgcaattgggaagcagaaggaaaaacatcagttttactcacagtctgtrtctgtacatctacttgaacaggacccagatctttaaagagttagataggaaattaatttatttcccactccctttctggttaccagctgttctcctwacatgaagtgatggtccccataaaggccttctgaagaaacaagcaatttcctgaataaatcaagttatcctttccttcttcccttttttctccctttcagtgactggtatctttggtgacaatcctgaacagtcttgtt

SEQ ID NO: 88384 - DNA, 600 bp, Chicken  19866894393219_2
cctgcatgggactgttggtccttacccctctgcacagacatatattgtacaaagcctttctcaggaaggtcctccattctgactaaaagtagcttgttctgtaagtgtacaagtaagcacgtgtgatttttttttttttttgaaactgccaaggaaatttaggttggtggaggttttcctacctgaactggaacttaacaggaaaataataaaatgtgcagtctttgtgtaggctgttttttggtacagattgcaattgggaagcagaaggaaaaacatcagttttactcacagtctgtrtctgtacatctacttgaacaggacccagatctttaaagagttagataggaaattaatttatttcccactccctttctggttaccagctgttctcctwacatgaagtgatggtccccataaaggccttctgaagaaacaagcaatttcctgaataaatcaagttatcctttccttcttcccttttttctccctttcagtgactggtatctttggtgacaatcctgaacagtcttgttaccagctgctctaatctagggctttcatcatttcaccttgatrtttccttcctcattgtttccc

SEQ ID NO: 88385 - DNA, 600 bp, Chicken  19866894393219_3
tctgtaagtgtacaagtaagcacgtgtgatttttttttttttttgaaactgccaaggaaatttaggttggtggaggttttcctacctgaactggaacttaacaggaaaataataaaatgtgcagtctttgtgtaggctgttttttggtacagattgcaattgggaagcagaaggaaaaacatcagttttactcacagtctgtrtctgtacatctacttgaacaggacccagatctttaaagagttagataggaaattaatttatttcccactccctttctggttaccagctgttctcctwacatgaagtgatggtccccataaaggccttctgaagaaacaagcaatttcctgaataaatcaagttatcctttccttcttcccttttttctccctttcagtgactggtatctttggtgacaatcctgaacagtcttgttaccagctgctctaatctagggctttcatcatttcaccttgatrtttccttcctcattgtttcccctacatgtacaaaayaatgcctatgagygctgtgtacaagacttgcagtagaaaatgaattgtttatggtggcgcatatcaaactaaggttactttc

SEQ ID NO: 88386 - DNA, 600 bp, Chicken  19866894393219_4
cagttttactcacagtctgtrtctgtacatctacttgaacaggacccagatctttaaagagttagataggaaattaatttatttcccactccctttctggttaccagctgttctcctwacatgaagtgatggtccccataaaggccttctgaagaaacaagcaatttcctgaataaatcaagttatcctttccttcttcccttttttctccctttcagtgactggtatctttggtgacaatcctgaacagtcttgttaccagctgctctaatctagggctttcatcatttcaccttgatrtttccttcctcattgtttcccctacatgtacaaaayaatgcctatgagygctgtgtacaagacttgcagtagaaaatgaattgtttatggtggcgcatatcaaactaaggttactttctcgcttaggaatagatttgttccttggaaagaaaatgttgaggtttttaacttcttcaaaagagtgcaactgagaatttgtttcattttcctttgtctgtagatccaggaagaccagtagaagttgctgtgaatgtacagttagaaaacgtagtgactattgacttagttgtttgcactgga

SEQ ID NO: 88387 - DNA, 600 bp, Chicken  19866894393219_5
gaacaggacccagatctttaaagagttagataggaaattaatttatttcccactccctttctggttaccagctgttctcctwacatgaagtgatggtccccataaaggccttctgaagaaacaagcaatttcctgaataaatcaagttatcctttccttcttcccttttttctccctttcagtgactggtatctttggtgacaatcctgaacagtcttgttaccagctgctctaatctagggctttcatcatttcaccttgatrtttccttcctcattgtttcccctacatgtacaaaayaatgcctatgagygctgtgtacaagacttgcagtagaaaatgaattgtttatggtggcgcatatcaaactaaggttactttctcgcttaggaatagatttgttccttggaaagaaaatgttgaggtttttaacttcttcaaaagagtgcaactgagaatttgtttcattttcctttgtctgtagatccaggaagaccagtagaagttgctgtgaatgtacagttagaaaacgtagtgactattgacttagttgtttgcactggacctttccaatgtcgctaattcttcctgcttaataat

SEQ ID NO: 88388 - DNA, 600 bp, Chicken  19866894393219_6
atctttaaagagttagataggaaattaatttatttcccactccctttctggttaccagctgttctcctwacatgaagtgatggtccccataaaggccttctgaagaaacaagcaatttcctgaataaatcaagttatcctttccttcttcccttttttctccctttcagtgactggtatctttggtgacaatcctgaacagtcttgttaccagctgctctaatctagggctttcatcatttcaccttgatrtttccttcctcattgtttcccctacatgtacaaaayaatgcctatgagygctgtgtacaagacttgcagtagaaaatgaattgtttatggtggcgcatatcaaactaaggttactttctcgcttaggaatagatttgttccttggaaagaaaatgttgaggtttttaacttcttcaaaagagtgcaactgagaatttgtttcattttcctttgtctgtagatccaggaagaccagtagaagttgctgtgaatgtacagttagaaaacgtagtgactattgacttagttgtttgcactggacctttccaatgtcgctaattcttcctgcttaataatatagtatcaaaaa

SEQ ID NO: 88389 - DNA, 599 bp, Chicken  19866894393222_1
  misc_feature (1)..(80): n is any nucleotide
nnnnnnnnnnnnnnnnnnnnnnnnnnnnnnnnnnnnnnnnnnnnnnnnnnnnnnnnnnnnnnnnnnnnnnnnnnnnnnnncctgttcctgactgtaggttattgaggctgtggtgtcattaaggtgtgtgctgataaaaagcttgtatctgctgactgaaacaagaatgcaaagcttttattctcctttgctctccaatattatgtgtagatatgtgcctttgcacatacccacgcattgcatatggcccctccaaaaattcatgatatgctgtggtgcttgaaggtctgatgttaactyaggaaagtatcttgcatccactagtgttgatgtggctctcctgttcctctttagataccattttttagaaacgcagtgaatgcatgggcaaattggagcctttctagtaccttctcatgctcctatgaactgaagtatgattcttcctgaatctgttttccgtgtcttcttttctggacgctctctcttttatagcaaagattttaaagctgtgaatgatcgagtgcacaacagctgatggctgtgtcctttgtcttactccaggccttaaactgcgtgggaaggatattggaaaacca

SEQ ID NO: 88390 - DNA, 600 bp, Chicken  19866894393225_1
tcaccacaagtctgaccatcacatttctactgtggaattttatttttttttttaggaggcacacccacacgagagactgaagattacagaagcacgcagtggtcttcaacttactttactgctagccaagtgcaaagatgtattcgagtccttatctcttaatgtcaggtcagccttggcaatgttcactaaaaaatctgaaatttagaacacaaatcaatgagcaaatgcaatgggcaaagaaacatgtgaaaacagaggaaaaaaacccactatttctaatatgtgtgtgcttacgtrttaagccttgatgcagcataagctttatgagcatgaagtgaaagtaacggtagacatcacaataatctcgtgcagttaatctgcaaccaaaggcagacctcatacataaatgaagatgaatctatgcctgacagtttgagacaaaatgaactcccccatttgcagatcagcaagttctgcctgagtcacctcctgagaataactctggatctcgctctgagaggactaagtggatataaagaatttagggcgcaacctgtgctgtcaaagctagagaaaagagagttctgttaagtcaat

SEQ ID NO: 88391 - DNA, 600 bp, Chicken  19866894393229_1
ctgtatctatgaagcccacctgaatcattaaggtagtggtgggacggtgagtgggggtgggagaggtatgctcagtttatatgaaaagaaccatgtcaggacagatttttgcctatgagaaatgtgtgaggaaggatgtaaagggaaaaaaaaaaacatctccatgacagtcctcccttccagggactttgtctcttggaagaacctactggagacaaaggcatactgtgcctttgcacagcttgggggccttcacagctttcatcatccttgcagccatcaacctgcctgtaaaggctwatgttttgcactgcacttgtgtattagctctctgactgcaagccgtcacttcaaggagcttacacctcacaccatgcttcacgagcacaccacagctgagtttcagtgctggatcttactattttaattagattgctaagtacactgtggatgttgctgctaaacttatgttgaccacagcatacacaaaggtaaccccgagcatccaggatctaagagacaaaaaaatagtcagccctgtagtggggwtaaaaggaagctagatttgtctttgttccacaaagtgtagcataaactgca

SEQ ID NO: 88392 - DNA, 600 bp, Chicken  19866894393229_2
ccttcacagctttcatcatccttgcagccatcaacctgcctgtaaaggctwatgttttgcactgcacttgtgtattagctctctgactgcaagccgtcacttcaaggagcttacacctcacaccatgcttcacgagcacaccacagctgagtttcagtgctggatcttactattttaattagattgctaagtacactgtggatgttgctgctaaacttatgttgaccacagcatacacaaaggtaaccccgagcatccaggatctaagagacaaaaaaatagtcagccctgtagtggggwtaaaaggaagctagatttgtctttgttccacaaagtgtagcataaactgcataattagtcattttggcctgaagctttatctacatgacaatgtagcactactattagtaatagcaatccaaagcatcttttctgagttgacaaaaatwttaggtatgctatttatagcaaccattgcacacactgacatgagaaataattgttactacaacatcccgttagtgttatttttgtattctgttccaatttgtatataaatgaaacctatgaacatttcctgcactgacctcatgtctttgt

SEQ ID NO: 88393 - DNA, 600 bp, Chicken  19866894393229_3
agtttcagtgctggatcttactattttaattagattgctaagtacactgtggatgttgctgctaaacttatgttgaccacagcatacacaaaggtaaccccgagcatccaggatctaagagacaaaaaaatagtcagccctgtagtggggwtaaaaggaagctagatttgtctttgttccacaaagtgtagcataaactgcataattagtcattttggcctgaagctttatctacatgacaatgtagcactactattagtaatagcaatccaaagcatcttttctgagttgacaaaaatwttaggtatgctatttatagcaaccattgcacacactgacatgagaaataattgttactacaacatcccgttagtgttatttttgtattctgttccaatttgtatataaatgaaacctatgaacatttcctgcactgacctcatgtctttgtgtagatgggctttagaccagatccaaggaagtgctaaataatcatataagcagcaagaacaaattcatggttgagcaccattattcatcatggtgtaatatgtgatcactgagcaggcagtggtgaagaggaggctcagggaagacctt

SEQ ID NO: 88394 - DNA, 600 bp, Chicken  19866894393232_1
gcagtgtttggtaacagttctaatatacattttcagtctctgtactggtgcagatctgttcaaaaaagactgtgatttgtcaaagcaagcactcaaaaaagcagaaaatccatttaatgctgtttctattttattccatggtgacagccttacatcagaacagtgtcaagattttttctgtcccaagtaaacgatatgtttttattcaatttgaaaaaaagactaatttctgcacttctgtaacagaaaacatgaaatttcagttttctctaaatcatacaaattgaatatttctcaaargagaaagtctgccttcaatagattctgcatgtgtagatttcagcatatttatattcatacagactcacatgatagaaccttttattttatttgaaaccttttccttacagcaagcattcgtatttttaactttaggtaaggttctaaacattagcatttgtgtgcatttctttcagcctacctcatcattttcttgtttcatgcccagggcttagcagttggagtttaaaaacagccagctttaatgtctatgactgacatgtaatttctgcttactttaaagcttttttttctttttct

SEQ ID NO: 88395 - DNA, 584 bp, Chicken  19866894393232_2
aaagtctgccttcaatagattctgcatgtgtagatttcagcatatttatattcatacagactcacatgatagaaccttttattttatttgaaaccttttccttacagcaagcattcgtatttttaactttaggtaaggttctaaacattagcatttgtgtgcatttctttcagcctacctcatcattttcttgtttcatgcccagggcttagcagttggagtttaaaaacagccagctttaatgtctatgactgacatgtaatttctgcttactttaaagcttttttttctttttctttytttttttttttgctaactttgccttttttaatatacttttctgtccataatcacaaagctacataagctcttttgtggcttaataaatattgtcaattttttaagctcagcacggtgtgtattcttcttcaaagatagttattaaacatataaaaggaagcttgttaaatttgcagattcatttttgttcttgttattcctactgtttatacttaaatgagaaaagataatccattaaaaaggccaaactgtcaaaaatactgccatatctataattaagtata

SEQ ID NO: 88396 - DNA, 600 bp, Chicken  19866894393234_1
aattcttctttcaaggtctgatggaatcattttccctctgggaaaaggagagttctattagaaatttggtcttgaaatcatcttttgctgttacttctccacttaatggtaaacccaaaaaggaacaaagcgacatttttgcccatggcttacgaggcactgaagagctcagatagactctgtccattagtctacactttcagcctgcttactttttcaaccgatctgcatcaacacggtgatggcaacacagacactatctcacagtcacctcccgttaaagactgaggcagacccacrgagcctcccagtcctgttggatgttgcagccccaggaactgttcccagccccaagcaaggggctcagcccaggctcccaagatgccccctgggtgccaaacccctcttagcaggcacaaaaaaatgctggctgagctgcayggcccgagcactgcaacagctccagtgtaagcagcactctccatgtcctggtcccagggatgggcttgtttcagggtgactgctcacagttactagtgcattacatgttcatgtttgcttgaagcaagatgtagacaaagcaaccagcccagactcgga

SEQ ID NO: 88397 - DNA, 459 bp, Chicken  19866894393234_2
cccatggcttacgaggcactgaagagctcagatagactctgtccattagtctacactttcagcctgcttactttttcaaccgatctgcatcaacacggtgatggcaacacagacactatctcacagtcacctcccgttaaagactgaggcagacccacrgagcctcccagtcctgttggatgttgcagccccaggaactgttcccagccccaagcaaggggctcagcccaggctcccaagatgccccctgggtgccaaacccctcttagcaggcacaaaaaaatgctggctgagctgcayggcccgagcactgcaacagctccagtgtaagcagcactctccatgtcctggtcccagggatgggcttgtttcagggtgactgctcacagttactagtgcattacatgttcatgtttgcttgaagcaagatgtagacaaagcaaccagcccagactcgga

SEQ ID NO: 88398 - DNA, 599 bp, Chicken  19866894393240_1
  misc_feature (1)..(115): n is any nucleotide
nnnnnnnnnnnnnnnnnnnnnnnnnnnnnnnnnnnnnnnnnnnnnnnnnnnnnnnnnnnnnnnnnnnnnnnnnnnnnnnnnnnnnnnnnnnnnnnnnnnnnnnnnnnnnnnnnnnttcacaggaaggccatttttaaaaaattttatctcactcaatatcaatgggttaaatctacaaatacctgatagccatctagaggtttgtatatcattaatagacagctcatttgatggtagaattcacagatgacaaatacacatcacccaaaactactatccagtcttcaagatgttgagaaktgtttcacagacatcttttctacttcatctgttttccttgtttgaaagataagtagtttgggcaggtgttgctctactgaacccggagacataccaccacatttcacagccttcatagaaaacctgtagaggagcccattttatagaaacaaaggcaacagctacaaagccaacactcgctattgcagaacacccattttttgtttgtttctttgaaagttttttacccaaatactcctttcttaggaacagaatttctcttgacatgtccttcttaacatttaggagatgctgggatt

SEQ ID NO: 88399 - DNA, 600 bp, Chicken  19866894393252_1
gccctttgttctgagctcagctttagtcatccaagatctgacaaaagtagagatatggcagcaaaggtctggagcacaagtgttatggggagcagctgagggagctgagatgggtcagtctggagaaaaggaggctcagaggagatctcaatacgatgagaggtgatgatcttaagttgcatcaggaaaggttcagggtggatattaggaaaaacaacttctctgaaggagcactgaggcaccggcatgggctgtccaggaaggtggtggagtcaccatctctggaggtgtttcagaacrgcggagatgtggcactgagggacatggtttagcgggcaatattggtggtaggttgatggttggacttgatggtcttagaggtcttttccaaccttaatgattctatgattctatgatggagaatgaaagctgtagtgctagcattagctttgaaccaaggaacgagacaaagtttcttctgagatcgaagtctgacatatatttgtaaggaagctggacattattttcccaacacattttaaatttttttcttgtggaaagggaagtctttttatatgaccttgcctggacacccgctgg

SEQ ID NO: 88400 - DNA, 600 bp, Chicken  19866894393269_1
tagggtctccttctctggagacattcaaaacccacctggaggcatttctgtgtgacctgatctaagtgctcctgctctggcaggggaatggactaggtgacctttcgaaatcccctccaattcctgtgattctgcgatacttgtaaacgcaaaccctgtatgtaagcagtccaagatggacaactcttttttcaatcattaaaacattatgatgacttcaaacactctcaggttaaactgtcaaacagctcatcattatatttgcacagttctgctcttttttttttcccttctctcccyaaagcagcagtttccttgaaattgcaaatttagcactaaagaagataaacagctatcaattattcatatttttttaatgctaagggtagacttatgccatagttattgtcattttaacatggctagactgtgacagatgcagctaaataccaaacatattttggtaagcaaaccagtaaattatgcaagtttgcaacatctatacaacaattcagatgaaagttctggcttgtaataactatatcgtagggtattacaatgcataaaatgcttgcaataagaagagcaccttgaaaactg

SEQ ID NO: 88401 - DNA, 599 bp, Chicken  19866894393270_1
  misc_feature (1)..(24): n is any nucleotide
nnnnnnnnnnnnnnnnnnnnnnnnggctgctttttctttttcttttttttttttcccccccaaaaacctacgttactgaaagcagcaacatgtactacttttaaattgcccgcctgcttaggcatgtgtttcagctgcttccagttacaaatccctatgtggtaaatgtcatcttttattttgctaaaagaatatgttgcactgtgcaagtaaaaagggctcaatgtacagtggaagaatacagggcattttgagggatggctttgtatttcctttggattacaggttccttgcctaggmctttggtttgacaagctctattaatattcagtggtaattgcaatctacagaaaatttccgttgccctttagactgtacctacycagttagaaatgtgagcaagataagcaaattttaagtaatatggttaaacttaaagagcacatttgttttcatcttagacatctgacttgaatttgcaccagctaactagtctgaatgaattacgtgggcagcaacactgtgaacattaatgtatatgtgatattcatggagcagaggatactgctcctagctttgctgaccagtgattcctaata

SEQ ID NO: 88402 - DNA, 600 bp, Chicken  19866894393270_2
agcaacatgtactacttttaaattgcccgcctgcttaggcatgtgtttcagctgcttccagttacaaatccctatgtggtaaatgtcatcttttattttgctaaaagaatatgttgcactgtgcaagtaaaaagggctcaatgtacagtggaagaatacagggcattttgagggatggctttgtatttcctttggattacaggttccttgcctaggmctttggtttgacaagctctattaatattcagtggtaattgcaatctacagaaaatttccgttgccctttagactgtacctacycagttagaaatgtgagcaagataagcaaattttaagtaatatggttaaacttaaagagcacatttgttttcatcttagacatctgacttgaatttgcaccagctaactagtctgaatgaattacgtgggcagcaacactgtgaacattaatgtatatgtgatattcatggagcagaggatactgctcctagctttgctgaccagtgattcctaatattaataacatgttttagcaatggataaggggtaaggtgactaaaaggattttacggtgtttgattttttttgtatagaggatac

SEQ ID NO: 88403 - DNA, 600 bp, Chicken  19866894393272_1
agaggaagagagtcactgaacaagagttgtatctccagctcagctggcattttcctatttgacaagggatgggtaatgggttgccagtagaaaagctggaaaagagacggaacacatagtgctgcttggcatggatcccctcagaacctcctgaacgtcacgtgtcaggttttaacatcggaggatgtgtgctattcatacttctacactactgcctcactgtatctgttggaagcatcttttggctgtcttccctgggcttcctcttgcctcggggagaggagcatttagtaagctttragcatcacaggagatattgtctttgttgggacatggggagcctgycaacccagtgactggtgacagcaggtccacctgtgtagtgtgatgggcttctctaattctgtgtttcctcactccttgttgcccttgtggcattcctgcttctgaagacatctgccacatgcacctttattcacttgtgttagagtatggcattttgttgctcaaagaaggagtttttcccagtattggtgtttttggctgaattgtctgaacttcactgcagtcttctcagtggttgttttgttgcttgggacr

SEQ ID NO: 88404 - DNA, 600 bp, Chicken  19866894393272_2
ggcattttcctatttgacaagggatgggtaatgggttgccagtagaaaagctggaaaagagacggaacacatagtgctgcttggcatggatcccctcagaacctcctgaacgtcacgtgtcaggttttaacatcggaggatgtgtgctattcatacttctacactactgcctcactgtatctgttggaagcatcttttggctgtcttccctgggcttcctcttgcctcggggagaggagcatttagtaagctttragcatcacaggagatattgtctttgttgggacatggggagcctgycaacccagtgactggtgacagcaggtccacctgtgtagtgtgatgggcttctctaattctgtgtttcctcactccttgttgcccttgtggcattcctgcttctgaagacatctgccacatgcacctttattcacttgtgttagagtatggcattttgttgctcaaagaaggagtttttcccagtattggtgtttttggctgaattgtctgaacttcactgcagtcttctcagtggttgttttgttgcttgggacragaacaaatgctctctgtattccatatgttggcaagccttgtgtt

SEQ ID NO: 88405 - DNA, 600 bp, Chicken  19866894393272_3
agcatcacaggagatattgtctttgttgggacatggggagcctgycaacccagtgactggtgacagcaggtccacctgtgtagtgtgatgggcttctctaattctgtgtttcctcactccttgttgcccttgtggcattcctgcttctgaagacatctgccacatgcacctttattcacttgtgttagagtatggcattttgttgctcaaagaaggagtttttcccagtattggtgtttttggctgaattgtctgaacttcactgcagtcttctcagtggttgttttgttgcttgggacragaacaaatgctctctgtattccatatgttggcaagccttgtgtttcaataatatggaatgggatcttttctcctgccagaaaaatgtcctactcagttgtttttcttctctgtcattagaaatatgtgggtgacagaaatatgtggatgagatgtagtgccctgtgttctggctgctttcatttggcagacgtttgagcagttgaccatgagtgtggrgtctgacttttccactctagtgtgctgagatagtcattgagagaaagtcattagctgtcaggtctccctcttacttccttt

SEQ ID NO: 88406 - DNA, 600 bp, Chicken  19866894393272_4
ttttcccagtattggtgtttttggctgaattgtctgaacttcactgcagtcttctcagtggttgttttgttgcttgggacragaacaaatgctctctgtattccatatgttggcaagccttgtgtttcaataatatggaatgggatcttttctcctgccagaaaaatgtcctactcagttgtttttcttctctgtcattagaaatatgtgggtgacagaaatatgtggatgagatgtagtgccctgtgttctggctgctttcatttggcagacgtttgagcagttgaccatgagtgtggrgtctgacttttccactctagtgtgctgagatagtcattgagagaaagtcattagctgtcaggtctccctcttacttcctttctgacagatgtgtgccagagtgtactacaccctatctagtgttctttctgtcaatagtcagcaactgatattacaggtaagtcattcgcatccagagagtatgtgtttgagagacagctatacatttttgtttagttgtgcaccttccctccttccctccctccctccctccctctcctttcctccttcctttcctccttccttcccttccttcccttc

SEQ ID NO: 88407 - DNA, 599 bp, Chicken  19866894393274_1
  misc_feature (1)..(66): n is any nucleotide
nnnnnnnnnnnnnnnnnnnnnnnnnnnnnnnnnnnnnnnnnnnnnnnnnnnnnnnnnnnnnnnnnnttctgcagcatctgtggctctgtcatcgctgtcttcatggagagatagatggtcatcaggcgttcaaactgctcccctgaggctgtcagcagcagggttagaactctgttgagcttctcgccacgctacctgcaggcggtgaaggctttggtttatctttaccatctggtcatgcaacctactcggggaaaacaaggcaagagatcagacaagatgcaagtaagctcagtacaractgcctaagcaatacagaagtcaccgtgcttcttagctagaacttaacttgtttgttagrgacagacttgcctgctgcacagaatcttttctgtttaagctatttccctgcaaataatctgtttcgggggtcagtaacaagaaatgcataargaaaggcaagccaggacttgaaaggacaagaaatcctcctgaaataccaaggaggtctgctaagcagcctgctaaagcagcagctcctatgaarcactctgcagwggtgcagacaacgagcccacgcagctgcaaaccttgttggg

SEQ ID NO: 88408 - DNA, 599 bp, Chicken  19866894393274_2
  misc_feature (1)..(5): n is any nucleotide
nnnnnttctgcagcatctgtggctctgtcatcgctgtcttcatggagagatagatggtcatcaggcgttcaaactgctcccctgaggctgtcagcagcagggttagaactctgttgagcttctcgccacgctacctgcaggcggtgaaggctttggtttatctttaccatctggtcatgcaacctactcggggaaaacaaggcaagagatcagacaagatgcaagtaagctcagtacaractgcctaagcaatacagaagtcaccgtgcttcttagctagaacttaacttgtttgttagrgacagacttgcctgctgcacagaatcttttctgtttaagctatttccctgcaaataatctgtttcgggggtcagtaacaagaaatgcataargaaaggcaagccaggacttgaaaggacaagaaatcctcctgaaataccaaggaggtctgctaagcagcctgctaaagcagcagctcctatgaarcactctgcagwggtgcagacaacgagcccacgcagctgcaaaccttgttgggttaccaaggtcagggtgtgggtaagcctgggaggcaacgttttcagtttcccagcaacaag

SEQ ID NO: 88409 - DNA, 600 bp, Chicken  19866894393274_3
agcagcagggttagaactctgttgagcttctcgccacgctacctgcaggcggtgaaggctttggtttatctttaccatctggtcatgcaacctactcggggaaaacaaggcaagagatcagacaagatgcaagtaagctcagtacaractgcctaagcaatacagaagtcaccgtgcttcttagctagaacttaacttgtttgttagrgacagacttgcctgctgcacagaatcttttctgtttaagctatttccctgcaaataatctgtttcgggggtcagtaacaagaaatgcataargaaaggcaagccaggacttgaaaggacaagaaatcctcctgaaataccaaggaggtctgctaagcagcctgctaaagcagcagctcctatgaarcactctgcagwggtgcagacaacgagcccacgcagctgcaaaccttgttgggttaccaaggtcagggtgtgggtaagcctgggaggcaacgttttcagtttcccagcaacaagccacttgcataactttttcatctatttctatatttagctcatawaccagaaggggactgtgctcgaatcagtggtgacctcatagtatccagg

SEQ ID NO: 88410 - DNA, 600 bp, Chicken  19866894393274_4
ctcggggaaaacaaggcaagagatcagacaagatgcaagtaagctcagtacaractgcctaagcaatacagaagtcaccgtgcttcttagctagaacttaacttgtttgttagrgacagacttgcctgctgcacagaatcttttctgtttaagctatttccctgcaaataatctgtttcgggggtcagtaacaagaaatgcataargaaaggcaagccaggacttgaaaggacaagaaatcctcctgaaataccaaggaggtctgctaagcagcctgctaaagcagcagctcctatgaarcactctgcagwggtgcagacaacgagcccacgcagctgcaaaccttgttgggttaccaaggtcagggtgtgggtaagcctgggaggcaacgttttcagtttcccagcaacaagccacttgcataactttttcatctatttctatatttagctcatawaccagaaggggactgtgctcgaatcagtggtgacctcatagtatccaggcaacaatttagagaagaaagctataaaaacagtgcattctggtgtccagaaaattgtttcctggaaacggtcagttaccttgcactgctgcttc

SEQ ID NO: 88411 - DNA, 600 bp, Chicken  19866894393274_5
caaggcaagagatcagacaagatgcaagtaagctcagtacaractgcctaagcaatacagaagtcaccgtgcttcttagctagaacttaacttgtttgttagrgacagacttgcctgctgcacagaatcttttctgtttaagctatttccctgcaaataatctgtttcgggggtcagtaacaagaaatgcataargaaaggcaagccaggacttgaaaggacaagaaatcctcctgaaataccaaggaggtctgctaagcagcctgctaaagcagcagctcctatgaarcactctgcagwggtgcagacaacgagcccacgcagctgcaaaccttgttgggttaccaaggtcagggtgtgggtaagcctgggaggcaacgttttcagtttcccagcaacaagccacttgcataactttttcatctatttctatatttagctcatawaccagaaggggactgtgctcgaatcagtggtgacctcatagtatccaggcaacaatttagagaagaaagctataaaaacagtgcattctggtgtccagaaaattgtttcctggaaacggtcagttaccttgcactgctgcttccaataaaatca

SEQ ID NO: 88412 - DNA, 600 bp, Chicken  19866894393274_6
ttccctgcaaataatctgtttcgggggtcagtaacaagaaatgcataargaaaggcaagccaggacttgaaaggacaagaaatcctcctgaaataccaaggaggtctgctaagcagcctgctaaagcagcagctcctatgaarcactctgcagwggtgcagacaacgagcccacgcagctgcaaaccttgttgggttaccaaggtcagggtgtgggtaagcctgggaggcaacgttttcagtttcccagcaacaagccacttgcataactttttcatctatttctatatttagctcatawaccagaaggggactgtgctcgaatcagtggtgacctcatagtatccaggcaacaatttagagaagaaagctataaaaacagtgcattctggtgtccagaaaattgtttcctggaaacggtcagttaccttgcactgctgcttccaataaaatcaatttagtgggagcagttcagacacctcacactctgctactgagatgctctctagtagataagcaaaaggacagaggcctgctctcccagagaacctatcagcactgagcgagccctgccaaaccagcacctagctgttaaaatact

SEQ ID NO: 88413 - DNA, 570 bp, Chicken  19866894393280_1
ttagcttaaaaagtactcccgcttcattttaactaacattgtacaaactggcattcaggttttcgtagaagaacatgttgaattttgcagtagcaaaatgacacatccacaagtactatgtgccggataattggtcaatgactgataataagacctctaaaagaacacacaagtttagtctcaataccaagaaaaacttcacatccaaacaggagagaaggcgcaaaaagcagtactgtgagagaagcgcggcgcctacatggccattttcttttctatatgagaaaacacactgcgagrtgatttagaatgaggcacagttcaatgaaatcatactaacttgtctgagaaataaaacagyccagggatttttatatacagaactcagtactttcagcagatgttcttcagaacgctgtcccttctgttactgcatgcacaaccttttttcttttacattgcaattagtattggaaatctgaatctagaacttaggatgttaaaagacaaggggcaaaaggagaagaaaataacatcaaatacaaaatttctactcccctaggaggggtg

SEQ ID NO: 88414 - DNA, 509 bp, Chicken  19866894393280_2
ttcgtagaagaacatgttgaattttgcagtagcaaaatgacacatccacaagtactatgtgccggataattggtcaatgactgataataagacctctaaaagaacacacaagtttagtctcaataccaagaaaaacttcacatccaaacaggagagaaggcgcaaaaagcagtactgtgagagaagcgcggcgcctacatggccattttcttttctatatgagaaaacacactgcgagrtgatttagaatgaggcacagttcaatgaaatcatactaacttgtctgagaaataaaacagyccagggatttttatatacagaactcagtactttcagcagatgttcttcagaacgctgtcccttctgttactgcatgcacaaccttttttcttttacattgcaattagtattggaaatctgaatctagaacttaggatgttaaaagacaaggggcaaaaggagaagaaaataacatcaaatacaaaatttctactcccctaggaggggtg

SEQ ID NO: 88415 - DNA, 600 bp, Chicken  19866894393281_1
tgggacctacctgctctttctaagatgagtttccattactgttttatctttatcagttcctcttaacatgtatttaattcaagggctctgagagatgcggcataactcctttctgcatcaaatggagtccagggttttccctttcttcaacacgtgcttgactagaccttcctgctctgaaggcaaaaaatatgacatctatttttccaccacattcactttgcctgtgatctgtaacatcagttccatccccttttcctcccctttgatcaagagatgaagctcttttttcctccactytttttcttctatggggaggaaggtttcaacaaatgtggtgccttaggaacactctcaccctggtaggtctaacagatgatgggtgtctctgaagccatctcttgcagaggtacccaaattaaagcctctggctgccctcacagccrattgcactgacaaaggaactcatttgctccctgagaagatcacaaccatctgtccacctgattcttcagaacaaaagagaaacgagcaagcagctgyctggytgcgggtggagctggctggatarctcaccaacaccatggaaggtgatccaca

SEQ ID NO: 88416 - DNA, 600 bp, Chicken  19866894393281_2
tcaacacgtgcttgactagaccttcctgctctgaaggcaaaaaatatgacatctatttttccaccacattcactttgcctgtgatctgtaacatcagttccatccccttttcctcccctttgatcaagagatgaagctcttttttcctccactytttttcttctatggggaggaaggtttcaacaaatgtggtgccttaggaacactctcaccctggtaggtctaacagatgatgggtgtctctgaagccatctcttgcagaggtacccaaattaaagcctctggctgccctcacagccrattgcactgacaaaggaactcatttgctccctgagaagatcacaaccatctgtccacctgattcttcagaacaaaagagaaacgagcaagcagctgyctggytgcgggtggagctggctggatarctcaccaacaccatggaaggtgatccacaagtggacagtttcccagagtgtgttttgaatcaaaggaagaaggtgcctttgggaagaacgctgtggtaactgaagcagagaagaaaaaactccccagctgagatggaaacagcccacgccttttcaaactatatcaatccctgaa

SEQ ID NO: 88417 - DNA, 517 bp, Chicken  19866894393281_3
ttccatccccttttcctcccctttgatcaagagatgaagctcttttttcctccactytttttcttctatggggaggaaggtttcaacaaatgtggtgccttaggaacactctcaccctggtaggtctaacagatgatgggtgtctctgaagccatctcttgcagaggtacccaaattaaagcctctggctgccctcacagccrattgcactgacaaaggaactcatttgctccctgagaagatcacaaccatctgtccacctgattcttcagaacaaaagagaaacgagcaagcagctgyctggytgcgggtggagctggctggatarctcaccaacaccatggaaggtgatccacaagtggacagtttcccagagtgtgttttgaatcaaaggaagaaggtgcctttgggaagaacgctgtggtaactgaagcagagaagaaaaaactccccagctgagatggaaacagcccacgccttttcaaactatatcaatccctgaagagctctgggttca

SEQ ID NO: 88418 - DNA, 512 bp, Chicken  19866894393281_4
tccccttttcctcccctttgatcaagagatgaagctcttttttcctccactytttttcttctatggggaggaaggtttcaacaaatgtggtgccttaggaacactctcaccctggtaggtctaacagatgatgggtgtctctgaagccatctcttgcagaggtacccaaattaaagcctctggctgccctcacagccrattgcactgacaaaggaactcatttgctccctgagaagatcacaaccatctgtccacctgattcttcagaacaaaagagaaacgagcaagcagctgyctggytgcgggtggagctggctggatarctcaccaacaccatggaaggtgatccacaagtggacagtttcccagagtgtgttttgaatcaaaggaagaaggtgcctttgggaagaacgctgtggtaactgaagcagagaagaaaaaactccccagctgagatggaaacagcccacgccttttcaaactatatcaatccctgaagagctctgggttca

SEQ ID NO: 88419 - DNA, 489 bp, Chicken  19866894393281_5
aagagatgaagctcttttttcctccactytttttcttctatggggaggaaggtttcaacaaatgtggtgccttaggaacactctcaccctggtaggtctaacagatgatgggtgtctctgaagccatctcttgcagaggtacccaaattaaagcctctggctgccctcacagccrattgcactgacaaaggaactcatttgctccctgagaagatcacaaccatctgtccacctgattcttcagaacaaaagagaaacgagcaagcagctgyctggytgcgggtggagctggctggatarctcaccaacaccatggaaggtgatccacaagtggacagtttcccagagtgtgttttgaatcaaaggaagaaggtgcctttgggaagaacgctgtggtaactgaagcagagaagaaaaaactccccagctgagatggaaacagcccacgccttttcaaactatatcaatccctgaagagctctgggttca

SEQ ID NO: 88420 - DNA, 599 bp, Chicken  19866894393284_1
  misc_feature (1)..(15): n is any nucleotide
nnnnnnnnnnnnnnnacactgtgccactacactttccaagcggaacacttagtcatcaattcagaagaaaatttctgtttcgatattaattttgctatccgcattcaaaaacccaatgcaaaatgacagaacaactttgcaaggtaagctttccattccagacgctctggtcttgctctaatgtcagaatttccccgcaggatgaaaactctatgggcatgagaaatccatgcagtgtaccaacacagcagtcactacctatgcaccccgggtgcccactgtttgctcaggtgtttctawctcctgggatggcacagaaagcacagctctcccctctcacacacggctctcgcctacaaggccacctagcacatgagggagcctgcttctgatacggccccgcttgacatagtcatattcatttttacagggctgtataaaaaaggatgagataaaaccttgagcaaataaatgggcaaagttcgtgcttacagctgctcctcatgggccacttcatactgacacacctgctcttctggcaagtggttttgctcccagaggctgacttcacaagactgctgtggctgggctggatgatg

SEQ ID NO: 88421 - DNA, 600 bp, Chicken  19866894393286_1
tggttacaaactcttactgaaatcagtaaacaaaacaggcttatggagcctgaaacaaacaatgtacatcatttgttttcattgcaaccctataggatcagcagctagagtagagctaagttttgtctcatgtttctttcatcctggaaaaccaggttcagccaaggagttcaaacagctctgcaagctatagaccaaaaagcacatggagctcatacgtattcagccacactaaagaggaatttcccagttagcctagaagcagaccttccacaagtgctttcacgttctccacctctygtgatgcgaacacacagccagcttgcaatacatgccagcaaacctacatgtgatcaattaattaatattcaatattcaaaaagtaagtccagctaattctctcactgagattaagagaatgtttattattaatggcagctacaggtacatctgtggtcctgcaactcaaatacagtattttaagcccataggcagggacagatgcactaaagctgttcatagaaagatgacttctcttttcataattgcttcccactaattctgtcaccgacataccagtaattaccatttctaaatgcc

SEQ ID NO: 88422 - DNA, 600 bp, Chicken  19866894393295_1
ctttttgacctccgtatttgaccaaagagcagtgctctcacagacagggaatttctatgaaatctatcgagcttggcagttggatggaagccggggtgatttctggaagctgagctgcatgttccatctgactgccgacccctcagcctgcatgtggctgcctctaaaaccagctgctgcaccggaggctcctgcttggctggggctgggggctgggctgcagggggtgtatgagggagcacaggcagtgtggggtcattgggagtgaaggtgcatgggtagggaggtgggcagagctgycctgggcaaggagacagaaatactggaagcccatgcaaaagcgtgtgctgctccttacttttgtgggagcaacttatggctgtgtggtgtttatgctactcagttcaggcattttctatggtaaagacatgttaccacttgaaaataaacaatacaaaaactgcatagttgtcttctgctttctcagagttttgttttttgttttgaaaagtatgggaccattacagacaagtattgataaatatgttgctgtaactccctttcatgtttgttttatttttaaaggatgttgtaggtgtg

SEQ ID NO: 88423 - DNA, 599 bp, Chicken  19866894393299_1
  misc_feature (1)..(192): n is any nucleotide
nnnnnnnnnnnnnnnnnnnnnnnnnnnnnnnnnnnnnnnnnnnnnnnnnnnnnnnnnnnnnnnnnnnnnnnnnnnnnnnnnnnnnnnnnnnnnnnnnnnnnnnnnnnnnnnnnnnnnnnnnnnnnnnnnnnnnnnnnnnnnnnnnnnnnnnnnnnnnnnnnnnnnnnnnnnnnnnnnnnnnnnnnnnnnnnnttttctgtagtttgaggtgaattgtttcctgatatcacccctgtttatttatccacttctaccccatgaaaggaggatattgactgcttttcactggtggacatctgkttcygaacaccgttccccctmttattgataaactcacaatagaaggacttcttagagctcagcacttcacatccatcttttagcttctataaaacccactaatggcagtttaagctcaattgctctcatctacatctccaggacaatcagagctgtctcagagcatgttaacaagtatcagctgaggaggagctttccctcaatatcggcatccgtctttgaacgtgctcagaaatgcctacaggaagagataaacatttaagtgtgccatgattcaaggctattgaaaagaacagaay

SEQ ID NO: 88424 - DNA, 599 bp, Chicken  19866894393299_2
  misc_feature (1)..(188): n is any nucleotide
nnnnnnnnnnnnnnnnnnnnnnnnnnnnnnnnnnnnnnnnnnnnnnnnnnnnnnnnnnnnnnnnnnnnnnnnnnnnnnnnnnnnnnnnnnnnnnnnnnnnnnnnnnnnnnnnnnnnnnnnnnnnnnnnnnnnnnnnnnnnnnnnnnnnnnnnnnnnnnnnnnnnnnnnnnnnnnnnnnnnnnnnnnnnttttctgtagtttgaggtgaattgtttcctgatatcacccctgtttatttatccacttctaccccatgaaaggaggatattgactgcttttcactggtggacatctgkttcygaacaccgttccccctmttattgataaactcacaatagaaggacttcttagagctcagcacttcacatccatcttttagcttctataaaacccactaatggcagtttaagctcaattgctctcatctacatctccaggacaatcagagctgtctcagagcatgttaacaagtatcagctgaggaggagctttccctcaatatcggcatccgtctttgaacgtgctcagaaatgcctacaggaagagataaacatttaagtgtgccatgattcaaggctattgaaaagaacagaaygact

SEQ ID NO: 88425 - DNA, 599 bp, Chicken  19866894393299_3
  misc_feature (1)..(171): n is any nucleotide
nnnnnnnnnnnnnnnnnnnnnnnnnnnnnnnnnnnnnnnnnnnnnnnnnnnnnnnnnnnnnnnnnnnnnnnnnnnnnnnnnnnnnnnnnnnnnnnnnnnnnnnnnnnnnnnnnnnnnnnnnnnnnnnnnnnnnnnnnnnnnnnnnnnnnnnnnnnnnnnnnnnnnnnnnnnttttctgtagtttgaggtgaattgtttcctgatatcacccctgtttatttatccacttctaccccatgaaaggaggatattgactgcttttcactggtggacatctgkttcygaacaccgttccccctmttattgataaactcacaatagaaggacttcttagagctcagcacttcacatccatcttttagcttctataaaacccactaatggcagtttaagctcaattgctctcatctacatctccaggacaatcagagctgtctcagagcatgttaacaagtatcagctgaggaggagctttccctcaatatcggcatccgtctttgaacgtgctcagaaatgcctacaggaagagataaacatttaagtgtgccatgattcaaggctattgaaaagaacagaaygactctgcatgcrtgaaacaa

SEQ ID NO: 88426 - DNA, 600 bp, Chicken  19866894393299_4
kttcygaacaccgttccccctmttattgataaactcacaatagaaggacttcttagagctcagcacttcacatccatcttttagcttctataaaacccactaatggcagtttaagctcaattgctctcatctacatctccaggacaatcagagctgtctcagagcatgttaacaagtatcagctgaggaggagctttccctcaatatcggcatccgtctttgaacgtgctcagaaatgcctacaggaagagataaacatttaagtgtgccatgattcaaggctattgaaaagaacagaaygactctgcatgcrtgaaacaagtgaggaagagaattagatgaaggactgaaaaactgtttcctcatttgcagttggcatcgtgcccaaggatgtgcaggatgtgcaacagagccatcattctgtgctagcagtgacaatggctccccagggcccccgctgtctccactccatcccagacaaagaggctgggaaggaggacagcacactgtgggcagcagacacccagtgctccgtcagggtcctaaatatgaatatcttcaagctaccatttgaccaagaggtcagatgatgagattata

SEQ ID NO: 88427 - DNA, 600 bp, Chicken  19866894393299_5
ttccccctmttattgataaactcacaatagaaggacttcttagagctcagcacttcacatccatcttttagcttctataaaacccactaatggcagtttaagctcaattgctctcatctacatctccaggacaatcagagctgtctcagagcatgttaacaagtatcagctgaggaggagctttccctcaatatcggcatccgtctttgaacgtgctcagaaatgcctacaggaagagataaacatttaagtgtgccatgattcaaggctattgaaaagaacagaaygactctgcatgcrtgaaacaagtgaggaagagaattagatgaaggactgaaaaactgtttcctcatttgcagttggcatcgtgcccaaggatgtgcaggatgtgcaacagagccatcattctgtgctagcagtgacaatggctccccagggcccccgctgtctccactccatcccagacaaagaggctgggaaggaggacagcacactgtgggcagcagacacccagtgctccgtcagggtcctaaatatgaatatcttcaagctaccatttgaccaagaggtcagatgatgagattatacaaatgcaagttc

SEQ ID NO: 88428 - DNA, 600 bp, Chicken  19866894393301_1
cttcgttctcctcttcctgcactaacaaggccaaactgagggctccagcagtgggcagagaatctctttgtgtctgcttgggctgcaggccctgggagagcagaactgcgttccctttgtttgttgagaaacattcaccaaaaatacttcttatggaacataaacaaatggggcttgcaggcacgtggatctgtttctacagagttgactgtttgagcctgagtcttatttctatggcagtgttgattcaacagactgaaagagctgcctgtacaagttggttcccctgtgaaaatggcrgctgactgcaaaggatggggctcakgcacagggctgccttactggagcctctgtgaccaaagactgatgaggagatgccttacaggccagtgataagcttaccaaggtttgcctgggacatagtgactcatgytgttkcactgctgtgtgaggcagcagagtgtgagactctgatgaagaaacatagcaattaacaaacttgagrgagctggaggagcttctcttgtctctcttcattggaggtgtgcctcatgggcagagcgtgacggcctccttaaggcctccttaaggcctcctcca

SEQ ID NO: 88429 - DNA, 600 bp, Chicken  19866894393301_2
caaggccaaactgagggctccagcagtgggcagagaatctctttgtgtctgcttgggctgcaggccctgggagagcagaactgcgttccctttgtttgttgagaaacattcaccaaaaatacttcttatggaacataaacaaatggggcttgcaggcacgtggatctgtttctacagagttgactgtttgagcctgagtcttatttctatggcagtgttgattcaacagactgaaagagctgcctgtacaagttggttcccctgtgaaaatggcrgctgactgcaaaggatggggctcakgcacagggctgccttactggagcctctgtgaccaaagactgatgaggagatgccttacaggccagtgataagcttaccaaggtttgcctgggacatagtgactcatgytgttkcactgctgtgtgaggcagcagagtgtgagactctgatgaagaaacatagcaattaacaaacttgagrgagctggaggagcttctcttgtctctcttcattggaggtgtgcctcatgggcagagcgtgacggcctccttaaggcctccttaaggcctcctccactttgctaatctgtgctacccctct

SEQ ID NO: 88430 - DNA, 600 bp, Chicken  19866894393301_3
ttcaccaaaaatacttcttatggaacataaacaaatggggcttgcaggcacgtggatctgtttctacagagttgactgtttgagcctgagtcttatttctatggcagtgttgattcaacagactgaaagagctgcctgtacaagttggttcccctgtgaaaatggcrgctgactgcaaaggatggggctcakgcacagggctgccttactggagcctctgtgaccaaagactgatgaggagatgccttacaggccagtgataagcttaccaaggtttgcctgggacatagtgactcatgytgttkcactgctgtgtgaggcagcagagtgtgagactctgatgaagaaacatagcaattaacaaacttgagrgagctggaggagcttctcttgtctctcttcattggaggtgtgcctcatgggcagagcgtgacggcctccttaaggcctccttaaggcctcctccactttgctaatctgtgctacccctctggtgtgctggccagagcaggttgtggcctttaagcttatattaattcctgctgttgtttcactgggctgtcatgctggtatggagtgagggagcagtgctgagaggca

SEQ ID NO: 88431 - DNA, 600 bp, Chicken  19866894393301_4
caaaaatacttcttatggaacataaacaaatggggcttgcaggcacgtggatctgtttctacagagttgactgtttgagcctgagtcttatttctatggcagtgttgattcaacagactgaaagagctgcctgtacaagttggttcccctgtgaaaatggcrgctgactgcaaaggatggggctcakgcacagggctgccttactggagcctctgtgaccaaagactgatgaggagatgccttacaggccagtgataagcttaccaaggtttgcctgggacatagtgactcatgytgttkcactgctgtgtgaggcagcagagtgtgagactctgatgaagaaacatagcaattaacaaacttgagrgagctggaggagcttctcttgtctctcttcattggaggtgtgcctcatgggcagagcgtgacggcctccttaaggcctccttaaggcctcctccactttgctaatctgtgctacccctctggtgtgctggccagagcaggttgtggcctttaagcttatattaattcctgctgttgtttcactgggctgtcatgctggtatggagtgagggagcagtgctgagaggcaggcct

SEQ ID NO: 88432 - DNA, 600 bp, Chicken  19866894393301_5
tgactgtttgagcctgagtcttatttctatggcagtgttgattcaacagactgaaagagctgcctgtacaagttggttcccctgtgaaaatggcrgctgactgcaaaggatggggctcakgcacagggctgccttactggagcctctgtgaccaaagactgatgaggagatgccttacaggccagtgataagcttaccaaggtttgcctgggacatagtgactcatgytgttkcactgctgtgtgaggcagcagagtgtgagactctgatgaagaaacatagcaattaacaaacttgagrgagctggaggagcttctcttgtctctcttcattggaggtgtgcctcatgggcagagcgtgacggcctccttaaggcctccttaaggcctcctccactttgctaatctgtgctacccctctggtgtgctggccagagcaggttgtggcctttaagcttatattaattcctgctgttgtttcactgggctgtcatgctggtatggagtgagggagcagtgctgagaggcaggcctgctcttcacgggggccattaggtgttttattggtgtcgataaagcctctgactgcctctctcaacaa

SEQ ID NO: 88433 - DNA, 599 bp, Chicken  19866894393303_1
  misc_feature (1)..(232): n is any nucleotide
nnnnnnnnnnnnnnnnnnnnnnnnnnnnnnnnnnnnnnnnnnnnnnnnnnnnnnnnnnnnnnnnnnnnnnnnnnnnnnnnnnnnnnnnnnnnnnnnnnnnnnnnnnnnnnnnnnnnnnnnnnnnnnnnnnnnnnnnnnnnnnnnnnnnnnnnnnnnnnnnnnnnnnnnnnnnnnnnnnnnnnnnnnnnnnnnnnnnnnnnnnnnnnnnnnnnnnnnnnnnnnnnnnnnnnnntgcttaggtcatgcctatgcagcaagttaggccaactgctcagaaagattcgctccatttaagataaygactggactcacagcttaggttaacacacagaaaaaaagaatcctgagacacggattcaggcagagtctgatttgaagcttaaaatgtttcagtcaccatttccatgaagatctgctgctttgactgcatttaaaaggacacggaggaagaaaagtaggcagttgagtttatagcgtcgcttatttctttgctgggttctaatgactaaaggaagatactgaaaatatgttctacttccaaacatgcttgcatgtacataatttagctccctccaatcaggacaatagtcttcccatga

SEQ ID NO: 88434 - DNA, 599 bp, Chicken  19866894393309_1
  misc_feature (1)..(116): n is any nucleotide
nnnnnnnnnnnnnnnnnnnnnnnnnnnnnnnnnnnnnnnnnnnnnnnnnnnnnnnnnnnnnnnnnnnnnnnnnnnnnnnnnnnnnnnnnnnnnnnnnnnnnnnnnnnnnnnnnnnncgatgcacagggcatagcttttcaaggagtggccatctctgtaaatttaattgaaactacatataaaatgacgtgttctcgtggatcaagtaaactgaaatgtttaccttgaaaaagaatagctgcataaatatatgggcaagggaaacgtgaacgtcacagaagtgatcctctcaaggaaaaraattatttccccagaacccttaaatcaacgggcgtgtgtttactggccgtgttagcgctataaacagcgtgatcagcttcgtgggagggaggtgcactgtggtctgaagtgggagagagctccatgtgtggagtggcagcagataaatataaacatcagcaaccaagtccaacttcttccattccagtttccagtggaatgctaccttaaatttgagtttgttaattgtaagtgcttcaaagaaatcatgtgcttctaaaaggcttattaataagcttaaatatgattatgttattaaa

SEQ ID NO: 88435 - DNA, 600 bp, Chicken  19866894393309_2
gagggaggtgcactgtggtctgaagtgggagagagctccatgtgtggagtggcagcagataaatataaacatcagcaaccaagtccaacttcttccattccagtttccagtggaatgctaccttaaatttgagtttgttaattgtaagtgcttcaaagaaatcatgtgcttctaaaaggcttattaataagcttaaatatgattatgttattaaatatttcattaattagaaaagtgagctctgtaagccattgtgtaagaccagtatggaaaacagaattgatgtattagtaatatgcytcatcctttatttattaatggttggctttagaggtgaataggaaattctcctgaataaaktcacaaatgcatacctctcttgcctttttagaaaacgttttgttctgctgttcaacaaattaggtattcttttttgctccctctaaataatgtcaccgttgctgaaagggtcaaccgtattaccggtttgccttaagtttcagggaaagtttttcaagctctttctttatattaaaataaggcagatgttgaaggtgattcaatgtaatccattaatttcaaatttcccaacgatgaagt

SEQ ID NO: 88436 - DNA, 600 bp, Chicken  19866894393309_3
aaatataaacatcagcaaccaagtccaacttcttccattccagtttccagtggaatgctaccttaaatttgagtttgttaattgtaagtgcttcaaagaaatcatgtgcttctaaaaggcttattaataagcttaaatatgattatgttattaaatatttcattaattagaaaagtgagctctgtaagccattgtgtaagaccagtatggaaaacagaattgatgtattagtaatatgcytcatcctttatttattaatggttggctttagaggtgaataggaaattctcctgaataaaktcacaaatgcatacctctcttgcctttttagaaaacgttttgttctgctgttcaacaaattaggtattcttttttgctccctctaaataatgtcaccgttgctgaaagggtcaaccgtattaccggtttgccttaagtttcagggaaagtttttcaagctctttctttatattaaaataaggcagatgttgaaggtgattcaatgtaatccattaatttcaaatttcccaacgatgaagtttcagctataaatgattattgtaagccattattatgtaatttratgtggatttcttctgt

SEQ ID NO: 88437 - DNA, 600 bp, Chicken  19866894393309_4
aattctcctgaataaaktcacaaatgcatacctctcttgcctttttagaaaacgttttgttctgctgttcaacaaattaggtattcttttttgctccctctaaataatgtcaccgttgctgaaagggtcaaccgtattaccggtttgccttaagtttcagggaaagtttttcaagctctttctttatattaaaataaggcagatgttgaaggtgattcaatgtaatccattaatttcaaatttcccaacgatgaagtttcagctataaatgattattgtaagccattattatgtaatttratgtggatttcttctgtaggacaaggtaaatataggacaatraggcaaagccctgcagtcaaaactcccagtttgacagtatgagatgaggcagagcaggtactgcaggatttgcaatgttgcatccagagtacagtctaagtttgtggctataaccttacagttagagaaatatctgcattggaggtttacattttattgttttattttgttttgktttgtttttttttcctactacatttatctaaatttctgttctatttaccagtaaaagctttactgcagttttcattgttaatg

SEQ ID NO: 88438 - DNA, 600 bp, Chicken  19866894393309_5
ttttagaaaacgttttgttctgctgttcaacaaattaggtattcttttttgctccctctaaataatgtcaccgttgctgaaagggtcaaccgtattaccggtttgccttaagtttcagggaaagtttttcaagctctttctttatattaaaataaggcagatgttgaaggtgattcaatgtaatccattaatttcaaatttcccaacgatgaagtttcagctataaatgattattgtaagccattattatgtaatttratgtggatttcttctgtaggacaaggtaaatataggacaatraggcaaagccctgcagtcaaaactcccagtttgacagtatgagatgaggcagagcaggtactgcaggatttgcaatgttgcatccagagtacagtctaagtttgtggctataaccttacagttagagaaatatctgcattggaggtttacattttattgttttattttgttttgktttgtttttttttcctactacatttatctaaatttctgttctatttaccagtaaaagctttactgcagttttcattgttaatgtatttcaaacaagaagttgctcggtctgtgttctctaaaagt

SEQ ID NO: 88439 - DNA, 600 bp, Chicken  19866894393309_6
caatgtaatccattaatttcaaatttcccaacgatgaagtttcagctataaatgattattgtaagccattattatgtaatttratgtggatttcttctgtaggacaaggtaaatataggacaatraggcaaagccctgcagtcaaaactcccagtttgacagtatgagatgaggcagagcaggtactgcaggatttgcaatgttgcatccagagtacagtctaagtttgtggctataaccttacagttagagaaatatctgcattggaggtttacattttattgttttattttgttttgktttgtttttttttcctactacatttatctaaatttctgttctatttaccagtaaaagctttactgcagttttcattgttaatgtatttcaaacaagaagttgctcggtctgtgttctctaaaagtctaacctgtcagaatgagaattaattacaatagctttgattaacttccagctttccctctccccttttttcccctggttaatttgggagaggggaaaaatagaactcaggttagtataatttcccaaatcacatcaaatcctgtgtttctctaggacagattcatagggtaataa

SEQ ID NO: 88440 - DNA, 600 bp, Chicken  19866894393309_7
aatgtaatccattaatttcaaatttcccaacgatgaagtttcagctataaatgattattgtaagccattattatgtaatttratgtggatttcttctgtaggacaaggtaaatataggacaatraggcaaagccctgcagtcaaaactcccagtttgacagtatgagatgaggcagagcaggtactgcaggatttgcaatgttgcatccagagtacagtctaagtttgtggctataaccttacagttagagaaatatctgcattggaggtttacattttattgttttattttgttttgkkttgtttttttttcctactacatttatctaaatttctgttctatttaccagtaaaagctttactgcagttttcattgttaatgtatttcaaacaagaagttgctcggtctgtgttctctaaaagtctaacctgtcagaatgagaattaattacaatagctttgattaacttccagctttccctctccccttttttcccctggttaatttgggagaggggaaaaatagaactcaggttagtataatttcccaaatcacatcaaatcctgtgtttctctaggacagattcatagggtaataat

SEQ ID NO: 88441 - DNA, 600 bp, Chicken  19866894393309_8
atgtaatccattaatttcaaatttcccaacgatgaagtttcagctataaatgattattgtaagccattattatgtaatttratgtggatttcttctgtaggacaaggtaaatataggacaatraggcaaagccctgcagtcaaaactcccagtttgacagtatgagatgaggcagagcaggtactgcaggatttgcaatgttgcatccagagtacagtctaagtttgtggctataaccttacagttagagaaatatctgcattggaggtttacattttattgttttattttgttttgktktgtttttttttcctactacatttatctaaatttctgttctatttaccagtaaaagctttactgcagttttcattgttaatgtatttcaaacaagaagttgctcggtctgtgttctctaaaagtctaacctgtcagaatgagaattaattacaatagctttgattaacttccagctttccctctccccttttttcccctggttaatttgggagaggggaaaaatagaactcaggttagtataatttcccaaatcacatcaaatcctgtgtttctctaggacagattcatagggtaataatg

SEQ ID NO: 88442 - DNA, 600 bp, Chicken  19866894393309_9
tgtaatccattaatttcaaatttcccaacgatgaagtttcagctataaatgattattgtaagccattattatgtaatttratgtggatttcttctgtaggacaaggtaaatataggacaatraggcaaagccctgcagtcaaaactcccagtttgacagtatgagatgaggcagagcaggtactgcaggatttgcaatgttgcatccagagtacagtctaagtttgtggctataaccttacagttagagaaatatctgcattggaggtttacattttattgttttattttgttttgkttkgtttttttttcctactacatttatctaaatttctgttctatttaccagtaaaagctttactgcagttttcattgttaatgtatttcaaacaagaagttgctcggtctgtgttctctaaaagtctaacctgtcagaatgagaattaattacaatagctttgattaacttccagctttccctctccccttttttcccctggttaatttgggagaggggaaaaatagaactcaggttagtataatttcccaaatcacatcaaatcctgtgtttctctaggacagattcatagggtaataatgg

SEQ ID NO: 88443 - DNA, 600 bp, Chicken  19866894393316_1
atttatttgcaatagcacagtacttaagattgttggttatgggccaggactcagactgattaatgttgtgttcagttttcattctgtcacctacagagtgaaaacctgcagctcaattagaaataaaattaaatgttcttttgttttgtgtacaaatttaggttttctgaggtagcagtgtagtctgtggaagagaactaaatttatgaggatgctgacagtaatgtaagaaatctgacagtattcaccatcctgtcctgctgtaaaggagaccattttcaaaattattccaaaatttgygtgatgaaggaggaacatgagaaggggaaaaaggtgggtttttttcctactataatgcatacagcaaactggtgcaagatttcaggcatgaatgattatcattcaggcaagtaaaattcagaccttttaaataaagacacaggagtagttgattcttacttaagaatatatttacacatttaagaacatacttgcacatgtttttttttattctctgatactggtctgtattctgtacttaaagtaatttaattgcctggggctgctgggtgagctgtatgcagctgaagtcattaccct

SEQ ID NO: 88444 - DNA, 600 bp, Chicken  19866894393320_1
cacgtttgtctggacacatccttagaggaactggatctcaaggctggaatttacagctgtatgtgtgattacatgggctacactaatgctttttgcagcccctgtcccagaaggttttctgagagcagaggtatggattgtgtgatgcaaaaatcactgccgagtattctgcgtcatatagaagagggtgttgtctggcgtaatttgctcaggagctggagaaaatccataagagaagagctacgaggtgatgtaaatacactgcttctcttagttgtgtctgggaagtacagcaggctktacagtcctgaggaaactggtcagtgtctggagcagccagtcctgctgcagctgtcctgggtaggcggtgaagtgggaagtgataccygcttgtcagcaggcttctgattttaaggagtgaatttgaacataagagaactgggggagttttactagcatttagtgcctcaaagttggatatttgaagcttgacaggtgtttgtttgctccaaatgtgaaagcaactcagctagtctctgtactgtgtatagcatgtaatgttagagttcatagagttgcagatcttttccccgggctgat

SEQ ID NO: 88445 - DNA, 600 bp, Chicken  19866894393320_2
ctttttgcagcccctgtcccagaaggttttctgagagcagaggtatggattgtgtgatgcaaaaatcactgccgagtattctgcgtcatatagaagagggtgttgtctggcgtaatttgctcaggagctggagaaaatccataagagaagagctacgaggtgatgtaaatacactgcttctcttagttgtgtctgggaagtacagcaggctktacagtcctgaggaaactggtcagtgtctggagcagccagtcctgctgcagctgtcctgggtaggcggtgaagtgggaagtgataccygcttgtcagcaggcttctgattttaaggagtgaatttgaacataagagaactgggggagttttactagcatttagtgcctcaaagttggatatttgaagcttgacaggtgtttgtttgctccaaatgtgaaagcaactcagctagtctctgtactgtgtatagcatgtaatgttagagttcatagagttgcagatcttttccccgggctgatttctctacattcttagattctaagttgtctttggaggagagaataatatgcaagtcttgctgtgcattctgcagctgctgctgtgtct

SEQ ID NO: 88446 - DNA, 599 bp, Chicken  19866894393327_1
  misc_feature (1)..(26): n is any nucleotide
nnnnnnnnnnnnnnnnnnnnnnnnnncctgtctgcagtctttcttctgtccccacaccctgatgataatgggaattcagctgtagcatcattttagaaacaatttttgggatcagttgaaagccaccaacatcacactttaaggtcatttttatattggtgggagatgctatcagatgacatgaaagctggatttttgtattcatgtacagtttggttaagtaggcagtcagtaaacataaaactgaaaggcacctggcaccactgtcatgacagctgttctaaactgtgatttccaaargtttccaaattgacgcattaggcttaccagactgcagcctggtaagacctttctagtaaaagccagtaaaaaagaatgatgggacaacttttctatcaccaatcctgtggctgttcactcttgccacatctaacatcccactacaccagggagcttgttctagtgtcccaccagccgtggaccagagcgctctgtggtctcacaaggacagcctggccctgttagtattgtctgggagaaccagcaatctcacaccttctggatacaccttgaagttcgccctttggttgccccatgca

SEQ ID NO: 88447 - DNA, 580 bp, Chicken  19866894393333_1
cttgctcatttaaagactgccttgtgcaattagggagagtaagtcagattctgttcttcagcaaaatttttagttcatgatacatttatgcaccaggtagttttaggaatgttttggcctcaaaaatgagggccagccacttgtgtggaatactttgaaggtacatgaaaatggatcaacaaaaatttttgaaaatttgcagactcctttttctgtgaaaggatctatactctggaaaacactaagtgatagtgaattctgtgcaagttggtccatctctgatatctgtaaaataattcwtaaaatgtggaacattgcaggagtgttctacatacaacgtaatgtctttaagattcattggtaatggaaatttcttactctgatgttaatagccctaaacaatattgcactggtgatgtgtgttgtttttattaacctcttgaatttaatgttttctcgaagcaagggaattttctactctcgtgcaattgcttaaatctgtatgaattatacttcctctctgttgaaaaacattaggccactgaaaaacataaggctgggagacctgggactcttcagt

SEQ ID NO: 88448 - DNA, 422 bp, Chicken  19866894393338_1
gccctgcatttacctcactttgcatgcatgagttgtcctgctggagatcagacacatctgcatgcgtacatttaagagtacgtgttaactgtttttcttacagttggcttgctcacattgtgcaagaggagactttccccctggcagagcctcacagccatgtaggtgtgtggtatagacaacaacacttctgcatttaaatgctgccctaaatagaagcctgttttccctttccctttttcagtgcagactgcgtgcaaacctgaacagcaaggtcttgggatctcttcatccaccctrtagaaggacaaaccagccgatcaatgttttccatgggcagagtgaccatcggggcaaaaggctaatttgtcagagttgcataattggcatcacatatgtgttcgtaagaacagaatgcaaag

SEQ ID NO: 88449 - DNA, 600 bp, Chicken  19866894393340_1
gcctaagacttcgcaattgcatagtgacatttaaaatagattttttcaaatagttttaagcctcaccatttccccaagaacacagctaaaacattacacaagcaatgtgtacacaaccaaaaataatttgaagttataaaactttataatgcacatctgatggtgtaattgaaacctaccagaggttgaagacaagatattaactatggcaacttgggtatctgatagagcttcttggtaagagaaatttgccaagaaccactggagaatgagaaaaataatttactgattacattacaygacagagacaaaattagaacaaagttaaaccaaccacattcaactacatgtatcataayggaataatayacttcagaacttcaacataattaaataacataatggtaacacattatctaaaggtatttttatcctgaagaacttgcaaaacaagataattactgcacatgggccacaaagaaatttccagagatagacgggacattagtcagcctaatcttcgttctaaaaagcaaacaacacttacacttaatgcctcaaaaaactctggaaagattcatgtctgtcaattccctcaaa

SEQ ID NO: 88450 - DNA, 600 bp, Chicken  19866894393340_2
gcctcaccatttccccaagaacacagctaaaacattacacaagcaatgtgtacacaaccaaaaataatttgaagttataaaactttataatgcacatctgatggtgtaattgaaacctaccagaggttgaagacaagatattaactatggcaacttgggtatctgatagagcttcttggtaagagaaatttgccaagaaccactggagaatgagaaaaataatttactgattacattacaygacagagacaaaattagaacaaagttaaaccaaccacattcaactacatgtatcataayggaataatayacttcagaacttcaacataattaaataacataatggtaacacattatctaaaggtatttttatcctgaagaacttgcaaaacaagataattactgcacatgggccacaaagaaatttccagagatagacgggacattagtcagcctaatcttcgttctaaaaagcaaacaacacttacacttaatgcctcaaaaaactctggaaagattcatgtctgtcaattccctcaaatataaaaagcagcaagtgcttaaacttttgacactgtctcccacagtattctcctgcag

SEQ ID NO: 88451 - DNA, 600 bp, Chicken  19866894393340_3
ttccccaagaacacagctaaaacattacacaagcaatgtgtacacaaccaaaaataatttgaagttataaaactttataatgcacatctgatggtgtaattgaaacctaccagaggttgaagacaagatattaactatggcaacttgggtatctgatagagcttcttggtaagagaaatttgccaagaaccactggagaatgagaaaaataatttactgattacattacaygacagagacaaaattagaacaaagttaaaccaaccacattcaactacatgtatcataayggaataatayacttcagaacttcaacataattaaataacataatggtaacacattatctaaaggtatttttatcctgaagaacttgcaaaacaagataattactgcacatgggccacaaagaaatttccagagatagacgggacattagtcagcctaatcttcgttctaaaaagcaaacaacacttacacttaatgcctcaaaaaactctggaaagattcatgtctgtcaattccctcaaatataaaaagcagcaagtgcttaaacttttgacactgtctcccacagtattctcctgcagatgctggcag

SEQ ID NO: 88452 - DNA, 537 bp, Chicken  19866894393340_4
tcagaacttcaacataattaaataacataatggtaacacattatctaaaggtatttttatcctgaagaacttgcaaaacaagataattactgcacatgggccacaaagaaatttccagagatagacgggacattagtcagcctaatcttcgttctaaaaagcaaacaacacttacacttaatgcctcaaaaaactctggaaagattcatgtctgtcaattccctcaaatataaaaagcagcaagtgcttaaacttttgacactgtctcccacagtattctcctgcagatgctggcagtcygtggcttggacaggtacactcttggctgggtaaggaactggctggagggccgggcccagagagcggtggtgaatggagttaaatccagctggcgaccggtcatgagtggtgttccccaagggtcggtgctggagcctgtcctcttcaatatctttattgatgacgtggatgaggccattgagtacatcctcactaagtttgcagatgacaccaagttggctggaagtgtcgatctgc

SEQ ID NO: 88453 - DNA, 539 bp, Chicken  19866894393342_1
tgtgaatgcgtccttcttttccctgagactcagttaattaaaactgatgagcaagtgaaattagcagtgctttggtaacgcttatgtttcctgctttggctttacccatgagtcttgctccaagaccctgctctcttgtctttgttgtcaaggcacaaagtgggggccagacctgggccacctgccctcaacaggcactgaaatcttagcccatccttcgctgttggtggtcacactgaaaaggagcccaagagcacagctctggggtcccacctccgggaaagcataaaccatgggctkagggcatggtgaaagtgagatggtaaaggcagcaaaggggcgctgccgaggctctgggctggtccctgcagctgtgcctgcagctccctgtagggcacactgtgaggatgctcagctttgaggtgctttaattcttgtggctgtaaaaaaaagcagtgcgaaggcagaaatagggaaacaaagctaaggatgctcaaagaggtkcagcttgtccttggtgtgcagggaacctcaggcgt

SEQ ID NO: 88454 - DNA, 335 bp, Chicken  19866894393342_2
cttagcccatccttcgctgttggtggtcacactgaaaaggagcccaagagcacagctctggggtcccacctccgggaaagcataaaccatgggctkagggcatggtgaaagtgagatggtaaaggcagcaaaggggcgctgccgaggctctgggctggtccctgcagctgtgcctgcagctccctgtagggcacactgtgaggatgctcagctttgaggtgctttaattcttgtggctgtaaaaaaaagcagtgcgaaggcagaaatagggaaacaaagctaaggatgctcaaagaggtkcagcttgtccttggtgtgcagggaacctcaggcgt

SEQ ID NO: 88455 - DNA, 599 bp, Chicken  19866894393360_1
  misc_feature (1)..(87): n is any nucleotide
nnnnnnnnnnnnnnnnnnnnnnnnnnnnnnnnnnnnnnnnnnnnnnnnnnnnnnnnnnnnnnnnnnnnnnnnnnnnnnnnnnnnnnncaaaaagctgctctgaatgccaacaggtgtttctagtttggtgtgtgggagtgcatagtaacctcctttttgtccctccagcctcaccaaataaaatcccagctgcatctaaaagtcctccactcagcactggagcagcaggcagccctgctgtgagtgccaggaaacccatgcatgttcacatagggaatttgggttcttttttggggtgaratttaagtggcttgcttaaatgtgggtggagctccaagcccactcttggctctcgtgtgccagagctgttccgagtcattggggatggaggtcagagctgctgttccatggccttaatctgattgtctgagatcaaagggccctatggtgctgtgtgcactcataaaggagcagtgggatgctgggttccctcgctgtgccagcaatgcagtgtgcagtggatggagggggagggtggagaatccaggggatgttgtgcctttccttgcacaccgytgtgtctgtgagcacattgcatt

SEQ ID NO: 88456 - DNA, 600 bp, Chicken  19866894393360_2
atttgggttcttttttggggtgaratttaagtggcttgcttaaatgtgggtggagctccaagcccactcttggctctcgtgtgccagagctgttccgagtcattggggatggaggtcagagctgctgttccatggccttaatctgattgtctgagatcaaagggccctatggtgctgtgtgcactcataaaggagcagtgggatgctgggttccctcgctgtgccagcaatgcagtgtgcagtggatggagggggagggtggagaatccaggggatgttgtgcctttccttgcacaccgytgtgtctgtgagcacattgcattgcagggcagcagaagctgagccgatgggcgccaggtgcgtgcaatcaggggatccctctttgcacctttggctttttaatttaagcttgtgggtgtagtaagaaacgagtagtgatggccccttgcttagagataaaggaagcatggataaatgtcttttgtggcctggcaacgaacttgctgaggacaacataaaacgtgctcattaaatgtcctttaaccagcattgctttttgttttcggcagcgctggggtggttcatccccccattaattgc

SEQ ID NO: 88457 - DNA, 600 bp, Chicken  19866894393364_1
aagtatcgtattttgaaacagttctcagaccttttgccaaaaaagtttttttaaaaaggttcatgtgaactttcactatgcactatttcactattcacacaggtgaaaagaacgacccttggttctgtttggaccagtaatcacattttgcctccattttccaagtaaataattctgcaattcactgatatttaaacatcatgtagggccacagttctttcacttctcactaattgggcaaactggaaagacccggttaagtgcagttgcaaggcagcaaggcattactaccctgagaakggcaaacaaaaagacatgccaggaaggttgagccacattgtgcaaaggtagaacactttcattgtttcattcacaggtaactggttgggttttatgttaacatcaagtcaagcagactttatacaggaagaaaagaaaagtgtgtcatctggttttgtgactcaaaaaatcagtgtgtttagaggggatctgaatagaacacggaacagagtaaaactgtaagaagttgaaagtctttacctgaatttcattatggagaatgacttgattcagtgttatatgataaagttgtaaatggtt

SEQ ID NO: 88458 - DNA, 600 bp, Chicken  19866894393369_1
tgtgtgacctccctcattgcagatatgtcacagagtttgtggacctggggaatgtctcagcattgagaactttcagagttctccgagctttgaaaactatctctgtaattccaggtgagaaccgttaagcattaaaggctggtcttgctgtatctctttgatattcccccctcgtcctgcattgcttatttctcagaagtggcactggggtatctttgatgggtttgcagtctgtatggatgggatggttggaaattgaggctcctgggccattggatgagcagcccgctgttccatacrtctctgtccctgtgtacacctgtggctctccaatctctaaaatgaaagccagactgaaagtagagtccagattgagtcgaggatgagtttggaatgagttgctgctttctcctactctgggctgccctgtggcccaaactgctgtgtgagctttcatgaagccccaggtcctaattcccaacgttgcccattttgcatggcacccccagcacggggctgtctcttccagggatgcttctggactttgtctgggtgccaaagaatgagcactgccctttactgcaggagaccgtgtagcat

SEQ ID NO: 88459 - DNA, 599 bp, Chicken  19866894393370_1
  misc_feature (1)..(232): n is any nucleotide
nnnnnnnnnnnnnnnnnnnnnnnnnnnnnnnnnnnnnnnnnnnnnnnnnnnnnnnnnnnnnnnnnnnnnnnnnnnnnnnnnnnnnnnnnnnnnnnnnnnnnnnnnnnnnnnnnnnnnnnnnnnnnnnnnnnnnnnnnnnnnnnnnnnnnnnnnnnnnnnnnnnnnnnnnnnnnnnnnnnnnnnnnnnnnnnnnnnnnnnnnnnnnnnnnnnnnnnnnnnnnnnnnnnnnnnncaacatgaagaagaaatctgaaatggtgtctttagatgcttctttttaatgagcaagttaaaatcccrttgtatcgctgtctattccactgagattacaatgttagtgtgctttattaacctttctttactcttggttggatagtttattttttyatggtagtttaaaggagaagaaaagagtagtcagcaaggacatacaaatttcaactaaataaaagtcaagtttttccccaaactacagacaagtgcaataactttttttttttttttaatcagtttgtaatgctgcaaagttattcagtcttctgaactctgctcttttctaacttcttttttatcataggcttctattgtcttatctgtgt

SEQ ID NO: 88460 - DNA, 599 bp, Chicken  19866894393370_2
  misc_feature (1)..(145): n is any nucleotide
nnnnnnnnnnnnnnnnnnnnnnnnnnnnnnnnnnnnnnnnnnnnnnnnnnnnnnnnnnnnnnnnnnnnnnnnnnnnnnnnnnnnnnnnnnnnnnnnnnnnnnnnnnnnnnnnnnnnnnnnnnnnnnnnnnnnnnnnnnnnnnnnncaacatgaagaagaaatctgaaatggtgtctttagatgcttctttttaatgagcaagttaaaatcccrttgtatcgctgtctattccactgagattacaatgttagtgtgctttattaacctttctttactcttggttggatagtttattttttyatggtagtttaaaggagaagaaaagagtagtcagcaaggacatacaaatttcaactaaataaaagtcaagtttttccccaaactacagacaagtgcaataactttttttttttttttaatcagtttgtaatgctgcaaagttattcagtcttctgaactctgctcttttctaacttcttttttatcataggcttctattgtcttatctgtgtggaaggaggtggcatatgcaaaggtatccaaaggcctttaaataacaccatgttgttttgtatctaggtactcaagtgtttattaaa

SEQ ID NO: 88461 - DNA, 599 bp, Chicken  19866894393370_3
  misc_feature (1)..(42): n is any nucleotide
nnnnnnnnnnnnnnnnnnnnnnnnnnnnnnnnnnnnnnnnnncaacatgaagaagaaatctgaaatggtgtctttagatgcttctttttaatgagcaagttaaaatcccrttgtatcgctgtctattccactgagattacaatgttagtgtgctttattaacctttctttactcttggttggatagtttattttttyatggtagtttaaaggagaagaaaagagtagtcagcaaggacatacaaatttcaactaaataaaagtcaagtttttccccaaactacagacaagtgcaataacyttttttttttttttaatcagtttgtaatgctgcaaagttattcagtcttctgaactctgctcttttctaacttcttttttatcataggcttctattgtcttatctgtgtggaaggaggtggcatatgcaaaggtatccaaaggcctttaaataacaccatgttgttttgtatctaggtactcaagtgtttattaaaatattattaactgtatagcaacaacgtatatattactatataaagagaaacccttcaaaaagtagaattcatagtataaaataatttatcttccaatactatc

SEQ ID NO: 88462 - DNA, 599 bp, Chicken  19866894393370_4; identical to SEQ ID NO: 88461
  misc_feature (1)..(42): n is any nucleotide

SEQ ID NO: 88463 - DNA, 599 bp, Chicken  19866894393370_5; identical to SEQ ID NO: 88461
  misc_feature (1)..(42): n is any nucleotide

SEQ ID NO: 88464 - DNA, 600 bp, Chicken  19866894393370_6
aaaacaaaacaaacaaacaaaaaaatgttaagatactccaaacctcttatctgactccatgtcggtctactataaaatatttgacttaaccatattggtaatagagattttcctttgtaaaaatctggagtttcctcatgctacgcacactttaaagcaaattatatgattgtattttccgttcttttttcttattaaagggaaaactgattaactgaactatatatagagaaaaggccctctagataggttttaagaccagctgagaatgctctgttctggtgcagagagctctgctamgatttccatgtgggcactggtcccattatggtcacaaatattcagttatcagtccagaagtctctgggatactcaaggccatttcttctttttctgtgctgtgaacatgcatggccytcttcagcttcaagaggaatgctcctagcagaggggaactttagctactttgcaaaattactcctacagttatagttcttacttgctctgttttatctttgtcttacttatatatttcctaagtactctgacagctgtcaagtctatctttttggggggggtcaatgtcagcatcatcaaata

SEQ ID NO: 88465 - DNA, 600 bp, Chicken  19866894393370_7
taaaaatctggagtttcctcatgctacgcacactttaaagcaaattatatgattgtattttccgttcttttttcttattaaagggaaaactgattaactgaactatatatagagaaaaggccctctagataggttttaagaccagctgagaatgctctgttctggtgcagagagctctgctamgatttccatgtgggcactggtcccattatggtcacaaatattcagttatcagtccagaagtctctgggatactcaaggccatttcttctttttctgtgctgtgaacatgcatggccytcttcagcttcaagaggaatgctcctagcagaggggaactttagctactttgcaaaattactcctacagttatagttcttacttgctctgttttatctttgtcttacttatatatttcctaagtactctgacagctgtcaagtctatctttttggggggggtcaatgtcagcatcatcaaatattttcagtgatggcaggctgctacaaaattgtatggacagtataaactcagtctttgaagagaaagaaaacatttttcattctttcaatgtcatcctaaggagatgcaaggaagttt

SEQ ID NO: 88466 - DNA, 599 bp, Chicken  19866894393373_1
  misc_feature (1)..(192): n is any nucleotide
nnnnnnnnnnnnnnnnnnnnnnnnnnnnnnnnnnnnnnnnnnnnnnnnnnnnnnnnnnnnnnnnnnnnnnnnnnnnnnnnnnnnnnnnnnnnnnnnnnnnnnnnnnnnnnnnnnnnnnnnnnnnnnnnnnnnnnnnnnnnnnnnnnnnnnnnnnnnnnnnnnnnnnnnnnnnnnnnnnnnnnnnnnnnnnnntgggatgtttatcccagccctctgtggtgttgaattctgctggatgtcccctaatccttaaggggaagatattcctctgcttatgcaaggtgcacagcagacttacaygatttctatcttargggagcaaagtgtgtggatctacacaatgaaactatgcattatgcaaatattaaartgtaggaggaaagaatttgcactgaaccaaggctcaacatctaagcattgttatcaacatgaatagagaggtttagaggcwtaaattacaacacaagttcacaattcaagctctgcacagctttcctgccttggagactaacacttgttctgcctgtaaatggcacagagctgaatccaacaaagaaaaggagagcttacaaattgtggcaataaagggccaacatctg

SEQ ID NO: 88467 - DNA, 599 bp, Chicken  19866894393373_2
  misc_feature (1)..(178): n is any nucleotide
nnnnnnnnnnnnnnnnnnnnnnnnnnnnnnnnnnnnnnnnnnnnnnnnnnnnnnnnnnnnnnnnnnnnnnnnnnnnnnnnnnnnnnnnnnnnnnnnnnnnnnnnnnnnnnnnnnnnnnnnnnnnnnnnnnnnnnnnnnnnnnnnnnnnnnnnnnnnnnnnnnnnnnnnnnnnnnnnnntgggatgtttatcccagccctctgtggtgttgaattctgctggatgtcccctaatccttaaggggaagatattcctctgcttatgcaaggtgcacagcagacttacaygatttctatcttargggagcaaagtgtgtggatctacacaatgaaactatgcattatgcaaatattaaartgtaggaggaaagaatttgcactgaaccaaggctcaacatctaagcattgttatcaacatgaatagagaggtttagaggcwtaaattacaacacaagttcacaattcaagctctgcacagctttcctgccttggagactaacacttgttctgcctgtaaatggcacagagctgaatccaacaaagaaaaggagagcttacaaattgtggcaataaagggccaacatctgtggcaagacttaca

SEQ ID NO: 88468 - DNA, 599 bp, Chicken  19866894393373_3
  misc_feature (1)..(122): n is any nucleotide
nnnnnnnnnnnnnnnnnnnnnnnnnnnnnnnnnnnnnnnnnnnnnnnnnnnnnnnnnnnnnnnnnnnnnnnnnnnnnnnnnnnnnnnnnnnnnnnnnnnnnnnnnnnnnnnnnnnnnnnnnntgggatgtttatcccagccctctgtggtgttgaattctgctggatgtcccctaatccttaaggggaagatattcctctgcttatgcaaggtgcacagcagacttacaygatttctatcttargggagcaaagtgtgtggatctacacaatgaaactatgcattatgcaaatattaaartgtaggaggaaagaatttgcactgaaccaaggctcaacatctaagcattgttatcaacatgaatagagaggtttagaggcwtaaattacaacacaagttcacaattcaagctctgcacagctttcctgccttggagactaacacttgttctgcctgtaaatggcacagagctgaatccaacaaagaaaaggagagcttacaaattgtggcaataaagggccaacatctgtggcaagacttacaggttaatcatcttgcaaatgagggagggagtctggaaaggaggacagatggaattc

SEQ ID NO: 88469 - DNA, 599 bp, Chicken  19866894393373_4
  misc_feature (1)..(41): n is any nucleotide
nnnnnnnnnnnnnnnnnnnnnnnnnnnnnnnnnnnnnnnnntgggatgtttatcccagccctctgtggtgttgaattctgctggatgtcccctaatccttaaggggaagatattcctctgcttatgcaaggtgcacagcagacttacaygatttctatcttargggagcaaagtgtgtggatctacacaatgaaactatgcattatgcaaatattaaartgtaggaggaaagaatttgcactgaaccaaggctcaacatctaagcattgttatcaacatgaatagagaggtttagaggcwtaaattacaacacaagttcacaattcaagctctgcacagctttcctgccttggagactaacacttgttctgcctgtaaatggcacagagctgaatccaacaaagaaaaggagagcttacaaattgtggcaataaagggccaacatctgtggcaagacttacaggttaatcatcttgcaaatgagggagggagtctggaaaggaggacagatggaattctgcaccatacaaatatgctggcattggagctaagatgaactgcatgtccttggactgtatatgcaggtgatggttttatcc

SEQ ID NO: 88470 - DNA, 600 bp, Chicken  19866894393381_1
cttctgtaagtataactaataagaaagatacctgtaattcaatatttagctagaaattgtgattatcttaggagtaccagatagtattgaagcctttaatgtcatgaaaaagggctattagatcaacatgtatgacatacaaatacacttgaactacataaatggaagactaaagcttgaatgccaagagttgatgtaatgtatttattttctcaaattattgatcaaaagtcttcttcatccacttatctaaataaccccaaagattcctatgctgccttcatttttaatgtgcagtawgtcttagataccaagaactacatctatgttgtgcctgtgcagttgtacctcagccatgatcaatatgttgagctcagtatcttttccaggtctacatctaatccagaaatcaaaggtgagattcagttggttaaatacaagtgactaattcagtagggtcacctagtttcaagagctgctgctcttgaaaggcaagaatctctcaaaatgcctgtgatgtgcctgtcagcatcttgttgggtgtataaagacattaggcaattgcatttagaaaactgatttgcagactctggataaact

SEQ ID NO: 88471 - DNA, 600 bp, Chicken  19866894393382_1
gcagccccaaaggcatttcccagagcatgtaggttcttttcaaaatatggctgggacttcaatacattgagaacataccttcaaggcagaataccacagtagatattcctccgtaaagtccatatccaattaaagagcattagctattacatatagctacgcaagaaatacatatagccactgttgcttttaataacaaagcacatcatgtgaccatagagacacatttgaggggcaggaaaggaagctccagccttcgaagcaacaaggcagataaactgccctacatgatgttcattyatttgaactctgaaaagaaacagaaatgaaactgaaaattgttaaatgcaaaaayagtcaacagcaagataatgacacaagtcagtgaggaaagactgagttttgtaaactgcccagcccccatgctgagacttaaatttgtaattttctaacatagagattagacaacaggtggaatccaacaagcttgattcacactaaagcagtgttgataaaaaaaacactacataattaagtttatggtataaacatccagaatttctgcatgaatctccccatggattctaccataaaaaaaat

SEQ ID NO: 88472 - DNA, 600 bp, Chicken  19866894393382_2
acttcaatacattgagaacataccttcaaggcagaataccacagtagatattcctccgtaaagtccatatccaattaaagagcattagctattacatatagctacgcaagaaatacatatagccactgttgcttttaataacaaagcacatcatgtgaccatagagacacatttgaggggcaggaaaggaagctccagccttcgaagcaacaaggcagataaactgccctacatgatgttcattyatttgaactctgaaaagaaacagaaatgaaactgaaaattgttaaatgcaaaaayagtcaacagcaagataatgacacaagtcagtgaggaaagactgagttttgtaaactgcccagcccccatgctgagacttaaatttgtaattttctaacatagagattagacaacaggtggaatccaacaagcttgattcacactaaagcagtgttgataaaaaaaacactacataattaagtttatggtataaacatccagaatttctgcatgaatctccccatggattctaccataaaaaaaattatgactgcagataaagtgctctgtcccagccataatcagtcctttaaaaaaaaa

SEQ ID NO: 88473 - DNA, 600 bp, Chicken  19866894393382_3
caacagcaagataatgacacaagtcagtgaggaaagactgagttttgtaaactgcccagcccccatgctgagacttaaatttgtaattttctaacatagagattagacaacaggtggaatccaacaagcttgattcacactaaagcagtgttgataaaaaaaacactacataattaagtttatggtataaacatccagaatttctgcatgaatctccccatggattctaccataaaaaaaattatgactgcagataaagtgctctgtcccagccataatcagtcctttaaaaaaaaaaawaaaaatccctcccttctaatatcccaatttgaaaatgctgtgaactatatcaaattgagaacagaggcggtaattctcaaagttcatttacagggttctcacttcagtagtcttgctggaacaataaaatagtttgaatgcaagcttatttgttaaagtctatcctgcttcacttcctcgtgatattttttgattgctattagctctctccctaaaatatgcgtgaatgttctggttagaaatcaccaagaaagaagctcatgatcagcagctagacattttgagaccaataattttttg

SEQ ID NO: 88474 - DNA, 495 bp, Chicken  19866894393387_1
  misc_feature (1)..(68): n is any nucleotide
nnnnnnnnnnnnnnnnnnnnnnnnnnnnnnnnnnnnnnnnnnnnnnnnnnnnnnnnnnnnnnnnnnnnatcccccatttaagcgaaaatcaagtgttttctcttcgagaatcccccatttaagcgaaaatcacgcgttttctctttgagaatcccccatttaagcgaaaatcacgcgttttctcttcgagaatcccccatttaacccgaaaatcacgcgttttctcttcgcaaatcccccatttaagtgaaattcaggtgttttctcttcgagaatcccccatttaagggaaaatcacgygttttctcttcgagaatcccccatttaagtgaaaatcacgcgttttctgtttgagaatcccccatttaacccgaaaatcacacgttttcttttcacaaatcccccatttaagtgaaaatcacgcgttttctcttcgagaatcccccatttaacccgaaaatcacgcgttttctcttcgagaatcccccatttaac

SEQ ID NO: 88475 - DNA, 600 bp, Chicken  19866894393401_1
ttatcttttcctaaggctgagcagacccagcttcctcagcctttcctcatatgggagatgctccaggcccttaatcatctttgtggccctctgctggactccttctaggagatatcccagtcttctttggactgggaagccaagaactggacacagtaaatgattttatggtttttgttttgctgtgataactggtacaaatggctcaatgtgaaggaattttattccctgaaggtttaactggaatgaaagacttcatgctaaaactctaggtgctaagaggcctgtgtcttcttacgsagaactagttactttaactgtccactaccattaagcttctgggtactaaatcctatattccatgatgcagggtttcaatgcagagctacctttgctctgaaatacccaatattctactaacttttcctcagtaataggataatggaccctttgaaaattactaacttggacctgacagaaaaaaaattgactcccattatcacagaaataaagcaaaccaaatgggaaaaatatacgtagtatagtgctatgtgttttagcagctcttgtcttcagctctaaaaaggcacattttgtatt

SEQ ID NO: 88476 - DNA, 600 bp, Chicken  19866894393407_1
gaaaataattttgcttaaacataaatcttcaaacagtaaatcagcagcatttttatttacagacccttaaaaaaaaaaatcactcccactgataattactacaacatacatctctgtatcctttccctctcccagctgtcaccgggactcttccccatgcatccttgcttatgaaaagcaccaaccccttcctctgggcacagcctaaatgcgcctcccctatcaccattcctcccactcctcagaaatggaactctcattcctgctgcagcctcaacctgccttcttttcgtatccacwatttcacaggatccagaccccttccaaatatgcaggaaagaatagaacctcaaggaactttcagctgaaagattacagctgaagacaagatgtatgagaggcgggccacatttgaccttgctttctctctgcatacatatatcagtaaggtatagaagatgtgtgggatataacagaggtacgtttctgaagaaagcacagcaccacagtattcacaagcaggagctcctaattctgtaagaagaggctagaatgttcctgcagttgagatctccagatcagggaatgttgagcaataga

SEQ ID NO: 88477 - DNA, 600 bp, Chicken  19866894393410_1
ttggaatgggtacagttcactcaattttaaattttacttaggtcgtatttgacagttcccaagtcatatcttttttatttttaaaggtaggggcaactttgatgtagaaaaagcagtctttaacacagaaggagatcagcctctggaacaaatgaaaaaaaaaagagaatggtggattctccctttggtcttcaaactggaaaagatatgctctgctcagaaatcctatgaggctccaagtagtagtaactgggagctctggagaacaggagaagccagaggagactcagcatgtttgtsctattggttccatatatgttatataactccttatctcggaggttcaggctggcaaaagccaagtgggttagctgtgtactcatatcaagtgaccaggcattatcacaccatctgaggctaaggggaaggtgctctagcaacttttgagctccmcaatgcatctacaattataatacaagtcccagagttttgatagctgaggtcttttcaatgtggaatcatagaatcatagaatcacgaaggctggaaaagaccacaaagatcatcaagtccaattgtgaacccatcacaccatgccca

SEQ ID NO: 88478 - DNA, 600 bp, Chicken  19866894393410_2
gaaaaaaaaaagagaatggtggattctccctttggtcttcaaactggaaaagatatgctctgctcagaaatcctatgaggctccaagtagtagtaactgggagctctggagaacaggagaagccagaggagactcagcatgtttgtsctattggttccatatatgttatataactccttatctcggaggttcaggctggcaaaagccaagtgggttagctgtgtactcatatcaagtgaccaggcattatcacaccatctgaggctaaggggaaggtgctctagcaacttttgagctccmcaatgcatctacaattataatacaagtcccagagttttgatagctgaggtcttttcaatgtggaatcatagaatcatagaatcacgaaggctggaaaagaccacaaagatcatcaagtccaattgtgaacccatcacaccatgcccactaaccatgtccctcagtgccacatccacacgtttctcaaacaccttcagggatggtgactccaccacctccctggcasactgttccaatgtatggctactttttctgagaattctttccaaatactcaacctgaactttccttggttcaagt

SEQ ID NO: 88479 - DNA, 590 bp, Chicken  19866894393410_3
tcatatcaagtgaccaggcattatcacaccatctgaggctaaggggaaggtgctctagcaacttttgagctccmcaatgcatctacaattataatacaagtcccagagttttgatagctgaggtcttttcaatgtggaatcatagaatcatagaatcacgaaggctggaaaagaccacaaagatcatcaagtccaattgtgaacccatcacaccatgcccactaaccatgtccctcagtgccacatccacacgtttctcaaacaccttcagggatggtgactccaccacctccctggcasactgttccaatgtatggctactttttctgagaattctttccaaatactcaacctgaactttccttggttcaagttgttctatcttgttctatcactgttacctgggagaagagaccaacccccaccttgccacarcctcctctctggagctgtggagaataataatgtctcccctgagcctcctcttctccagactgaacaatcccagttccctcagtcactccccataagacttgtgctccagacccttcacagcttcattgcccttctctggacatggtgagcatcaa

SEQ ID NO: 88480 - DNA, 455 bp, Chicken  19866894393410_4
ggaatcatagaatcatagaatcacgaaggctggaaaagaccacaaagatcatcaagtccaattgtgaacccatcacaccatgcccactaaccatgtccctcagtgccacatccacacgtttctcaaacaccttcagggatggtgactccaccacctccctggcasactgttccaatgtatggctactttttctgagaattctttccaaatactcaacctgaactttccttggttcaagttgttctatcttgttctatcactgttacctgggagaagagaccaacccccaccttgccacarcctcctctctggagctgtggagaataataatgtctcccctgagcctcctcttctccagactgaacaatcccagttccctcagtcactccccataagacttgtgctccagacccttcacagcttcattgcccttctctggacatggtgagcatcaa

SEQ ID NO: 88481 - DNA, 600 bp, Chicken  19866894393417_1
tgatagaaggggaggagccacccatggaagttggtagatttcaaaatttcataatgcaatgagcagtataggttttggtgtagactgcaaagcaaacgctgcagagggtgcttctctgtctttgtttcttatgtatttttactaagtagcacataatgtattagagttatcagctctgaataacttttcccatgatgttatataaattgcctttataacatgaatatttttctacatgctagtcagtgttacttttgaaaaggaatcaatttatccatccaactcaattcactgttttartttttagcagtgcaaataaaacataggaaaagctaaaagctagtcaaatgaaagttagcattaccgatgtgttctgtttatttaygttaactctgttaaaagcaaggcttacttttcttgctggaaggaaagagaagtgtatttgaaatattgaggggtggtgatccatgagctggctgtttcttcccattactgtaagagctgcagtttttatacagatgaacataggtacaaaccttactgccttctccttaaacatcccatgaagaagaatagctttgatttatgacccaatcactg

SEQ ID NO: 88482 - DNA, 600 bp, Chicken  19866894393417_2
tgcaaagcaaacgctgcagagggtgcttctctgtctttgtttcttatgtatttttactaagtagcacataatgtattagagttatcagctctgaataacttttcccatgatgttatataaattgcctttataacatgaatatttttctacatgctagtcagtgttacttttgaaaaggaatcaatttatccatccaactcaattcactgttttartttttagcagtgcaaataaaacataggaaaagctaaaagctagtcaaatgaaagttagcattaccgatgtgttctgtttatttaygttaactctgttaaaagcaaggcttacttttcttgctggaaggaaagagaagtgtatttgaaatattgaggggtggtgatccatgagctggctgtttcttcccattactgtaagagctgcagtttttatacagatgaacataggtacaaaccttactgccttctccttaaacatcccatgaagaagaatagctttgatttatgacccaatcactgtcatgccacaagaaaacatgagaagatattttaaagcattttatcttctaggtgttttagtgactcctttactgcctttgttctg

SEQ ID NO: 88483 - DNA, 600 bp, Chicken  19866894393419_1
ataacctctgtagacaattatatctgtcttcacatccatgtttcctatttccctgtgaagacagggcctcatggagtccagcttatatcctgctgtaaaatgagaagaaaaattggtgggaggaggaaaaaaaggtttttgttgaacagagttccacaacagacctggttaagcccgaatcttcccagtttaactgtgttcagcaaaacccctctactgaaaaaggcatgtgccaaataatagccaagtggaatgtaaatgaatcttccagcagcttactttatttgaacaaacaagatyaaaagaacaagaagaaaaagaccttccttctaggagtacatttgatatatttttcatagcaaaaaatgctttaatgttttcataatagatgctattaaaaatacccatgtctaattgcagtagtataaatgggactaattcagaaatcaaaattatgtgtttattttcacctctgctgcaaaacaaacaaacaaacacaaaccactatgaatttgtctagttcctgatctgtcataccactgatagctaaaagatgtctgcagccaggggggcaggacatcagaaaatatgacagtagaa

SEQ ID NO: 88484 - DNA, 600 bp, Chicken  19866894393421_1
tagggtatatgtgctgccctgctgttctggacaaagatggtgtcagtgctgctgttataactgcagagatggctagctttttggcaaccaggaacttgtctttgtcacagcagctgaaggctgtctatgatgagtgagtttgattataattgtcaaatcttcagattttctccattccatgtatgttgcttaatagcaatctatggtatacaaagaaacaaacacacaggtatggtaacagtgatctagcgagctctcctatgctagatcatatacctatgctatctccataccaacatracttggttttgtgtagttttaaaacattgactaccttcctaactcttactctattaaagaggtgtttgtaacattttctagttcttctgacgggtatcccccatttgagaagtttggctcttgagcactgctctttcttgtacaaaagattggactttgttttgttttgttttccccagcagtatcggtgcactgtggagctcatagtgyttcttgctgcttaaacacaccagatgcacaaaaacattaatggcagaatgtgtccaagtagckctggcatatttatgctatctggcttat

SEQ ID NO: 88485 - DNA, 600 bp, Chicken  19866894393421_2
caaagaaacaaacacacaggtatggtaacagtgatctagcgagctctcctatgctagatcatatacctatgctatctccataccaacatracttggttttgtgtagttttaaaacattgactaccttcctaactcttactctattaaagaggtgtttgtaacattttctagttcttctgacgggtatcccccatttgagaagtttggctcttgagcactgctctttcttgtacaaaagattggactttgttttgttttgttttccccagcagtatcggtgcactgtggagctcatagtgyttcttgctgcttaaacacaccagatgcacaaaaacattaatggcagaatgtgtccaagtagckctggcatatttatgctatctggcttatttctgtcctgcttgcagtactacttgtgattaaattaattctagttggcactatagttagaatttttactatattattctgtctttcattttctgattgatagtggtgtgttctttctcctcctgaatacccagatttgagctgattcagttgatgtgctatgactggctctgcttgctatatccaacagggtattcctctgaaagcttt

SEQ ID NO: 88486 - DNA, 571 bp, Chicken  19866894393421_3
tacctatgctatctccataccaacatracttggttttgtgtagttttaaaacattgactaccttcctaactcttactctattaaagaggtgtttgtaacattttctagttcttctgacgggtatcccccatttgagaagtttggctcttgagcactgctctttcttgtacaaaagattggactttgttttgttttgttttccccagcagtatcggtgcactgtggagctcatagtgyttcttgctgcttaaacacaccagatgcacaaaaacattaatggcagaatgtgtccaagtagckctggcatatttatgctatctggcttatttctgtcctgcttgcagtactacttgtgattaaattaattctagttggcactatagttagaatttttactatattattctgtctttcattttctgattgatagtggtgtgttctttctcctcctgaatacccagatttgagctgattcagttgatgtgctatgactggctctgcttgctatatccaacagggtattcctctgaaagctttgaatatgaggcactcctttttctttttcctttaa

SEQ ID NO: 88487 - DNA, 524 bp, Chicken  19866894393422_1
aaaaaaacaggattatatggcgtagttaaactgaggagttagagaaagatgttataatgctaaattgctgagcaataatgtacaatgaaaagatagatgccccataaagaagaaaactggtctttactatatataagaaaagaggaaaattgaaaatggaaaccaaattaaccagatttttgttaaattctttaaattcttcaaatctgtaattgggttttggatttaggtatttaagaaagcttaaatgagcataattgcttcccaagaatttgatcaaccatctcatgcctcagtacmtctctttttgtattcctttgtaaatgttgcagatcatcaataacagctggctataatcgtatagagaatacaccaggactgagggtggacagtatatctattgtccagcacactatctgcactgaggaagcgatttgtgtcaacattttattcttgaagtatatatgaaatatgcattgagacacttgatcacaagctattgtaactaagtaagtaaaagtaaa

SEQ ID NO: 88488 - DNA, 600 bp, Chicken  19866894393437_1
tcactccttaaatgacaatgttctagagaggttatagaagtattccctttactccttgagcttcgttatgtagaagcatcttaattttttttttttgaggtcaagatggtagtgttctacattggctcttattatgtgtacttagattatatctgtttgaatggggattctttaaatacatggatgtacgtatttggatcccatttaggactacaactaaatcgccatcagctaacattcttatttctgttcttcgtttgtgcagcttttaaattctgcctgcagtacacacgcaaagcrgagttccgtaaactctgtgataacctgagaatgcatctggggcagatccagcgtcatcataaccaaagcacagcaatcaacctcaacaatcctgacagccagtcaatgcacctggagaccaggcttgtgcagcttgacagtgctattagcatggaactgtggcaggtatgcaaccggcttcctgtaatcactctgtagtcttctgctttccacctgtgtactgaatgctttatctgatggtcctggaattgctctttttgcatagcatttcaaaccaagcttatgctggcagtagttaat

SEQ ID NO: 88489 - DNA, 600 bp, Chicken  19866894393443_1
atattctggtgtgtgtgtgttagtgttgagggggacctcttctgtaatacttaactgcactttcacatccagtaagtgaagtgtatgctacttcaatacatctgtgattataataagataattagtttttcctccaatggaggaaaaagtataaattcttgagttacagctgtctacaagactttcatgacataggaaggaagtgatagaaggaatcttatccttcctcatagcaggaagtagtttaacttgcagtctgcatatgcgattagattagggattaaaaatattcatataccygtctctagcttggaactgagcatccattggttatagtcaaacaagatttatctctaatatattaaagcttttcatttgttagtcatagcagtggaaaaaaacacaggtctaggaggatgaactatggtaattttctgtattactgtctgaattggaggtgatataggtgaaagatgttttgaaagtcagagaaagccttttcagcacgggaagtgatgcataggattcagtgtacagaaagagaaagaacttgattggttctgagaactgtcatgtctcttccctgttgtgatgctgaag

SEQ ID NO: 88490 - DNA, 600 bp, Chicken  19866894393443_2
tcctgcacttcatgcattacatactaggaactaaagagtatttacagtcttaaacaattacatgaggtgtgtgtcactcttctctatgtctgattcttccaggttcttctcagacaaactagacttgctcatccctcattgtattgggaatgtgatttggatgtgtcatcagggaaagacaacttaaggctctgttcacacaactgttaagtgctatagtggtgtgactaattagaaagccgttacctcaaacaaaaacttgtttctgttctgtgagaacttcataaggttcagagatayggattctattgaccaagcactagacaaatttaggtagatttgatccttacaggtgtataataagagagaggaaaagggagaaaattaatagttgcttgtgatgaagtctgtcagcaatatacatctgctgtgttaaagaaattctcttttaacgtaggagatctgacaaaacataagaggagataaatacccttctgtagtttttaattcaaaaatgtcactatcatactgtttttattaaaaattattgctgcagtttaaaatgttcagttccaaggtagacttgaatgtagatctgtg

SEQ ID NO: 88491 - DNA, 600 bp, Chicken  19866894393444_1
gtgactgtttcatctcagcaaacaaacacattcataaattttgaccttcagcctctggcaacacaatggccctcttgtgaggtgttgagtggtgttagcggctgtggggggttggtttgcagcaagtgtgttgcagaatcctccaaaggtctgacccagtctggattctgcaagccagctttgtttctcaacaagattccagttacgggtatttcccacattctttggaaaaatctttatcagttcacatttcttgctctgttacaaaattgtggtgctttcgtgtggttcatgggtggsttggcagagctgaaatgggtacattgctaccagccgcactaacctcagtaagtcaaattaagtggatatactctggggttctcatttcaggtcttgtttcagttttggggtccacaccaaaagctgaaaatagcagagtgtacggtgagagatgtgaggatggaatgcttctcttctgtagagaaggcactgacacttctagttagcttaccaaagtaaaagatcttgattgtggaataaagccaatggggaagaatttatccttatttaggacaactctttaatctagcagttgcaggt

SEQ ID NO: 88492 - DNA, 600 bp, Chicken  19866894393455_1
tctggtgagcattccctggaagctagtgcttcgccctcaatatgctcacaaaacccaagccacctgagaccactagctcaaagagcatcatggctatgggaagtttgtcaactttgttattatctgtgtggaggccactctggttagagcttgcagtgagctaacttccacgttgcacattattgtgtctgccacacaagaacccaggattaggcttatgatcaacttgctgcatgatggctgtgttggtgcagtctggtttgtgtgttcccagacacgtgacagagttttgcctttgcrtttggtgtgaggcaggggcacgtacagtgatggcacagctgatgccatttaacttatcaagccacagtagcttcatcatgtgtttgcactgtagtgagcacagggaatgaatgaagtatgcagtaaagtggtacaagagtgagatcaggaaccagggataaatgaagaaagggaagaaaagaagcatactgcattaagaacagtagaaacagggcaagtattgaaaacttcttagtagcttcatatggacctccctcagaagcagttcattcctaaaaacatattttctgtttgttggtt

SEQ ID NO: 88493 - DNA, 599 bp, Chicken  19866894393462_1
  misc_feature (1)..(59): n is any nucleotide
nnnnnnnnnnnnnnnnnnnnnnnnnnnnnnnnnnnnnnnnnnnnnnnnnnnnnnnnnnncagtggtttgcaggtgcattgcaacattctatgtctgctggatctacttggcaccatgaagagagcaagtacagggcactgacaggcagggatggaagtgtgtgaaacaggctcaagacacacagggaactgtttggtaagaacagagaggttgctgggtttcctggtgagcagcaaagaacctcaaaaccaccaagccccatgtactcccttagctagagtcaggagtctgcaggtgccygccatgttagggtggataatgataggacaagsgggaatggtgttaaactgggacargggaggtttaggttggatattaggaagaagtttttcacacagagaactgacacactggaacaggttgcccaaggaggttgtggatgccccatccctggaggcattcaaggccaggctggatgtgactctgggcagcctggtctagtggttggtaaccttgcacatagcaggggggttgaaactcaatgatcattgtggtccttttcaacccaggctgtgctatgattctatacacaatattgc

SEQ ID NO: 88494 - DNA, 599 bp, Chicken  19866894393462_2
  misc_feature (1)..(27): n is any nucleotide
nnnnnnnnnnnnnnnnnnnnnnnnnnncagtggtttgcaggtgcattgcaacattctatgtctgctggatctacttggcaccatgaagagagcaagtacagggcactgacaggcagggatggaagtgtgtgaaacaggctcaagacacacagggaactgtttggtaagaacagagaggttgctgggtttcctggtgagcagcaaagaacctcaaaaccaccaagccccatgtactcccttagctagagtcaggagtctgcaggtgccygccatgttagggtggataatgataggacaagsgggaatggtgttaaactgggacargggaggtttaggttggatattaggaagaagtttttcacacagagaactgacacactggaacaggttgcccaaggaggttgtggatgccccatccctggaggcattcaaggccaggctggatgtgactctgggcagcctggtctagtggttggtaaccttgcacatagcaggggggttgaaactcaatgatcattgtggtccttttcaacccaggctgtgctatgattctatacacaatattgctggatattctcttaatgccagtgactgtgctt

SEQ ID NO: 88495 - DNA, 599 bp, Chicken  19866894393462_3
  misc_feature (1)..(3): n is any nucleotide
nnncagtggtttgcaggtgcattgcaacattctatgtctgctggatctacttggcaccatgaagagagcaagtacagggcactgacaggcagggatggaagtgtgtgaaacaggctcaagacacacagggaactgtttggtaagaacagagaggttgctgggtttcctggtgagcagcaaagaacctcaaaaccaccaagccccatgtactcccttagctagagtcaggagtctgcaggtgccygccatgttagggtggataatgataggacaagsgggaatggtgttaaactgggacargggaggtttaggttggatattaggaagaagtttttcacacagagaactgacacactggaacaggttgcccaaggaggttgtggatgccccatccctggaggcattcaaggccaggctggatgtgactctgggcagcctggtctagtggttggtaaccttgcacatagcaggggggttgaaactcaatgatcattgtggtccttttcaacccaggctgtgctatgattctatacacaatattgctggatattctcttaatgccagtgactgtgcttttccctcatgatttgcctggttta

SEQ ID NO: 88496 - DNA, 600 bp, Chicken  19866894393463_1
cacagtcattattaatcatgggcatttgtaagagccacgtgtaagagagatgagctctctggattagaaaggttagaaggtgggactgagaaaaggacagatcatccaattgcattttagagtaagtttagggatgggcttttgcttcaatacggttgtgcctatgctagcgtcagtctttgcgagtagacagatagagggaaaaaatttagtcagcttggttcacttggctttcagatccttgtaggacagtttggcaaagataaataaaggcatacacacaagacccttagggcttayggcccagttaggaatgagaccgcttcttttatcagacaaagttgtttaattgagattgtaaaagctagagttagccctcttttcagtataccatatgtattatttatagcaatgaatgaatctttatgagtacgratgagagctttaaatgaactacaggaagcatattgaacaggtgggtttttctgaaaaaaggctttatagatgagtaggtttatgaatgagaagcagaatttattgtaggctattttaaagactctacttagtctrtggcaacatgagggagggatttttatggtt

SEQ ID NO: 88497 - DNA, 600 bp, Chicken  19866894393463_2
gggcttttgcttcaatacggttgtgcctatgctagcgtcagtctttgcgagtagacagatagagggaaaaaatttagtcagcttggttcacttggctttcagatccttgtaggacagtttggcaaagataaataaaggcatacacacaagacccttagggcttayggcccagttaggaatgagaccgcttcttttatcagacaaagttgtttaattgagattgtaaaagctagagttagccctcttttcagtataccatatgtattatttatagcaatgaatgaatctttatgagtacgratgagagctttaaatgaactacaggaagcatattgaacaggtgggtttttctgaaaaaaggctttatagatgagtaggtttatgaatgagaagcagaatttattgtaggctattttaaagactctacttagtctrtggcaacatgagggagggatttttatggtttggataagaaatttaagtgggaatgtgattttttccccgcctaataagttctgtcatttgcttccccatattcagtcatcctcagacgagttactcttcctcttatgtggcaatacaacgtagcagcatcttctg

SEQ ID NO: 88498 - DNA, 600 bp, Chicken  19866894393463_3
aggcatacacacaagacccttagggcttayggcccagttaggaatgagaccgcttcttttatcagacaaagttgtttaattgagattgtaaaagctagagttagccctcttttcagtataccatatgtattatttatagcaatgaatgaatctttatgagtacgratgagagctttaaatgaactacaggaagcatattgaacaggtgggtttttctgaaaaaaggctttatagatgagtaggtttatgaatgagaagcagaatttattgtaggctattttaaagactctacttagtctrtggcaacatgagggagggatttttatggtttggataagaaatttaagtgggaatgtgattttttccccgcctaataagttctgtcatttgcttccccatattcagtcatcctcagacgagttactcttcctcttatgtggcaatacaacgtagcagcatcttctgcacaaaccatttgttgagtataaactttaaataacaacactagcatgccaaatttttgacttgtaggccatcaaaaatgtactttctcaaagccaaaagacagtgcatttttcctatgtggatgttagagctaag

SEQ ID NO: 88499 - DNA, 600 bp, Chicken  19866894393471_1
ggcttctccctgattcaagacgagaagctggtcctagtctttctctgcacaccacttaaaggactgttctgaagcaggtatgggtgagaatttgacaatgccaccttctgaaaagagaaatagcaactgtctttttgcattatacttctgtatatcagtgccaaaccacagatcaactacaaagagtaggtcttctcaatgaggtatttaaaaacaaaaatctactctcaattctcctcctgcaaatgttatttttccaattaattatgaaggtcactttattcattaaaagtgccattktatttaaagccctcaaacaaaagatggcaaaaaggacaacaaagccatgcaacatttctgagtgtatgttttcytcctactacaccyaacccagaccttcagaactgccttactcctcacataacttccactgggagaggatgcatagtaaacatgttaaaaaaaaacaacaaccaacaacagttcttcttaagagagcttctcttaacagygcttcattgttcccttgccttggatagttttagctttaggtctttattttactcaaagatctcttacttaccaatggcctgaccttgg

SEQ ID NO: 88500 - DNA, 600 bp, Chicken  19866894393471_2
caggtatgggtgagaatttgacaatgccaccttctgaaaagagaaatagcaactgtctttttgcattatacttctgtatatcagtgccaaaccacagatcaactacaaagagtaggtcttctcaatgaggtatttaaaaacaaaaatctactctcaattctcctcctgcaaatgttatttttccaattaattatgaaggtcactttattcattaaaagtgccattktatttaaagccctcaaacaaaagatggcaaaaaggacaacaaagccatgcaacatttctgagtgtatgttttcytcctactacaccyaacccagaccttcagaactgccttactcctcacataacttccactgggagaggatgcatagtaaacatgttaaaaaaaaacaacaaccaacaacagttcttcttaagagagcttctcttaacagygcttcattgttcccttgccttggatagttttagctttaggtctttattttactcaaagatctcttacttaccaatggcctgaccttggcatctgtgctactcctactaaagctaatgtgatctgctcacacaaagcagactattgccaaggagcataagcag

SEQ ID NO: 88501 - DNA, 600 bp, Chicken  19866894393471_3
gaatttgacaatgccaccttctgaaaagagaaatagcaactgtctttttgcattatacttctgtatatcagtgccaaaccacagatcaactacaaagagtaggtcttctcaatgaggtatttaaaaacaaaaatctactctcaattctcctcctgcaaatgttatttttccaattaattatgaaggtcactttattcattaaaagtgccattktatttaaagccctcaaacaaaagatggcaaaaaggacaacaaagccatgcaacatttctgagtgtatgttttcytcctactacaccyaacccagaccttcagaactgccttactcctcacataacttccactgggagaggatgcatagtaaacatgttaaaaaaaaacaacaaccaacaacagttcttcttaagagagcttctcttaacagygcttcattgttcccttgccttggatagttttagctttaggtctttattttactcaaagatctcttacttaccaatggcctgaccttggcatctgtgctactcctactaaagctaatgtgatctgctcacacaaagcagactattgccaaggagcataagcagccctagtgatgtc

SEQ ID NO: 88502 - DNA, 600 bp, Chicken  19866894393471_4
aacaaaaatctactctcaattctcctcctgcaaatgttatttttccaattaattatgaaggtcactttattcattaaaagtgccattktatttaaagccctcaaacaaaagatggcaaaaaggacaacaaagccatgcaacatttctgagtgtatgttttcytcctactacaccyaacccagaccttcagaactgccttactcctcacataacttccactgggagaggatgcatagtaaacatgttaaaaaaaaacaacaaccaacaacagttcttcttaagagagcttctcttaacagygcttcattgttcccttgccttggatagttttagctttaggtctttattttactcaaagatctcttacttaccaatggcctgaccttggcatctgtgctactcctactaaagctaatgtgatctgctcacacaaagcagactattgccaaggagcataagcagccctagtgatgtcactgaactcattaaagatatagttgacttcttggccctagaaaacctaattattaaatgtaaccttagctgaaaacagtagtgcttgttgataagcaaagcaaaacaataggtgttttgttcaaa

SEQ ID NO: 88503 - DNA, 599 bp, Chicken  19866894393472_1
  misc_feature (1)..(138): n is any nucleotide
nnnnnnnnnnnnnnnnnnnnnnnnnnnnnnnnnnnnnnnnnnnnnnnnnnnnnnnnnnnnnnnnnnnnnnnnnnnnnnnnnnnnnnnnnnnnnnnnnnnnnnnnnnnnnnnnnnnnnnnnnnnnnnnnnnnnnnnnnngatcagcaatacagtttttagtagcagaagatgcctttcttcttcagaattatcattaatagctatatttcatgaactgtgacaggtttacttctttctttcctttcttctccccttcacccccctagaaaatacatattacacaagaatgaatggagatgmaaacaaagcagtcttggcactagctcccacaggttcaaataatcaaagaaagatggtaaagttcatytaaatatgcagtgatttttttaccctgagggaagaaggtaaaaccatrtgaactttactgctggacatactttgttgtctattttccctaccaaatgtctcccactgtcatgcttttatgtgtaaccaatgtaaggcctttgagtaaatttaaacatcactgtcctttctctatacactgcgaagtatctgttgcataataaatctgtgatacctcatcttttagtttcatc

SEQ ID NO: 88504 - DNA, 599 bp, Chicken  19866894393472_2
  misc_feature (1)..(71): n is any nucleotide
nnnnnnnnnnnnnnnnnnnnnnnnnnnnnnnnnnnnnnnnnnnnnnnnnnnnnnnnnnnnnnnnnnnnnnngatcagcaatacagtttttagtagcagaagatgcctttcttcttcagaattatcattaatagctatatttcatgaactgtgacaggtttacttctttctttcctttcttctccccttcacccccctagaaaatacatattacacaagaatgaatggagatgmaaacaaagcagtcttggcactagctcccacaggttcaaataatcaaagaaagatggtaaagttcatytaaatatgcagtgatttttttaccctgagggaagaaggtaaaaccatrtgaactttactgctggacatactttgttgtctattttccctaccaaatgtctcccactgtcatgcttttatgtgtaaccaatgtaaggcctttgagtaaatttaaacatcactgtcctttctctatacactgcgaagtatctgttgcataataaatctgtgatacctcatcttttagtttcatcttaagtggaaaaggtcaacaaggctggatccaacatataagctgaaagagagtcttattttactttt

SEQ ID NO: 88505 - DNA, 599 bp, Chicken  19866894393472_3
  misc_feature (1)..(23): n is any nucleotide
nnnnnnnnnnnnnnnnnnnnnnngatcagcaatacagtttttagtagcagaagatgcctttcttcttcagaattatcattaatagctatatttcatgaactgtgacaggtttacttctttctttcctttcttctccccttcacccccctagaaaatacatattacacaagaatgaatggagatgmaaacaaagcagtcttggcactagctcccacaggttcaaataatcaaagaaagatggtaaagttcatytaaatatgcagtgatttttttaccctgagggaagaaggtaaaaccatrtgaactttactgctggacatactttgttgtctattttccctaccaaatgtctcccactgtcatgcttttatgtgtaaccaatgtaaggcctttgagtaaatttaaacatcactgtcctttctctatacactgcgaagtatctgttgcataataaatctgtgatacctcatcttttagtttcatcttaagtggaaaaggtcaacaaggctggatccaacatataagctgaaagagagtcttattttacttttctgtccagactcttaagcccaatcgttaattgcagacaggcaataaat

SEQ ID NO: 88506 - DNA, 600 bp, Chicken  19866894393473_1
gaacagctttgaagggaaagttttgatccagagcatctagatccagacacactagcacaacacaaccaagatatataaagcatacaaaggggaactgagaggcatcaagcctgtgagcctgatataaccagagctattttcttataaggagaactagctgaataatcttgctttagcaattacaagtagagaagacagactatacttttgaacctcagcaggcatggaaaaggtctgtgatgcatgtacaggaaacaacagtcacattacaacttgtgaataggcccagactgtactctygttgagagtttccttctgatgacgaagtgagagtaacaaaggcacaaaagcatcttttgagaaaataggaccatacacagagaaccacacaaaggacagtattaagtcataatatcacactgttggttttcatcaattcttcaggtggtctcaagcagacagctttttaatcctttttccccagctgtcttatgcctttgctggtgggaccacataagtgagtcatgtaaatggtttgcagtttacaggaagcactgtatgtatcctctctattcagcttgaagctgttcagtgctgctt

SEQ ID NO: 88507 - DNA, 600 bp, Chicken  19866894393475_1
gcttgggaaatgctttcaacttggctgctggacagacccagaggttgtgagctccatttgctctgaaattttccagggcacatttctcaggcaagcagaacatgaaagggctttgagtgctggaacaaacttcagacacaatctgttgctagaggcagaagatacgtttattttgtagtttccctgctcaccctcctttctctttggtacacttgtttgtcagccaaatcagcttatttaaggacgccgaatgggacaaacaatgcaggcagctctgtgcagcacttcttatcagaaacrcctcgtaagaactgcatcacatccatccactcacttgaaacagcacctgttattccaaccaygtgctccttgctgtatggcccaaatacactcaagtacaccaccacgacctgtttgatggctctgcctgcccatcaggagagctcagcatggggtccygctggtggttggttatggacatcacatttctgaccccacgtttcccccacagacacagccccactcttctgctaaatgtttaaatgctgctgcagcagcttgggaaagaaaaaagataattatcaacgactgttgttgttc

SEQ ID NO: 88508 - DNA, 600 bp, Chicken  19866894393475_2
ctgaaattttccagggcacatttctcaggcaagcagaacatgaaagggctttgagtgctggaacaaacttcagacacaatctgttgctagaggcagaagatacgtttattttgtagtttccctgctcaccctcctttctctttggtacacttgtttgtcagccaaatcagcttatttaaggacgccgaatgggacaaacaatgcaggcagctctgtgcagcacttcttatcagaaacrcctcgtaagaactgcatcacatccatccactcacttgaaacagcacctgttattccaaccaygtgctccttgctgtatggcccaaatacactcaagtacaccaccacgacctgtttgatggctctgcctgcccatcaggagagctcagcatggggtccygctggtggttggttatggacatcacatttctgaccccacgtttcccccacagacacagccccactcttctgctaaatgtttaaatgctgctgcagcagcttgggaaagaaaaaagataattatcaacgactgttgttgttcttgctgttcttccctaggctgaaacctcacactggttcaaagcggctctgctcaggagggct

SEQ ID NO: 88509 - DNA, 600 bp, Chicken  19866894393475_3
agatacgtttattttgtagtttccctgctcaccctcctttctctttggtacacttgtttgtcagccaaatcagcttatttaaggacgccgaatgggacaaacaatgcaggcagctctgtgcagcacttcttatcagaaacrcctcgtaagaactgcatcacatccatccactcacttgaaacagcacctgttattccaaccaygtgctccttgctgtatggcccaaatacactcaagtacaccaccacgacctgtttgatggctctgcctgcccatcaggagagctcagcatggggtccygctggtggttggttatggacatcacatttctgaccccacgtttcccccacagacacagccccactcttctgctaaatgtttaaatgctgctgcagcagcttgggaaagaaaaaagataattatcaacgactgttgttgttcttgctgttcttccctaggctgaaacctcacactggttcaaagcggctctgctcaggagggctcctgtttgattcaagcctgtagggccattccaagctgtacaccagacaaataacgtggatcaaaatgcaactctttaagtgcagttaagattgtaca

SEQ ID NO: 88510 - DNA, 600 bp, Chicken  19866894393479_1
ggctgcacattaaagagccttttgtttcccagctctctgctggaatacggaggtttatgggttatctctagcaagctgggcttgaaatactcaacagatgccagctgtgaatggctgtggattcaaatgagagtgtcagacggcgactgcagtttaattaaaacagaacaattctaagggttttttgttccctccaccgttccccctctgccttcccacaggaactgggccagggttgctcctcactccgtgaagcctcactgctgccgacagcctgcacagctctgcagcatgaacggmggagcaaggggcactcggtgccatggctgcggcactgctggagctctgcccagctccccgaagtccccacccacccgtgctcatctccccgcatcgctctgcccatgctgctttgagacgtccccagccatgaacgtgtcactgctccctgtgcccgttcagcccccgcaggaatgctcacagcagtggctggccccaggcccactcgtgtggaggaaggagtcctctttcactggggaaagcacaacagccacaaacgtgctgaaaaggcacagagagggttccgagctgcgtttgagt

SEQ ID NO: 88511 - DNA, 600 bp, Chicken  19866894393487_1
ataatgagttgtaacataaataagattttgcttagatatataaataataaccacttcaccgttcacacagcaagatgatgggaaaggtgcagattgatttctgtgaagatatcaaatagttgcactcagaatgtagactattcagcaacagctccaagttgagaggaaatacgattcaaagtgaagtaactttacatcaggctgttaagttatcagtgcttatattatggaacaatacttaaaaaaaatcaaaagtatttaacatcttaggaataaacttagaattaaggtttttagttrcaaagggaaattgaaaagaattgctgtagctcatgattttacaagatataaaccacttgctcataaatgcaatgattctttaattagacttataaaaatagtttaaacagtagtgtttggcaaaggcagggttttttttttgttgttttagataaatgtcatatttatcccaaggcacagactggaaaagtaaccagaactgttttttttccttagtgagatggtgtcggtgtttggtggtggtcaaataggttgtccactaaggaaatggtttctagtttctttagctaccactagaaa

SEQ ID NO: 88512 - DNA, 600 bp, Chicken  19866894393493_1
ttgatgaggtcagagctcctttcagtgtggagaaggagcttcgttttatttgtgtcactcagcatttggggatgaagtgggaatgaggataatgccgcattctgggctgtggtggtgtggtagaaatgaatttgttttcaggctccagccccttcccctgcgaagctcagcacgggtgctcggaatgcatttagctgtggtttggccttttggttgaactgtagtgtccattgcagctgggaaaaccttgctggggacaagcaggagggaagcatgaggatgaggatgtgtccgcgcccwtccattcttggctggaatggagcagagcaygcagtgctggaggctgccatgaacagcacagccctgcaaccccgcggatggctctggggcatcatggctctgtccttcagtgcacaactgcttgcttgaaagcacttttttgggggatgcatttttaccctctgcgatagtggaagggtgggcgttgtttggcccacgtggagcaaaaatgcctgcaggattcccactgcttacggaaaaagggcagcgcacggagtaggtgttaataactcacccaaatccagacccttctccctctcc

SEQ ID NO: 88513 - DNA, 600 bp, Chicken  19866894393493_2
agaaggagcttcgttttatttgtgtcactcagcatttggggatgaagtgggaatgaggataatgccgcattctgggctgtggtggtgtggtagaaatgaatttgttttcaggctccagccccttcccctgcgaagctcagcacgggtgctcggaatgcatttagctgtggtttggccttttggttgaactgtagtgtccattgcagctgggaaaaccttgctggggacaagcaggagggaagcatgaggatgaggatgtgtccgcgcccwtccattcttggctggaatggagcagagcaygcagtgctggaggctgccatgaacagcacagccctgcaaccccgcggatggctctggggcatcatggctctgtccttcagtgcacaactgcttgcttgaaagcacttttttgggggatgcatttttaccctctgcgatagtggaagggtgggcgttgtttggcccacgtggagcaaaaatgcctgcaggattcccactgcttacggaaaaagggcagcgcacggagtaggtgttaataactcacccaaatccagacccttctccctctcccccaaatccaccgagccgctcacacgcccg

SEQ ID NO: 88514 - DNA, 600 bp, Chicken  19866894393495_1
agaagctcttcatcagattaccttttaattctttatggaagttaaacacataatattcttcctaagaataagggtagaggtgtactcagcataggcagcgacagaacgaagtgctgcagcatgatgtggaagatttggtaaatatgctgtccaatgctgtccagtttagtaatcatattttttttattattggcaacttcctttatttgttgaagtaagattttgtatcaaaacagagaggaaagacggacagtgctaaaacacctgatgcagttctacaggcaacagaagattacacasattttcttgaagtttcccgacttctcctctaggtttgtgttacgtgtacttcagggcagatctaccctgagaaaatgtgggtaagcatccttcactctcctgtctgcccctgcccacccagggaacagtgctgtggctctgcacaggctcctttagcagcagtgccaactgcagcatctccaggtccctgtctaactygcttggggctagttgcccctgctcacgtttgactggcatgggcatttgtgtagccactccaaacaggtggtttatttcggagactaaactcagctggaagtg

SEQ ID NO: 88515 - DNA, 600 bp, Chicken  19866894393495_2
tcctttatttgttgaagtaagattttgtatcaaaacagagaggaaagacggacagtgctaaaacacctgatgcagttctacaggcaacagaagattacacasattttcttgaagtttcccgacttctcctctaggtttgtgttacgtgtacttcagggcagatctaccctgagaaaatgtgggtaagcatccttcactctcctgtctgcccctgcccacccagggaacagtgctgtggctctgcacaggctcctttagcagcagtgccaactgcagcatctccaggtccctgtctaactygcttggggctagttgcccctgctcacgtttgactggcatgggcatttgtgtagccactccaaacaggtggtttatttcggagactaaactcagctggaagtgcggaatgaggtagggactacctaaactgataatgtcagtgagagaaatgcttggattaagtgtaccagcattgccctgtgcactaggttaaggcatgtaaggcaggaaatacactccaaactgaggaaagtcaccgactatgaaacaatatcccacgggcatttctttgggcagcagagttgccttttttttttttcc

SEQ ID NO: 88516 - DNA, 600 bp, Chicken  19866894393504_1
gttagaattgcacttgactaaataataattgaaaaaagatttgtagtttgtaagatgaaacactagattatgagccttaataatgttttatggcacattaagaggtagtctcattaaagagactctgatcccacaaaaagtgagtattttaatgttttctattgtaacgttgttcaatttgtagcagtgaagtgacttatctcttatttatgtactttatgttctgagggatctttataggtttatttgatttaggtttgtaataggtgatatgtatctgtctagatttaaattcctatrgtattaaggtgtgaattagtcctctggacttcaataataagtcttcataggacataagcacttctacagtaaactttatctaaagtatgcatttaaattagggcatgtggattgcaggctagatgtgtttgtgtctttctgtgtgctgtaacactcatctagcttacaggcaaataataaatgaaaatgtctatggccaggtgaaattactgtcttatcttactgtggtcccatacataagccagctggacatacatgggatggggtaggatgcattcaagcatgccaagagaactcacc

SEQ ID NO: 88517 - DNA, 600 bp, Chicken  19866894393516_1
ttccataagctaaataaacacagctccctccacctctccacagacaccacatgatctgatcacccaacaccgctggtggcccctctctggacctcctccaggctgccagcacctttcttgcgcagcaggactctaaactggatgcgtggttttgtgagtgatgaaaagaggcaacaaacacttccgtgatttatgccacggccctgctcacatagcacagcatatacatacagccatccccactcccatttgacttagtgtccaacagacaaaggtgtaactccccataacaagtccagsgtaggttctgagctccacaggaatactctgtatccaacctaagtgtgatttatgttatttcacacctaacactttaccaaaggtagtggcactgaaaaggggatggttgacactgtctcagagcacaacaaagtacaggcatgcccatcacaggcccaaggcagttcctatgcgctactaatagagccattttggtctgtcccactttagaactgcctagtgtcagcccagttaaagttacaaaatcaagtacgctgctttcttgaatcaccagcgacatcctctgattagggcctcccg

SEQ ID NO: 88518 - DNA, 600 bp, Chicken  19866894393516_2
catgatctgatcacccaacaccgctggtggcccctctctggacctcctccaggctgccagcacctttcttgcgcagcaggactctaaactggatgcgtggttttgtgagtgatgaaaagaggcaacaaacacttccgtgatttatgccacggccctgctcacatagcacagcatatacatacagccatccccactcccatttgacttagtgtccaacagacaaaggtgtaactccccataacaagtccagsgtaggttctgagctccacaggaatactctgtatccaacctaagtgtgasttatgttatttcacacctaacactttaccaaaggtagtggcactgaaaaggggatggttgacactgtctcagagcacaacaaagtacaggcatgcccatcacaggcccaaggcagttcctatgcgctactaatagagccattttggtctgtcccactttagaactgcctagtgtcagcccagttaaagttacaaaatcaagtacgctgctttcttgaatcaccagcgacatcctctgattagggcctcccgcaagcaaacagctcaacctgccctccttgtctgatgtgttccgacagct

SEQ ID NO: 88519 - DNA, 600 bp, Chicken  19866894393516_3
atgatctgatcacccaacaccgctggtggcccctctctggacctcctccaggctgccagcacctttcttgcgcagcaggactctaaactggatgcgtggttttgtgagtgatgaaaagaggcaacaaacacttccgtgatttatgccacggccctgctcacatagcacagcatatacatacagccatccccactcccatttgacttagtgtccaacagacaaaggtgtaactccccataacaagtccagsgtaggttctgagctccacaggaatactctgtatccaacctaagtgtgatstatgttatttcacacctaacactttaccaaaggtagtggcactgaaaaggggatggttgacactgtctcagagcacaacaaagtacaggcatgcccatcacaggcccaaggcagttcctatgcgctactaatagagccattttggtctgtcccactttagaactgcctagtgtcagcccagttaaagttacaaaatcaagtacgctgctttcttgaatcaccagcgacatcctctgattagggcctcccgcaagcaaacagctcaacctgccctccttgtctgatgtgttccgacagctg

SEQ ID NO: 88520 - DNA, 600 bp, Chicken  19866894393519_1
gatataagtactattgatatctcctacatctttaattatattttttttcctagcttcagatccccaattcctgtacttaccacctttcctccaagtgaaatatccaatcatctcataattcaatgagaaagtgtgactagaacggagcctaagaacttcactcctacagaatttcaattatctctggtacacgaccagatgtacgcaacctattattgagtataaacattctattcatttccctctgccaaaattatttgcatcaagaaatcatatgggaaagtggatctcctaaagagrtgctttgattttcattttgatgaaaagcactgaagaacagcaagaagtgaaactgtcagcactatacaaaatagagaatcgtattcagaaatgtatatatttttagtggagtttccattaaattcacgttggcataaattgctgccgatcagatagttactcactgctgactgcagaaacacaggttccctgcaattagagtatcctattggcagctcggtaaaatgtttaagtgtatgcttaaattcatgttctcagattgtgtccatataaagcgtggaataagaaattgttttcagc

SEQ ID NO: 88521 - DNA, 600 bp, Chicken  19866894393519_2
aatagagaatcgtattcagaaatgtatatatttttagtggagtttccattaaattcacgttggcataaattgctgccgatcagatagttactcactgctgactgcagaaacacaggttccctgcaattagagtatcctattggcagctcggtaaaatgtttaagtgtatgcttaaattcatgttctcagattgtgtccatataaagcgtggaataagaaattgttttcagcttttaagcgtggagtaaatgctacactgattcaaagcctgaaattaagatgtgacacccccattttgawgctagctgtagttaacgcttcrttaatgtttttcactcctggtgcatttaagcttctttctgtgascctcaaaccataacatttcattctcatacacgttttattttcatctatttatttctcattatacacgtgcacatgtatatggataaatctctgtaagccgccatctatttcaagcagtctataccaaagcccacacacctgtttggcagtgcaatctgtttgtaaattggctgtgatgtgacatggcaattgcataaccgggacttgagctggcatgactgtgggagacgaggg

SEQ ID NO: 88522 - DNA, 600 bp, Chicken  19866894393519_3
tgtatatatttttagtggagtttccattaaattcacgttggcataaattgctgccgatcagatagttactcactgctgactgcagaaacacaggttccctgcaattagagtatcctattggcagctcggtaaaatgtttaagtgtatgcttaaattcatgttctcagattgtgtccatataaagcgtggaataagaaattgttttcagcttttaagcgtggagtaaatgctacactgattcaaagcctgaaattaagatgtgacacccccattttgawgctagctgtagttaacgcttcrttaatgtttttcactcctggtgcatttaagcttctttctgtgascctcaaaccataacatttcattctcatacacgttttattttcatctatttatttctcattatacacgtgcacatgtatatggataaatctctgtaagccgccatctatttcaagcagtctataccaaagcccacacacctgtttggcagtgcaatctgtttgtaaattggctgtgatgtgacatggcaattgcataaccgggacttgagctggcatgactgtgggagacgagggaggaatggcagggttacaaata

SEQ ID NO: 88523 - DNA, 600 bp, Chicken  19866894393519_4
aaattgctgccgatcagatagttactcactgctgactgcagaaacacaggttccctgcaattagagtatcctattggcagctcggtaaaatgtttaagtgtatgcttaaattcatgttctcagattgtgtccatataaagcgtggaataagaaattgttttcagcttttaagcgtggagtaaatgctacactgattcaaagcctgaaattaagatgtgacacccccattttgawgctagctgtagttaacgcttcrttaatgtttttcactcctggtgcatttaagcttctttctgtgascctcaaaccataacatttcattctcatacacgttttattttcatctatttatttctcattatacacgtgcacatgtatatggataaatctctgtaagccgccatctatttcaagcagtctataccaaagcccacacacctgtttggcagtgcaatctgtttgtaaattggctgtgatgtgacatggcaattgcataaccgggacttgagctggcatgactgtgggagacgagggaggaatggcagggttacaaataactccatcccatgtgtgggttttttggggttggttcagtctatt

SEQ ID NO: 88524 - DNA, 600 bp, Chicken  19866894393520_1
aaacaattcaccatactgtttacttcttgtcatccttatttgatggtaggagcaaacttccagttaatacaaaaagtacagagtcactactatgaaaatagtatcacacaaattttaacttgtgttctttagcaatgtgcatgattttaattatgaacgacaaactaattttttttttccattctaaatgcctgaaaatcatgcaattgagaactgttgactgaagtctttagtcatggagagttaatacaaaacacaaatgacctgcttgcaaccaaatgttttgcattacacttcagwcttaatgaatgtattaaatattagaaagcatacaatatacaacctaatcataaatatgcaggtaatctgcatgatgctaccgacttgcacaccagtctctgtttcaagtgcccagcaaaacaaaactagatcaactggtgatagataaacagtccttattaacatcaactttcaaaaaaaaaaaaaaaaaaaaaagctttagtcccactacataattaatcatctaggcttttatctgcttcctaaggaagaacgtctcatgatttcagaactgtctagcattttaaattataatctttt

SEQ ID NO: 88525 - DNA, 599 bp, Chicken  19866894393521_1
  misc_feature (1)..(88): n is any nucleotide
nnnnnnnnnnnnnnnnnnnnnnnnnnnnnnnnnnnnnnnnnnnnnnnnnnnnnnnnnnnnnnnnnnnnnnnnnnnnnnnnnnnnnnnnagaatagttacttagaaaataaagtgaaaaagtaaaggacagaaagagatccaaagggataatggctatatggaaaaagagaccaagagaaccctggagaaagaggaaagttaccagtcttttcttaaaatcttgttaggaaaagaacaggaaaaaaattgtgaatacagaaattgttattgaagtttgcttgaaagctttgagcatgaatrtgaaagtagaactgtcagtgtaatagaatcaaaaattgcttygtcaagcagggatacaggaatcatagaatggttcaagttagaaggtcatctagtccaactccctcgtaatgaacaaggacacctacagctagtgcaagtgctcagagttcagcctgaccttgaatgtctccaaggatgggscttctaccacccctgtgggcaacctgtgccagtgcctcaccacccttactgtgaataacatcttccttatgcccaagctagatctcccttcttttagtttggaaccgtttcccctt

SEQ ID NO: 88526 - DNA, 599 bp, Chicken  19866894393521_2
  misc_feature (1)..(46): n is any nucleotide
nnnnnnnnnnnnnnnnnnnnnnnnnnnnnnnnnnnnnnnnnnnnnnagaatagttacttagaaaataaagtgaaaaagtaaaggacagaaagagatccaaagggataatggctatatggaaaaagagaccaagagaaccctggagaaagaggaaagttaccagtcttttcttaaaatcttgttaggaaaagaacaggaaaaaaattgtgaatacagaaattgttattgaagtttgcttgaaagctttgagcatgaatrtgaaagtagaactgtcagtgtaatagaatcaaaaattgcttygtcaagcagggatacaggaatcatagaatggttcaagttagaaggtcatctagtccaactccctcgtaatgaacaaggacacctacagctagtgcaagtgctcagagttcagcctgaccttgaatgtctccaaggatgggscttctaccacccctgtgggcaacctgtgccagtgcctcaccacccttactgtgaataacatcttccttatgcccaagctagatctcccttcttttagtttggaaccgtttccccttgtcctattacaacagaccctgctaaagagttcgttcccttat

SEQ ID NO: 88527 - DNA, 600 bp, Chicken  19866894393521_3
ggagaaagaggaaagttaccagtcttttcttaaaatcttgttaggaaaagaacaggaaaaaaattgtgaatacagaaattgttattgaagtttgcttgaaagctttgagcatgaatrtgaaagtagaactgtcagtgtaatagaatcaaaaattgcttygtcaagcagggatacaggaatcatagaatggttcaagttagaaggtcatctagtccaactccctcgtaatgaacaaggacacctacagctagtgcaagtgctcagagttcagcctgaccttgaatgtctccaaggatgggscttctaccacccctgtgggcaacctgtgccagtgcctcaccacccttactgtgaataacatcttccttatgcccaagctagatctcccttcttttagtttggaaccgtttccccttgtcctattacaacagaccctgctaaagagttcgttcccttatttcttatagacccgctctttctctatagaaggaggagtagttcataaactttgggagcttggaggcaaagagaagcaaggcagtggccagaaagttaaggaagataaagacctctcaatgcatgcaaagggatataaaggca

SEQ ID NO: 88528 - DNA, 600 bp, Chicken  19866894393536_1
ttcccttgggagtccattccacatcacagtgtgaattccatcacactgcgttttcaggccatgaagtacaaactcttaatcttttccaaaatgtgaggttataacattgtgattcctatgggttatgtcttcttaaaactttcctcttttaacatttgaaagtgctacctagtgtaaagcttttaaaaatgaacggacagtactggaactaaaatgctgtgtggcatacagagaaggttgcatttggaatgctgtaggaccctcacctcggagttgacctttgctacatgggctagaccwtaccctccatgtaggtgttgtagttgctggaagctaggtctctgtaaggtctctaagactgttttcaagaaaaatagctgctgtgtttgttactccatagaacgaaaaggctgcaactcaggctaagcacaagaaaatcttaaacatgccccagtcactcagtgttttttttcatttatctttctgtggagggtgctgtcataagacttgagggatgagatgttaggctacatgcaaaaagtggtcatttttatctcacagggatagcttgctatggagtacttcagatcagacttgaag

SEQ ID NO: 88529 - DNA, 600 bp, Chicken  19866894393540_1
ccctctcccagctaaatttaattcaggcatttaaaattgatatggtgaggtatttcccaacctcaagtaccgtttgccttagcaaacaatcagaaacaatgttcctgccacctctctggtgctgcatttacagtcttgaatgcaacactgtcaggtaaaaaaatatagtatatttcctttagcaatgcattcacatggctaataattctctcttctattatttatcaggttattactactattatgaggattatagctatgggaaaatactcttgctagagacaaaattaagtagacctwgtgatattaggaaaagcaggggtagagtctgttttcctccatctggtgagctttgcccatgcactgcaatctcccttgcatttctgcagactgctgtattttattttctgaatgagaaaattgacaacaagtgtcagaaaagagctacagtatcaggacaaataaaacaaaacggagaatgaggtgctctcagaagagattttaaacttctgttactacacttcttcatgtcctgtgtagtttgacttcctggatcaataaagatcattctgctctctattctgttcctctgaaaaaata

SEQ ID NO: 88530 - DNA, 600 bp, Chicken  19866894393540_2
ttgccttagcaaacaatcagaaacaatgttcctgccacctctctggtgctgcatttacagtcttgaatgcaacactgtcaggtaaaaaaatatagtatatttcctttagcaatgcattcacatggctaataattctctcttctattatttatcaggttattactactattatgaggattatagctatgggaaaatactcttgctagagacaaaattaagtagacctggtgatattaggaaaagcaggggtagagtctgttttcctccatctggtgagctttgcccatgcactgcaatctwccttgcatttctgcagactgctgtattttattttctgaatgagaaaattgacaacaagtgtcagaaaagagctacagtatcaggacaaataaaacaaaacggagaatgaggtgctctcagaagagattttaaacttctgttactacacttcttcatgtcctgtgtagtttgacttcctggatcaataaagatcattctgctctctattctgttcctctgaaaaaatatcctgtgagtgtttaccatgagctcaaaatgacaaaaagtaaagacatctcaattagggcccttctgggtaca

SEQ ID NO: 88531 - DNA, 600 bp, Chicken  19866894393544_1
tgcttgttcttgattgttaatgaataatgctgaattatccatgaaatgctaaatggcaccatgatctcatcgggcattaaccagacatgagacaagcttagcaaccatccaaacacacggcccaacctggagaatgtctcacaccaagagggtctttctcaagaagcaagaaggctgaattcccagccgggcaggaaataaacctcttgatgataaggccatcagcactgggagagatgaaaagggttgggattgaagtggggctgcatgagttgcacttgggatctcactctgcagatkggaaaactgaaaacacatggtggtttgggcccaaggctgtgtaatgagcccaggagttcctggtgccctcatctggactcagaccaatggagaaccccttcttgggtttcctcacccaatggaacatgctttgtcttgggtttcctgtccccaggcatwagctgctggtgctcccaaatgggcaccccacctctagcagtgcatctctttcaaactgcatttccaccaacatatcacagcaaagggtcagcactggggaaactgaggcacaggggggtcagacctgcccaagaccagaag

SEQ ID NO: 88532 - DNA, 600 bp, Chicken  19866894393544_2
caagaagcaagaaggctgaattcccagccgggcaggaaataaacctcttgatgataaggccatcagcactgggagagatgaaaagggttgggattgaagtggggctgcatgagttgcacttgggatctcactctgcagatkggaaaactgaaaacacatggtggtttgggcccaaggctgtgtaatgagcccaggagttcctggtgccctcatctggactcagaccaatggagaaccccttcttgggtttcctcacccaatggaacatgctttgtcttgggtttcctgtccccaggcatwagctgctggtgctcccaaatgggcaccccacctctagcagtgcatctctttcaaactgcatttccaccaacatatcacagcaaagggtcagcactggggaaactgaggcacaggggggtcagacctgcccaagaccagaagcaaaccctgcagcaggggtgggcattgcagctgaaataatccagtttaatcacaaaaccgtttctccctccgccctaggagcctggtgtgcttcattccctttcccagcaaagcaagcacgagctgtaaaatcaggatggtttacagttatctaatcat

SEQ ID NO: 88533 - DNA, 599 bp, Chicken  19866894393563_1
  misc_feature (1)..(150): n is any nucleotide
nnnnnnnnnnnnnnnnnnnnnnnnnnnnnnnnnnnnnnnnnnnnnnnnnnnnnnnnnnnnnnnnnnnnnnnnnnnnnnnnnnnnnnnnnnnnnnnnnnnnnnnnnnnnnnnnnnnnnnnnnnnnnnnnnnnnnnnnnnnnnnnnnnnnnnatttgcacacacataaatatatataattcttacatggatacatcttgcaccataaatacacctaaattagtatttctcttccatttccatggaagttgtgcttcagtgaggccccactgcatggtgctcacagactctctccccatctaycccatgtcccataaccttgagaagcaaacactggaggaaaagggaaaacaagaaagaaaaatgctcctttcctttgtcagtctggctgtggctcagaaccgttacagagaggctgtgcactcctgaatgctaaataagctcccaggctacagactttctctcagcggagcttaaagagagatctcactcagcacagggaccagttggcatggcaacgcagaaaaaaggagccagcaagacctggcactcctgctgtagtggcagcagactgtttgcatgcctcgtacttctgtaaatga

SEQ ID NO: 88534 - DNA, 563 bp, Chicken  19866894393563_2
tggctcagaaccgttacagagaggctgtgcactcctgaatgctaaataagctcccaggctacagactttctctcagcggagcttaaagagagatctcactcagcacagggaccagttggcatggcaacgcagaaaaaaggagccagcaagacctggcactcctgctgtagtggcagcagactgtttgcatgcctcgtacttctgtaaatgatgtgttggtacctgcctcccctctgccaaggctgggacacagctgtctgcaggggcaaggagggacgcctggctgctggggctgcgggragccaggccaggcagggcactgagccatggaaaaagtgggaggaaaggaacagcaaagcatgtgagtgagaggggtaatggttaatgactttagctcttgtgcaccgtgtgcaagaccctgcaggctgacaactgcctgcacaaagagtgaggggctcaaaatgaggcaacagtgtccacccaccggctgctgcctgagaacctgctgcttcctttgcaaggtgactttgggaaaggaagttggcacttcagctctgcctcaa

SEQ ID NO: 88535 - DNA, 600 bp, Chicken  19866894393570_1
aggtgtaagagaaagaccttttcttaatagttcttatataagttacttaagttctaacagaaattaaatattgaatgagctcccatgaagcgccccacttccagtttaaaaataacaatgtttttttcacttagggatagcgctgcggtggccatcaaaacataccagcaattaactcagcatgtaaccaaaaagacctaaaaggcattgcacagagctaattgtttgtatacatcggatgccagcaggaaatgaaatgatctttagatgcaatctgaattggcaggcagtgaatgaatrgtagaagacataagcacttggtgtgtcaattatctgccatgtcattcattatcctaattaatgtcatccaaaatgcctatgtctaccacaaggcatatttcagcctctttatagaaaattccctgctgcccagtgctagttaccagtcatgctatcaaccttggacttataaaaagaaatagagcggaattaagaaccacagaaattgctcatttactgtttttgtttttcttgtgtcaatcattgtaacaaaaacggttaaaaatctgcaatttcctcaaggaagttagacgatctccc

SEQ ID NO: 88536 - DNA, 600 bp, Chicken  19866894393578_1
aattatttgtcctataaacaatttgatacttgtttatagatgccctggattcagccaagacagtggtaatagcaaaccagaatcttggttgttactgaatgattggagcacacatgggaacagttgtcaccttcatccatctgtagcaggggtgggatagagccaggataggacgcctaaattaggctaaggattattccattccacctgacattgagcagaaggtcataaagctgtgagcagccactgctttggggttgctgaggtgagatcttgtgttattggtaggtcattatattrttgctgtgaggtaattatctatattgtggatctgtgtgtgtgtatacatacttttttttttctttttgcttatatatatataagcaatatatatatattgctttcatttttctattctgcctttgtaaatagtttctatctcaatctacaggttttattttgtttcctgttctctcctattttcaatttggatgggaggagtgagcaaacaaatggctgtgtagttgcctgctgggttaaatcataataaacaatttctaagctacccgtgaatgtttccctgacacttgcatcatggtt

SEQ ID NO: 88537 - DNA, 600 bp, Chicken  19866894393581_1
taacgtgaagaagctatgactgcctgaagaattttcagcaaaagtcataaaattatacttgacataaacttgaagtggttaacatgtcatctctttaagataaaaatgaacaaccccttttccacaaacacctgaacagttggtgctttttaacacttgcagcacttaaatggctcatcacttgtaggaatgcagtagcacaaatgtaggatttcaataaagataaacttgctttggaagaaactggatgcgatactgtttgttaaatagaaaatttatttttaggtttttactgtcttraactcagtacaatgtttgtacataaatattacgaactaatgtataaagttaagtagtgttattaaatctacgtttgaattctttcacagtgagttttcttttgtctttagtgttatttggttgtcagtgataaggctcgagatgcggctgctgtgctggtttcaaagtaagtccctactgtgcttgatagaaagagaaaaagctatctcccttttcctgtgtcatttttgagtctgatggaccagtaatgatagcactgggaggacagaaagttgtcaactgtatgtgagacgttgaacc

SEQ ID NO: 88538 - DNA, 600 bp, Chicken  19866894393581_2
agtgataaggctcgagatgcggctgctgtgctggtttcaaagtaagtccctactgtgcttgatagaaagagaaaaagctatctcccttttcctgtgtcatttttgagtctgatggaccagtaatgatagcactgggaggacagaaagttgtcaactgtatgtgagacgttgaacctgcttgaatcatatccaataggctgttcattactggagatgtgttttgtgctagaaaaacagctatccatcacaagtgttactaaaagttccttatggctagcagaattctcttcaaattgctayggagtttggaaatgaagaagttacactgtgttgctgcttagttttgtagcattgtgcatagtaaattggcagatgctatgttaagggctggttgtttactacagatacctaaaaaggaatgttaatgctagattcttttcttaatatccctactatctcttcactttcttgtccagaaaacagtacttctattttcattggcttgttatcaattaattaatcaaataaaaccaagcataatgggagttcctgaatccaattgttttacaaggattggtgttcaggcaacaaaccatttga

SEQ ID NO: 88539 - DNA, 600 bp, Chicken  19866894393587_1
atttccattcttctcataagaaaaggcaatgcagccacagcttccctcctcacattaagttttcagaaggaaagtcagttcccctttctctggctcctcatagcggcatttttctggctccagcaacctaataggttgattgctgagcctcttctgtttcaattacttttgattgattcccaggtctgtgtcagccactcagtgcagccaccatcccaggaacaaatctgcagtggctgaagatgaaaatagctcccatgaccagctaggaggggagttcaagcatcttttctaagcatraggttgccatagccatccctccaaattttctccctggccaggcctggtcctgatgaggttcctgttccttacagctcastgagctgtgcttagcctcagccatggctggggaggagggtgaaaggagctttaatatcgtcaagcagctcaacttgcggctgctggagggcatggctgttacccccaggagatgagctgtggcctggcagaagtccctctgggtttagggagtrgaggggratggggagaggtgggcacagagcccgtaagattagtcctggagacttggtttgtggttcc

SEQ ID NO: 88540 - DNA, 600 bp, Chicken  19866894393587_2
tcccctttctctggctcctcatagcggcatttttctggctccagcaacctaataggttgattgctgagcctcttctgtttcaattacttttgattgattcccaggtctgtgtcagccactcagtgcagccaccatcccaggaacaaatctgcagtggctgaagatgaaaatagctcccatgaccagctaggaggggagttcaagcatcttttctaagcatraggttgccatagccatccctccaaattttctccctggccaggcctggtcctgatgaggttcctgttccttacagctcastgagctgtgcttagcctcagccatggctggggaggagggtgaaaggagctttaatatcgtcaagcagctcaacttgcggctgctggagggcatggctgttacccccaggagatgagctgtggcctggcagaagtccctctgggtttagggagtrgaggggratggggagaggtgggcacagagcccgtaagattagtcctggagacttggtttgtggttcctgcttttactgaaggagcaatgggagagggaagggaggaaaagggagctgggaaaaggagtgggggtgatggcaactgg

SEQ ID NO: 88541 - DNA, 559 bp, Chicken  19866894393587_3
tggctgaagatgaaaatagctcccatgaccagctaggaggggagttcaagcatcttttctaagcatraggttgccatagccatccctccaaattttctccctggccaggcctggtcctgatgaggttcctgttccttacagctcastgagctgtgcttagcctcagccatggctggggaggagggtgaaaggagctttaatatcgtcaagcagctcaacttgcggctgctggagggcatggctgttacccccaggagatgagctgtggcctggcagaagtccctctgggtttagggagtrgaggggratggggagaggtgggcacagagcccgtaagattagtcctggagacttggtttgtggttcctgcttttactgaaggagcaatgggagagggaagggaggaaaagggagctgggaaaaggagtgggggtgatggcaactggttccttacagaaacagccatcctctgcagttgctttgtgtgcatctgagtcttaacagcagcagcagcctccagccttcaggctggcagaggcaaaggagcagcgaggacaca

SEQ ID NO: 88542 - DNA, 552 bp, Chicken  19866894393587_4
agatgaaaatagctcccatgaccagctaggaggggagttcaagcatcttttctaagcatraggttgccatagccatccctccaaattttctccctggccaggcctggtcctgatgaggttcctgttccttacagctcastgagctgtgcttagcctcagccatggctggggaggagggtgaaaggagctttaatatcgtcaagcagctcaacttgcggctgctggagggcatggctgttacccccaggagatgagctgtggcctggcagaagtccctctgggtttagggagtrgaggggratggggagaggtgggcacagagcccgtaagattagtcctggagacttggtttgtggttcctgcttttactgaaggagcaatgggagagggaagggaggaaaagggagctgggaaaaggagtgggggtgatggcaactggttccttacagaaacagccatcctctgcagttgctttgtgtgcatctgagtcttaacagcagcagcagcctccagccttcaggctggcagaggcaaaggagcagcgaggacaca

SEQ ID NO: 88543 - DNA, 600 bp, Chicken  19866894393589_1
tggttttatttttgtgctcaaactggtgattaacagagacacgtcttattactgaagtagtggattgccttggaacatgcttgattcctctcttttgtattcagattcctgcagctggataatattttgtgggaacaatctatcaatgaggggagtgtggctcttagagttgttgactgcacgtaccaacgactgtttcatcttctgtcattatctgatgtcccagagtagtctgcagctgaactgtactgaatagtgtagagtattacctccgggtgctttgcagttcacttccatcayggttcttcatgtaaaagtgctctgcaatgagccatgttccttattctgctagcacagaacagtttgtgctcagaaaatgatctcaggctttaacttgctgatgggaatgctaagaatggaggatttttcctccagatattgcaagttcataccatcttacacctaacacacttgtccccttttctyctttgcaggtgtcagtggtttgtatgactttgggcccgttggatgtgctttgaagaataacatcatccaggcatggagacagcactttatacaggaagagcaaatcctggagat

SEQ ID NO: 88544 - DNA, 581 bp, Chicken  19866894393589_2
caacgactgtttcatcttctgtcattatctgatgtcccagagtagtctgcagctgaactgtactgaatagtgtagagtattacctccgggtgctttgcagttcacttccatcayggttcttcatgtaaaagtgctctgcaatgagccatgttccttattctgctagcacagaacagtttgtgctcagaaaatgatctcaggctttaacttgctgatgggaatgctaagaatggaggatttttcctccagatattgcaagttcataccatcttacacctaacacacttgtccccttttctyctttgcaggtgtcagtggtttgtatgactttgggcccgttggatgtgctttgaagaataacatcatccaggcatggagacagcactttatacaggaagagcaaatcctggagattgactgtaccatgctcacaccagagccagtttttgaagtaaatatgaatctgtctttttacagcatgtcatttctggtcacggttcctttttacagtctgctgtaaaattacccacagggatcttgagaattgggtcacccaattccacattcttttgcaatgcaaa

SEQ ID NO: 88545 - DNA, 599 bp, Chicken  19866894393592_1
  misc_feature (1)..(109): n is any nucleotide
nnnnnnnnnnnnnnnnnnnnnnnnnnnnnnnnnnnnnnnnnnnnnnnnnnnnnnnnnnnnnnnnnnnnnnnnnnnnnnnnnnnnnnnnnnnnnnnnnnnnnnnnnnnnnatgcaaagcgcagccgccggctcccctgtgcttagctgcctttctccgcttctgtgcaacaccccgcgggcccccatcgctggcatagaaagcactccgtacatctccaaacagcccccgggtccgggtccgggtccgggtccggcccaggacggagagccggagcccgcagcgaggctgggcggagggcygtragccggagcgggggtggaaggggggaaactctgcaccccgggagcgacaccgcggggtgagcacggggtgggtgcaggcaacgctcagagcgcttcctcctggctgcggagggccccacgtccccagctcggcgacacggggaccgacggcagtggggttccgaccccctccctcccctccaagcccacgctcccmtaccgggaggcggggagcagagggtggggcctcattttgggtaccccccacccccyttcgccgtgccgcttcggttctcctcccaggccaaaaatatttg

SEQ ID NO: 88546 - DNA, 599 bp, Chicken  19866894393592_2
  misc_feature (1)..(106): n is any nucleotide
nnnnnnnnnnnnnnnnnnnnnnnnnnnnnnnnnnnnnnnnnnnnnnnnnnnnnnnnnnnnnnnnnnnnnnnnnnnnnnnnnnnnnnnnnnnnnnnnnnnnnnnnnnatgcaaagcgcagccgccggctcccctgtgcttagctgcctttctccgcttctgtgcaacaccccgcgggcccccatcgctggcatagaaagcactccgtacatctccaaacagcccccgggtccgggtccgggtccgggtccggcccaggacggagagccggagcccgcagcgaggctgggcggagggcygtragccggagcgggggtggaaggggggaaactctgcaccccgggagcgacaccgcggggtgagcacggggtgggtgcaggcaacgctcagagcgcttcctcctggctgcggagggccccacgtccccagctcggcgacacggggaccgacggcagtggggttccgaccccctccctcccctccaagcccacgctcccmtaccgggaggcggggagcagagggtggggcctcattttgggtaccccccacccccyttcgccgtgccgcttcggttctcctcccaggccaaaaatatttgcat

SEQ ID NO: 88547 - DNA, 600 bp, Chicken  19866894393592_3
agcactccgtacatctccaaacagcccccgggtccgggtccgggtccgggtccggcccaggacggagagccggagcccgcagcgaggctgggcggagggcygtragccggagcgggggtggaaggggggaaactctgcaccccgggagcgacaccgcggggtgagcacggggtgggtgcaggcaacgctcagagcgcttcctcctggctgcggagggccccacgtccccagctcggcgacacggggaccgacggcagtggggttccgaccccctccctcccctccaagcccacgctcccmtaccgggaggcggggagcagagggtggggcctcattttgggtaccccccacccccyttcgccgtgccgcttcggttctcctcccaggccaaaaatatttgcatgctttttcgagcaggacttcctgattgctctctattggctgcaggtagaaagctgtggggagacggaggcacggacagccggacagatctcatgccgtgcttttcttgagcctcttcctcccgctctcctcctcctcctcctcccgccgctgcccggctcccttggctcgagtcctgcgcggcacatgtaaaagttg

SEQ ID NO: 88548 - DNA, 600 bp, Chicken  19866894393592_4
ccaggacggagagccggagcccgcagcgaggctgggcggagggcygtragccggagcgggggtggaaggggggaaactctgcaccccgggagcgacaccgcggggtgagcacggggtgggtgcaggcaacgctcagagcgcttcctcctggctgcggagggccccacgtccccagctcggcgacacggggaccgacggcagtggggttccgaccccctccctcccctccaagcccacgctcccmtaccgggaggcggggagcagagggtggggcctcattttgggtaccccccacccccyttcgccgtgccgcttcggttctcctcccaggccaaaaatatttgcatgctttttcgagcaggacttcctgattgctctctattggctgcaggtagaaagctgtggggagacggaggcacggacagccggacagatctcatgccgtgcttttcttgagcctcttcctcccgctctcctcctcctcctcctcccgccgctgcccggctcccttggctcgagtcctgcgcggcacatgtaaaagttgagcgagagcgtcccgctcccttccgccgctcgcacggaacgggagaggggcagagg

SEQ ID NO: 88549 - DNA, 600 bp, Chicken  19866894393592_5
ccgactcgagggcaaccatgaatgagatgtcgagtttcctgcacatcggggacatcgtctccctgtacgccgagggctccgtcaatggcttcatcagcactttggggtgagtgagccctgtcccggcactgcgggtttgcttctgggggaaacggggaagggaaggtggtgccgaagctgatctgggtgggaagaagggattgaaacccctttacaggtgttggccgtggggaggacaggatatggaatcccctttgcctttgttggttgctgttggggtgtgatttggccctgcaaccyacagcagccgtgggcagaagttattttcccatctttagagggttaaggtggggtcaaacagcaggagggtccgtggggctgtgcacagggctgaccgggatggtttggtggggatggcagcaggagggctcccagcccagccctgagtggctgtaggctgctgtcctggcaccaggcagtgatggtttttgctgcccacctcaagtgctggaggggctggggggagcagggcacgggcaggtcccggctgagctgtgtccttgcagcccccaggcacactggaacaggaggggatcttgc

SEQ ID NO: 88550 - DNA, 600 bp, Chicken  19866894393592_6
ggctgaccgggatggtttggtggggatggcagcaggagggctcccagcccagccctgagtggctgtaggctgctgtcctggcaccaggcagtgatggtttttgctgcccacctcaagtgctggaggggctggggggagcagggcacgggcaggtcccggctgagctgtgtccttgcagcccccaggcacactggaacaggaggggatcttgcagcccgacctcagggacctgtcccacgtccctgctgctttcatgctaaaataacactggagcgaaacccctgggctgcacatagcagracccaaacctctcctgcatccctgagcatcaagcctgatgctgcttttagtacgtgggtctgcgccagtacttgccccacggtacatgtaggagaggctgagatcaggcaggaatgcggacttggataggattcctggggcaggagctgcccggctctataatctgtgctgaatgcacttgctcccacatgcctgtgtagaactggagacgtacatacgtcgcctacacgtgtacgcacacccactgcggggcacacgcagcctctcggataatgcccgctggagccatgccctggccag

SEQ ID NO: 88551 - DNA, 600 bp, Chicken  19866894393592_7
gggtctgcgccagtacttgccccacggtacatgtaggagaggctgagatcaggcaggaatgcggacttggataggattcctggggcaggagctgcccggctctataatctgtgctgaatgcacttgctcccacatgcctgtgtagaactggagacgtacatacgtcgcctacacgtgtacgcacacccactgcggggcacacgcagcctctcggataatgcccgctggagccatgccctggccagcagcaggaggctgcccaaagctgtgctggtgggcgcaggtacaaaaccccgtgcrtgcagctgtgtacggtgctgacgtcgggtcctgcatgtgtgggatgcagccgtgctgtgctcagccctcaccctggggtcccattgggagtggtctccgtggtggggtccgtgtgcttggcgctcagcaccttcccatcctggcggtgagattggaggtggaggagctccagcagagccagcaccgattattagcccacgcagcatgtcccaatggcttgcaaggagccaaacaaagagatgttcgtatactttcaggctccaatccctttgtagctctggctcccttttctgcacgatg

SEQ ID NO: 88552 - DNA, 600 bp, Chicken  19866894393594_1
gttcttctgctgatgtacatcgctggatcagtactgccttgaaaacctgaaaacattacactatgagcacagattaaggcagcgtaggcagtgagatgtggagagaagcagttgtcaccagcacaaaggagtgctggagcttgtagcactgcatcaactttctgcatcttcacacgtgctcaggtatgttcatagctcttctgagttgatcttcacagtagtttccacaaggcctgatgttccacaagtccatgtaggagcactccatctcttacttcacctaccactaggtactgcacyggcttgtatgaattccttgctgccaacttcagcaactgcgtcctgtagcaaagttaataggtttcctgcatgcagaacgactgccaaattccactactttagagtgtaaaagcttcccaggagtagagagcgcatccctctgtgtatgtacagtgccgagcacacagctggtgctcaataaataatgtatgtataggcctggtatgatgtgactgttaatctaatacagctgaggtgagccatctttttgtagtaagaggcagcgctggtctgttttatagtttaggctttaaataatga

SEQ ID NO: 88553 - DNA, 600 bp, Chicken  19866894393597_1
ataatgtactgtgttgaatatgcagacaactcttttgaaagcacttttatttcttaggtgacaggagcctgctgtcttttcctggcaggaaaagttgaagaaacacctaagaaatgtaaagatataattaaaacagcccgcagcttgctaaatgatgtgcagtttggacaatttggagatgatccaaaggtaaaaaatactcacattgaactcgttttcatcctattgtacccagcaacgtgacatgccttaaaacactggttgattttcatttgttgcaagtttcacattcaacttgcrtttgtggctcttttgggtaaaatagtaggtaattatgaaaataattcttgctaatagagatcttgctagtacaagtaaagactacggcagtraatgtttacataaaaagcttatatttgatttcgtgtgagctctggtgttattttgcaatttaaaataaatctggagtcattgtggtcagaggtagaaatgctgtcaggacataaatcacactgggcaggcttaaygtggcttttagaaggaaccaattgcaaatctccagtcaaataagagcatcatctcaaatgttttaaggttcct

SEQ ID NO: 88554 - DNA, 600 bp, Chicken  19866894393597_2
agttgaagaaacacctaagaaatgtaaagatataattaaaacagcccgcagcttgctaaatgatgtgcagtttggacaatttggagatgatccaaaggtaaaaaatactcacattgaactcgttttcatcctattgtacccagcaacgtgacatgccttaaaacactggttgattttcatttgttgcaagtttcacattcaacttgcrtttgtggctcttttgggtaaaatagtaggtaattatgaaaataattcttgctaatagagatcttgctagtacaagtaaagactacggcagtraatgtttacataaaaagcttatatttgatttcgtgtgagctctggtgttattttgcaatttaaaataaatctggagtcattgtggtcagaggtagaaatgctgtcaggacataaatcacactgggcaggcttaaygtggcttttagaaggaaccaattgcaaatctccagtcaaataagagcatcatctcaaatgttttaaggttcctgtttataatacttagcttagcaaaactaagcttctctcaaaattgttgcaaatggtttattgtaaatgcaagaaagatctaaaagtagagcg

SEQ ID NO: 88555 - DNA, 600 bp, Chicken  19866894393597_3
gtacccagcaacgtgacatgccttaaaacactggttgattttcatttgttgcaagtttcacattcaacttgcrtttgtggctcttttgggtaaaatagtaggtaattatgaaaataattcttgctaatagagatcttgctagtacaagtaaagactacggcagtraatgtttacataaaaagcttatatttgatttcgtgtgagctctggtgttattttgcaatttaaaataaatctggagtcattgtggtcagaggtagaaatgctgtcaggacataaatcacactgggcaggcttaaygtggcttttagaaggaaccaattgcaaatctccagtcaaataagagcatcatctcaaatgttttaaggttcctgtttataatacttagcttagcaaaactaagcttctctcaaaattgttgcaaatggtttattgtaaatgcaagaaagatctaaaagtagagcgatatggtagaaggttacctttttattttgtatattggacagttttaagccatatctttttcagttctttgttccatgtaggaaaaggaatttaaagcacagcttctacccttccacctcacataaccgtgaagaa

SEQ ID NO: 88556 - DNA, 600 bp, Chicken  19866894393598_1
ggcaaggttggagagaatattaaacatttcaaaaaatcaaggactgatttacaaagactgagcaactgtggtgagaatttcaaatgagctcatgtcctattcaaactatgattaatgtgtcttttgttcttaaaattaaatgctatcaattttacctttaggaaacgtttctagagaaccaagagtatagcttctccctgtaaagtatcttttaatgttgtaacgataaagtcaggtttggcacggggaatagatggttatgttttatttatctaacatagatttttagcaaggagcagrcacagatcttttaaatattcaatagtttccattctgaatagaaaaatgtaaatattctacctgatttattaaagatgtcaacaaaacaagcataatctaaaaattgcagggatttactcatgactcgcattcattcaagtctcattcctgaatcacaactcataattgaatcaaatgaacttttattagatgtcatgaagactggagtttattctaaggctgttttttctttcattgagacaaatggatatcctgagcactgaggtccagtgtgaagagaaaatagcctcaaaccatgat

SEQ ID NO: 88557 - DNA, 600 bp, Chicken  19866894393611_1
cccttctcagcctgttaacttgatgtggcatgaatgagtttgattgcaagtttgctgctgacttgcaaaagcaggcaccgaggccagaagttgtcactgctgattgaactacaaagtgtgacaatagaagtctctactcacactgtttctcaagtatgaagatctctgccatctctagttcccttcctgagaaatacaaagacaaacagatatggcttcttaaggaaatactcccttattatatatacctggcctctgtcttgaagctgtgctgcttagtgcagttctgttaatccctgyaatggctcacttacagcctgggtacaccacattccccaattcaccckctgctccccatatttcccctggatttgccacgctgtcagagcttcccagcyccctctttcacatcctctatctgcagttgtacaacatgctggctacaccaggggtgagtcatcatctgactgctgtatgtaccagaacagataggaacatgtgtatatagagataagaacatgcgtgtatgtatctctaacagtatatatcagaatatttaattttctgtttaagattgtgcatctcagaacggtagaattt

SEQ ID NO: 88558 - DNA, 600 bp, Chicken  19866894393611_2
aagtttgctgctgacttgcaaaagcaggcaccgaggccagaagttgtcactgctgattgaactacaaagtgtgacaatagaagtctctactcacactgtttctcaagtatgaagatctctgccatctctagttcccttcctgagaaatacaaagacaaacagatatggcttcttaaggaaatactcccttattatatatacctggcctctgtcttgaagctgtgctgcttagtgcagttctgttaatccctgyaatggctcacttacagcctgggtacaccacattccccaattcaccckctgctccccatatttcccctggatttgccacgctgtcagagcttcccagcyccctctttcacatcctctatctgcagttgtacaacatgctggctacaccaggggtgagtcatcatctgactgctgtatgtaccagaacagataggaacatgtgtatatagagataagaacatgcgtgtatgtatctctaacagtatatatcagaatatttaattttctgtttaagattgtgcatctcagaacggtagaatttgagctaagtgggaagcctgcatctttctgatacacagctaaagatct

SEQ ID NO: 88559 - DNA, 600 bp, Chicken  19866894393611_3
gctgattgaactacaaagtgtgacaatagaagtctctactcacactgtttctcaagtatgaagatctctgccatctctagttcccttcctgagaaatacaaagacaaacagatatggcttcttaaggaaatactcccttattatatatacctggcctctgtcttgaagctgtgctgcttagtgcagttctgttaatccctgyaatggctcacttacagcctgggtacaccacattccccaattcaccckctgctccccatatttcccctggatttgccacgctgtcagagcttcccagcyccctctttcacatcctctatctgcagttgtacaacatgctggctacaccaggggtgagtcatcatctgactgctgtatgtaccagaacagataggaacatgtgtatatagagataagaacatgcgtgtatgtatctctaacagtatatatcagaatatttaattttctgtttaagattgtgcatctcagaacggtagaatttgagctaagtgggaagcctgcatctttctgatacacagctaaagatctctcacagaacttgtaggaacttcatgtctttgaaaacagtgcttatcttca

SEQ ID NO: 88560 - DNA, 600 bp, Chicken  19866894393612_1
atacaatatacaggtaagcaattactttatagaaatttttatattaaaaaacaaacaaacaaacaaacacatttttgcaatataaatgaatattttgtgtcccagatttgataaacccaatttttctaatatcctgagtgtttccctccaaatccactttctggcttaaagacaagaaaaactgaattaatcattttgtaattcatatttaataaaaaaggatcctatccaagcagatgagacatggtacactatttttttttagtttctgttgtcttaccttttttctccaactctagraatcttggctaatgatagactattacggagaaaattcagtaaacacwttatatcaattcacactgcatacaaataagccattacaatccataaatcaacttattataaatgattttatatgcagcatgctgaaacatagttcacagggaaaatgcactgcaggatattttagaacaacctactcaatagtgtttgggttgttcagaattaaaattaaaacaataaacttcactctggatgtgtcttcattactaaagccctggatcatttactttaacagtgtcaacctgctctcactat

SEQ ID NO: 88561 - DNA, 600 bp, Chicken  19866894393612_2
aaaacaaacaaacaaacaaacacatttttgcaatataaatgaatattttgtgtcccagatttgataaacccaatttttctaatatcctgagtgtttccctccaaatccactttctggcttaaagacaagaaaaactgaattaatcattttgtaattcatatttaataaaaaaggatcctatccaagcagatgagacatggtacactatttttttttagtttctgttgtcttaccttttttctccaactctagraatcttggctaatgatagactattacggagaaaattcagtaaacacwttatatcaattcacactgcatacaaataagccattacaatccataaatcaacttattataaatgattttatatgcagcatgctgaaacatagttcacagggaaaatgcactgcaggatattttagaacaacctactcaatagtgtttgggttgttcagaattaaaattaaaacaataaacttcactctggatgtgtcttcattactaaagccctggatcatttactttaacagtgtcaacctgctctcactatcacattcaatttaattaggaaaagaagtaatatgcaagagcacacct

SEQ ID NO: 88562 - DNA, 600 bp, Chicken  19866894393618_1
ggcatcagatttgcccagttcatgggtgctggtttgtctcagctagctggactgtactttctcccaggaaacctgcttttatttatacagcaatttaggcaaacaaatgctttgatgataggggaataaaatgttgccattgtaataaatgctttgttttcactctcactactggcattactagcagaaaattctcaagcggtatcgattgtctctccctctgaagtatgaggcatatttgtttccttggaaaaactgtagtatgaaatcatgcccatggagacctcttcttgaactaaygttaccagtaattgggaaaatgatagagagaagactaatacaggggaaacactaggtgggttgatagccacagctgctcacaaatccgtgtgggtttcagtgaatgcttcagctttaaaaatgagatgtagaggactatattttcaaaatacaaaagcatgtaatttcagcatttcaagatgaaatgtttcagctatgctgatacgtgttttttgtaacttttcacaatgcctgcaaacagaaccatttatttcactctaagtacatagaatgtgaaaactgagcaaagctgagagtggg

SEQ ID NO: 88563 - DNA, 600 bp, Chicken  19866894393618_2
gtgaatgcttcagctttaaaaatgagatgtagaggactatattttcaaaatacaaaagcatgtaatttcagcatttcaagatgaaatgtttcagctatgctgatacgtgttttttgtaacttttcacaatgcctgcaaacagaaccatttatttcactctaagtacatagaatgtgaaaactgagcaaagctgagagtgggcaggggagatctgcaacaatgtgacttacattttcactatgaagtaaagcaaagtgaatcatttgcagtgactttggatttctgattatatgttagagyggtatgattaattcagtgctgtctacagggttttatctaatggaaatagcttcccaaatctgttttggttctattattttgctcccttctctcctccccacctcttagttttggtcatagttcaggctctcaaagtgcacagtccattaatgcccgctcctatcccaagcactgttcagtttatcattaaagaggaactcctgtgtatggctcctatattgtaactgttttgccaaactttgattggcatcaggaggtgatgcatgcagactgtaagggtcattattaaacactggttta

SEQ ID NO: 88564 - DNA, 599 bp, Chicken  19866894393631_1
  misc_feature (1)..(137): n is any nucleotide
nnnnnnnnnnnnnnnnnnnnnnnnnnnnnnnnnnnnnnnnnnnnnnnnnnnnnnnnnnnnnnnnnnnnnnnnnnnnnnnnnnnnnnnnnnnnnnnnnnnnnnnnnnnnnnnnnnnnnnnnnnnnnnnnnnnnnnnnngggctccaaatatggagaactttgcatgtatatccaaggacataccccagcacggacaaatcccaaaccagagccggacagatactgtttgtgaatggtttgtttgttttgttaaataacactcactccaaagccttggataactggcacaagtaccagcacygctgttcttaaacaagatggccaatgacaattgttagatgtggtgattaaagaaaatgggtgtcatcctcacaccactctccaggtatattctaagttgtgaatattaaacagtacccttctacagaaagggaaaaatgttacttttaaacagctgggctcagcaagagattggtttccctactgactgtactttccctgcagctctctaagcagattctgtgctctggagtatatccttatagcgctctataaataaatgctactacgtgcacctacttctgattaaattccttagta

SEQ ID NO: 88565 - DNA, 600 bp, Chicken  19866894393636_1
ggatcattaggacgttactgttttctacttcacttagatcttccatcttcatgttatttttccaccactactggcagctttcttcagtttacatgattctgttacttctccgtaagctgaaaccagatgttatttattttttatttttttttgaatgcataaaaagcaagggaacaagaaaaacagaagagggctatttgctgtctctaacatttaatacaagcgattgtaacaaattgaaacaaatgcaggattctggaagaaaagaccaccctaactataaaaagacatgttccacamagagtagtacaaaaaaagtttccttgtttttccactctttctttgaagaaaaggaacggttcggcagcctaccactggaaatgcacattacctgatttctctgagaaagatgttttatgctcttttcactgattagctgaaaccaactgaaaagcagtatggctctgcccccaaattccaggggtcattagtgggtagttgaccattattccacaagttccacttcagaaatacttaacattcacagaatgtaaagatgagtttctgtaacaggttttattccatggatagtggagtcat

SEQ ID NO: 88566 - DNA, 600 bp, Chicken  19866894393643_1
tagggatgggtaaagaaactgagcactatcaacgacatttttccaggtggggaaaatacacattttatctgcgcttattgactgctacctcgtgactaaaataacattggtcttctgcagaatggttctcttttttttctagctcattgggaagcaatgaaggtgccatcaccatctgtcttcagattttagctcactggaacttcttgctcacaagtggaataggatttgggtagctaaaagccacaatgcagggaagtagggcttgactgccccacctgcccatgcctcttccatgckgctgaatgtgccccatctcctgagcagctgtcaggatgtcctgcagcaagcacatgcctacagtagctagttcagagaaaacaaggaattaggagaagaagcacaatggtaggagaaggagacaaaacttttggactgttatacaccatcagatgaatgagaataagtaatggggtcactgtggtagaagacaagcttcaatatgatttctattcatgagactgcttaaggaggtcagtgggccttgctgttgtccccagcaaggagaaaaggacccagcccaaagagctgaatgtgaaa

SEQ ID NO: 88567 - DNA, 599 bp, Chicken  19866894393645_1
  misc_feature (1)..(69): n is any nucleotide
nnnnnnnnnnnnnnnnnnnnnnnnnnnnnnnnnnnnnnnnnnnnnnnnnnnnnnnnnnnnnnnnnnnnntagttccccacctttcttgagctgaggagcctgcaactgtaaacagtattccagatgtggcctcaccaaaggcagagcagaggggaaggatcaccccactggacctgctgcccatcctcctttttatcctcccagcataccactgaccttcttagccacaaaggcacgctactggctcacagccaacctgctgtccatcagaacacataggtccttctccacagagcaccwttccagtaagtcagcccctaacctatactcatgagtgtggttattccttcccaggtgttggattctacacttcaacttattcagtctcatcaggttcctctctgcccggctctccagcctgtccaggtcttgctgaatggcagcactgccttctgctgtgtcagccactgccctctgctttgcaacatcagcaaacttgctgagagtgcactctatccctttcttcaggtcactgacaaagatgttaaagaccagaaccagtactgatccctagagaacacactgatagctacagacct

SEQ ID NO: 88568 - DNA, 599 bp, Chicken  19866894393667_1
  misc_feature (1)..(2): n is any nucleotide
nntgacagagaatctttcctgttagaaaagatgcagaagatgaccctgtagcagatagagataaaagcctgctaacagatacagtttcacagaaatactatgactctgagatttttttacatgtacatcttagccatgtagtaatgaccacaaatggaattctcacctttccagaaagcagcatttacaatgcttgaatatcctaaataataacctttagtcactgctgagggagttctgttccatattcaagcactagcattcacttgtcacacaggctagctgggtcttctaggtaaygtaaaccaccagctcgcttactccctttgctccataaagttatgtctccaggaatagggaatgcacttgttctcttacagctagaaatataaattagcaaaataaatatattcagtagaacagctgaggcacacagtatacattacacttattttgaaaatgaaatcagatgcttatttcactattttaatcaataaaaatcaactggaaaattttcactaagtatgacattttctgtagtattattgcctatcttcttctgagaatggcagctgggttaaatcatagaatcaccaagg

SEQ ID NO: 88569 - DNA, 600 bp, Chicken  19866894393667_2
aataaatatattcagtagaacagctgaggcacacagtatacattacacttattttgaaaatgaaatcagatgcttatttcactattttaatcaataaaaatcaactggaaaattttcactaagtatgacattttctgtagtattattgcctatcttcttctgagaatggcagctgggttaaatcatagaatcaccaaggttgaaaaagacccacaggatcatccagtgcaaccatttgcccttcaccagtggttctcactaaaccatgtcccacaacacaacatccaaatgctctttaamcaccaccaggcttggtgactccaccacctctctgggcagcccattccagtgcctgaccaccctttctgagaagtagtagtatttcctaacgtccagcctgaatcttccctggtgcagcttgaagccattccctccagtcctatcactagtcaccccagaggagaggccgacccccagctcactacaacctcttttctggtcattatagagagcaataaggtctcccctgagtctcctcttctctaaactgaacaatcccagctccttcagctgctccgcataaggcctgtgctccagcct

SEQ ID NO: 88570 - DNA, 600 bp, Chicken  19866894393674_1
attatttgttttagggttttccttttttgtttcaacatatccgtgatggtatcaacatcaggcaaacttgcaatctcatcttcagtttgtgtcggtacaataatagacttgcagaacatgtaagtatcagaaactgcagatgtttgttgaagatgttatctagtaagtgtaacgggatgatttgttatttaaattgaataagcaaaaatctaagtgagttttgtttgttttcttcaagattgtgtccatgcttttcacatctatagcaaagttgactcctgaggtatgtaaacctactamgtgtatattaaataatctgttctaacattcttctgttttaaattgcttaatacgttgctcattaaaaatacagcatagaagatgatccatgaaagtttttgtgacataaaataaagcctaactgcactgtatagtaaattttctggagcagaaatctggtatgcaatttcagatgaaagttttattcaaaaccaaataactcatttctagatttgccacctatgtcaattttataacattgatgaaaaataaaacatgaacactagaataagttgagataaggaattacctctttattgt

SEQ ID NO: 88571 - DNA, 600 bp, Chicken  19866894393681_1
gggttgccataaaggtcgtgacaaaagctttatgtggcatgtgacgttcaaactggggctcagttgtgggtagctggcgttaaaaatggggaatgaatgtactgctgagatgtaccagatgcagaaagattgtgaaaggaaggaaaaaaggccttcaactgtgcattgttgatagtggagaccttggagaggggccaggaagtagaaagattctgtagacacttcagtcctttagtccccattaggaccagacaacctgtccaccccatgccctgtggggacctgagcaaaattacaagrttttatctcttttcttatgggtgttctgtgagataaaagtcttgcaattatttttgccttgctggattcaccaacgtagaagtgatacaaacacagaaagttattaaaaaaacaaagacaaacagataataacaacaacaaaatccaggaaaattacattccagtcttccctcaatatcgttaccagaaagtatcagtggtcactgtggtaaaactatagcattaactgtaattgctttttaggagaaaagagataatgcctaactatcacaactgtttttttcctatcaggcagaatgc

SEQ ID NO: 88572 - DNA, 473 bp, Chicken  19866894393685_1
gaaggcaaaaatcagagagctatgaaaaattacttatgaactcaaatctagcaaacaaccctttctttgctggtaccattcaaacatgaaggaagacagaatatttgctattcaagtggaagagctcctgcagcacaaggtaggactgataaagtttagcacattcatcatgaagttaaggccagtgaattagttatcacatgctttatggatcagtttgagaggatatttaaagcatatggattttgtgaacttgtaatatattcatttttaaatattaaagaatgtacatttaactamaagttggggagggtaaagctgtctgattattatgagttattattattgttttgattaacttaacctttttatttgtctttaattttatttatttatttatttatttatttttaagagagattctgttaagtatcctttccagaaagtcagtgtcacatagcattcagagaaca

SEQ ID NO: 88573 - DNA, 600 bp, Chicken  19866894393688_1
tatagaaatctaaataaagaactgtttcttttgatctgaaacaaattcctttcactgtttgtcagaacgttaaacaaaggcaaagatgtgtcacccaggcttgtatctcccttgtccctggatgctctgtagtgcaggacatgggacaaactatcagggtgggtgtcaggatccgttctttcctgagatgaggaattttgtcatagcaggtccctggcactgccttgccgaacactccacactctatttaactacccacagaacctttctgtaggctgagggttgtagtgcttgtctcayagggagtacagctaagttttagcttcctccattgcatttgtagctcacagctcaagtatgaagtgtgacaaaaaaggcattggttttggccctaccaccaaaacttgacagaatctagatctgactgacatttcctggtgaatctcaccattacttcaaaccccaaattaaacaaacatttatttgaccttcattatcatgaaggaccacattaacaggcacctgtgatttaaagccaaggctgtgcaatggtctgatgtgacaacctccatttcaaatgtcagacactgcgctttcagg

SEQ ID NO: 88574 - DNA, 600 bp, Chicken  19866894393701_1
cagcccaggcaggtgatacccattcatagagagtgaatacctagcaaagcatcctgcatcacctcatcctttgtgtttcatcttcatcttccccttctcctcctactgcctttgtttcagaaacaagttaaaccccacctgtagggttaagtcctttctctgaaagcatgacaccaaagcaggacctgttgggaaaactcattccactcccgagctccaaaatgctgacagatcttgatcactcatgaagtgctacatggaaaactttgtctaaagtataccatcttatattaaaatttkatttccccaaaatacaatgctactgaagtaatattcagcttgaatcttcttggaggtcagaaagagggacaagagccagaggatagattcattcttccacctaaatcttttcaatatgtcattttatttccactgtaatagcttttcattgtacaactgccaaactacttccttccactgtaactgaatccaaatatcttatttgccttaagtgaagatagcaagctttttggtttggactgctctcaccctacaggcagcagaaaactactctcttcttattcctgtttttctgtttct

SEQ ID NO: 88575 - DNA, 600 bp, Chicken  19866894393702_1
atttatgaaaaacttgctagtgctactaacgcacaaaactagtactgtctacatgggtttcacacacactgcaagctgatactctaagtgggaaatctgagtacttcaagtacatagctactgcatgatatgagacccaaaggacttttttggctgagctgtgagagtctaaaatacatgaagtataatttcatagtggaggttatgtgaaatacaaagcatacttcaaaatcttaacagaagcctgaaaagaggtgctcttagcagatgagcatacgaaagatcctctctgtagaaagraaggctgaatgttagttttgggaagcctcaatttccttgctgcttctgtcccttatccatgctaagttacttctwcattattttttcctgtatgcagaagcactgagtaacactaaagcactgagcagatacaggtgaaaagcatttggcttagggcagcacaagctgcttgtactactccttatctcctagtttgtagcaccattgttagccaagatgggttttattctctcaaagaaaagccttcacattcagcttacctgacaaatgaagtcactaactattctgtgaaaggtggta

SEQ ID NO: 88576 - DNA, 600 bp, Chicken  19866894393702_2
ctgatactctaagtgggaaatctgagtacttcaagtacatagctactgcatgatatgagacccaaaggacttttttggctgagctgtgagagtctaaaatacatgaagtataatttcatagtggaggttatgtgaaatacaaagcatacttcaaaatcttaacagaagcctgaaaagaggtgctcttagcagatgagcatacgaaagatcctctctgtagaaagraaggctgaatgttagttttgggaagcctcaatttccttgctgcttctgtcccttatccatgctaagttacttctwcattattttttcctgtatgcagaagcactgagtaacactaaagcactgagcagatacaggtgaaaagcatttggcttagggcagcacaagctgcttgtactactccttatctcctagtttgtagcaccattgttagccaagatgggttttattctctcaaagaaaagccttcacattcagcttacctgacaaatgaagtcactaactattctgtgaaaggtggtattcttgaatccaaagcctttytcccctgtgcacagggcccggaaattttcagccgttcgagggacgatatttgcg

SEQ ID NO: 88577 - DNA, 600 bp, Chicken  19866894393702_3
gaagcctcaatttccttgctgcttctgtcccttatccatgctaagttacttctwcattattttttcctgtatgcagaagcactgagtaacactaaagcactgagcagatacaggtgaaaagcatttggcttagggcagcacaagctgcttgtactactccttatctcctagtttgtagcaccattgttagccaagatgggttttattctctcaaagaaaagccttcacattcagcttacctgacaaatgaagtcactaactattctgtgaaaggtggtattcttgaatccaaagcctttytcccctgtgcacagggcccggaaattttcagccgttcgagggacgatatttgcgaacagctccatggttatgcgtcctaaaggttcatcattggcagaaacgttaaaatacacaacaggattggtgtccttkgacagcactgctgccagagagaggtgacccttctgtagctccgacaagctttgctggcattcttcaaatctcctcttgaaagaattagccagttcttgaactttaaatctgactgcaaattgttctactttcacttcaccatctgaaaacaaatccagcaagagattt

SEQ ID NO: 88578 - DNA, 600 bp, Chicken  19866894393702_4
gggcagcacaagctgcttgtactactccttatctcctagtttgtagcaccattgttagccaagatgggttttattctctcaaagaaaagccttcacattcagcttacctgacaaatgaagtcactaactattctgtgaaaggtggtattcttgaatccaaagcctttytcccctgtgcacagggcccggaaattttcagccgttcgagggacgatatttgcgaacagctccatggttatgcgtcctaaaggttcatcattggcagaaacgttaaaatacacaacaggattggtgtccttkgacagcactgctgccagagagaggtgacccttctgtagctccgacaagctttgctggcattcttcaaatctcctcttgaaagaattagccagttcttgaactttaaatctgactgcaaattgttctactttcacttcaccatctgaaaacaaatccagcaagagatttccttagctctactcactgtagccagagattagtagctttcgttctgaataatttccagggtaaaacaaagccaaacaaactacagaagataccgaaaagaactgtaaaaaccactcaaccaactcaccagca

SEQ ID NO: 88579 - DNA, 593 bp, Chicken  19866894393709_1
taggagtctctgttttgatgagaagaatttcagaattgcttttcaaaggtcggctgcacagcattttcagaatatgaggcgccaggattgctcttctcttttgaaaaccccctgatgtttcttgtgcatggagggagggggggacttcgtttcacaatgggatatttgggcactgtggtaatgggaactaggcaaaactcagaaggacttccatgctgaatcacagcttatcttctgcagagtagaaaggaggataccggatcttcttctttttacctttgagagattcatagtaaaaawacttctgaaatgatctcagggaaagaaaggtccgttccttatcttttctgcctttcctacgagaagtggaagtggtttgtggtcaggttgactgtgctgtcttctgggatgtgtgctggaaatgggctgtggctggcagtgccaagtggatgcttgggcaccactgcaatgtacctcgtgccacccagacaaaccttgtttgtgcagagcaaggactagaaagtgaaagatgggcttgcaagggtactctggaaaaatgctggtggggaaagcttgtcacagtccagtgctta

SEQ ID NO: 88580 - DNA, 600 bp, Chicken  19866894393713_1
tgttctgcttgttctatgtggagcagaaagagggaaagaaggagcgagcgatggtggacagattgtttattgcaaggatatgtcgaatcctgaaaataatggtccctagagcattttgtaaggaggtaagcactgcctgcagtaacaaagaaaaatggacgtttttggagttgttttcttctgtactataccttgctagaatagggtaaaattgtagtgcatactttaaaatggcagcaaaacacgtaagtataaaaagccacatccactttcagttactagagtgctaaaacatgatgrcttttatccattgtttaactattatttatctatttctgtaccagacaggttatttgctgcttattgctgtaatgctggtagtccgcacatattgtgatatttggatgattcaaaatggaacagtcattgaaaggtatctattaacttcttattttaaaatattttttcttacatttaccaggggagggtggtctgattcagacactttactgcatattgatgtgcctgaataactggtatcgtcataatttcatggctcctataatcttgaaaaggaggaaaaaatattttgttgttttg

SEQ ID NO: 88581 - DNA, 600 bp, Chicken  19866894393720_1
aaggaaggaatgaccaaagtctgagtgtattttcaggatcctctgtctcagtgaggagcagcgctcctgatgacctcacgatgtcctctcttcctgccatgcaggaaaggtgtctgagcctgacaggcctgatgagactgcagcagagatatggctacagagcatgttcttgtctcctggatactcccacagctcttcagaagcactctgaacagccacaagtaagttggtctttacagcttgaatttttggggtcagatattgtaccatttgtctcattaggcaatagtgaatgagaartggcatctggaagggcagtaaacttggctgtgctaaactggtagcactggaggtgacaaatggatttaaagactgttcttttgagccatggcttgatttgaagttatcttgatctaggtggtcctgcaaaactagatatttgatgaatagagtgtatagaatgaatagaattagaatttcgtattgagaagacagactaaataatgccattaaagccttagaagcaataggttaagtgatgccacagcttcttattctctttttctgagatctgtgccccagtgctggagtgcatggacc

SEQ ID NO: 88582 - DNA, 600 bp, Chicken  19866894393736_1
ttcactcctggagatgactgccaaaattttaggcacttatcttagccacgcttactgtggctggaaatgttataaatgtccttgatgctttttgatcaagttcagtttcacgccatcccctgctgccttaaaacttcctttagcattaccaatttagcagaacagttgtcctagagaagagaaacatatgcagaagactgttccaattgtagttaagtggaaatccttgaaagagagcttaattgagacctcattgatttagctgcctccgtatttgggtaattcatgttgctttggagmtgtctgggtttcagcttttgagagatcctcagttctgccagataactgcagaaggcacagcaggcatcatgatcacagattcctcaggagagaggcaattacagagctgtggcatttaacattaaaaaaaaaaaaagaaagaaagaaaattgcctctttagcatatgtgacctgttaaaaaacagtagtgatcacatctgtagcataatgatcatactatttggatgttcatagccagagagttcaatggctctacggctgggtggtggctggtcacgcgtggtatcccccagggtccat

SEQ ID NO: 88583 - DNA, 577 bp, Chicken  19866894393736_2
gatcctcagttctgccagataactgcagaaggcacagcaggcatcatgatcacagattcctcaggagagaggcaattacagagctgtggcatttaacattaaaaaaaaaaaaagaaagaaagaaaattgcctctttagcatatgtgacctgttaaaaaacagtagtgatcacatctgtagcataatgatcatactatttggatgttcatagccagagagttcaatggctctacggctgggtggtggctggtcacgcgtggtatcccccagggtccatcttgggaccaatgctctttaacrtctttaccatcgacatagatagtggcactgagtataccattggcatgtttgctgataacactaaactgagtggtgcagttgacacaatacaagggagggacaccatccagagaggcctggacgtgctcaaaaagtgtgcccacaagaatttaatgaggccaagtgcaaggtattgctcttggatcgaggcatttccagatatgagtgcagactgggagcaaaactcattaagagcagccctgctaagaaagacctgagaattctggtgaatgaagag

SEQ ID NO: 88584 - DNA, 599 bp, Chicken  19866894393741_1
  misc_feature (1)..(171): n is any nucleotide
nnnnnnnnnnnnnnnnnnnnnnnnnnnnnnnnnnnnnnnnnnnnnnnnnnnnnnnnnnnnnnnnnnnnnnnnnnnnnnnnnnnnnnnnnnnnnnnnnnnnnnnnnnnnnnnnnnnnnnnnnnnnnnnnnnnnnnnnnnnnnnnnnnnnnnnnnnnnnnnnnnnnnnnnnnntttgcttagttcctggctgcattgtgcagagctggcttcaaaaggactgttgcttctacgccgtgagaatggcgtgcagtcagaattcacaaggaatggtgtagctactgatctaaaatgcagcaaacrctcattttagtttcagttatgcctgttyttgtagtgctgcttagaaattgacagtggtgactgtgaattaattctgggggaattctgtatttttattattgtcccttaatttttcagtagtaaatttcgtagacysggcagatcttctgcatatttacactatcaatagaaagttcttagcttgaaggtcacaagttcagacttcaatgcctgattgtaggaccctgtgtttaccatgcatcttactgctttggagatggtgaatgcctactgcttatgctggcatttagaggaatggt

SEQ ID NO: 88585 - DNA, 575 bp, Chicken  19866894393741_10
tcatcagactgtaagcatctgctttctccctttaaagctagcaccacctacrtgytttttgtgcaccragaagccaagctattagttcacatgcctgtctccaaaatattaacttttactgtaggtcgaagagtgcaaattgttttactgtggcatttcttctggtgagtggctgcattaattcccatagagctccaatttctgwgcagccattcatcactcaaccaactcacgatgctctcagcaaaaaacaggtttgtcaaagtaactcaatgcctttgctgaagtgtatttaaacartgatgcagagcaattttattaagttatgtgaaaagctgtttgtgaaccagaacaaaagaatccttactttaccacttaacatggtcaacattttggagttcaaaatggacccagcattgctcatttctctgttgtacagatgaatctttttgccaaggargttttgtgcttcacagaggtgaagggtgtaaacctgctctgtgctgatagaattctgcttgtgcttacctctgaatttagtgccccttagaacttcatctgaggctgcctctaga

SEQ ID NO: 88586 - DNA, 415 bp, Chicken  19866894393741_11
tctggtgagtggctgcattaattcccatagagctccaatttctgwgcagccattcatcactcaaccaactcacgatgctctcagcaaaaaacaggtttgtcaaagtaactcaatgcctttgctgaagtgtatttaaacartgatgcagagcaattttattaagttatgtgaaaagctgtttgtgaaccagaacaaaagaatccttactttaccacttaacatggtcaacattttggagttcaaaatggacccagcattgctcatttctctgttgtacagatgaatctttttgccaaggargttttgtgcttcacagaggtgaagggtgtaaacctgctctgtgctgatagaattctgcttgtgcttacctctgaatttagtgccccttagaacttcatctgaggctgcctctaga

SEQ ID NO: 88587 - DNA, 599 bp, Chicken  19866894393741_2
  misc_feature (1)..(143): n is any nucleotide
nnnnnnnnnnnnnnnnnnnnnnnnnnnnnnnnnnnnnnnnnnnnnnnnnnnnnnnnnnnnnnnnnnnnnnnnnnnnnnnnnnnnnnnnnnnnnnnnnnnnnnnnnnnnnnnnnnnnnnnnnnnnnnnnnnnnnnnnnnnnnnntttgcttagttcctggctgcattgtgcagagctggcttcaaaaggactgttgcttctacgccgtgagaatggcgtgcagtcagaattcacaaggaatggtgtagctactgatctaaaatgcagcaaacrctcattttagtttcagttatgcctgttyttgtagtgctgcttagaaattgacagtggtgactgtgaattaattctgggggaattctgtatttttattattgtcccttaatttttcagtagtaaatttcgtagacysggcagatcttctgcatatttacactatcaatagaaagttcttagcttgaaggtcacaagttcagacttcaatgcctgattgtaggaccctgtgtttaccatgcatcttactgctttggagatggtgaatgcctactgcttatgctggcatttagaggaatggtgaattgagctggtgctactgaggtgcca

SEQ ID NO: 88588 - DNA, 599 bp, Chicken  19866894393741_3
  misc_feature (1)..(36): n is any nucleotide
nnnnnnnnnnnnnnnnnnnnnnnnnnnnnnnnnnnntttgcttagttcctggctgcattgtgcagagctggcttcaaaaggactgttgcttctacgccgtgagaatggcgtgcagtcagaattcacaaggaatggtgtagctactgatctaaaatgcagcaaacrctcattttagtttcagttatgcctgttyttgtagtgctgcttagaaattgacagtggtgactgtgaattaattctgggggaattctgtatttttattattgtcccttaatttttcagtagtaaatttcgtagacysggcagatcttctgcatatttacactatcaatagaaagttcttagcttgaaggtcacaagttcagacttcaatgcctgattgtaggaccctgtgtttaccatgcatcttactgctttggagatggtgaatgcctactgcttatgctggcatttagaggaatggtgaattgagctggtgctactgaggtgccagagtgtctgggtctgcattcaggtaccacactataattastggattttctttatgttcatcagactgtaagcatctgctttctccctttaaagctagcaccacctac

SEQ ID NO: 88589 - DNA, 599 bp, Chicken  19866894393741_4
  misc_feature (1)..(35): n is any nucleotide
nnnnnnnnnnnnnnnnnnnnnnnnnnnnnnnnnnntttgcttagttcctggctgcattgtgcagagctggcttcaaaaggactgttgcttctacgccgtgagaatggcgtgcagtcagaattcacaaggaatggtgtagctactgatctaaaatgcagcaaacrctcattttagtttcagttatgcctgttyttgtagtgctgcttagaaattgacagtggtgactgtgaattaattctgggggaattctgtatttttattattgtcccttaatttttcagtagtaaatttcgtagacysggcagatcttctgcatatttacactatcaatagaaagttcttagcttgaaggtcacaagttcagacttcaatgcctgattgtaggaccctgtgtttaccatgcatcttactgctttggagatggtgaatgcctactgcttatgctggcatttagaggaatggtgaattgagctggtgctactgaggtgccagagtgtctgggtctgcattcaggtaccacactataattastggattttctttatgttcatcagactgtaagcatctgctttctccctttaaagctagcaccacctacr

SEQ ID NO: 88590 - DNA, 600 bp, Chicken  19866894393741_5
ttaattctgggggaattctgtatttttattattgtcccttaatttttcagtagtaaatttcgtagacysggcagatcttctgcatatttacactatcaatagaaagttcttagcttgaaggtcacaagttcagacttcaatgcctgattgtaggaccctgtgtttaccatgcatcttactgctttggagatggtgaatgcctactgcttatgctggcatttagaggaatggtgaattgagctggtgctactgaggtgccagagtgtctgggtctgcattcaggtaccacactataattastggattttctttatgttcatcagactgtaagcatctgctttctccctttaaagctagcaccacctacrtgytttttgtgcaccragaagccaagctattagttcacatgcctgtctccaaaatattaacttttactgtaggtcgaagagtgcaaattgttttactgtggcatttcttctggtgagtggctgcattaattcccatagagctccaatttctgwgcagccattcatcactcaaccaactcacgatgctctcagcaaaaaacaggtttgtcaaagtaactcaatgcctttgctg

SEQ ID NO: 88591 - DNA, 600 bp, Chicken  19866894393741_6
sggcagatcttctgcatatttacactatcaatagaaagttcttagcttgaaggtcacaagttcagacttcaatgcctgattgtaggaccctgtgtttaccatgcatcttactgctttggagatggtgaatgcctactgcttatgctggcatttagaggaatggtgaattgagctggtgctactgaggtgccagagtgtctgggtctgcattcaggtaccacactataattastggattttctttatgttcatcagactgtaagcatctgctttctccctttaaagctagcaccacctacrtgytttttgtgcaccragaagccaagctattagttcacatgcctgtctccaaaatattaacttttactgtaggtcgaagagtgcaaattgttttactgtggcatttcttctggtgagtggctgcattaattcccatagagctccaatttctgwgcagccattcatcactcaaccaactcacgatgctctcagcaaaaaacaggtttgtcaaagtaactcaatgcctttgctgaagtgtatttaaacartgatgcagagcaattttattaagttatgtgaaaagctgtttgtgaaccagaa

SEQ ID NO: 88592 - DNA, 600 bp, Chicken  19866894393741_7
cagatcttctgcatatttacactatcaatagaaagttcttagcttgaaggtcacaagttcagacttcaatgcctgattgtaggaccctgtgtttaccatgcatcttactgctttggagatggtgaatgcctactgcttatgctggcatttagaggaatggtgaattgagctggtgctactgaggtgccagagtgtctgggtctgcattcaggtaccacactataattastggattttctttatgttcatcagactgtaagcatctgctttctccctttaaagctagcaccacctacrtgytttttgtgcaccragaagccaagctattagttcacatgcctgtctccaaaatattaacttttactgtaggtcgaagagtgcaaattgttttactgtggcatttcttctggtgagtggctgcattaattcccatagagctccaatttctgwgcagccattcatcactcaaccaactcacgatgctctcagcaaaaaacaggtttgtcaaagtaactcaatgcctttgctgaagtgtatttaaacartgatgcagagcaattttattaagttatgtgaaaagctgtttgtgaaccagaacaa

SEQ ID NO: 88593 - DNA, 600 bp, Chicken  19866894393741_8
tatttacactatcaatagaaagttcttagcttgaaggtcacaagttcagacttcaatgcctgattgtaggaccctgtgtttaccatgcatcttactgctttggagatggtgaatgcctactgcttatgctggcatttagaggaatggtgaattgagctggtgctactgaggtgccagagtgtctgggtctgcattcaggtaccacactataattastggattttctttatgttcatcagactgtaagcatctgctttctccctttaaagctagcaccacctacrtgytttttgtgcaccragaagccaagctattagttcacatgcctgtctccaaaatattaacttttactgtaggtcgaagagtgcaaattgttttactgtggcatttcttctggtgagtggctgcattaattcccatagagctccaatttctgwgcagccattcatcactcaaccaactcacgatgctctcagcaaaaaacaggtttgtcaaagtaactcaatgcctttgctgaagtgtatttaaacartgatgcagagcaattttattaagttatgtgaaaagctgtttgtgaaccagaacaaaagaatccttact

SEQ ID NO: 88594 - DNA, 600 bp, Chicken  19866894393741_9
agaggaatggtgaattgagctggtgctactgaggtgccagagtgtctgggtctgcattcaggtaccacactataattastggattttctttatgttcatcagactgtaagcatctgctttctccctttaaagctagcaccacctacrtgytttttgtgcaccragaagccaagctattagttcacatgcctgtctccaaaatattaacttttactgtaggtcgaagagtgcaaattgttttactgtggcatttcttctggtgagtggctgcattaattcccatagagctccaatttctgwgcagccattcatcactcaaccaactcacgatgctctcagcaaaaaacaggtttgtcaaagtaactcaatgcctttgctgaagtgtatttaaacartgatgcagagcaattttattaagttatgtgaaaagctgtttgtgaaccagaacaaaagaatccttactttaccacttaacatggtcaacattttggagttcaaaatggacccagcattgctcatttctctgttgtacagatgaatctttttgccaaggargttttgtgcttcacagaggtgaagggtgtaaacctgctctgtgct

SEQ ID NO: 88595 - DNA, 600 bp, Chicken  19866894393764_1
tggatgttattatttgctatttataagtgttttctgtggcagatggggatatgtatctgtgtcaaattggttttgtcacagtttgttttggtaatgtgtttctgtaacagtcttcagagattgtgttctattacatttggcactggatactgtatatttatatacacctgtgtcagatggcagagtttatttgaaatgtggcaactaagtccctctttttgcttgtggatttgaggattgatctttttttatctgatttgagataaagaattttattctgttttgctgttgttagttttytgggggtttgttctgttttgattccaggtcatcaattgttatccaaaatacaaatacctatktatgtaaaatagttctaattacatagtaatccatacatttaattactctttcatgagaatacaaaatattctttgaattactacttgttggcatgttgctatgctaggaaactatgagaccttccatcttggaagacttgcataatgcaattatttgttttccaaacagattttattagaatatcttgccaagtcactcaagtgttatcaaatatttttattaggtgatgcttttatt

SEQ ID NO: 88596 - DNA, 600 bp, Chicken  19866894393764_2
caaattggttttgtcacagtttgttttggtaatgtgtttctgtaacagtcttcagagattgtgttctattacatttggcactggatactgtatatttatatacacctgtgtcagatggcagagtttatttgaaatgtggcaactaagtccctctttttgcttgtggatttgaggattgatctttttttatctgatttgagataaagaattttattctgttttgctgttgttagttttytgggggtttgttctgttttgattccaggtcatcaattgttatccaaaatacaaatacctatktatgtaaaatagttctaattacatagtaatccatacatttaattactctttcatgagaatacaaaatattctttgaattactacttgttggcatgttgctatgctaggaaactatgagaccttccatcttggaagacttgcataatgcaattatttgttttccaaacagattttattagaatatcttgccaagtcactcaagtgttatcaaatatttttattaggtgatgcttttattgataacctggatgaggatactgagtgcaccctcagtacatttacagatgatgccaagttggg

SEQ ID NO: 88597 - DNA, 600 bp, Chicken  19866894393773_1
ctgccaaggaactcctgcagcttttctgttttgcttggagtagagctgtcccccaaagtgaaagggtttctctcaacctggaagagcagacacaggcacagatgcagcacaggagaaagcctgcgccaaaatccccgtgccacaggcagactacatattagtacagaggggtccaagctctgctgggtgctgagaagtgcccttcaggcagagtgtaagtgtaagagtgtaaggattcaagctgacagcatgaccaagtctgacccctgccaccagcaaaccagtggggttcaggagctrgagacaagaatccataagtatagctgacgaattattgtgagaaacacactcaagatcaacaatttctaatcaggccgagatctctgtcaagagcagtttattcattactgcagtaataggtgcacaccccctactgataagggagaaattgcacaactagtcagtgaaacccactccattatataccctgggtccaacgcagttaaagcctctcctggtactcactggttgagcatctcaggctcacaaccttccgacactgttgctgttacgcttccatacaacgtctgtcaccaaccc

SEQ ID NO: 88598 - DNA, 600 bp, Chicken  19866894393779_1
aacagcactctttcactgtgcttagggagaggcctatcccatacagcacgtatccccgtcaagcgcctactacaacaaacaagtattagacaaactgtttatcacatttgggctacagattgaaatccaaacagaaaatatattatggtccctttcccatgcataatcttgcaaattaaatttaataatgaaacctgcagcatgcttcttccttttcagctggcacacatagggtaagcagataaaaaaataatttacagaggactatagtgacatgcatacatgtcttgccatgggttygcgaaaaaaaaaaaaaaagtgctgctgcttctttttcactcacccaatggtttttgtctccaaaacattaattcagtgttcatcagagctatagtgaacagtttgtcagaaattcagaattaaaagtcaagcttaatttgaaaaggctaccagctaatcactttttggcttgtgctgacaaatgaagtatgaaacatgccagcagctgcatattttattcaactgtttgatctgaaaactagacagaccagagtgtagagagagaagagtgagcataacaaagaggaaaaaggggaaagt

SEQ ID NO: 88599 - DNA, 599 bp, Chicken  19866894393785_1
  misc_feature (1)..(16): n is any nucleotide
nnnnnnnnnnnnnnnnctgaccctttaagggatgaaatggaggaggcatctgaaaacagaacgtaaatcctttcctcagaattgcacagttgggaattatatcccttgtctacagaatatagcacaggttaaagtaaagcatgatggttgctcccatttcttgccaaggcagaatctttcaaaatctttggcaagagaaatgttggatgtgacatgctgctttttctcgtggaacattttaatggcagcgctcagttttccccaggggaccttccttcctcggagcaggaacttgtcgcygcttagctgatttagatgtgccttctgccaaaatcagcaaggaaggaatggatgggatggacattagcaatagggaaatcttgacatgtctgaagagaatgcatgctcggaggaggggcttcttctgtttccaaaagcgaagttttatctgcaaaacaagctttgcttttcctgcagatgtctcatctctgcctcrcggcaatgctgtgatgatgtttcatcttgtgagaagccaaggggaagagaacttactatagtgaaaacatctattcacaagctatttaaactgaactaaaaca

SEQ ID NO: 88600 - DNA, 600 bp, Chicken  19866894393785_2
gaaatgttggatgtgacatgctgctttttctcgtggaacattttaatggcagcgctcagttttccccaggggaccttccttcctcggagcaggaacttgtcgcygcttagctgatttagatgtgccttctgccaaaatcagcaaggaaggaatggatgggatggacattagcaatagggaaatcttgacatgtctgaagagaatgcatgctcggaggaggggcttcttctgtttccaaaagcgaagttttatctgcaaaacaagctttgcttttcctgcagatgtctcatctctgcctcrcggcaatgctgtgatgatgtttcatcttgtgagaagccaaggggaagagaacttactatagtgaaaacatctattcacaagctatttaaactgaactaaaacaagcactacaaccagctggggctgcaatgattaaagtctccgcagttattacagggtttggttttctactgaaacaacacatgctgcagactaagatgaaggaaggaagtatgcactggtacaatagcagacaaaaataccactcattacccttctgctgactggccatgagtgccttcggatagacatgtctgtctt

SEQ ID NO: 88601 - DNA, 600 bp, Chicken  19866894393788_1
ttagcagtaagtaggggagatggtgctgtggcacacggtggatgggagccacgcaggcggtgctcatcagaaagcaaaagattttggtaacagcaggcattgcgttcacagtcattagggaggagcagacccatcagcacgcagtgggtttgacccagctgccaacacaaggatgctttgctggtgactccccttgcaaatcacgtgccttctgatgccacataccaaagaaacgggtgttgtttcttcaaagtcagcacacctcgtgcagatggcagatcccatctctgctgctcttgsccatagcaggagtgtgggcgagcgatgctgctcagcagcctggygtttacatcaaagtactgctgagagcaacgacagcgtggatgtggggcagctcggattggaggcatctgctgcaaaagatggcgacacaccgctgtggaagtgactggaagggatggaagtctctataataaagcagcctctggtttgcagcctcgaggagcagacagagcccctgcagcagtgagagccaccagctggcccagcccrgggtcatggcatccatagaaagccatcagccctaggaaccacatcacc

SEQ ID NO: 88602 - DNA, 600 bp, Chicken  19866894393788_2
ggagccacgcaggcggtgctcatcagaaagcaaaagattttggtaacagcaggcattgcgttcacagtcattagggaggagcagacccatcagcacgcagtgggtttgacccagctgccaacacaaggatgctttgctggtgactccccttgcaaatcacgtgccttctgatgccacataccaaagaaacgggtgttgtttcttcaaagtcagcacacctcgtgcagatggcagatcccatctctgctgctcttgsccatagcaggagtgtgggcgagcgatgctgctcagcagcctggygtttacatcaaagtactgctgagagcaacgacagcgtggatgtggggcagctcggattggaggcatctgctgcaaaagatggcgacacaccgctgtggaagtgactggaagggatggaagtctctataataaagcagcctctggtttgcagcctcgaggagcagacagagcccctgcagcagtgagagccaccagctggcccagcccrgggtcatggcatccatagaaagccatcagccctaggaaccacatcacctcgactggagcaagaaaagctgggagaccttaaaacacgtcctg

SEQ ID NO: 88603 - DNA, 600 bp, Chicken  19866894393788_3
gtcagcacacctcgtgcagatggcagatcccatctctgctgctcttgsccatagcaggagtgtgggcgagcgatgctgctcagcagcctggygtttacatcaaagtactgctgagagcaacgacagcgtggatgtggggcagctcggattggaggcatctgctgcaaaagatggcgacacaccgctgtggaagtgactggaagggatggaagtctctataataaagcagcctctggtttgcagcctcgaggagcagacagagcccctgcagcagtgagagccaccagctggcccagcccrgggtcatggcatccatagaaagccatcagccctaggaaccacatcacctcgactggagcaagaaaagctgggagaccttaaaacacgtcctgtgcactgacagagacacctccatctggctgcaacagacgcagtcgatctgcgatgtcccgatgccatcatcctctgggtttgacctctcagcatcaggagcaataagggctgtgaggctgcactgctgcgatgtgtgccgttgccattgtgcagacagatcttcggctccttattaaagtggcaattttcccaagcactgtgtgtacg

SEQ ID NO: 88604 - DNA, 600 bp, Chicken  19866894393790_1
gagtacgacttctttacttacgtagcacttgctggtatctcacagcagctattcatgtcttcacatggatgctgagcccagtgaatgcctctgggattctgcagctgagtgcagtgcaaactgaggagtaagcaccggttatatgggctgacaagaataaacaaatctcactgattttataagttcctgacatataatgaaggcaatattttaaaaaacagagctgtacattctgctgtgtttagctatcccatgtctggttatgcaaccagaaacttaattgtttcattgtctgcttcraggtctgtcagaggtggatctggtgtctatccggtctacctagacttcaccaaaggctttgatgtagtctcccacagtattctcttgrggaagctggcagcccatggcttggataggtacactctttgtgtaaacactggctggggagctgggcccagggagtgtaggtggatggagttaaatccagctggtgaccagtcatgggtggtgttccccagggatcagtactggggcctgtcctctttaatatctttattgatgacctgtacgaggggattgaatgcactcttamtaagtttg

SEQ ID NO: 88605 - DNA, 600 bp, Chicken  19866894393790_2
ctctgggattctgcagctgagtgcagtgcaaactgaggagtaagcaccggttatatgggctgacaagaataaacaaatctcactgattttataagttcctgacatataatgaaggcaatattttaaaaaacagagctgtacattctgctgtgtttagctatcccatgtctggttatgcaaccagaaacttaattgtttcattgtctgcttcraggtctgtcagaggtggatctggtgtctatccggtctacctagacttcaccaaaggctttgatgtagtctcccacagtattctcttgrggaagctggcagcccatggcttggataggtacactctttgtgtaaacactggctggggagctgggcccagggagtgtaggtggatggagttaaatccagctggtgaccagtcatgggtggtgttccccagggatcagtactggggcctgtcctctttaatatctttattgatgacctgtacgaggggattgaatgcactcttamtaagtttgcaggtgacaccaagttgggagaaattgtttatctgtctgagggtagtaaggccctgtagagggatctgaatagaccagatcactgggc

SEQ ID NO: 88606 - DNA, 460 bp, Chicken  19866894393790_3
ctgcttcraggtctgtcagaggtggatctggtgtctatccggtctacctagacttcaccaaaggctttgatgtagtctcccacagtattctcttgrggaagctggcagcccatggcttggataggtacactctttgtgtaaacactggctggggagctgggcccagggagtgtaggtggatggagttaaatccagctggtgaccagtcatgggtggtgttccccagggatcagtactggggcctgtcctctttaatatctttattgatgacctgtacgaggggattgaatgcactcttamtaagtttgcaggtgacaccaagttgggagaaattgtttatctgtctgagggtagtaaggccctgtagagggatctgaatagaccagatcactgggctgaggccaatgggatgaagttcaacaaggccaagtatcaagtcccttgctttgctccccatgca

SEQ ID NO: 88607 - DNA, 599 bp, Chicken  19866894393795_1
  misc_feature (1)..(64): n is any nucleotide
nnnnnnnnnnnnnnnnnnnnnnnnnnnnnnnnnnnnnnnnnnnnnnnnnnnnnnnnnnnnnnnnattagaattaaataagttcagtattcagaaacttgctaaatccttgtgcttctttccacagagaaaacaactatgtgttaagacaactgtttgtacccctgtattcttggatgtaacttccctaggaaaatatatggagtcccctgtgtaacaggctaagcttttataatggactgtttttttaccttataatatgtatatattttttatatatatacttatatatatatatatamttttttttttccagctctacgggacaacagaattgagctagttcgagcttcatggcatgaactgagtatcagtgtcagtgatgtgtctctgtcggatgaagggcagtacacctgctctttatttactatgcctgtcaaaacctcgaaggcttttcttactgttcttggtaagtataaataactgagcatgctcatattaaagaaggaagtgttggcaaatattgatatgtatgaactcgtctgaagttttgcagaagagccatgtaaatatctcaagtccctgtagttaatttaataat

SEQ ID NO: 88608 - DNA, 599 bp, Chicken  19866894393795_2
  misc_feature (1)..(63): n is any nucleotide
nnnnnnnnnnnnnnnnnnnnnnnnnnnnnnnnnnnnnnnnnnnnnnnnnnnnnnnnnnnnnnnattagaattaaataagttcagtattcagaaacttgctaaatccttgtgcttctttccacagagaaaacaactatgtgttaagacaactgtttgtacccctgtattcttggatgtaacttccctaggaaaatatatggagtcccctgtgtaacaggctaagcttttataatggactgtttttttaccttataatatgtatatattttttatatatatacttatatatatatatatatmtttttttttccagctctacgggacaacagaattgagctagttcgagcttcatggcatgaactgagtatcagtgtcagtgatgtgtctctgtcggatgaagggcagtacacctgctctttatttactatgcctgtcaaaacctcgaaggcttttcttactgttcttggtaagtataaataactgagcatgctcatattaaagaaggaagtgttggcaaatattgatatgtatgaactcgtctgaagttttgcagaagagccatgtaaatatctcaagtccctgtagttaatttaataata

SEQ ID NO: 88609 - DNA, 600 bp, Chicken  19866894393795_3
atgtagacaggcaaacagttgagtttaataggactaatgtaagatgttctctgcaccagtaatattcacattaatctagccaaggaattgcttttgtgtatacgatctgaaatatgtccccatagaatcatagaatcactcaggttggagaagaccttaaaaatcattgcgtccaacaacaaccttaccatactaccctaactctaacaaccctccactaaatcatgcccctgagccccacatccaaacagtttttaaacacttcgagggatggtgactcaaccacctccctggcgagcrtattccagtgcttaataaccttttctgtaaagaagtgtttactgatatccaacctaaacttaccctggcgcaacttraggccatttcccctygtcctgtcacctatttatcagtgagaagagaccaaccctgctctctctgtaagcacctttcagatatyggaagagagcaataagatctcccctcagcttcctcttccccagactaaacagccccagttccctcagcctctcttcatagagcatattctccaagcccttcacaaaccttgctgcccttctttggacctgctccagcacy

SEQ ID NO: 88610 - DNA, 600 bp, Chicken  19866894393795_4
agccaaggaattgcttttgtgtatacgatctgaaatatgtccccatagaatcatagaatcactcaggttggagaagaccttaaaaatcattgcgtccaacaacaaccttaccatactaccctaactctaacaaccctccactaaatcatgcccctgagccccacatccaaacagtttttaaacacttcgagggatggtgactcaaccacctccctggcgagcrtattccagtgcttaataaccttttctgtaaagaagtgtttactgatatccaacctaaacttaccctggcgcaacttraggccatttcccctygtcctgtcacctatttatcagtgagaagagaccaaccctgctctctctgtaagcacctttcagatatyggaagagagcaataagatctcccctcagcttcctcttccccagactaaacagccccagttccctcagcctctcttcatagagcatattctccaagcccttcacaaaccttgctgcccttctttggacctgctccagcacytcaacgtcctttctgtactgacatgcccaaaacagagcacagtactcgaggtgaggcctcatcaatgccgagtacag

SEQ ID NO: 88611 - DNA, 600 bp, Chicken  19866894393795_5
tttgtgtatacgatctgaaatatgtccccatagaatcatagaatcactcaggttggagaagaccttaaaaatcattgcgtccaacaacaaccttaccatactaccctaactctaacaaccctccactaaatcatgcccctgagccccacatccaaacagtttttaaacacttcgagggatggtgactcaaccacctccctggcgagcrtattccagtgcttaataaccttttctgtaaagaagtgtttactgatatccaacctaaacttaccctggcgcaacttraggccatttcccctygtcctgtcacctatttatcagtgagaagagaccaaccctgctctctctgtaagcacctttcagatatyggaagagagcaataagatctcccctcagcttcctcttccccagactaaacagccccagttccctcagcctctcttcatagagcatattctccaagcccttcacaaaccttgctgcccttctttggacctgctccagcacytcaacgtcctttctgtactgacatgcccaaaacagagcacagtactcgaggtgaggcctcatcaatgccgagtacaggggcaggatgacttc

SEQ ID NO: 88612 - DNA, 600 bp, Chicken  19866894393795_6
aaatcattgcgtccaacaacaaccttaccatactaccctaactctaacaaccctccactaaatcatgcccctgagccccacatccaaacagtttttaaacacttcgagggatggtgactcaaccacctccctggcgagcrtattccagtgcttaataaccttttctgtaaagaagtgtttactgatatccaacctaaacttaccctggcgcaacttraggccatttcccctygtcctgtcacctatttatcagtgagaagagaccaaccctgctctctctgtaagcacctttcagatatyggaagagagcaataagatctcccctcagcttcctcttccccagactaaacagccccagttccctcagcctctcttcatagagcatattctccaagcccttcacaaaccttgctgcccttctttggacctgctccagcacytcaacgtcctttctgtactgacatgcccaaaacagagcacagtactcgaggtgaggcctcatcaatgccgagtacaggggcaggatgacttccctagtcctgctcaccacaccattcttgatacaagccagggtgccattggccttcttggccacctggg

SEQ ID NO: 88613 - DNA, 600 bp, Chicken  19866894393795_7
tattccagtgcttaataaccttttctgtaaagaagtgtttactgatatccaacctaaacttaccctggcgcaacttraggccatttcccctygtcctgtcacctatttatcagtgagaagagaccaaccctgctctctctgtaagcacctttcagatatyggaagagagcaataagatctcccctcagcttcctcttccccagactaaacagccccagttccctcagcctctcttcatagagcatattctccaagcccttcacaaaccttgctgcccttctttggacctgctccagcacytcaacgtcctttctgtactgacatgcccaaaacagagcacagtactcgaggtgaggcctcatcaatgccgagtacaggggcaggatgacttccctagtcctgctcaccacaccattcttgatacaagccagggtgccattggccttcttggccacctgggcacactgccrgctcatattcagccaactgtccatcggtacaccaaggtccctttccatcaggcagctttccagacactcttccccaagcctgtagggttgcctggggctgctgtgaccaaaatgcaggacctgacactgg

SEQ ID NO: 88614 - DNA, 600 bp, Chicken  19866894393795_8
aataagatctcccctcagcttcctcttccccagactaaacagccccagttccctcagcctctcttcatagagcatattctccaagcccttcacaaaccttgctgcccttctttggacctgctccagcacytcaacgtcctttctgtactgacatgcccaaaacagagcacagtactcgaggtgaggcctcatcaatgccgagtacaggggcaggatgacttccctagtcctgctcaccacaccattcttgatacaagccagggtgccattggccttcttggccacctgggcacactgccrgctcatattcagccaactgtccatcggtacaccaaggtccctttccatcaggcagctttccagacactcttccccaagcctgtagggttgcctggggctgctgtgaccaaaatgcaggacctgacactgggccctattgaaactcaaacagtttgccttgacccattgatccagtctatccaggtccctctgtagtgcctttctcccctcaggcagatcaatactccctcccaacttggtgttgtctgcaaacttatagaaagtgcactcaatcccctcatcaagatcgttaataaagat

SEQ ID NO: 88615 - DNA, 599 bp, Chicken  19866894393798_1
  misc_feature (1)..(68): n is any nucleotide
nnnnnnnnnnnnnnnnnnnnnnnnnnnnnnnnnnnnnnnnnnnnnnnnnnnnnnnnnnnnnnnnnnnnagggaaagaggaaggtttagatatcaccttgtaaagctcattgctcacagcataagctcttcagactacctcgacacacgggccttggagaagtcaggcacaagcgcttatccttctaaatgcctttcccaagagctgagaccccacaaacttcacacgcctagcaaaagcgcacaggaatgggtctccaaggaggaaaagcgagctcgcctgtcagtactgccagggaagrcagtggtggagactgttgggctgatgtcctcttgtgttgtttttaatgctagtccgctaaagtaggatgatcaaacaaatgtacattcctaaagtcatcctctgactcactgaaccctcttctctatttttccccctctaagtcagaatattttacttttttgtcctaaacaaaaattatctaggaaatatcctttttggcagcccaaattgttagcagcacagaacattctctgctcacagaagccttagttctatttatcccacagaagttacgtgccgttaagaaggcctacctga

SEQ ID NO: 88616 - DNA, 600 bp, Chicken  19866894393798_2
gctttcagttaactcgggcagaggaggctcattatgaaattactacataaaattgagtacagcactccatgtgcagaagaaaaaagaattttatgtatgtatgtatgtatacacattctgaaatgctgagttagaaaggagcatgaaaggagcgctttaaggatgcctttctgagagcacaagagttctccagcccccagcagttcagatgaaactgatctcggcaggagatttaaaaacaaacaaacatagaacagggagggatttctacaggtacactgctcgcaggagaaatgaacraggaaagcatactcactctcataagtgagaaagggcaacgacagacagagggaagcctgaggtgctcaaggagctcttcaatctttgctggcagtcaggatttccatagctctcatgtccctaaacctctggccagggactgggggaatcaaaatccctcacccagtaagagaagagcgagtctgagaccacccaatgagtctragtgtgtacaaggctatggggcctgataacacgcatcccagggtcagggccttgctagatatgagcgcagaccaggagaagaactcactgaggtca

SEQ ID NO: 88617 - DNA, 600 bp, Chicken  19866894393798_3
tcagatgaaactgatctcggcaggagatttaaaaacaaacaaacatagaacagggagggatttctacaggtacactgctcgcaggagaaatgaacraggaaagcatactcactctcataagtgagaaagggcaacgacagacagagggaagcctgaggtgctcaaggagctcttcaatctttgctggcagtcaggatttccatagctctcatgtccctaaacctctggccagggactgggggaatcaaaatccctcacccagtaagagaagagcgagtctgagaccacccaatgagtctragtgtgtacaaggctatggggcctgataacacgcatcccagggtcagggccttgctagatatgagcgcagaccaggagaagaactcactgaggtcagccttacagagaacttgagggttccagtgtactagaagctccgtgtgagccagcagagtgcacttccagcccagaaaaccaagggtatcctgggctacaacaagagagggaggcgattgtccccctctactctgccctggagacctgtgcctagggccctcagcatgagagagaacgtggagctgatggagtgggtccagggga

SEQ ID NO: 88618 - DNA, 600 bp, Chicken  19866894393807_1
cccacccaaatccatcagagagcagtcagggctttttgctctctgaagcaccccaccttctcaagattgctgcccagcagtgcagcgcagctgggctttgtgcatcaccaagctggaagttaattgcattttgggatgggtgagtgtttggaagcggtggtgctttctcctcttgggccagattagccattttcttgatagctccctttttgaacagaaaactgaagttcttttcctaacagatctgatcccaggggccttaagaggagcaccgagtacagggggacctgcaggaaaacraagccaggtatccactgagcctccactgttgcacctcgctccaccagccagcasagccacaacatgtgagtgacagcctttatcacaacattgcagtaaaagtattaatttaactaattatgtgattaatatttaaccgttcagtgatatttttgtcatccataattcagttgtttgcatatattaaaaatttattctgtagacactttttctgcccaatgtcacatcagcagggagtgcgcattatagaggactgtcattgaatgcagctctcttctgattttatggaaagagtgggga

SEQ ID NO: 88619 - DNA, 600 bp, Chicken  19866894393807_2
accttctcaagattgctgcccagcagtgcagcgcagctgggctttgtgcatcaccaagctggaagttaattgcattttgggatgggtgagtgtttggaagcggtggtgctttctcctcttgggccagattagccattttcttgatagctccctttttgaacagaaaactgaagttcttttcctaacagatctgatcccaggggccttaagaggagcaccgagtacagggggacctgcaggaaaacraagccaggtatccactgagcctccactgttgcacctcgctccaccagccagcasagccacaacatgtgagtgacagcctttatcacaacattgcagtaaaagtattaatttaactaattatgtgattaatatttaaccgttcagtgatatttttgtcatccataattcagttgtttgcatatattaaaaatttattctgtagacactttttctgcccaatgtcacatcagcagggagtgcgcattatagaggactgtcattgaatgcagctctcttctgattttatggaaagagtggggaagaaaagaggaatgcttgctggtaagcccctccagcatgtggggctgcgctctg

SEQ ID NO: 88620 - DNA, 600 bp, Chicken  19866894393807_3
atcacaacattgcagtaaaagtattaatttaactaattatgtgattaatatttaaccgttcagtgatatttttgtcatccataattcagttgtttgcatatattaaaaatttattctgtagacactttttctgcccaatgtcacatcagcagggagtgcgcattatagaggactgtcattgaatgcagctctcttctgattttatggaaagagtggggaagaaaagaggaatgcttgctggtaagcccctccagcatgtggggctgcgctctgcttgcttccctgctccatccttgctcygtccctgctctcttctgcttctgctgacagacagctgggctgacagagctctgcagctcctgctgtagcatgcaggctctgctggctgcatgcagctcctggctgctgtggggctgcaggaggagaagctgtgtgaggtgcagcagggaggaggaagggggttgttcagagctggaacagagccaggggcaacaccatccagcataacccgaagctaccctgcaggacatgttagcactgttgggtgtgtaagtggagtccagccgcttctgctgagccaaaagggcttcttatctccta

SEQ ID NO: 88621 - DNA, 600 bp, Chicken  19866894393811_1
tttaaattgatgaaatgtggggctgatcagcagagaagcctcaccagtagcattttctttaagattttgtctctttgttggaaacttaatcattcctaaaaagagacaggtacatcattctgccagctaaattaaagtgttgttagaacggcagtgcaagtcagagtgaaacgtaagttgaatggaaaggacagtgaaggagataggaagaaaagtatttagagatcaggaactcagtattttaaatgtattgcactctgcacaggataaatatattaatttcccttgcacttcacagcwtgcccttatgttcagaaagttgcagggatgtcagatttaaagatgcatatgaagtgtacagggtagagcaataggtggtgagtaggctgctgagatccgtttctcttcccagttcaattccttttagtcatgtctgtgtttttttttgaaaacaaaatgcaatatgaaaacaaataaagccgcaacaaaaaatcctgctctccagcaaacatagtttaaagctgttttccatcatatattattttcacatttttttcttttcttccttctcttgctcacaaatcaggcaaatcagatctt

SEQ ID NO: 88622 - DNA, 600 bp, Chicken  19866894393811_2
cgtttctcttcccagttcaattccttttagtcatgtctgtgtttttttttgaaaacaaaatgcaatatgaaaacaaataaagccgcaacaaaaaatcctgctctccagcaaacatagtttaaagctgttttccatcatatattattttcacatttttttcttttcttccttctcttgctcacaaatcaggcaaatcagatcttggcacatgtgcctcaaaggaatgagtaccgttaccaacttcgactgctgtgccatgctgtgtattttaaaattgatttttcctccagctagcttccstatctgtgtattggtgttctccaaaatcacatctagggtagggacaggagaagagaaagaaaagaagactaaatgttgcagcatttgggttttctcttgtcaaggagatcatgaagctgaccacaaacttttgggcatcccatgtcaagattcggttgggggaccagggtgagaagtcctaatgtccttatgtgctgcctggagaggttgtggattctcctccttggagatcttcaaaagcctcctggacatggccctgggcaccttgtagtggccctgcttcaggaaaggttccatcag

SEQ ID NO: 88623 - DNA, 600 bp, Chicken  19866894393813_1
gttcactcagattgttgtaattgtttcacctcctgctgaagtgagttttcaatgatctgttcttcccattcctccaacccaaaatcggtgcttgatgtgcaggtggtctttccaggcattaatattagaacttcccttcattcattacactgcttagcacgctttaactgacattccaaggctttgagtgtcttcagtgttttgcaaggatccaaggttgtgatatttttcccttgaagactggtacacatatttgaaggctactgtgatctgttgtgaaagcacagagataaggaggcycttcgtgaaagctgtggctttggattgtatggtagtgttgcgtgttttcattgactgattgaatgattttttwgctgctcttgggaaagaaaagatttctcttattcagttgtgtcccctggacaagttgctgctacagccaaggctctaggtcaaatcaatttgagatgtgtttttaccactgaaccatcatgtgattataagaggcctcggtcactccttgttttactcaaaaaataacaataggcttttgaaacaaagaagtgcctgatctcatttttgcattagctttgctattat

SEQ ID NO: 88624 - DNA, 600 bp, Chicken  19866894393813_2
ccaacccaaaatcggtgcttgatgtgcaggtggtctttccaggcattaatattagaacttcccttcattcattacactgcttagcacgctttaactgacattccaaggctttgagtgtcttcagtgttttgcaaggatccaaggttgtgatatttttcccttgaagactggtacacatatttgaaggctactgtgatctgttgtgaaagcacagagataaggaggcycttcgtgaaagctgtggctttggattgtatggtagtgttgcgtgttttcattgactgattgaatgattttttwgctgctcttgggaaagaaaagatttctcttattcagttgtgtcccctggacaagttgctgctacagccaaggctctaggtcaaatcaatttgagatgtgtttttaccactgaaccatcatgtgattataagaggcctcggtcactccttgttttactcaaaaaataacaataggcttttgaaacaaagaagtgcctgatctcatttttgcattagctttgctattatgttcaaaagaaaaactccgattcaggcaattctacaactactaccaatgtaatgttgattgtgggtgagttct

SEQ ID NO: 88625 - DNA, 600 bp, Chicken  19866894393814_1
tcatttagttcttagctttcaaagaccaaaaggtatacagtgatttccagccccttcccaattattgtttccatttattattttggtatatctgagaaagcagaaaaagtagagcactgggttgtttactactactgcagcttcctctcaccgatgcacgagcttttctcacctgagagcagaatgcagttttgcagccatgcactccccattgctcgtacagctgtgcacgtacaccacacgctcagcatcagagatgtctgtattacaaacaaatgtgagtcagcttgaaaaagtacygaaatacattttgtaaaagctgcttaggaacacctgccagcaatggacaacttttttttccctttcctctcaacgacttctgtttgttgtgcaaatgcttcccaagctcagatggttatgcagcactttattaaagtcagtggaaaagactgtgaaagggagaagaaaacagtgtttcaggagatgtttctagttgctggaagggattcagaagtattgtatgtagaagcaattaggttttgagcagctcttcatgcacagtagtttctgttcagatttcttctcaacttttcttattga

SEQ ID NO: 88626 - DNA, 600 bp, Chicken  19866894393815_1
acattcacattcatgagtgataaaagagctctggaggtggaagtgaggcacgattccttcctcatctccattcatctacatgctgatgatctgcacgtctttcatcttcagacacgcaggacccgatctgagaagatctgccccaatgtggaaaatgtattgtaatgtctttttctctgatgagcggcttataaacgtttgagctaagatttcagcaatcagagctataccttccgccttcgtttcctgtttaaccttgtttctcaggtcttcacttcaatcatgcaattaccgcttatrcatttttaggagagcttcattaaaactgtgcccttgcattggtttcagcagcaccggcattcagttgtgcagcacttgcaggttagattgcagtagctggtttattctcatcctttaaagactgccttttttcccactgtccctgtggaaaagcgagcaatttaatacaatgattccttccaaaacgttttaggtcacatcgttggttggtgcatattggcattatgagatgaaaatcgatggagctgtggcactctatgcagttcgggattccagggctttaattccctccgtttcaag

SEQ ID NO: 88627 - DNA, 600 bp, Chicken  19866894393819_1
accctctgaacctgccaaatacattcagaaaggctccacctgtaaagccactgttatcagcctcacgagtagaagctaaaaccataaacttcataagcctatggacactaaagtaggagacagagacagtcctgtatcacttcaaactaattctatctgtaagtgaagtctgtaaaaatatttacagttacgtagtctggttcagttgatatcattcagctgagaaactgaagaccgtcaacattttacacagacttggatacagacatctacattttgctattctgttagctaaaaaaygatcaaacagcccctttcaccactccaacagatttttccctgaaaacctaagcyacacattcctggaaattccattctctaaatgtgagatttaggcatcagctcctaacattgaagtacgtacacaagggaaaagattttaagtggagtgctaggactcatacagttgtgcacaagcattttcataaccaggtctctgtactgatttcagctgatttcacagctgacaaggtgattattagcagttttcatatgtggcctgtctacacccaaagctttaagaacttccattcaaagcag

SEQ ID NO: 88628 - DNA, 600 bp, Chicken  19866894393819_2
tatcagcctcacgagtagaagctaaaaccataaacttcataagcctatggacactaaagtaggagacagagacagtcctgtatcacttcaaactaattctatctgtaagtgaagtctgtaaaaatatttacagttacgtagtctggttcagttgatatcattcagctgagaaactgaagaccgtcaacattttacacagacttggatacagacatctacattttgctattctgttagctaaaaaaygatcaaacagcccctttcaccactccaacagatttttccctgaaaacctaagcyacacattcctggaaattccattctctaaatgtgagatttaggcatcagctcctaacattgaagtacgtacacaagggaaaagattttaagtggagtgctaggactcatacagttgtgcacaagcattttcataaccaggtctctgtactgatttcagctgatttcacagctgacaaggtgattattagcagttttcatatgtggcctgtctacacccaaagctttaagaacttccattcaaagcagtttggtaatcatgttctcatttatgcacaactacagacaagggaagaaaaattc

SEQ ID NO: 88629 - DNA, 600 bp, Chicken  19866894393833_1
tcccccctacacttttcctgatttcagtttacccttgttatgattcaggtatggaactataaacagtacttcagaaatatgcatcacacagattcacgtgtttatcttctaatagtatttggaattattcttatggttttgtttgctttctgagcgttactgagcactgaatataagctctcccagaagagtctattctaatgccaagacgaagcccatcacagagtttagattcagattccttttctacacacacaatatgagacatttgcctacattgaatttcatctgctattttcytacccattcatttccattamgtcaacagtttttctttgttatttagcacaacttactagtatgcataagtgacactcaycactttggyatttactctcttttccaaatgattttctgaccatatggaagaacctggttcaaactcagggctctgttaattacaccagtaccctcctttaaatagcttttcacttctcatttgttaactgtttattcatttgagcagcttccctgctatctccagtgagcttagcttgactaggaacctagtaaggtctgcctaatgtcttctagaaatta

SEQ ID NO: 88630 - DNA, 600 bp, Chicken  19866894393833_2
atttcagtttacccttgttatgattcaggtatggaactataaacagtacttcagaaatatgcatcacacagattcacgtgtttatcttctaatagtatttggaattattcttatggttttgtttgctttctgagcgttactgagcactgaatataagctctcccagaagagtctattctaatgccaagacgaagcccatcacagagtttagattcagattccttttctacacacacaatatgagacatttgcctacattgaatttcatctgctattttcytacccattcatttccattamgtcaacagtttttctttgttatttagcacaacttactagtatgcataagtgacactcaycactttggyatttactctcttttccaaatgattttctgaccatatggaagaacctggttcaaactcagggctctgttaattacaccagtaccctcctttaaatagcttttcacttctcatttgttaactgtttattcatttgagcagcttccctgctatctccagtgagcttagcttgactaggaacctagtaaggtctgcctaatgtcttctagaaattactatcaaaacatgatttata

SEQ ID NO: 88631 - DNA, 600 bp, Chicken  19866894393833_3
tgcatcacacagattcacgtgtttatcttctaatagtatttggaattattcttatggttttgtttgctttctgagcgttactgagcactgaatataagctctcccagaagagtctattctaatgccaagacgaagcccatcacagagtttagattcagattccttttctacacacacaatatgagacatttgcctacattgaatttcatctgctattttcytacccattcatttccattamgtcaacagtttttctttgttatttagcacaacttactagtatgcataagtgacactcaycactttggyatttactctcttttccaaatgattttctgaccatatggaagaacctggttcaaactcagggctctgttaattacaccagtaccctcctttaaatagcttttcacttctcatttgttaactgtttattcatttgagcagcttccctgctatctccagtgagcttagcttgactaggaacctagtaaggtctgcctaatgtcttctagaaattactatcaaaacatgatttatagagcctttgcccccaggctcaaaaactccttccaagaactctacacatcagcaggcaga

SEQ ID NO: 88632 - DNA, 600 bp, Chicken  19866894393833_4
cagattcacgtgtttatcttctaatagtatttggaattattcttatggttttgtttgctttctgagcgttactgagcactgaatataagctctcccagaagagtctattctaatgccaagacgaagcccatcacagagtttagattcagattccttttctacacacacaatatgagacatttgcctacattgaatttcatctgctattttcytacccattcatttccattamgtcaacagtttttctttgttatttagcacaacttactagtatgcataagtgacactcaycactttggyatttactctcttttccaaatgattttctgaccatatggaagaacctggttcaaactcagggctctgttaattacaccagtaccctcctttaaatagcttttcacttctcatttgttaactgtttattcatttgagcagcttccctgctatctccagtgagcttagcttgactaggaacctagtaaggtctgcctaatgtcttctagaaattactatcaaaacatgatttatagagcctttgcccccaggctcaaaaactccttccaagaactctacacatcagcaggcagactgccctta

SEQ ID NO: 88633 - DNA, 554 bp, Chicken  19866894393834_1
ctcatcagcccctccttgttggtgagaacaaggctcagcatagctccttttctcacaggttcctgtataacttggaagaagttatcatcaacacattccaggaacctctttgatttctggtgcactgctgtgttgtccctttaacagatgcaggggtagctgaaggctcccatgatgaccatgttttgtgactgtggagcaactcctattagtttgtagagggtctcttctactaggtcttccagatcaggcagcctgtagaagacccccactacgatgtctcttttcccctgccttccytttaaccctaacccacgcatgcatatgcctgcaactcctcctgcttgttccccatgctccatgcattgtgtatgggcacttgagttggacacccattgaggctcatttaccaattagaattcccttatcctgaaccttaagagctgtcttactggcctgcaatcctactccaggcccagggcatcctcattgtcagcctcaaagtgcaatgatttaaagatccccaccctcagcaactctagtttaaagctcat

SEQ ID NO: 88634 - DNA, 600 bp, Chicken  19866894393843_1
tggctgctggccgtggcacactgcacccttgcatccccagcactggctttgcttggggattcaagtcagattccagatggaaacaggtttggggttcaaatataaatcatcatctgcggctccaaaggtctcctccaggagcatgagttcgccccttagaccctcgtgcaggcaatgagaacagtgcagtaggtacaaagcagcgtttatgtcccacatgctgatggtgctctgcagcaaacagagctgtgtgcaggcacatgtggaagagcactgagatttacgtgcaagaaagaaggraatgtttgaggtctgacggtgtggcatggtggcagtgggacaaggcacggagctgcagtggagggtgggcagagctttcattctcttgttcacatttcagtcctgatgcctctggtttgtttatttgcttatttctgattatccgtgcatcttgaggtgggctggcttggaggtgctgagtgcttgatgtgctgttggtgctgattgtggcttgcagctcaagacacaaatcccaattggaatgcaaaaggagaaggctttgcccaaacagctgcagccttgtgagccggggttgcactt

SEQ ID NO: 88635 - DNA, 439 bp, Chicken  19866894393843_2
ggtttgtttatttgcttatttctgattatccgtgcatcttgaggtgggctggcttggaggtgctgagtgcttgatgtgctgttggtgctgattgtggcttgcagctcaagacacaaatcccaattggaatgcaaaaggagaaggctttgcccaaacagctgcagccttgtgagccggggttgcactttggtgttgggaagagcccgggtgctgcctgtccaggggcagcacgtggcaaagcatcctgcagagaagggcacggctcaaagcagccgtcccggggcctgcagtgagccctgygttctctcccctgcaggtccctggacaggaagttgcagaggccgctcctggggaagtcccggacgctgcccagcatcccgcagtccccagtgctgagcaggattcccctccttactccgcagcgttccgggaggcgatg

SEQ ID NO: 88636 - DNA, 600 bp, Chicken  19866894393849_1
tcaataattgcatatgaatacatggacatttggtagatctggaagggaaaacagtttcccaacatagcataagatttctttaatacgttgctatggtgaattacgtgaagaagccaaagcttcaacaccatagttgggttataataaaatattgtgaaactaggaattatacattaccaatagtttctcagcttttaaatccaaacatttttcaagttaaaaaaaaaaatcatcataaccctcgccatagttgccattttgacaaaggacttttctatcccaaagcgtgtgcactgagaraattcctaatcttcttttacaattgagagtgttaatcagttctgtcccttagctcttgttttttggcagttcatgtaatgatggtctgggaggctccagataacatttaaggctaaactgagtcagcctggaagggtttatatttatgtaattgctgcatggtatgagaagtgctgcgtgttgtgacatgctcagcattagcctaactctgaagtccgctgtagtcagccaccaccaccctgctatgagtaactctggtctctcttcatgcaacaccttacattgcaaatgtgttaagac

SEQ ID NO: 88637 - DNA, 600 bp, Chicken  19866894393849_2
tccagataacatttaaggctaaactgagtcagcctggaagggtttatatttatgtaattgctgcatggtatgagaagtgctgcgtgttgtgacatgctcagcattagcctaactctgaagtccgctgtagtcagccaccaccaccctgctatgagtaactctggtctctcttcatgcaacaccttacattgcaaatgtgttaagacacagcccttttctggctctttgtgtttttacaacccagacatgagcgtcccaagccactgccagtctctaacccccactgtgatggaaatactraagaaggcagtttttcagctctgctctcattcccatgctgctgggtttggtcctcctttctttgtttgtttgttactagacctcttttctcaatcctgcatattgctgtccaccagacaatacaatgagtaaagaggcagcagtgctaaccagctgrgtatgcagcacaggctgttctatccagctgcatccagtccttggattcaagctgcttttttgcactaagttcctcatactgggtctcataagtgcaggcattagggccacccaatagaaacartgaatgctgtcatgatgttc

SEQ ID NO: 88638 - DNA, 600 bp, Chicken  19866894393849_3
actctggtctctcttcatgcaacaccttacattgcaaatgtgttaagacacagcccttttctggctctttgtgtttttacaacccagacatgagcgtcccaagccactgccagtctctaacccccactgtgatggaaatactraagaaggcagtttttcagctctgctctcattcccatgctgctgggtttggtcctcctttctttgtttgtttgttactagacctcttttctcaatcctgcatattgctgtccaccagacaatacaatgagtaaagaggcagcagtgctaaccagctgrgtatgcagcacaggctgttctatccagctgcatccagtccttggattcaagctgcttttttgcactaagttcctcatactgggtctcataagtgcaggcattagggccacccaatagaaacartgaatgctgtcatgatgttccctgtccagccaacaggaaggttaatgggatgctctgctcagyagaaatctggaagcaggcatttggtacaaaacattgttgccaggaataccctgtgagataccagcatgccaggatacagagagaatgtgctgttcattttcagggtccactgat

SEQ ID NO: 88639 - DNA, 567 bp, Chicken  19866894393849_4
ccactgtgatggaaatactraagaaggcagtttttcagctctgctctcattcccatgctgctgggtttggtcctcctttctttgtttgtttgttactagacctcttttctcaatcctgcatattgctgtccaccagacaatacaatgagtaaagaggcagcagtgctaaccagctgrgtatgcagcacaggctgttctatccagctgcatccagtccttggattcaagctgcttttttgcactaagttcctcatactgggtctcataagtgcaggcattagggccacccaatagaaacartgaatgctgtcatgatgttccctgtccagccaacaggaaggttaatgggatgctctgctcagyagaaatctggaagcaggcatttggtacaaaacattgttgccaggaataccctgtgagataccagcatgccaggatacagagagaatgtgctgttcattttcagggtccactgatttgtggcataggagtacactaaaatgaaagccctattgggacagcagcctccagctccctttgcctccaccatgtaccttcccctcttga

SEQ ID NO: 88640 - DNA, 504 bp, Chicken  19866894393849_5
ggtttggtcctcctttctttgtttgtttgttactagacctcttttctcaatcctgcatattgctgtccaccagacaatacaatgagtaaagaggcagcagtgctaaccagctgrgtatgcagcacaggctgttctatccagctgcatccagtccttggattcaagctgcttttttgcactaagttcctcatactgggtctcataagtgcaggcattagggccacccaatagaaacartgaatgctgtcatgatgttccctgtccagccaacaggaaggttaatgggatgctctgctcagyagaaatctggaagcaggcatttggtacaaaacattgttgccaggaataccctgtgagataccagcatgccaggatacagagagaatgtgctgttcattttcagggtccactgatttgtggcataggagtacactaaaatgaaagccctattgggacagcagcctccagctccctttgcctccaccatgtaccttcccctcttga

SEQ ID NO: 88641 - DNA, 600 bp, Chicken  19866894393857_1
gggctgaaacagagaaggtgggaaaataaatatataagggcacaatccactattagagaattgggaagagtaactctctagccattcaccaataattgcatgaccggttttgcccacctgaaagattcattgatggctttctagaaatctaggaagtgtacttgagctggaagaaaataaaatacatgcaagttcccaccctaaattacaaagatcaacagctcccatcatgaaggacatatttcagtgtatgctcaagcactcttccgagctgcccttgtaattctgaaatctttgctygcatcactctttcaaatcagcaaaggttttgactggatattgacttcagccaacatgggttcaaaagaccgaagaaagggaattcctttatcccttcaatgggaaccataaatgaatgtcaaactttaatctttcagccatccttggtattcaaactgaagacatgctaaaaatgggagagataaatatgtccgtaccccaatgacttgctgattctgccagatgactattcttcatttgcctacagagcttgcacacacacacattgggaagcagaagatgtgaagagaatcaagaaaa

SEQ ID NO: 88642 - DNA, 600 bp, Chicken  19866894393866_1
cagtctgatttgtcacatttctaaagccgaggttcagaagtcacagcgccagcagtttgttagcactggtgtgcaaaagctatctgacataaggcaggaaaatccaaagctgtggtatttcagctgtgtccagggcttcaaatacagctacaaacaaggacaaaggaaaatgtttgaggaaaataccttgaatgcattgcagtcagtattggatatccgtgtcagtgaggtcagaccattaaccatcactgcatcagagggcattacaaacacttctcagacacgtgcgcggtccaaatmctttaatggtaaaaaccaacttgatcagatttgaggagaggataaatgctccaaccctggtgcatcactctccatcagacttctggaggggccccaggctgcctccaccccgccttggctgggtagagcaaagcagcagctgcacagagcctacggatgaatgcagcgcacacatgtgcactcggccaagttgagcatcccgcaaggactcccgctgcttgtggcagaggcacccatttactttctctttgagcatcacgtgtattcttctcagctgtggaaaatcagcgaagaaagaag

SEQ ID NO: 88643 - DNA, 597 bp, Chicken  19866894393874_1
agttactgggaaaatgctgcccatgcagtccacctttcatcagctcaaacaaatggaagtctgaaggtgccaaatctggactatatggtgggtgtggtagggcggtccagccaagattggctgtgtgctccatggtcttcaaactggtatggggcctggcattattgtgttgcaagagaaaggttttcatcttctcgggtctgactctggaagtttgagccttcagcttagtcagcactgcaacaaagcggtcagagttgatggtttgtccaggttctgggaaattgtgaaggatcaccrctttcccayccgaaagagagcacatatcatttaatctgaatctttttgaatgttttgtttggtggggagttcacacatcaccatgccacggactgctgttttgactctgacttgtagtgatgataccacaggtacagtcatcttcggctttgtatgggttcagtagatcctgacaaacttacatatggtgtccgttctgtttcgttgtgagcatttgtgagatccacctgatgcaaactttgcaatattccaatgttgcctccatagtttccagagcaatgaagctgatactgagct

SEQ ID NO: 88644 - DNA, 588 bp, Chicken  19866894393874_2
gaaaatgctgcccatgcagtccacctttcatcagctcaaacaaatggaagtctgaaggtgccaaatctggactatatggtgggtgtggtagggcggtccagccaagattggctgtgtgctccatggtcttcaaactggtatggggcctggcattattgtgttgcaagagaaaggttttcatcttctcgggtctgactctggaagtttgagccttcagcttagtcagcactgcaacaaagcggtcagagttgatggtttgtccaggttctgggaaattgtgaaggatcaccrctttcccayccgaaagagagcacatatcatttaatctgaatctttttgaatgttttgtttggtggggagttcacacatcaccatgccacggactgctgttttgactctgacttgtagtgatgataccacaggtacagtcatcttcggctttgtatgggttcagtagatcctgacaaacttacatatggtgtccgttctgtttcgttgtgagcatttgtgagatccacctgatgcaaactttgcaatattccaatgttgcctccatagtttccagagcaatgaagctgatactgagct

SEQ ID NO: 88645 - DNA, 600 bp, Chicken  19866894393876_1
tcactctcccagcctgccttgcatcttcaaagcgctccatgagaacaaactaattaactgtccagagaagaagctcatgactaagagctgagaagccatgtgagtcaacccacttgcaacaggtctttgcagatttcagtaaaaattcattttggaggaagatctgttgactggcccgactggtcacaccaatccccggccacattccagggctgtgagcgctgcaaacggacccaacccggagaagccccactgacatcaaaagagcaacacctcggaggaatgccccaaaaccaaccrtgtggcttcctcctcctcctcctcgtttgtgtgtgcgtgtgcagccagcgtgcactgaaagtgctgagctaacagtccctctgcagatccaccaaacaagggcgcatcctgctcggcactgttggccaaactgcccttttctgctgtcttgagaccaatgatttgggaacaacaacccatactggggtcttccaatggagacgtagccttggttgtgaccaacttagcactgctctggatcagcattcagtcccagctttccttttccttgctctgggcaaagcattaagctcccacaag

SEQ ID NO: 88646 - DNA, 600 bp, Chicken  19866894393876_2
aattcaccactggatccaggcgccttcaagtgagctcctggtgcagctgtcaccctcgtgtccctggggcaggcagccatgtgctttccatagaatcagagaaccacagaatccttaaggttggaaaagacctctgagatccccaagcccaaccccattccatcccactgtgcccaccaaccacgttcctcagtgccacatctctgcagttctgaacccctccagggatggtgattgtaccacctccctgtgcagctgtgccaatgcatcaacacttcttctgagagggaatttttcctratatccaagctgagcaccagggcagatamagcaaaaacaatccatggagaagctttgtgcccacgagagcccacatctacatgaaacatctgggttgggtttgtgctgcatgtacagatgggactcrtagcagacagcagcggctctccttgctcctcacctgcttcatgggcagaggcatttgggagatttgcatcatttttcctttttccaaaagagaaatgcttccttctgggtttatcagtttgtgtgcaaggagctgccacagcccaaggggctgcaactgggacttcacagctg

SEQ ID NO: 88647 - DNA, 600 bp, Chicken  19866894393876_3
gtgagctcctggtgcagctgtcaccctcgtgtccctggggcaggcagccatgtgctttccatagaatcagagaaccacagaatccttaaggttggaaaagacctctgagatccccaagcccaaccccattccatcccactgtgcccaccaaccacgttcctcagtgccacatctctgcagttctgaacccctccagggatggtgattgtaccacctccctgtgcagctgtgccaatgcatcaacacttcttctgagagggaatttttcctratatccaagctgagcaccagggcagatamagcaaaaacaatccatggagaagctttgtgcccacgagagcccacatctacatgaaacatctgggttgggtttgtgctgcatgtacagatgggactcrtagcagacagcagcggctctccttgctcctcacctgcttcatgggcagaggcatttgggagatttgcatcatttttcctttttccaaaagagaaatgcttccttctgggtttatcagtttgtgtgcaaggagctgccacagcccaaggggctgcaactgggacttcacagctgcaaagaaatgcgagcaattcccaattggt

SEQ ID NO: 88648 - DNA, 600 bp, Chicken  19866894393876_4
agacctctgagatccccaagcccaaccccattccatcccactgtgcccaccaaccacgttcctcagtgccacatctctgcagttctgaacccctccagggatggtgattgtaccacctccctgtgcagctgtgccaatgcatcaacacttcttctgagagggaatttttcctratatccaagctgagcaccagggcagatamagcaaaaacaatccatggagaagctttgtgcccacgagagcccacatctacatgaaacatctgggttgggtttgtgctgcatgtacagatgggactcrtagcagacagcagcggctctccttgctcctcacctgcttcatgggcagaggcatttgggagatttgcatcatttttcctttttccaaaagagaaatgcttccttctgggtttatcagtttgtgtgcaaggagctgccacagcccaaggggctgcaactgggacttcacagctgcaaagaaatgcgagcaattcccaattggtccaattggttgctcttcctttgcaatgatgatgtttggatgcttgcatggctttatgatctttaaggacccttccaacccaaccattctatgggccta

SEQ ID NO: 88649 - DNA, 599 bp, Chicken  19866894393880_1
  misc_feature (1)..(147): n is any nucleotide
nnnnnnnnnnnnnnnnnnnnnnnnnnnnnnnnnnnnnnnnnnnnnnnnnnnnnnnnnnnnnnnnnnnnnnnnnnnnnnnnnnnnnnnnnnnnnnnnnnnnnnnnnnnnnnnnnnnnnnnnnnnnnnnnnnnnnnnnnnnnnnnnnnncttgttcaattctgaatgtgcagatagctttggggttgggggttcccacgtttaatgcaggaattatattgtggttaaactgcctttgagtatgtgtgagcttcagcattttattttgagaatagctatctgaccccttctgtaatggtgttygagtgttcctgcgatgctgtgctccrgctgttcttagtgttaaataaaaggctttccattattaacttctgtagaaaacttgaggagaaaaaagaatgcgtgtagttgaattgaactgccccaacctgtagaaaagtgatccagttcagcttgaatattaggaagcattaccagtatttgggagtgtttttgtcattttgcaccacataatttaaaacattcagtagtgtgaattaagtcatcttctagattgactaaacaattattttaatttaaggtaaaaaaaaaaaatccacaaa

SEQ ID NO: 88650 - DNA, 599 bp, Chicken  19866894393880_2
  misc_feature (1)..(121): n is any nucleotide
nnnnnnnnnnnnnnnnnnnnnnnnnnnnnnnnnnnnnnnnnnnnnnnnnnnnnnnnnnnnnnnnnnnnnnnnnnnnnnnnnnnnnnnnnnnnnnnnnnnnnnnnnnnnnnnnnnnnnnnnncttgttcaattctgaatgtgcagatagctttggggttgggggttcccacgtttaatgcaggaattatattgtggttaaactgcctttgagtatgtgtgagcttcagcattttattttgagaatagctatctgaccccttctgtaatggtgttygagtgttcctgcgatgctgtgctccrgctgttcttagtgttaaataaaaggctttccattattaacttctgtagaaaacttgaggagaaaaaagaatgcgtgtagttgaattgaactgccccaacctgtagaaaagtgatccagttcagcttgaatattaggaagcattaccagtatttgggagtgtttttgtcattttgcaccacataatttaaaacattcagtagtgtgaattaagtcatcttctagattgactaaacaattattttaatttaaggtaaaaaaaaaaaatccacaaactcaacatgaataaaaaaccaatttt

SEQ ID NO: 88651 - DNA, 509 bp, Chicken  19866894393880_3
aaggtaaaaaaaaaaaatccacaaactcaacatgaataaaaaaccaatttttattcttccatcaggtcgttgtaatacacctaatggtacaaagactctagagacaaaatcccagagttttccagaaagggtaggtgcggacttgtgaattcatgttttctggaattaaaattggagaagtgaacagaagggactgcataagaagagctgcaaatgttactggttattaaactactttgctagagaatttcaacattgatgagaaaatgtactgaagtctgcttggattgctttgtttgmtcaaatattcttagaaaagtaaggaattttttgttgtaggttgtctacactaagttccctgaaagcagcattgtgctaatgtaggaagtagaaaatgggtaattgaagggggaaaaaaatcatctttagtagctgtattgttgcatcttccatgttttccctttttttttttttttttttttatccctttttcttttaaataattttag

SEQ ID NO: 88652 - DNA, 600 bp, Chicken  19866894393881_1
aaagtaaacatctaagtcaagaggctctcgttcatacacagatggtttcagatcactgtaattcaaattacgttctgaatgatgttctcattcagatgtaaaatgacctttgactgattcacgctagagatacaaggggctgttctatattcaacacagcattcatacacaagtttaacatacttcaacatatacatcttgacttgacacttcaaattatttcctttggtgtctccatgtagatatgattaaaggctcttatctccaacctctaacaatacccagaggaaaacagggaaygggaaaagtcaaagtcggctcctggttgcatattcaacttaagagagaactcatcatgtcaaatgacacttgcaggatatcatgtgcatctacctcctcctctgcagcccatagaagccatctttttctatttcttctcattcctcccggttagtgagagttttaggtaattccaaaaaatatatatcaaccaaatgcttacttcattactatgccttatcagcactcgtaaacaccagcactgtatctctttattgaaattcacctccttgccaagccatcacccacaaaaaaagatat

SEQ ID NO: 88653 - DNA, 599 bp, Chicken  19866894393883_1
  misc_feature (1)..(78): n is any nucleotide
nnnnnnnnnnnnnnnnnnnnnnnnnnnnnnnnnnnnnnnnnnnnnnnnnnnnnnnnnnnnnnnnnnnnnnnnnnnnnntaatgacttattcacacattcacagtcaagctcgtgctttctctgatatgtagtttataatcaacagactaacactggctgtagcaaattgcccataatcagtgctgtccagagctgggggaaggtacatcagcatgccacagctccagaaatgtgtaggtttgtagaatgctgccagcagttctggtgaacccatcagcctccttttcctagaagctctcrtattagtgtcatctttatgttactgtatagttatcagtgagattgttaaacttaatctagtgatacagtttattatttgcttaacaagtcttgctagtttgccactaatgcatgacacttattaagggtacttatatgttaattttggttttgttagcaatgaaattcccattgaattacgttaatccaaagcccaccatttataaaatggaatactattttataaagatttccataatagaaaactaaagccccaaggaaataaatcctttagaatgtgcaccttgttttagttgcta

SEQ ID NO: 88654 - DNA, 534 bp, Chicken  19866894393883_2
agtgatacagtttattatttgcttaacaagtcttgctagtttgccactaatgcatgacacttattaagggtacttatatgttaattttggttttgttagcaatgaaattcccattgaattacgttaatccaaagcccaccatttataaaatggaatactattttataaagatttccataatagaaaactaaagccccaaggaaataaatcctttagaatgtgcaccttgttttagttgctaaattctcctgtgtagcagaagaggaggattttcctgcaaggtcagtttcattgtttccrtcttgcactgcagctgcccaagtcttttcattaatgtgacccaaggggtttcagttgcaaatgtcccactgtccccatttgggcttgacctcaagatgactttggcattattattgctaggagagaatcagagctcaacatggtgatttacttaactgtatacaaactttactgtgtgttgtttaaatgcacatttcactgtttacagtgcttcactaatatattttaaaaagt

SEQ ID NO: 88655 - DNA, 600 bp, Chicken  19866894393885_1
agagggaggctccggccgctccgtgctatttgcccgtctaggagagggtctgccgctagcatgtgacacgggtgaggcgagtgccacggacgcttctgtacacacgcggaccgcagggatgaggctccggcggctgctgtgcgtcgtgttcctgctcctggtcagcctgctacctgccgccgcgcagagaccgggtaagcgctgctcgcacctcccgcgctgccgccttggggacgaaggttcgaagcccgcgtgtgcgcggcgcacctgcgttagcaccgcgcgtacttcggggtaaayggggccgggctgcggcggcgggcgggtgctaccggctgggtgtcacggcccgcccgcgcccggggacgaaaagaaccgcggggagaggcgcggccgtctgcgacgggacgggacggggcgcgcgccgaaagggagagtgaaacttgcagtagttgcctgacgccctgccttctcccgcagccaacctggccctgcgcaggaagctgcaccgacacaactgctcgcaccggcggtgcatgccgctccactcccgcgtgccctttccctgagcgcccggcccagctcggcaaggtaatgctc

SEQ ID NO: 88656 - DNA, 600 bp, Chicken  19866894393899_1
aagctgtcaggtaacaggctgaaggccaggctgggacacgtgtggtagaactccgaagtgcttcatatcccacgtgtgaaattgatcaggaagtgaatcacatagaagtgtgacagagaacaacggagtgttgagaagggtttgtgcttattgggagctccgagtagctgcaatctataaaagaagaatagcgttcatctacatcaaagtagaatcagtttcctggttcttcagatgaaacgttatgggagaggtcttaaaaactgtggagagtcaggggagtttcagtacaggagaacmtcttctaaggcactgcgactgcatttacaaaaaccataacaaataagtcagtacaattccagctccaacacaggacagccttgagaagttcagtcaaaattatggagggtgcacaaaaccgggcagtgagatgatgacaaacagacctgtgctgttaaggccgggatcccaaggctaaaagaaaccaaagagccaggctaaaggagcgtgctggcttaagagcaagttataaacttggtacaaggtagaatatcagtagtatcctaggtttcagagtagaagctttgtagaaagaccaga

SEQ ID NO: 88657 - DNA, 515 bp, Chicken  19866894393900_1
ttaaaaaaatagagcacatgtttcaaaccaacttatacattaagagtaggtgctttgtaagtaacaaatatagtacttctaatgaataaaacaggtagacaaactacgtactattacttcatactactaagatgagattaatacagtcatcctgctggatttttgttcagtgaatcacaaatagcaattcatttggccactttaattttactttaaattttgaaaaattaaatacattttcagtctcttgttactgaatttcctttagcacgattttcaaatcatacattacaaaaatgyacatacatttcatagttcagcaaatagtaattacatgtgttacattaaaaacaaaacaaaacaaaaaggtcatctggaaattctgatgtaattatctttattctcaggagctgtatttacaaatgttccattttatggtccttatgaagaattgtaaactggtaattaatctctctaaaaatgttacttgggcagatataaagtcccctaacatt

SEQ ID NO: 88658 - DNA, 600 bp, Chicken  19866894393904_1
cacaattcaacccaacttgtgcaagttagaataaagaagggcacttccagacgttctgtatgtcaccagttaagagagtagaatttttgcctcagataaagaacagagagatgcttctcatctagatggtaacaaaggatttatcagtgaaaaatagagatggggaaacatcgccagccagggctagaagattacagatctttaattaaactgcccacaggtagcttcacctagctgctattgtctgggaggaaaactgcttctttctagttaggacagacagagattgtctttttctcraacttttttgcagattatccccctgtttattattctttgtaagtggctgggtactggtgcagtgagccactctgaaagggtttgaaactatttttcctactggctattggctgaaaagccagacatttaaaaataataatagtttatgtccagaaaacattttctagtgacctgaattgttttctgctttgaatagatattgaatctcagtgtattgcatgtctcctacatcacatgcactaattcagaaagcttcagaaaattgcactcgggaggatcagtagtttcccccaagattgg

SEQ ID NO: 88659 - DNA, 600 bp, Chicken  19866894393906_1
ctgtttctgcataggctgcccaggaagagttaaaaggcacatggagtgaaaacttctgtgactgaaaaattaactctatatctctctatataccagagtgaaattcaagctgccgttaacacagagcaaaatattgccattgcttccaacttcatctagcgactctagtccagttgttgtggaacaaaattccacgttatttaaagccaggtccaatgataagtagtaaaaagttaaaagtatacctaatataaacaaatattacattagccagaagaattagtgtaaaggacaaaggaygtttactacattgtctacagggttgtatggaaatgcatgcggacaagtgtgtacagagacataccccttgtgtctgtagggacagaggtgtgatacgccgcttttcccactcattggggcgtggttcgggtgtggattccatgaaattgcgcttgagctcactaatgctagcctggtgtttcaataagtcgtcctgggtcttatccaggtcctagcaacccgcaacgtaaaacaaagtaggacaaaacacgacaacaaaagcaaacttaacagttaaaaaaaataaaagaatcaaaccca

SEQ ID NO: 88660 - DNA, 600 bp, Chicken  19866894393908_1
accaacagcactgcacactgagtatctgttaaaatactgcaattattttttccaataacctgatgaaatcccgtcaaaatacactctgtagctggaaaaagggagctccagctgcacgcaacctgttctgctgcattgctttcatgtcctacaagattgctgtgcttcaaaccaggaaattgatttcaggatagagctggtaaattccctcatgacgaaagctgtgcagagctgcaggattagcattgtgtcagctcccagcaaacaccccatgcaaacagctttcattaccaacgtgayacctggactaccactttggtattatcctcaacctctttcaactggaaagagctttctcaatacctgacaatgagtttttaggggcaggaaagtgttttttttagccttggcagcacagaatgcaatacagctatcatccacatctctggctgctgatgtcacaatcattatatatatataattcatattaacacatatttatatataatacaacagttacaaagtttggattcttaactcttaagatgtctggcaaatttctttgatattgcccattttttccagttttcagaagaattt

SEQ ID NO: 88661 - DNA, 583 bp, Chicken  19866894393913_1
ccaccatctcagctgcagcttttcttcaacctaaatgcctgacacagcagccatcacatttctgagaactctccaaagattcacggcagtttattctcaaaaaaaaaattaaaatctgaggaaatgaaatctgatttgaggagcacaagatgaggaaagcattgcccgaaggattggaagaaaaaaaatctcaccaaaagccttagtaataaagtcagagtctttcagctttggctttttgtccggggcatttctcaaacacacatatattttaatgttttaatatttctatgggtcctwgaggcactactgattccgccacagtgtcatttttgaagacgccgtctcaaatgccaataacacagggagagcttcagacttccaaagcccagcagcatggtgttttacttcccaactggaaacgggtgcttctgttagcaacgtaacaggcaggagcaccttcagagtcaaagagaatccctaggccaccctctttcaatgtgcctgtccaaaatggcagctctgaggcaagtacaccagctctgtgaaacagcttggggctgacatccacgcccacaacaca

SEQ ID NO: 88662 - DNA, 600 bp, Chicken  19866894393917_1
tggtagacgtttataggcaaggcaagtgggtaaatgtgctctgacatcctgcagagcaaagctgggagcaaacactcccaccccagcccagaggtcagggcagaggtggacagaacatctgggaatgtggaaatgctctgtggcctgctgacgcacctgtccccggcaccacaacctcccattgttctgcctgctccctctgtgccagacatccagacattgtccactctatcccagctcttcagcccataggatgcatggggcagggaagtcctggcttgcagagatgtcaggcacccyagagcacatctcagagagggtacactcagttttgcgtacccaaatcccagtctcgctgaaaatgatacagagaacagtcggtaccatggaaagcacctaacattatttgtcatatttccaaggctgtcataatgaattagtgctccttgctggttttcagaccaggcctgtgccatcctgcaactcctggcagcttttgaatggaccatgacctaggaagcttctcagcagctccaggaacaggtccctgggagaaaacacagacagcatgtcattgagccaattgctttgagagctaat

SEQ ID NO: 88663 - DNA, 600 bp, Chicken  19866894393938_1
tttagtgctgactaattttaatgttccttttttcttgtcttcccatccctgcacaggataatgtataagtgtaagagttgctatactgcagttaaaaaggctttcttctgagctgaatcttaccatgccaaagctttattaaacataaaaacaaagttaagcacatcaggtttatatttctccctactctgtcattctcctgcacaagcatttatgaggcttttggagggtatgaattaccaatcctgcttgctctttagtgtttgagcccagcagacttcaacaggttttggatcaggscacgagagcattcatagtttgtttcaacaagtaatattaactgagtctaaaaacagtattaagtcatttcctctacgtaattagtggggttttatgatgctgaatgggagtttattaatacaacataatttggcaagcttgtatgctttcattcgtccttttaaaaatatacgaaaaaaaataaattagttgtatgttttytttgttcccaaagggaatccttggttcaggctttgccctgaaggtacagcagaaacaaagacagaagcatttcaaccgtcaaattccagctgctgcttc

SEQ ID NO: 88664 - DNA, 600 bp, Chicken  19866894393938_2
gcacaagcatttatgaggcttttggagggtatgaattaccaatcctgcttgctctttagtgtttgagcccagcagacttcaacaggttttggatcaggscacgagagcattcatagtttgtttcaacaagtaatattaactgagtctaaaaacagtattaagtcatttcctctacgtaattagtggggttttatgatgctgaatgggagtttattaatacaacataatttggcaagcttgtatgctttcattcgtccttttaaaaatatacgaaaaaaaataaattagttgtatgttttytttgttcccaaagggaatccttggttcaggctttgccctgaaggtacagcagaaacaaagacagaagcatttcaaccgtcaaattccagctgctgcttctctcatacaggtacaaagttcttgcatttcacatattatcatttttctccatttgtacttttttcaaaacttggcaatgttccacagcctaattcatgtagaaaattgtgtatgagttacagacacaaatctcttaaacaacttctgtctttacagtggtattttcaactaatgaccaggaagcttcactcccaaatcaga

SEQ ID NO: 88665 - DNA, 600 bp, Chicken  19866894393938_3
acaaatctcttaaacaacttctgtctttacagtggtattttcaactaatgaccaggaagcttcactcccaaatcagatcaaattctttgctttagcagtttaaaatagaaactgaaggctatcctgtggctgctgaacaatttaactgtggaaaaagttatgaaatgctgtgtttgcaatagtgaaaaatagagaaaaggcttcatgtaaaatcatgttttaaaacaatattgttccttgtagaaacgaatgtcagatatatttccttttcctttgtacaaataaattcttaaaaatctyaattttaggagaattaaatcggagatgactgggaaatgtgagattctgcaaaatcaatcttttctgtaggattacatagaggcagaaaatttarttctgtctgttaaaagtatggttgcagttctgtgtgaagttggcatttaactcacgagaagtattaatgttatttcattgcatgtttttttcctccttgtttccccctcactcagtttccgcatgtagctgtagaagcacgtaatcaaattcaaaagaatgcagatgtacccctatgttatatcatttttgccttcccgtatgact

SEQ ID NO: 88666 - DNA, 600 bp, Chicken  19866894393938_4
gcagtttaaaatagaaactgaaggctatcctgtggctgctgaacaatttaactgtggaaaaagttatgaaatgctgtgtttgcaatagtgaaaaatagagaaaaggcttcatgtaaaatcatgttttaaaacaatattgttccttgtagaaacgaatgtcagatatatttccttttcctttgtacaaataaattcttaaaaatctyaattttaggagaattaaatcggagatgactgggaaatgtgagattctgcaaaatcaatcttttctgtaggattacatagaggcagaaaatttarttctgtctgttaaaagtatggttgcagttctgtgtgaagttggcatttaactcacgagaagtattaatgttatttcattgcatgtttttttcctccttgtttccccctcactcagtttccgcatgtagctgtagaagcacgtaatcaaattcaaaagaatgcagatgtacccctatgttatatcatttttgccttcccgtatgacttatttctccaccttcatgagtgaatgtggatttccaggtcaggctctgtatggaaacagtagctaactgtaaagcttatgcttgaaattaaaca

SEQ ID NO: 88667 - DNA, 599 bp, Chicken  19866894393939_1
  misc_feature (1)..(4): n is any nucleotide
nnnnaatggctttaagtaatcctctgaaaaatgcctttgacataaaaatctcattactttcccaacagctcgaaatacacacagttcagatcacaccaaagtgtgagagaaagtcttcccccttcaacgaatattagcttacttcggagtatttcctttcctacttatgaagtttcagtgcaaatgttctgcagaattatgggtttcgtgagctttctcatttcaggttttgccatgtgctttctctatccaaataaataataaaagtaattctaaattttcatggcttggggctatcgygaaactttctccccagtaaacgtgatttaaatacaaagaactgttagccaygatcatcataaaataaccaaccatgacccagatcccttttatagggggctcttcttggtgtgcatcatttccataaattccttgygtgcgccgtggccttcagtactgcacgttttgaatgtgtttccatgaactatttcctgttttatctttccccttttaccattgggtggaattgcctcgtgttgctaagtgagtaaatgtgcttgggcaatatgtgatagacctgcacaccgtgctctgttgga

SEQ ID NO: 88668 - DNA, 600 bp, Chicken  19866894393939_2
cattactttcccaacagctcgaaatacacacagttcagatcacaccaaagtgtgagagaaagtcttcccccttcaacgaatattagcttacttcggagtatttcctttcctacttatgaagtttcagtgcaaatgttctgcagaattatgggtttcgtgagctttctcatttcaggttttgccatgtgctttctctatccaaataaataataaaagtaattctaaattttcatggcttggggctatcgygaaactttctccccagtaaacgtgatttaaatacaaagaactgttagccaygatcatcataaaataaccaaccatgacccagatcccttttatagggggctcttcttggtgtgcatcatttccataaattccttgygtgcgccgtggccttcagtactgcacgttttgaatgtgtttccatgaactatttcctgttttatctttccccttttaccattgggtggaattgcctcgtgttgctaagtgagtaaatgtgcttgggcaatatgtgatagacctgcacaccgtgctctgttggagctcttcctgcatggtgcagaattgtgttgtgagctctgtgtctcccttgca

SEQ ID NO: 88669 - DNA, 600 bp, Chicken  19866894393939_3
gcttacttcggagtatttcctttcctacttatgaagtttcagtgcaaatgttctgcagaattatgggtttcgtgagctttctcatttcaggttttgccatgtgctttctctatccaaataaataataaaagtaattctaaattttcatggcttggggctatcgygaaactttctccccagtaaacgtgatttaaatacaaagaactgttagccaygatcatcataaaataaccaaccatgacccagatcccttttatagggggctcttcttggtgtgcatcatttccataaattccttgygtgcgccgtggccttcagtactgcacgttttgaatgtgtttccatgaactatttcctgttttatctttccccttttaccattgggtggaattgcctcgtgttgctaagtgagtaaatgtgcttgggcaatatgtgatagacctgcacaccgtgctctgttggagctcttcctgcatggtgcagaattgtgttgtgagctctgtgtctcccttgcaagaggcaaagtggaggtgtaagaaaggcacaatgcagatggagacttgcccagatggtggtgggcatggcataggctccccagga

SEQ ID NO: 88670 - DNA, 600 bp, Chicken  19866894393944_1
tttcctttacaactttgtagaaggatatatatatatgtatataaggaacttgaacctgatagtacagacataaaaatatatattaaaatggtgtgacaggaaaagattatgttaacaactattttccagtctgtaaaatatggggaaagtgcataaattcatgggctggaatgagaaattgtctcccttaactccactgtgttataatgagggccttccacttttgttaagaaatggagcctttagaacctagcaacaaaaagagttcatttgtattaaagatttgtttaaggatggacrttttaaatcatttgaccaatttgtagaagaatttaatattcctggagctcagttttcctggttyctttggataagacatgctattctttgtgaattaaaaaaaggtatagaaatgcaaatgtcacagattgaaaaattgttgtacaaagagactgtctcactaaattgatttcaaggctatataggacattgtcagtatccttagacaaaggcaaattggaagttaaagagaaaaaggagagagatttaggtaaagatctaaatatgaaagaatggaagcaggcagatagtttaataaaa

SEQ ID NO: 88671 - DNA, 600 bp, Chicken  19866894393944_2
cagacataaaaatatatattaaaatggtgtgacaggaaaagattatgttaacaactattttccagtctgtaaaatatggggaaagtgcataaattcatgggctggaatgagaaattgtctcccttaactccactgtgttataatgagggccttccacttttgttaagaaatggagcctttagaacctagcaacaaaaagagttcatttgtattaaagatttgtttaaggatggacrttttaaatcatttgaccaatttgtagaagaatttaatattcctggagctcagttttcctggttyctttggataagacatgctattctttgtgaattaaaaaaaggtatagaaatgcaaatgtcacagattgaaaaattgttgtacaaagagactgtctcactaaattgatttcaaggctatataggacattgtcagtatccttagacaaaggcaaattggaagttaaagagaaaaaggagagagatttaggtaaagatctaaatatgaaagaatggaagcaggcagatagtttaataaaatggatttctatgaaaataagacatcaagttgttcaatttaattatagcttattcagaagacgta

SEQ ID NO: 88672 - DNA, 600 bp, Chicken  19866894393949_1
gatcaaaacatttcagtttgatttcccctgcccagcaccaaatggatcatccagtcacatcggtcttctgtgtcatctgtggctaccctggcttgaggtgctcttcaccaagacctaaatcgtgacataaggaggctcaatcttctgagcctcccaggtacctacaggtagccactcagtcttcaggacaccatctggcagactgtcttctactggaaacttgtctgtgttctggcaagagtttgccgaagtgcatgcatctgggcaagattttttttagttcagatgcatcagcagatycaagtccggaagctgcacaagtaatcctggctgtcttcagaccaggtttcccagatttttgaaatggagctcccatctcyaccaacctctagaaagatgtccgctgctgaagtgtaaggcatcctcttgtggctctgtattctctgtctcaacacttaaaagtaccgctgttccttgtgttagaacatgtttccttctaacagtcttcaatggaaggtgatctgactgatgggtaacatcataaagtaacagctgtggcattcacaatgggggggcaattcccaccacacaactgtggtt

SEQ ID NO: 88673 - DNA, 600 bp, Chicken  19866894393949_2
ggctaccctggcttgaggtgctcttcaccaagacctaaatcgtgacataaggaggctcaatcttctgagcctcccaggtacctacaggtagccactcagtcttcaggacaccatctggcagactgtcttctactggaaacttgtctgtgttctggcaagagtttgccgaagtgcatgcatctgggcaagattttttttagttcagatgcatcagcagatycaagtccggaagctgcacaagtaatcctggctgtcttcagaccaggtttcccagatttttgaaatggagctcccatctcyaccaacctctagaaagatgtccgctgctgaagtgtaaggcatcctcttgtggctctgtattctctgtctcaacacttaaaagtaccgctgttccttgtgttagaacatgtttccttctaacagtcttcaatggaaggtgatctgactgatgggtaacatcataaagtaacagctgtggcattcacaatgggggggcaattcccaccacacaactgtggttgaaagctgctggaaaactcaagcatttcagtaggggcttccacttatgactgtaatagcttgagcctttgcttgtttttt

SEQ ID NO: 88674 - DNA, 599 bp, Chicken  19866894393956_1
  misc_feature (1)..(52): n is any nucleotide
nnnnnnnnnnnnnnnnnnnnnnnnnnnnnnnnnnnnnnnnnnnnnnnnnnnntatgcgtgctccacttccagaagcagttaaccatccccatgtagacaccttaaaacagagttagttacacaggatttagctagccaggaattcccaccaattgaattaaaaaaaatacagaaatgtttaagcacttatttttctgaaattttattaaggcactgagtagttattttccaagagtaatgccgagcttctctgatcattaatttgaaggctccaccatactacatctactattctgaaawgatgttctgactcttaaatatttagtcccttatggcaaagtrtataatgtggaaaatagtaagccacaagccttaggcttggttgtcctgaaactttcatgctgtaggatatgccatacactgcagtacgatccttgttttctgcttcctctctgggcttggcctggactttaaaagaaggctagaattcctggaaacttctgtcctggttgacaagggctattattttgttaatgacatgaggaatataagttaaatcatagaatggcctgggttgaaaaggaccacaatgatcatcg

SEQ ID NO: 88675 - DNA, 599 bp, Chicken  19866894393956_2
  misc_feature (1)..(10): n is any nucleotide
nnnnnnnnnntatgcgtgctccacttccagaagcagttaaccatccccatgtagacaccttaaaacagagttagttacacaggatttagctagccaggaattcccaccaattgaattaaaaaaaatacagaaatgtttaagcacttatttttctgaaattttattaaggcactgagtagttattttccaagagtaatgccgagcttctctgatcattaatttgaaggctccaccatactacatctactattctgaaawgatgttctgactcttaaatatttagtcccttatggcaaagtrtataatgtggaaaatagtaagccacaagccttaggcttggttgtcctgaaactttcatgctgtaggatatgccatacactgcagtacgatccttgttttctgcttcctctctgggcttggcctggactttaaaagaaggctagaattcctggaaacttctgtcctggttgacaagggctattattttgttaatgacatgaggaatataagttaaatcatagaatggcctgggttgaaaaggaccacaatgatcatcgagtttcaacccccctgctatgtgcagggtcaccaaccagcag

SEQ ID NO: 88676 - DNA, 600 bp, Chicken  19866894393968_1
gctggtggtatggtagtagaggttgacccttcccccccagtattctatgttgctgccttgtgacaggtggcagcagaggagcagtctgacacaatggtgtccgacatggaagtgtttatgaaacaaatgtgtgccactgaatttatccctgcagaaaaaaatgcacccattggcattcatcagtgcttgctgaacattgatggagaccaaatggtgaaacagtgaggcagtgggtggtgcgtttcaaaattggtggtgggtcacctctgctagtgcagatttttacaagtgtggcatgcrggctcttgtccattgctaacaaaaatgcaaagtaaatggtggtcactatgttgaaaaagtgttttgtagctragaattttctctatcaattagtgttattgtgctctttgtatccgctgtaatttccaaggaaatagatattaggcattgctttttggtgtgtcctatgtacaaagtaggtggaatgcaccactgaatctcattctgttatgccatgagtagagaacatttgcatttttaaactgttaagagctacttaaattctgtgaatgaagatgctgaatttggctccaaaccact

SEQ ID NO: 88677 - DNA, 600 bp, Chicken  19866894393968_2
gcagaggagcagtctgacacaatggtgtccgacatggaagtgtttatgaaacaaatgtgtgccactgaatttatccctgcagaaaaaaatgcacccattggcattcatcagtgcttgctgaacattgatggagaccaaatggtgaaacagtgaggcagtgggtggtgcgtttcaaaattggtggtgggtcacctctgctagtgcagatttttacaagtgtggcatgcrggctcttgtccattgctaacaaaaatgcaaagtaaatggtggtcactatgttgaaaaagtgttttgtagctragaattttctctatcaattagtgttattgtgctctttgtatccgctgtaatttccaaggaaatagatattaggcattgctttttggtgtgtcctatgtacaaagtaggtggaatgcaccactgaatctcattctgttatgccatgagtagagaacatttgcatttttaaactgttaagagctacttaaattctgtgaatgaagatgctgaatttggctccaaaccactgcagtagagcagtacttccacatgccagcattgttgtctttgtgctcagagaagtacggaaaccactgttct

SEQ ID NO: 88678 - DNA, 600 bp, Chicken  19866894393974_1
agaaaactgcagatatctttgtttgatttgaacaagtttgactatcccttaatgctcgcaataaaacactaaaagttgatgccagaagaaagtaaggctttcttagcagaaagaaagaatgagagtataatttggagaagtgaggagttctaaaaataggttaaatgatgcacactttgtttgaggaagctttcatcgcagtaaacaaatgaaacatttccagacgttctgttaggcctatgtaacagtgtgctactctggtctctcaaaatggcctttcatattaaatatatatatatwtgtatatataatggaaaatctgctttgataaacataaggtrctttgttgactgtggttgaaaatggacccttgaagtaatcttgcatatggacacaaaatcagtccttgttttatttatttattatttatttaactttttagcaaggtcgtgggtttacagacatctcatggagaaaatggaaatttgtacctcattaaactagtaagtgaaatccagtatagctgtctggcatgctcacggtccagcttggtcaaagttttcactgatgcatctgcaagggaataagtgttctcatctg

SEQ ID NO: 88679 - DNA, 600 bp, Chicken  19866894393974_2
ctatcccttaatgctcgcaataaaacactaaaagttgatgccagaagaaagtaaggctttcttagcagaaagaaagaatgagagtataatttggagaagtgaggagttctaaaaataggttaaatgatgcacactttgtttgaggaagctttcatcgcagtaaacaaatgaaacatttccagacgttctgttaggcctatgtaacagtgtgctactctggtctctcaaaatggcctttcatattaaatatatatatatwtgtatatataatggaaaatctgctttgataaacataaggtrctttgttgactgtggttgaaaatggacccttgaagtaatcttgcatatggacacaaaatcagtccttgttttatttatttattatttatttaactttttagcaaggtcgtgggtttacagacatctcatggagaaaatggaaatttgtacctcattaaactagtaagtgaaatccagtatagctgtctggcatgctcacggtccagcttggtcaaagttttcactgatgcatctgcaagggaataagtgttctcatctgaggactttggacttaacattacaggggctgttggacccacc

SEQ ID NO: 88680 - DNA, 600 bp, Chicken  19866894393978_1
tgcaagcagttgcaaacagggagcacacagttcagaggttcaccagttgtatttaacctgcattataagcagccatctgcagatcattatacactaagaaatccatcatgtattggagatagtaaacctaactgtcattcataatctattctatgctttgttttcatcatgtgtgtgttatgctttttgtttcaattttttattacttcagaggtgccattacatagactccaatgaacatgcgtggtaggtgacaatactcttttttgactaccatgtttacagttcctcctcctggasaacaagtttgtgaacgtgatttaggaaggagaaaatgcagcaatagcggctcctggtatctgatgacttacacctacagctgcatgtggcattaatacacttgagctggtctttttccaggagcaaggtaccattttcagcccagtgccgctcagtatgttcctctggtgcagtcagctgcaacatcaccatttctcaggagataccgatctccttcaagccccgcagtagtaacaaattgctgagggccttttctgttggagtagactttggagtatgtgtttctgcaagtgatcctgt

SEQ ID NO: 88681 - DNA, 600 bp, Chicken  19866894393979_1
cttaacaagggcttccagcacagatttggtgataacatatgacaagtagagaagggaaatagagctgtgtgtttcaaggaaactgctaagcaggagaacagaattgttgttacaaacttctgaaatgcatataatttcagagacaacagaaattcagtgcagaaaagcaacacagtgtctgtaaatttgatgacatttcacctatctgtacatctcatgctgtgcctaaaaagcatgcaacaaattcagatattgtagaaatagttccattggtactccttcatagaaagcacgctgtaygttcattgctcctttggtttttgtaaaccacaaacagtgatgttttaaggaaatcaccatgcttcctcaccactataygtattttcttattcaatgcattataaaatgcgttgcattggaggttcacgttacatctgcaaaccattctctgttgcaatatttcatacatgaaaaaatgagattctttttccaataactttcaaatgtgcattttgtgtaatccacccctggacacacagaagtcagtagcaaacttggatcacacggtaggattggaccttagctgtgaaaggtgtgttt

SEQ ID NO: 88682 - DNA, 600 bp, Chicken  19866894393979_2
gaaactgctaagcaggagaacagaattgttgttacaaacttctgaaatgcatataatttcagagacaacagaaattcagtgcagaaaagcaacacagtgtctgtaaatttgatgacatttcacctatctgtacatctcatgctgtgcctaaaaagcatgcaacaaattcagatattgtagaaatagttccattggtactccttcatagaaagcacgctgtaygttcattgctcctttggtttttgtaaaccacaaacagtgatgttttaaggaaatcaccatgcttcctcaccactataygtattttcttattcaatgcattataaaatgcgttgcattggaggttcacgttacatctgcaaaccattctctgttgcaatatttcatacatgaaaaaatgagattctttttccaataactttcaaatgtgcattttgtgtaatccacccctggacacacagaagtcagtagcaaacttggatcacacggtaggattggaccttagctgtgaaaggtgtgtttaagatacttcagtgtctttttgaatcttgcagtatcttacatctggactggtagcatctgatacagaggcagtatgat

SEQ ID NO: 88683 - DNA, 600 bp, Chicken  19866894393984_1
tgagcttccatttttgccttcagtaaacagcttgagaagagcattaatctcatctcagagccaaagggagtcaaggtgctaaatcactctgacctctggcttcagcagagctttgatggagttgctggcttggttgtatcctccaacacatacgctgaagtgttggaggatacaatacgggggtcactgctgctgggctttggtacctgcatggctctgtgtgagcttgacagggtgcaacacagggccagtactgcagttggaggatgcttctgtgaacagagagcatttgcagctaaktatcctgtgtatagtttggatccagcagaagctgtattttatgaaatcatgcttgagaaagagaaaattgcacgtttggcgtttgtacattttttttaatatgcttggaatggaagtaactatttgtaagaattcactttattacttcagagagaaacctatagaacgcggaggtctttaatggttatggttattcaggaaatgtgaaattcattacaaaggtagaaaaagattccagtgtyttatgctgattttattactaagctttgcagtaacagtattttttattccttcaagtga

SEQ ID NO: 88684 - DNA, 600 bp, Chicken  19866894393984_2
cagggccagtactgcagttggaggatgcttctgtgaacagagagcatttgcagctaaktatcctgtgtatagtttggatccagcagaagctgtattttatgaaatcatgcttgagaaagagaaaattgcacgtttggcgtttgtacattttttttaatatgcttggaatggaagtaactatttgtaagaattcactttattacttcagagagaaacctatagaacgcggaggtctttaatggttatggttattcaggaaatgtgaaattcattacaaaggtagaaaaagattccagtgtyttatgctgattttattactaagctttgcagtaacagtattttttattccttcaagtgatatttaaaattgtttttgagtatyctctgtctttaaggagggagacactggtgtgctcagcgtttatccagctgccttcccactgctcacgtgagttcttaaaccatatgcaaatagccacttccacttcattttacatcattttaattgcaagtgtctcttctttctctgtagttctctgccttcaggtattggctgttctcccagttttcaggccctttctggagaggttgaatggctcg

SEQ ID NO: 88685 - DNA, 600 bp, Chicken  19866894393984_3
gcagaagctgtattttatgaaatcatgcttgagaaagagaaaattgcacgtttggcgtttgtacattttttttaatatgcttggaatggaagtaactatttgtaagaattcactttattacttcagagagaaacctatagaacgcggaggtctttaatggttatggttattcaggaaatgtgaaattcattacaaaggtagaaaaagattccagtgtyttatgctgattttattactaagctttgcagtaacagtattttttattccttcaagtgatatttaaaattgtttttgagtatyctctgtctttaaggagggagacactggtgtgctcagcgtttatccagctgccttcccactgctcacgtgagttcttaaaccatatgcaaatagccacttccacttcattttacatcattttaattgcaagtgtctcttctttctctgtagttctctgccttcaggtattggctgttctcccagttttcaggccctttctggagaggttgaatggctcgtcccttggcttgcagagatgaattaaaaacactgcaataaattcatgttaagaatcttctgttaacagtttctatttctgac

SEQ ID NO: 88686 - DNA, 599 bp, Chicken  19866894393990_1
  misc_feature (1)..(195): n is any nucleotide
nnnnnnnnnnnnnnnnnnnnnnnnnnnnnnnnnnnnnnnnnnnnnnnnnnnnnnnnnnnnnnnnnnnnnnnnnnnnnnnnnnnnnnnnnnnnnnnnnnnnnnnnnnnnnnnnnnnnnnnnnnnnnnnnnnnnnnnnnnnnnnnnnnnnnnnnnnnnnnnnnnnnnnnnnnnnnnnnnnnnnnnnnnnnnnnnnnntttcatgctatcttgccttattcttatgcatgtttcccatctgttccattctttactcattcacaaatcctgtcaaatattttggcaactttcaatactttttcrtaatcaaatattaaggaattactttctcctctcatctccttcaagctcctccaawtcttgtgctatgaaaacttgtggaagtcagtcagaatgactgtttgctctgaattctgatgacaaattgcaactgctttgctgctgcactgtatccaacagcatttggatttttttcctgtttccccgtttagcaaaagtaatttctaggtttgctatcaaatcttcatgttatccattcagaatgctgcagggaggtgattcagtatattacaaaccattgtgagccaaactacctccatttc

SEQ ID NO: 88687 - DNA, 599 bp, Chicken  19866894393990_2
  misc_feature (1)..(140): n is any nucleotide
nnnnnnnnnnnnnnnnnnnnnnnnnnnnnnnnnnnnnnnnnnnnnnnnnnnnnnnnnnnnnnnnnnnnnnnnnnnnnnnnnnnnnnnnnnnnnnnnnnnnnnnnnnnnnnnnnnnnnnnnnnnnnnnnnnnnnnnnnnnntttcatgctatcttgccttattcttatgcatgtttcccatctgttccattctttactcattcacaaatcctgtcaaatattttggcaactttcaatactttttcrtaatcaaatattaaggaattactttctcctctcatctccttcaagctcctccaawtcttgtgctatgaaaacttgtggaagtcagtcagaatgactgtttgctctgaattctgatgacaaattgcaactgctttgctgctgcactgtatccaacagcatttggatttttttcctgtttccccgtttagcaaaagtaatttctaggtttgctatcaaatcttcatgttatccattcagaatgctgcagggaggtgattcagtatattacaaaccattgtgagccaaactacctccatttcaactagtctagcttggtgaaaatctgtatttttgcttctttaaaattgatactag

SEQ ID NO: 88688 - DNA, 600 bp, Chicken  19866894393990_3
gaattctgatgacaaattgcaactgctttgctgctgcactgtatccaacagcatttggatttttttcctgtttccccgtttagcaaaagtaatttctaggtttgctatcaaatcttcatgttatccattcagaatgctgcagggaggtgattcagtatattacaaaccattgtgagccaaactacctccatttcaactagtctagcttggtgaaaatctgtatttttgcttctttaaaattgatactagagctcagctgggaattttctaccatctatttttacttagaactttcagttktgtcaaatattaagctcttactctgctggtaagtagatcaacaagtatactgcagtgtgttagttgtacaaagcataccctgtatagtaaatctctgagcaattgagtaatggcagcaggaatcaaagggccaaattctgctttcagctattctggattaaatccagagcaaatccactgacttcagtggaattacttgggatttaggttagtttaacagttaagcagaatgtgtcccttcctacttcaattctaacagctacttacagctggaattcctgggcagcaaaatgacttgca

SEQ ID NO: 88689 - DNA, 599 bp, Chicken  19866894393994_1
  misc_feature (1)..(43): n is any nucleotide
nnnnnnnnnnnnnnnnnnnnnnnnnnnnnnnnnnnnnnnnnnntgcaacatgaatgttgttttgtagtatgtttcactgattggcattaaaatcatcaatgttactttcagcacaaaaaagttcaagtctgttcttagccctaaaaacaataagcaagtaggatgtaagatcaaaatactgatgttagagtggaagtaggaaagggataattcatttattaaatcatcagtgatgacattcctttgcctcttattgctactgctactactttttcagtatgtcatcccaaaggtgttccyagcatcccaaaggggttaagcaggtaaaatatagttacctgagcactaggtacaaagaggacttgtttttcaactctgcaaaacagaaatgcatatagaaagttctatgtggtcacaattaataagagtgaagaatagaaattttagtgatttctggctttgcaaagagaaccccaaccattaagtcaactcacaattaatttctgtttctcaacagtatggagggatccatagtccgtttgcctgaagtgattgccctgaagaagaagtataaatcctatctgtaccttgatgaggct

SEQ ID NO: 88690 - DNA, 600 bp, Chicken  19866894393994_2
ggtcggggtgtagtggagtattttggactcaatcctgaagatgtggatgttatgatgggaacatttaccaaaagctttggagctgctggaggatatattgggggcaagaaggtaaaaagctgaaaatcttttggctgtttgagactggtgttgtagtgttttattaagcatttcaatgttgatttatttcttaaattgcccttattgtccatttgtttcataatttgacatgctgtctagtacaatgaaagtctgctcaaagcctgtgagcctaatctaataaaatacctcgtaatttcrtagtttccatgtggtcagtgatgagcatagtttgcagaaagtctggtaagagtataatatcttaggaaccggtaggagccaggaagcagggatttctcaatattacttttaatgaggcaggaagaatgccaaaagcttgaggtttttcagctgatttgaaaagaagccatttcttagcttagcctagtggagatcatttcttctggacttgagtagtttgcttttgaaaaaggctttgtgtgtatgggtactgattcctttctattggaaggtacttctagaacatactggcctttgtca

SEQ ID NO: 88691 - DNA, 599 bp, Chicken  19866894393995_1
  misc_feature (1)..(113): n is any nucleotide
nnnnnnnnnnnnnnnnnnnnnnnnnnnnnnnnnnnnnnnnnnnnnnnnnnnnnnnnnnnnnnnnnnnnnnnnnnnnnnnnnnnnnnnnnnnnnnnnnnnnnnnnnnnnnnnnntgctgagagaatatacgaggaatgtgttactcaagacctacttctagtgaggggtcacctggtcttcagaaatcaacaccagaaaaaaatgaaacatcaaactttgagaaaggaatctctcccagtaatctctgtctacaaaagaagaatactcaaaatatgtatctaaaccagtctcctgaaatgwctgttaaaaagttaacatttggaaataaragtttctcaccagttctaactgcttcatatttggtaagaatattaaagttactctacaggataactgaagttatcccattcagctgctacatgtcttaatgcttttgtagatctcgtttcaataatgtttttttttwttatttgttaatgtgtagctcaacttaagttcagtaaccccacatgaaacatactgtgaaaaaaacacagagggatctgtatctgaaacacatgatgctgatgaaaacttaagttttagacatggcttttcag

SEQ ID NO: 88692 - DNA, 599 bp, Chicken  19866894393995_2
  misc_feature (1)..(84): n is any nucleotide
nnnnnnnnnnnnnnnnnnnnnnnnnnnnnnnnnnnnnnnnnnnnnnnnnnnnnnnnnnnnnnnnnnnnnnnnnnnnnnnnnnnntgctgagagaatatacgaggaatgtgttactcaagacctacttctagtgaggggtcacctggtcttcagaaatcaacaccagaaaaaaatgaaacatcaaactttgagaaaggaatctctcccagtaatctctgtctacaaaagaagaatactcaaaatatgtatctaaaccagtctcctgaaatgwctgttaaaaagttaacatttggaaataaragtttctcaccagttctaactgcttcatatttggtaagaatattaaagttactctacaggataactgaagttatcccattcagctgctacatgtcttaatgcttttgtagatctcgtttcaataatgtttttttttwttatttgttaatgtgtagctcaacttaagttcagtaaccccacatgaaacatactgtgaaaaaaacacagagggatctgtatctgaaacacatgatgctgatgaaaacttaagttttagacatggcttttcagacaaaatttctactgaaggamaacaacaa

SEQ ID NO: 88693 - DNA, 600 bp, Chicken  19866894393995_3
gtcacctggtcttcagaaatcaacaccagaaaaaaatgaaacatcaaactttgagaaaggaatctctcccagtaatctctgtctacaaaagaagaatactcaaaatatgtatctaaaccagtctcctgaaatgwctgttaaaaagttaacatttggaaataaragtttctcaccagttctaactgcttcatatttggtaagaatattaaagttactctacaggataactgaagttatcccattcagctgctacatgtcttaatgcttttgtagatctcgtttcaataatgtttttttttwttatttgttaatgtgtagctcaacttaagttcagtaaccccacatgaaacatactgtgaaaaaaacacagagggatctgtatctgaaacacatgatgctgatgaaaacttaagttttagacatggcttttcagacaaaatttctactgaaggamaacaacaagacattactaaacctgtcataagaaataaaggagaggtatgttactagatccattgctgcttagaaaaaagctgctgcttttcatctgttttatatactttacatttccctaagatctcatcaaatgtattttcctta

SEQ ID NO: 88694 - DNA, 538 bp, Chicken  19866894393995_4
ggaaataaragtttctcaccagttctaactgcttcatatttggtaagaatattaaagttactctacaggataactgaagttatcccattcagctgctacatgtcttaatgcttttgtagatctcgtttcaataatgtttttttttwttatttgttaatgtgtagctcaacttaagttcagtaaccccacatgaaacatactgtgaaaaaaacacagagggatctgtatctgaaacacatgatgctgatgaaaacttaagttttagacatggcttttcagacaaaatttctactgaaggamaacaacaagacattactaaacctgtcataagaaataaaggagaggtatgttactagatccattgctgcttagaaaaaagctgctgcttttcatctgttttatatactttacatttccctaagatctcatcaaatgtattttccttacttaatgttaagcactagatataacgtttactcgtgacttccttgaaaaatactcatcccacaacaatactgctcattaatttttaaatatt

SEQ ID NO: 88695 - DNA, 600 bp, Chicken  19866894394002_1
aatacggctgatactttggaacaaaggagctcacatcttaccacagcacatttgaaaatagatcctcctgccacaagaacagaaactggagatgacttgacaaaattcttgaggatgcacacattacacctgaaataaggagggaaggcgagctgaagacgaccttcccagtactgtcaagcaagcatccacaagtaaatggaaccttacagtcctgtgaataatacaaacaggcattaacacacagcaaactcttgtagtcagcaatggttcatcaacctttaactcagagaaaatctracctgaactctgtaagaccctgcacaacactcatgtcaagatttacagggttttgtcacatttcatgaatgtcaataaccatagtatgtttaggtgatgccctactggactctcaacacagatgaatgtgccagggagaggcagtcctcaggagaattacccagaaaagatgagccagtaacctggcagttacttgaaataatgactttcagtatagggttttttcccccaaygtggtaacaaatgtaaattggttgggacatctccaaaataacaatttttcactgaaaccaaatctca

SEQ ID NO: 88696 - DNA, 557 bp, Chicken  19866894394002_2
gcattaacacacagcaaactcttgtagtcagcaatggttcatcaacctttaactcagagaaaatctracctgaactctgtaagaccctgcacaacactcatgtcaagatttacagggttttgtcacatttcatgaatgtcaataaccatagtatgtttaggtgatgccctactggactctcaacacagatgaatgtgccagggagaggcagtcctcaggagaattacccagaaaagatgagccagtaacctggcagttacttgaaataatgactttcagtatagggttttttcccccaaygtggtaacaaatgtaaattggttgggacatctccaaaataacaatttttcactgaaaccaaatctcatgcatagctatgatgaacttaaaagattttctgttattattttgcacttatatttttgagaatacttgcagacatttcagagatgtgaaatctctgtaaaattacacagattttacaaccaaattggggtaaggttaaatagcttctcaaatggaaaagacatcagcaagttgggtttgtggtcccaaat

SEQ ID NO: 88697 - DNA, 599 bp, Chicken  19866894394007_1
  misc_feature (1)..(47): n is any nucleotide
nnnnnnnnnnnnnnnnnnnnnnnnnnnnnnnnnnnnnnnnnnnnnnntcttgtcccttgctctgtacatatttacagggttgccccatactatgcccattctgctgttgcagaatctggcactttccgttgttaaacttcatatggtttgtgattgcccagcctaataatttgtctagacaaactaagaaaaaagatgataaaagatgtaagtaaaagaactggaaccaataacaagttagaatagggggaagaaattctataggatttggagatttctgttttactagctctgcagccyacactgctagttcagtctcttattgtttttccccataaaattttccttaaatgaaagaatttttctgacttctagttccccttcatctgccctcagcatttccagtattaaactattctctgtcaacacaaatactaagagtgtacctctcatagaccatttgtttctcttctgttctgtttgttttgttttttccttccagaagggaaagtgttcagagaaaatgttggctccacataaagacaactctgggggtttctgtttaacattaattttgagattgaaatatgttgcatttt

SEQ ID NO: 88698 - DNA, 600 bp, Chicken  19866894394007_2
aatttttctgacttctagttccccttcatctgccctcagcatttccagtattaaactattctctgtcaacacaaatactaagagtgtacctctcatagaccatttgtttctcttctgttctgtttgttttgttttttccttccagaagggaaagtgttcagagaaaatgttggctccacataaagacaactctgggggtttctgtttaacattaattttgagattgaaatatgttgcattttgaatgaccaaaaacctcactgtaagtgatggtcttttatcctatatcaatcaaacagyaatatatttagtgagttcttaatgagaaaggtggtcatagtgagatgctgcaaacagagagcggaaaagattttcttagccatcataccaagttcttatgcaaacatactttataatatgttcctgaacttgtcctgtctcacttttaaactagttagatttgttctgtaagaccttccagaacctcactcgttcttctaattttcagtctaaattttcccatttatacccatttgttcttgtgtcaaccttgtcttttagtttaaatagctttctccttctttagcatttatctacctc

SEQ ID NO: 88699 - DNA, 600 bp, Chicken  19866894394007_3
tttcctggtagcatatttgtatatgaaattaaagatacaattcaaaaagttactcaaatatgaattcaatattaaaaaacctgttatagctgaattgtggctgctgttgttcaaatgacacagggctgaaccaatggattaaacccatttgtgtgttatgctagtaaaaatcacacactgaatggtcttcaacatagccaataaattatgttctttcagtcatgatttacaaattaatatgaaaacaatagttttggaataggatctttaagatagcagatagctgatataccatttggmttctttttcagtcatgactcaattaaatgctgtgcatataaacaaatacttttttttatgtgtgtgtgttaagcaagttctcaagttgtcagaggatttgaaacagtcatggaacaatagatgaaagtaagatataatagagaagagttgctgaatgcttccactgtgaattccttcacctgttcctggcaactaaaatgccrctctgctaggttggagtctgaaagccaactgtcttttccatttccacacacaggcttcatattttatttttgaagaagataagctagatagtgtatt

SEQ ID NO: 88700 - DNA, 543 bp, Chicken  19866894394007_4
aattatgttctttcagtcatgatttacaaattaatatgaaaacaatagttttggaataggatctttaagatagcagatagctgatataccatttggmttctttttcagtcatgactcaattaaatgctgtgcatataaacaaatacttttttttatgtgtgtgtgttaagcaagttctcaagttgtcagaggatttgaaacagtcatggaacaatagatgaaagtaagatataatagagaagagttgctgaatgcttccactgtgaattccttcacctgttcctggcaactaaaatgccrctctgctaggttggagtctgaaagccaactgtcttttccatttccacacacaggcttcatattttatttttgaagaagataagctagatagtgtattttaagccgtgagattcatgggtatcataaagagattgttacagtcccaaaagagcattcaggtgtgagaaaaaactattgaaatcaactcagttctcaaatggatgaatattgttttagccagacattcagtttcaaggactgcat

SEQ ID NO: 88701 - DNA, 600 bp, Chicken  19866894394008_1
agtgacagggctgtagcagcacagctcctttagtaagagtgtgtgctttctccagcttttcaatcgctggttcacacactggattgtgtagaggggttaggacagaacaaaattttgtcattcactctcagctgagctacatcatcatccgacctccaatttagtcttttacgactttgtgttgcatgtggtaaaagttgtgcagttacgctgttttccacagtcctacaaacaattcagaagtgtcaaacattgagaagatcttcccaaagcaacaaggcctaacttgcttgtatcagygattttgctccagtgctgyggatctccaactccctctcccaccataaagctacaaactcacaggtagctgaagataaaagcaagagagcagttaaaaggctagctgctgaagatctgttgctgaaaacattttgcataaagccagctttgtgacagataccggcctgatacagcttccaaagaaacactagccagaaaagttaacctttttcaactttctgacagctgaaagccccagaaaacatggaagataacatttttcccagaaaagaagacatgtcctcatcaccgtggctaaag

SEQ ID NO: 88702 - DNA, 600 bp, Chicken  19866894394008_2
cacagctcctttagtaagagtgtgtgctttctccagcttttcaatcgctggttcacacactggattgtgtagaggggttaggacagaacaaaattttgtcattcactctcagctgagctacatcatcatccgacctccaatttagtcttttacgactttgtgttgcatgtggtaaaagttgtgcagttacgctgttttccacagtcctacaaacaattcagaagtgtcaaacattgagaagatcttcccaaagcaacaaggcctaacttgcttgtatcagygattttgctccagtgctgyggatctccaactccctctcccaccataaagctacaaactcacaggtagctgaagataaaagcaagagagcagttaaaaggctagctgctgaagatctgttgctgaaaacattttgcataaagccagctttgtgacagataccggcctgatacagcttccaaagaaacactagccagaaaagttaacctttttcaactttctgacagctgaaagccccagaaaacatggaagataacatttttcccagaaaagaagacatgtcctcatcaccgtggctaaagtcttacctccatgacaatc

SEQ ID NO: 88703 - DNA, 600 bp, Chicken  19866894394008_3
gaagataaaagcaagagagcagttaaaaggctagctgctgaagatctgttgctgaaaacattttgcataaagccagctttgtgacagataccggcctgatacagcttccaaagaaacactagccagaaaagttaacctttttcaactttctgacagctgaaagccccagaaaacatggaagataacatttttcccagaaaagaagacatgtcctcatcaccgtggctaaagtcttacctccatgacaatccacggaattgagtagccaaatccatgagactgtatgaggcaattcccgtrccagcctggacatcatttttcattaacacaatgaaattaaaacacagttactaacacaatmgtcattcatacaaagtcattttatttacttttgaatgcatctcttcaaaagctttagaaagcatctggcctccctcttgaaaaaatgcatcaatagttgttgtaattatttacaaacatcatattgtatatgacgcacaaaataaatgacagagcagtgaaacaaaggccttcttctcatgggtctgggtgatctgagtaactcatttacattgcattactcaagaatgatggaaagat

SEQ ID NO: 88704 - DNA, 600 bp, Chicken  19866894394008_4
tttgcataaagccagctttgtgacagataccggcctgatacagcttccaaagaaacactagccagaaaagttaacctttttcaactttctgacagctgaaagccccagaaaacatggaagataacatttttcccagaaaagaagacatgtcctcatcaccgtggctaaagtcttacctccatgacaatccacggaattgagtagccaaatccatgagactgtatgaggcaattcccgtrccagcctggacatcatttttcattaacacaatgaaattaaaacacagttactaacacaatmgtcattcatacaaagtcattttatttacttttgaatgcatctcttcaaaagctttagaaagcatctggcctccctcttgaaaaaatgcatcaatagttgttgtaattatttacaaacatcatattgtatatgacgcacaaaataaatgacagagcagtgaaacaaaggccttcttctcatgggtctgggtgatctgagtaactcatttacattgcattactcaagaatgatggaaagatctcaaagttgtaaaactttcagggtaattataagcaacgcaacattaatccatcgcagaaa

SEQ ID NO: 88705 - DNA, 600 bp, Chicken  19866894394010_1
ccctagccttttcttattcaatttctgactgctaaattatcctgtgcactcttgtaactatataatcactgtcaattcctgcattgtttggggtgactgaatccaaagcatttgggcttctttgagtcctgtgtgccagacctcaaagtgaccttaacttacaatcccttgtttctcttcctctttcatgtacttactttccaggatcaatctctttccaaaaataatattaactttggccccataccctactctgtttctctccggtatatgtctggagcagtgaggataagaacaaarctttctgtctttaaaacacttctccttcagccacagttgggtcctttayatccactgcagttctagggagaaatatggagttttttgctataagggaactccatgccctgtgctggtgacttgtgcagcatccatcagggctgtctgctaagcttggtcccaccgcatctgagcatccttcgggcatgaagggcagttcacaacccaggggcactaatgcaccatttcttccttctagcttacaacatttgtcaaatgcattmtgcattaaaaatacaaaataataataataaaaaatas

SEQ ID NO: 88706 - DNA, 600 bp, Chicken  19866894394010_2
tcttgtaactatataatcactgtcaattcctgcattgtttggggtgactgaatccaaagcatttgggcttctttgagtcctgtgtgccagacctcaaagtgaccttaacttacaatcccttgtttctcttcctctttcatgtacttactttccaggatcaatctctttccaaaaataatattaactttggccccataccctactctgtttctctccggtatatgtctggagcagtgaggataagaacaaarctttctgtctttaaaacacttctccttcagccacagttgggtcctttayatccactgcagttctagggagaaatatggagttttttgctataagggaactccatgccctgtgctggtgacttgtgcagcatccatcagggctgtctgctaagcttggtcccaccgcatctgagcatccttcgggcatgaagggcagttcacaacccaggggcactaatgcaccatttcttccttctagcttacaacatttgtcaaatgcattmtgcattaaaaatacaaaataataataataaaaaatasagagtaagtgcagaatagtgaatgggtattgcagtgtaaagggacagaa

SEQ ID NO: 88707 - DNA, 600 bp, Chicken  19866894394010_3
ccggtatatgtctggagcagtgaggataagaacaaarctttctgtctttaaaacacttctccttcagccacagttgggtcctttayatccactgcagttctagggagaaatatggagttttttgctataagggaactccatgccctgtgctggtgacttgtgcagcatccatcagggctgtctgctaagcttggtcccaccgcatctgagcatccttcgggcatgaagggcagttcacaacccaggggcactaatgcaccatttcttccttctagcttacaacatttgtcaaatgcattmtgcattaaaaatacaaaataataataataaaaaatasagagtaagtgcagaatagtgaatgggtattgcagtgtaaagggacagaaagggcaagagaggctgaacctggaatactgtgatgttttggtggctgcaacaagagccagtagctggaagtcactggttgtaaggttataacaagaagctagagcgatgtgtttaacaggagagtgttataatccttggaaagaaattcctgccagagtcagggagacttttatccctctgtacaaggttaggtgcccttctggaagatacacc

SEQ ID NO: 88708 - DNA, 600 bp, Chicken  19866894394010_4
ctttctgtctttaaaacacttctccttcagccacagttgggtcctttayatccactgcagttctagggagaaatatggagttttttgctataagggaactccatgccctgtgctggtgacttgtgcagcatccatcagggctgtctgctaagcttggtcccaccgcatctgagcatccttcgggcatgaagggcagttcacaacccaggggcactaatgcaccatttcttccttctagcttacaacatttgtcaaatgcattmtgcattaaaaatacaaaataataataataaaaaatasagagtaagtgcagaatagtgaatgggtattgcagtgtaaagggacagaaagggcaagagaggctgaacctggaatactgtgatgttttggtggctgcaacaagagccagtagctggaagtcactggttgtaaggttataacaagaagctagagcgatgtgtttaacaggagagtgttataatccttggaaagaaattcctgccagagtcagggagacttttatccctctgtacaaggttaggtgcccttctggaagatacaccaagctgaaactcacacttccgtgtgctgttaaccagg

SEQ ID NO: 88709 - DNA, 600 bp, Chicken  19866894394010_5
cttcatcttaaacacccatgaatctgtgaaaaacagatttcctccttttgaatgcacaagatttcagccttgatggaatttcataggccgcatacccatgcagggaaggtatgatgctatcaccatatttgttcctagtgaatgggttaaagagctcaccaaggagaacagccctgctgacatccttgtggtgcagaaggtgctgctttgtatttcattcagcagctgttagaaagctgtgtcattttcccccatgcaaattaatggggaaggatgtgggctataagcccattgggtgcyaagattaattctggcaatcaacacctttgctctgggcaccaggggatgacatgtccctgtcacatcagcagcagtcaggggtgaaggaagctgctgccatttgtcctcatccccatttttgtcagtgcagtaacaggaaccaatctgtgagcagcactgtgactccagcagagagctgtgggataggatgggcagcttagttagagcaaaaggatgcagaggtgtctgttccatgttccatttgcaaatcgcagggcagggcaggaagggtgaactggagaagtgttaatgctccattag

SEQ ID NO: 88710 - DNA, 600 bp, Chicken  19866894394011_1
caaagtgttacacaattagcaaagagaataaggaagtgcgtggaagagtttgcgtaaacaaaaccatcaagcttcccacgatcagactggtgtagaaaatgattgggatgggattttgcctaaatacaggcatctagcaccatttctaagactctggggataactgggttctcttaaatcctgtctcatacctgcaagtcgcatgctcatgtctcacaccctggtgcctctcatgccctagatgtttttctaaagtctacttccaaggagaaaatgcctgcctacagttcacgatatctkatctttccaagtgacaacgtagacagctataaagcttctgctttcacaggccgtcaagaaggcagaagtctctgttattctcaatgcactctgaacgcttcccccaccagaaagctttagggattgatcacaccgctgacatgagccaggaaatctcttatacgctacgtagaatttactttttcttcccttttttgcagcactgaagtccaacagtggaagaacagcatgacatggaccacagccctgtgacattacaagcgtgtattacagctgccagatgggctcagctgactcatg

SEQ ID NO: 88711 - DNA, 600 bp, Chicken  19866894394013_1
cttactggttagatcttcctgtcatgagtagttggaaaaaaacaatgcagagattaaaccattttactacattgttcactctgaaagtaatgcctcctctttatttccatggcaacagcaacagatagagcacaataatgctaattattggagcaaaattctcagctacaaaacaccgtctttcaacatagtcaccaccattagttgattcacacagatgagctgatcaagatgttcttcatttcatgttgtgacagctgtgcatggccatccagaatgtggcttgtcttttatgttgcygttgaaactgctgaaacacatcgcccactgcctcactgttctcacatccactgtttggtctccataagagttcagtaagtgttgatgaatgtcagtgggtgccattttttcctcgaggaggaattcaggaatgcacctttgcttccatgtcagactgcacctctgctgccatctgttgtacagcaacaaaatgcagtgggatattggtgggaaggtgcaatttctactgccataccactagcatccacctctgactttgtgggccaatataataaaataggaggcattacttttggcaca

SEQ ID NO: 88712 - DNA, 600 bp, Chicken  19866894394013_2
actaatttttatggctattttcagagagaacacaggggaatatgggaagttgtgtattagaacttaattgtaagactcgcacaagcttgccttggactaaattgctgcttacagatagtggagattttctgcagtgacatctgcaggagctggtggtgatgctaccttgatttcttgactggatttagctatctgtaaatttgctgccatcaaattatttataaaatgacttactgaacttctgtaacttatcaaaaactttaatttgggcgtgttggttttttttttctgatgtttacrtagctgtcattagaaagtgagaggaaattctgttttgtgcttacataggttatartgacctagataattatgtataattagtgccttacaatgtgctattttttattttaaaaacattacaataccttaaatgacagacacttgggagcacacaggtacaagtgtgttgtttctggccttttaaataatgtctcaggatgctgccttgtccatatttccttacctccagacagagaaattcatatggaggttgtttcacttttgttaaaacttacccatttttaattgcagctctctcag

SEQ ID NO: 88713 - DNA, 600 bp, Chicken  19866894394013_3
attagaacttaattgtaagactcgcacaagcttgccttggactaaattgctgcttacagatagtggagattttctgcagtgacatctgcaggagctggtggtgatgctaccttgatttcttgactggatttagctatctgtaaatttgctgccatcaaattatttataaaatgacttactgaacttctgtaacttatcaaaaactttaatttgggcgtgttggttttttttttctgatgtttacrtagctgtcattagaaagtgagaggaaattctgttttgtgcttacataggttatartgacctagataattatgtataattagtgccttacaatgtgctattttttattttaaaaacattacaataccttaaatgacagacacttgggagcacacaggtacaagtgtgttgtttctggccttttaaataatgtctcaggatgctgccttgtccatatttccttacctccagacagagaaattcatatggaggttgtttcacttttgttaaaacttacccatttttaattgcagctctctcagtttactctctggttttgcaaagtaaattgtactgataaagtagagatgactttag

SEQ ID NO: 88714 - DNA, 600 bp, Chicken  19866894394015_1
ttagtgcaataccaaggagctagcagcagcgaacacaagagccccaccttctgccagagagaaacactgctaggaaaagatcaccgttatcaggcagggatgagcggtgatttcttcacacgccagggcagagatcccaaggtacttgtgcagtgacataagagtggtcagagtctcttcagatgagctaattggcttcggacatccgttaggcctcagctcagccatggaaagccacagcgccaatccaagcagtccccacccttccttttttcccctgcagcacaagggaaagctcaygaagctgcacagcaaagccacttggaatctaatgcagctttctgcaaygttactttccacgcagctcggttcacccactccagttcacctcagggctgcacatgctgcagaaacaggaagcaagagctgcttaaaccagttcaagcagcacagccaccccgcgtgatggcagctcaaggggccagacctgagcttgcccagagccaggtctaatcgcatggcagcagtggggcagygttctagcctcaggaacacrgggctgggagttccggcagcgctgcggagctgctatgtgagcat

SEQ ID NO: 88715 - DNA, 600 bp, Chicken  19866894394015_2
ttctgccagagagaaacactgctaggaaaagatcaccgttatcaggcagggatgagcggtgatttcttcacacgccagggcagagatcccaaggtacttgtgcagtgacataagagtggtcagagtctcttcagatgagctaattggcttcggacatccgttaggcctcagctcagccatggaaagccacagcgccaatccaagcagtccccacccttccttttttcccctgcagcacaagggaaagctcaygaagctgcacagcaaagccacttggaatctaatgcagctttctgcaaygttactttccacgcagctcggttcacccactccagttcacctcagggctgcacatgctgcagaaacaggaagcaagagctgcttaaaccagttcaagcagcacagccaccccgcgtgatggcagctcaaggggccagacctgagcttgcccagagccaggtctaatcgcatggcagcagtggggcagygttctagcctcaggaacacrgggctgggagttccggcagcgctgcggagctgctatgtgagcatgtggagaactcccgccttgcctgagggctgatccctgacagagctcca

SEQ ID NO: 88716 - DNA, 492 bp, Chicken  19866894394015_3
acagcgccaatccaagcagtccccacccttccttttttcccctgcagcacaagggaaagctcaygaagctgcacagcaaagccacttggaatctaatgcagctttctgcaaygttactttccacgcagctcggttcacccactccagttcacctcagggctgcacatgctgcagaaacaggaagcaagagctgcttaaaccagttcaagcagcacagccaccccgcgtgatggcagctcaaggggccagacctgagcttgcccagagccaggtctaatcgcatggcagcagtggggcagygttctagcctcaggaacacrgggctgggagttccggcagcgctgcggagctgctatgtgagcatgtggagaactcccgccttgcctgagggctgatccctgacagagctccaggcgtggggaggaggagctgtggggccacacagctgctgctgctgccaggtgctctgcagccagatctgcagttgtgcat

SEQ ID NO: 88717 - DNA, 472 bp, Chicken  19866894394015_4
ccccacccttccttttttcccctgcagcacaagggaaagctcaygaagctgcacagcaaagccacttggaatctaatgcagctttctgcaaygttactttccacgcagctcggttcacccactccagttcacctcagggctgcacatgctgcagaaacaggaagcaagagctgcttaaaccagttcaagcagcacagccaccccgcgtgatggcagctcaaggggccagacctgagcttgcccagagccaggtctaatcgcatggcagcagtggggcagygttctagcctcaggaacacrgggctgggagttccggcagcgctgcggagctgctatgtgagcatgtggagaactcccgccttgcctgagggctgatccctgacagagctccaggcgtggggaggaggagctgtggggccacacagctgctgctgctgccaggtgctctgcagccagatctgcagttgtgcat

SEQ ID NO: 88718 - DNA, 600 bp, Chicken  19866894394019_1
tctggggaagaagaggctgaagggagaccgtattactcccagtacctgaaaagtgcttacagtgagagcggggtaggtctcttctcactggtgacaggtgacaagacaaggggaaatggcctcaagttgcgccaaggcaagtttaggttggatgttaggaaacacttctttacagaaagggtggttaaacactggaataggctccacagggaggtggttgagtcaccgtccctggatgtgtttaagagctgtttggatgtggtgctcagagatacgatttagcagaaggttgttagagtkagggtactatggttaggctgcggttggacttgatgatctttgaggtcctttccaacctgagtaattctatgattctaggattctatgaaaggggtcatacatgtacagtcatacatgtccagcccactagacttatgctttgttgccctctttttttaatatatattttaatgaaaaaaataaagacgacagttttatttatgtacattaagtacattgtatgttytgtacatgggccaagacagttcctcttcaatcagtctgtcccaggcaagccaaaagaytggacacctgaaattc

SEQ ID NO: 88719 - DNA, 600 bp, Chicken  19866894394019_2
cgtccctggatgtgtttaagagctgtttggatgtggtgctcagagatacgatttagcagaaggttgttagagtkagggtactatggttaggctgcggttggacttgatgatctttgaggtcctttccaacctgagtaattctatgattctaggattctatgaaaggggtcatacatgtacagtcatacatgtccagcccactagacttatgctttgttgccctctttttttaatatatattttaatgaaaaaaataaagacgacagttttatttatgtacattaagtacattgtatgttytgtacatgggccaagacagttcctcttcaatcagtctgtcccaggcaagccaaaagaytggacacctgaaattccgctctatgactttcagggtaggaaggactctggttcagagatgaatgacaaaatgaagtgttcaaagaaatgattacwaaatgaggagagaaattgytctttatcctgcattctatggcagcagtagataaaagcaaggctgtaataactcacgctgtcattctgtctagttggcatctgataggatttgtcaaatttgctgcctacaagcaaaacatttaccgt

SEQ ID NO: 88720 - DNA, 600 bp, Chicken  19866894394019_3
gaaggttgttagagtkagggtactatggttaggctgcggttggacttgatgatctttgaggtcctttccaacctgagtaattctatgattctaggattctatgaaaggggtcatacatgtacagtcatacatgtccagcccactagacttatgctttgttgccctctttttttaatatatattttaatgaaaaaaataaagacgacagttttatttatgtacattaagtacattgtatgttytgtacatgggccaagacagttcctcttcaatcagtctgtcccaggcaagccaaaagaytggacacctgaaattccgctctatgactttcagggtaggaaggactctggttcagagatgaatgacaaaatgaagtgttcaaagaaatgattacwaaatgaggagagaaattgytctttatcctgcattctatggcagcagtagataaaagcaaggctgtaataactcacgctgtcattctgtctagttggcatctgataggatttgtcaaatttgctgcctacaagcaaaacatttaccgtggttatagcacagatagaggctgtgtgagcctgccaatgcacctcagctttggtttgc

SEQ ID NO: 88721 - DNA, 600 bp, Chicken  19866894394019_4
attctatgaaaggggtcatacatgtacagtcatacatgtccagcccactagacttatgctttgttgccctctttttttaatatatattttaatgaaaaaaataaagacgacagttttatttatgtacattaagtacattgtatgttytgtacatgggccaagacagttcctcttcaatcagtctgtcccaggcaagccaaaagaytggacacctgaaattccgctctatgactttcagggtaggaaggactctggttcagagatgaatgacaaaatgaagtgttcaaagaaatgattacwaaatgaggagagaaattgytctttatcctgcattctatggcagcagtagataaaagcaaggctgtaataactcacgctgtcattctgtctagttggcatctgataggatttgtcaaatttgctgcctacaagcaaaacatttaccgtggttatagcacagatagaggctgtgtgagcctgccaatgcacctcagctttggtttgccacactcctgctcttcctgccactcatcacatcacttagaggctttacaatgcacaaaatgacagatagcggcccacagattcctctttctttgt

SEQ ID NO: 88722 - DNA, 600 bp, Chicken  19866894394019_5
acatgtacagtcatacatgtccagcccactagacttatgctttgttgccctctttttttaatatatattttaatgaaaaaaataaagacgacagttttatttatgtacattaagtacattgtatgttytgtacatgggccaagacagttcctcttcaatcagtctgtcccaggcaagccaaaagaytggacacctgaaattccgctctatgactttcagggtaggaaggactctggttcagagatgaatgacaaaatgaagtgttcaaagaaatgattacwaaatgaggagagaaattgytctttatcctgcattctatggcagcagtagataaaagcaaggctgtaataactcacgctgtcattctgtctagttggcatctgataggatttgtcaaatttgctgcctacaagcaaaacatttaccgtggttatagcacagatagaggctgtgtgagcctgccaatgcacctcagctttggtttgccacactcctgctcttcctgccactcatcacatcacttagaggctttacaatgcacaaaatgacagatagcggcccacagattcctctttctttgtggcacakccctgtacctcg

SEQ ID NO: 88723 - DNA, 600 bp, Chicken  19866894394019_6
gagagaaattgytctttatcctgcattctatggcagcagtagataaaagcaaggctgtaataactcacgctgtcattctgtctagttggcatctgataggatttgtcaaatttgctgcctacaagcaaaacatttaccgtggttatagcacagatagaggctgtgtgagcctgccaatgcacctcagctttggtttgccacactcctgctcttcctgccactcatcacatcacttagaggctttacaatgcacaaaatgacagatagcggcccacagattcctctttctttgtggcacakccctgtacctcggtggcctgcaggtgtgcccaagccgcaatggctttgcacaaacttctgcatcctgctgaaaggcacggggagagcgagtgccatgctggccaagcacgtgctgctccccagtcctcctgagggctctaagctgagcaggcacagcacgtgccctgagcagaccagctgtgccatgcctccatgggaagggctgcgggtcctctgggcayrgtttgatccctgacagacgactggttgaactgtctcattcaatgccagcatttgcaccaactttctttaatactttct

SEQ ID NO: 88724 - DNA, 600 bp, Chicken  19866894394019_7
tcatcacatcacttagaggctttacaatgcacaaaatgacagatagcggcccacagattcctctttctttgtggcacakccctgtacctcggtggcctgcaggtgtgcccaagccgcaatggctttgcacaaacttctgcatcctgctgaaaggcacggggagagcgagtgccatgctggccaagcacgtgctgctccccagtcctcctgagggctctaagctgagcaggcacagcacgtgccctgagcagaccagctgtgccatgcctccatgggaagggctgcgggtcctctgggcayrgtttgatccctgacagacgactggttgaactgtctcattcaatgccagcatttgcaccaactttctttaatactttctttccccaccaggattttttagtctaattttgcactggcagcacagaacaaaactcactgatgaacacactggatcactttctgttacgtgattttttctcttaacctctgaattaacagatttttttccacagacttgcttgaaaatcagaactgtacattgacattaccacagaaacgtgattaagtgagttattttatagagaacagaggaacctacaa

SEQ ID NO: 88725 - DNA, 600 bp, Chicken  19866894394019_8
catcacatcacttagaggctttacaatgcacaaaatgacagatagcggcccacagattcctctttctttgtggcacakccctgtacctcggtggcctgcaggtgtgcccaagccgcaatggctttgcacaaacttctgcatcctgctgaaaggcacggggagagcgagtgccatgctggccaagcacgtgctgctccccagtcctcctgagggctctaagctgagcaggcacagcacgtgccctgagcagaccagctgtgccatgcctccatgggaagggctgcgggtcctctgggcayrgtttgatccctgacagacgactggttgaactgtctcattcaatgccagcatttgcaccaactttctttaatactttctttccccaccaggattttttagtctaattttgcactggcagcacagaacaaaactcactgatgaacacactggatcactttctgttacgtgattttttctcttaacctctgaattaacagatttttttccacagacttgcttgaaaatcagaactgtacattgacattaccacagaaacgtgattaagtgagttattttatagagaacagaggaacctacaac

SEQ ID NO: 88726 - DNA, 600 bp, Chicken  19866894394025_1
ctccaactgtctcggagcacattcctttccttgcaaaatggagctcccttctttggcatcaatggcaaacttggcaagaggcaggttagatttctttttatattaagttttgactgatcttgtggaattctgtaaatattttattacatattttataggtggagcactttatatctagcagtctttttggaaatgtagtggtttagttgggtttctcctgccccatggttcagctgtaaactgcttccatctgtcaaaacctatgagcagctcactaattgtcaaccccttagtcaggcsttgcattttctataggtttattgttaatcattagattcaggaaaaataaacttctttgacaataccaataagtgtttccaaaaacgaagagaaaaattcctygtactttaattgcttttaccatttttaaaagacattccttcaacaatttagtaggaaatacttattgatggggctgcttaaaagaaatgtatatcaaaacaacaccctgggaaattggattaaactgccacgactgcaaacattttttttaaaggaagcttaatytttcagcaagatacagttgaaagtattttttga

SEQ ID NO: 88727 - DNA, 600 bp, Chicken  19866894394025_2
ttaagttttgactgatcttgtggaattctgtaaatattttattacatattttataggtggagcactttatatctagcagtctttttggaaatgtagtggtttagttgggtttctcctgccccatggttcagctgtaaactgcttccatctgtcaaaacctatgagcagctcactaattgtcaaccccttagtcaggcsttgcattttctataggtttattgttaatcattagattcaggaaaaataaacttctttgacaataccaataagtgtttccaaaaacgaagagaaaaattcctygtactttaattgcttttaccatttttaaaagacattccttcaacaatttagtaggaaatacttattgatggggctgcttaaaagaaatgtatatcaaaacaacaccctgggaaattggattaaactgccacgactgcaaacattttttttaaaggaagcttaatytttcagcaagatacagttgaaagtattttttgaaaatactctttgctgagaccagaagatttttacctttcctgtaagaaaagaggaaaggtaagaagaccagtgtaaggatcttataaactgtgccagcaaata

SEQ ID NO: 88728 - DNA, 492 bp, Chicken  19866894394025_3
cagctcactaattgtcaaccccttagtcaggcsttgcattttctataggtttattgttaatcattagattcaggaaaaataaacttctttgacaataccaataagtgtttccaaaaacgaagagaaaaattcctygtactttaattgcttttaccatttttaaaagacattccttcaacaatttagtaggaaatacttattgatggggctgcttaaaagaaatgtatatcaaaacaacaccctgggaaattggattaaactgccacgactgcaaacattttttttaaaggaagcttaatytttcagcaagatacagttgaaagtattttttgaaaatactctttgctgagaccagaagatttttacctttcctgtaagaaaagaggaaaggtaagaagaccagtgtaaggatcttataaactgtgccagcaaatataataacaaaacaaacaaacaacaacaaaaaaaccaacagctccacacaattcagga

SEQ ID NO: 88729 - DNA, 600 bp, Chicken  19866894394027_1
actccttccttaattatagagctactacacactttagataaggttgaaatttttacattcttctcttaggaaaacaatctaatttattgtatcaaaacttcatatcctctatttagcaattgaactgaaagtagacaagcttctgtggttttgagctcacgtcaaaccagagaatactggataacactacaaagaacaagtgataacatggtacatagcaatatgaaatgacttgctgttttcagcctacaatgaagtcagtaggaggtaatgctagtagagttgcttagtaggctgtcrgttgtggcattaatagggttgttagcatccataaagacatgctgccatcatacaatgcaagacactagagagacattcagtcatatctattttaagctagaatacttttaaaaaagtgtaacttcataatgtgtagttttttaagtagttgaatatttaccattgtttctacaggaacattaaaaggataaaaaacttcattacaagtggaagtgatggaaatgatgcagaaacttaatttatatataattaataatgaatataattaataaattgtaatatgtaatttaattcttcaga

SEQ ID NO: 88730 - DNA, 600 bp, Chicken  19866894394027_2
tggcattaatagggttgttagcatccataaagacatgctgccatcatacaatgcaagacactagagagacattcagtcatatctattttaagctagaatacttttaaaaaagtgtaacttcataatgtgtagttttttaagtagttgaatatttaccattgtttctacaggaacattaaaaggataaaaaacttcattacaagtggaagtgatggaaatgatgcagaaacttaatttatatataattaataatgaatataattaataaattgtaatatgtaatttaattcttcagacatrtattaaagaatagcaaaataaggaatgccagtcaacatctgctattctgctaaaaaattatatatcagggaagtgagattttgaacgatccataaagtgagctatatgaactatcctcagaacatttttactacttagatagaaccctcctgtgtgtatcttcattttctacttaccttgctaccatttccttttccttatttgatgcatatccactgctactaagtgtttttgttggagaagacaggaagtacaagcagtgatttgtaaagtactgatcaactaatggtaaaagaacct

SEQ ID NO: 88731 - DNA, 600 bp, Chicken  19866894394035_1
aggtaggggaggaacagagccaggggagagcccattgcacaggcacatgaaaggctgcttatgttttaatgcctcagcagcaccagccctactctgcccaaccaggacaatctgtgggcagtagaatatgctgaggagcctgtagccaccaaaacatggcacctctgggtgcaatcccttgtgcagcaggacctacagcatgaggggcacagcacagccagtcaagggcagaaatggtttaaaacagtgtatctgtcacctcaccatgctccctctgcatctgtgtttccagactctccrtcaccacaaccatctttccaagctctttgcacagacaggacgacagcagagacctcacactgccatcacgcaaaaccccatgacttcaaagcccaaagcagccccagtctacaagacaaccagcaccaggctgaacgttgccccagggaaccaaaccactcctcggccccatatcaaagggcacggagctgacacatgatggattcccaacccatcccatgccaggcacacacaatggtgcctttcatcccagcctccaaaagtcacctcctcgggcagacacatggcctctctgcccat

SEQ ID NO: 88732 - DNA, 599 bp, Chicken  19866894394042_1
  misc_feature (1)..(159): n is any nucleotide
nnnnnnnnnnnnnnnnnnnnnnnnnnnnnnnnnnnnnnnnnnnnnnnnnnnnnnnnnnnnnnnnnnnnnnnnnnnnnnnnnnnnnnnnnnnnnnnnnnnnnnnnnnnnnnnnnnnnnnnnnnnnnnnnnnnnnnnnnnnnnnnnnnnnnnnnnnnnnnntttttttactaatttgcttggtaattagatcttatcacactggctctatagctttacataaactgtaagcatttggagctgccatgtatgacattaagagctgtctgtgttggtttgtgctgctctgcaaagaccggggtrctctcaaaaagcagtagaaatagggaagcagttgtaacacatgagttcctgctggcttaagaaggtttcctcaaaggaaaggagtcccttcacttacattaaccgctggaagccaagcagcatcgatgggtttcatcctgctggatgctgaacgcaaacaaggagctctgcttctgccccctccttcgccctccagtgcgaatatttgtttccaacaggagccgagggcttcagttaaggtactttgttgttataggtatctcattgaarttaaggagagcaataccatgatactggga

SEQ ID NO: 88733 - DNA, 600 bp, Chicken  19866894394042_2
ggtttgtgctgctctgcaaagaccggggtrctctcaaaaagcagtagaaatagggaagcagttgtaacacatgagttcctgctggcttaagaaggtttcctcaaaggaaaggagtcccttcacttacattaaccgctggaagccaagcagcatcgatgggtttcatcctgctggatgctgaacgcaaacaaggagctctgcttctgccccctccttcgccctccagtgcgaatatttgtttccaacaggagccgagggcttcagttaaggtactttgttgttataggtatctcattgaarttaaggagagcaataccatgatactgggagttcacagccgagaggtggtatgaattgtagccaaayatatagataaaaaggcagtgagtccttctgtggcagcaaatcaccttgaaatggcttcatgcagtgatatgcatagcataatctggcaattctgaatctagttgccattactggtaaaacagccttacttaggaagatctcaaaggagaaagtgctctgccataacttctcaggtgcgtcctgctcaaatatcacagtgtttttccggtgcaagcttacaatatgcagtgaagc

SEQ ID NO: 88734 - DNA, 600 bp, Chicken  19866894394042_3
acacatgagttcctgctggcttaagaaggtttcctcaaaggaaaggagtcccttcacttacattaaccgctggaagccaagcagcatcgatgggtttcatcctgctggatgctgaacgcaaacaaggagctctgcttctgccccctccttcgccctccagtgcgaatatttgtttccaacaggagccgagggcttcagttaaggtactttgttgttataggtatctcattgaarttaaggagagcaataccatgatactgggagttcacagccgagaggtggtatgaattgtagccaaayatatagataaaaaggcagtgagtccttctgtggcagcaaatcaccttgaaatggcttcatgcagtgatatgcatagcataatctggcaattctgaatctagttgccattactggtaaaacagccttacttaggaagatctcaaaggagaaagtgctctgccataacttctcaggtgcgtcctgctcaaatatcacagtgtttttccggtgcaagcttacaatatgcagtgaagcaattttattctgtggctaaagatgtcagggccttgaagatctttcccagggcaatctctcagctgt

SEQ ID NO: 88735 - DNA, 470 bp, Chicken  19866894394045_1
caatccagtcttgaaggcttcgaggcaaagcttttccttgacaaaggcaaaatattttattttgcatgactaagggaccaggaccttaatatatacaatcttttaatctggctcatgttttagtgctcatggaactgaagtgccttatgaattacaggctgacatctcctttatcaaatgaaatgactaagttggactcattcatggaatgtttcccagcacaaaactcactgctttatatttccatcaagagctgatccatagcatactgatttgtactcactggtatccatttatatmtttttatgataaaaactttgtgttttgccatgtgtggttcagtagaagcatcctttcctgtgcactgtgctgcagtgatatcttcgagataaataatggtattttcagaatggcttgaattatatagcttcagctaccgttttagcagtaatatgtggtactttaagata

SEQ ID NO: 88736 - DNA, 600 bp, Chicken  19866894394050_1
agtaaaaagatgtgtcatgaattgggataaaaagtcttaatcttctaccttttcaaagaactgacatttcgctaggaaaaaaaatgctctccttgttcaatggaaatgttttatttcagcaaccttcaaatgttttctttagagccattcagacgtggttagccttctgctttttaatgactaatttacctatggtgaagaccttttgacttcaaaatacatctgaatgttacggtgcccacagaagggatcccctgagcagtacttcatgctgagatatcacctggaagcagcacttcycttggaaatcatttggaagtgatraacttccattaaaacttgaaaaacaaaaagaagtttggcagaaggttcccagcaaatcctactgacacctgtatctttgagctgcaaagctggcagttttgtgactgagtggtgttgggcagcaaggcagagctctgtgaccgattgcagccagagaactcaatgagattaagctctttggctgcctttgctacatactttggctttgctcttttaaatagttgttacatggtccccgtgaaacaatatgccacagtgtctgttgtttctgcaaaa

SEQ ID NO: 88737 - DNA, 600 bp, Chicken  19866894394050_2
ggataaaaagtcttaatcttctaccttttcaaagaactgacatttcgctaggaaaaaaaatgctctccttgttcaatggaaatgttttatttcagcaaccttcaaatgttttctttagagccattcagacgtggttagccttctgctttttaatgactaatttacctatggtgaagaccttttgacttcaaaatacatctgaatgttacggtgcccacagaagggatcccctgagcagtacttcatgctgagatatcacctggaagcagcacttcycttggaaatcatttggaagtgatraacttccattaaaacttgaaaaacaaaaagaagtttggcagaaggttcccagcaaatcctactgacacctgtatctttgagctgcaaagctggcagttttgtgactgagtggtgttgggcagcaaggcagagctctgtgaccgattgcagccagagaactcaatgagattaagctctttggctgcctttgctacatactttggctttgctcttttaaatagttgttacatggtccccgtgaaacaatatgccacagtgtctgttgtttctgcaaaacactgtgtgcagtgtatgcaaagc

SEQ ID NO: 88738 - DNA, 599 bp, Chicken  19866894394056_1
  misc_feature (1)..(78): n is any nucleotide
nnnnnnnnnnnnnnnnnnnnnnnnnnnnnnnnnnnnnnnnnnnnnnnnnnnnnnnnnnnnnnnnnnnnnnnnnnnnnncataggcctagaacaactgctctatgtattcctgttgaggagagtactctacatggtatttgtttagaattaattatggctttcaatgattgtaaatcaaagtttacaaggattcagttttttcatgcatacaaaggtggaataaactgaatattggatgtgaattctgtagaatgaacttgccacaacttccgttttgcagggaagagaggtgagcttggyatgatagctttgtaagacttttctcccagctccagttctggatctgagatttcaaaaagggaaactttaagatctgtttttagagtatagtaacagaaggcatttctgctgctttgtatgtgttggcaatcacagtacctatcacgatatttagtgagcaccttaaagaaatgcgaaacgtccatcctgaagttcatcaaagactatttcttctgggattgtggagtcttgtttgtttttgtttttaaaccaggaagtaacttgttaaatttttagctaaagtaaagcttttccacttg

SEQ ID NO: 88739 - DNA, 600 bp, Chicken  19866894394058_1
tgtggacagtgaagaggacccatgttgatggcaagagtggagtttttcactcatccagatacgttcccagttaaaaagatagagaggtaatagttaggcttagtatttttccctcccaagaagacaagagtagggtcttcgtgcaagcataacttcagaatcagtggctaattacagttttaccaccttctcagcagttgtgctgcccatcagagagctgtgctctgctcgacgatgagttttgttggccccacattgcccagagctctgccccgcgtgaagccaagatgggtacccaaygcagagccatgccccatgcagggctgtgagcctcgtgcatggtgctgcttagctgtgaggctgttggatggagatccattgagttatagagtggtttgtattagaagggacccttaaaggccatctggtcccacactgtgcattgaacagggacacccacagctccatcaggagctcagagccccatcccctgacagtgggtgtctgcagggatggggcatcacccacctctctgtgcaacctgcattgttagaaaggagcatgcccttaagctggtgaccttgggcttattgaggtgtt

SEQ ID NO: 88740 - DNA, 600 bp, Chicken  19866894394061_1
tatttctgctattatctcatttgaggagtgtgtgaaggctgcacgattggctggagtgggaagcagacccgtataaagacaccatccctgctcctaaacattaatatttcaacccagataagctacattattcagtgagggagcaggaataggactggtaaagtctacgaagtcatgtcccaaaaatattcaaactgtgcacttgcgggcacacattttcctgtgttaaattagtcattagcctttgtctctgcaaccattaatttttcaagagtctccttcattctggaagaaaaaacratttttattgcaattgcttttcagtaatttggagaagttgcaaattattttttcatacatctggtcagtatctttttttttcttttttttttttttttaagttatctcagatccttctaaaagtggatgataaaaagagtctgagtgcttcacgagaccatttgcttgtctttactatatttgccagttagaaacttatcctttatcagtgcccatctttttttcttcctttgattcattctctcacattttcccagcttttgctgtagcccaggattttcaccccattggaagaagaat

SEQ ID NO: 88741 - DNA, 600 bp, Chicken  19866894394062_1
cacactttggtatgccagcagctgttcccatttgtctctgactgggagacaaacagataaaatgtgaactccaaatgtgacatccattaaggctctacagttaaattttaagaaaaaaaattaaggaagttcctctgtagattcaggttatagtgttataaagagaaatgcccactctctcccaaaggcccaaagcccttatcagatatgtccttataaatgcaaccaagaattcacttgatatctctttgtattcaatctggaacatgttcaccactaccattgctccctccctccccrgcaccatgatggattagtatgaagcactgacagtggagtcttggctcccattcccactgtaggtgcagaaagccccaggattaataatttcgtgatgagagaaaggacaaaaattaccttgcttttttttttttttttttaaactgtccttgtgcctaagtaataaaataaattccttgtaacttaaaacatctgaggaggagaagggaaaaaataaagaagaaaaaattaaaggtttgagtggtatgaaccgtcaatcctcctaaccagaaattgggccacaataactgggcagagcaa

SEQ ID NO: 88742 - DNA, 600 bp, Chicken  19866894394064_1
tgcaaatccttgcaaatatcgatcctggttttccttccaagacttttaggttgcctggtggagtcctcctttcatgtaacagctgagcttgacttgattctgcagccttcacctggatgtgagccatacgaagggattcggtccccctgctgggtgtttgcaggggcatttgtggctccagacgggttgtcatgatgagatttgcaagtccatgtcagagcaagaagtggtctggaaaggagctcctggaaccagcccggttgtgctgggggaacagggacggcaccccaaatcacagcwacctgcaagggctgtgagcaagctcttccttccccaggccagcacagagacaaggcactagtgcctgctcctgccattaacctcaaaaacccacaccggcaagcaaagcctgagtgtcagcaggcctttttccgtccatgttgaatattttctctgagtcgggcccccatgtttttgtgctctgtggagggaaacgggaatgggaggatcaccagccgtattcttttctccctctgctggcctgttctccccaggacaatccaggcaggtttctgtgtcttgttctccagacttcaccca

SEQ ID NO: 88743 - DNA, 599 bp, Chicken  19866894394079_1
  misc_feature (1)..(79): n is any nucleotide
nnnnnnnnnnnnnnnnnnnnnnnnnnnnnnnnnnnnnnnnnnnnnnnnnnnnnnnnnnnnnnnnnnnnnnnnnnnnnnnagggatgtttaatctgattctatagagtagctgttctgtaaagcagaagtcttacatagaagtttttttacagaagctaaatacatagagctttattcctctcccctgttactaacagtaaagagtatctttataaataagcctgtatcagaagaggctcagacctaaaatttagctgctaatgataagatctgttctctatttactttttgagatttttmgaaccatattctaaagcaaatgtaaccagaatactgaagatgtaaaagttttccctgaatctctctgtctttttattcaaagtaagacagaccattgatagctatcacctcggggcttctggcctgcagtcagcaggccctgagaaacataacagtttgctttttatcactgtacatttgttgttttggtcctaaattcagccatatgaaaattaagtagaacacatagagcaatgaagctgatgaacaatgaactgaaactttctgaagtaaacaagcaagtttttaattgcttaact

SEQ ID NO: 88744 - DNA, 600 bp, Chicken  19866894394091_1
ttgccccatctgttttaggtttttttaatttgttttgaatgaatttcttagccttcagcaccactgaactgctgaaagattttatgctgagaattcagtcacagaaatacaacgtggcttaatccagtttaggaaaagcacacagatccacccactcatctttcactggtgacctatacgaggcacacaattctggctatgccccttctcccattcacctgggtttcagatagtcctcattacaacaggatcctaacagcggcagcagggacccacacctccaccctttgtcccactgamggcacatgaggagcctgctctgatcagccttccatgcatgctgtgttacacccccaagcttcacttcccgcccttgggaggaccaccacagacatctaaccccagaccaagtagcttcttcagttcttctctcagacaaaactyctcctcagggcacagttagcactctcatcaactggctscttcaacactggcatcagcaataatgacaaatgtggttctttagcaggagctaataactggcatgaatcctcccaaggggcaattgcagcaaaggccaggcacttcggttttaccaca

SEQ ID NO: 88745 - DNA, 600 bp, Chicken  19866894394091_2
gatccacccactcatctttcactggtgacctatacgaggcacacaattctggctatgccccttctcccattcacctgggtttcagatagtcctcattacaacaggatcctaacagcggcagcagggacccacacctccaccctttgtcccactgamggcacatgaggagcctgctctgatcagccttccatgcatgctgtgttacacccccaagcttcacttcccgcccttgggaggaccaccacagacatctaaccccagaccaagtagcttcttcagttcttctctcagacaaaactyctcctcagggcacagttagcactctcatcaactggctscttcaacactggcatcagcaataatgacaaatgtggttctttagcaggagctaataactggcatgaatcctcccaaggggcaattgcagcaaaggccaggcacttcggttttaccacaaggtcagcttgtccaggctagcactgcatcccctgcctggtatttctcttgtaaaactgaagtacctggtctatactgctgttatcccctgggattgcataagctcattattctgaggttatggggggggaaaaaaaccaaaaa

SEQ ID NO: 88746 - DNA, 600 bp, Chicken  19866894394091_3
gcacacaattctggctatgccccttctcccattcacctgggtttcagatagtcctcattacaacaggatcctaacagcggcagcagggacccacacctccaccctttgtcccactgamggcacatgaggagcctgctctgatcagccttccatgcatgctgtgttacacccccaagcttcacttcccgcccttgggaggaccaccacagacatctaaccccagaccaagtagcttcttcagttcttctctcagacaaaactyctcctcagggcacagttagcactctcatcaactggctscttcaacactggcatcagcaataatgacaaatgtggttctttagcaggagctaataactggcatgaatcctcccaaggggcaattgcagcaaaggccaggcacttcggttttaccacaaggtcagcttgtccaggctagcactgcatcccctgcctggtatttctcttgtaaaactgaagtacctggtctatactgctgttatcccctgggattgcataagctcattattctgaggttatggggggggaaaaaaaccaaaaactcctttttagcagcaaaaaaaagctcttcacctccac

SEQ ID NO: 88747 - DNA, 600 bp, Chicken  19866894394095_1
aagatcctgttaaagccgtgcctctcctcccttgcatatccctctctttacacaatcctttcatgtacttacaccagcccgcactatgggaatgccaatcatttcgtcacccagtgtccaagaaaatcagctggggaaactcccacctacaagatggttccagcaagggtcagctacctccaagagcttcaggccaaaacaaactgtagtctctcagtgagggtgggatttattcccctaaaataaacaaggtgcaattcttctggctgaccccacttcagctgttgcctctgtgggggrggaagagacaactgctggcttgttctcttctgctggtacagtttgttctcagaggtgtcttctaaagcacataaccaggtcttgggaaagagaagagatgaattctgcttggaagtgtcaatgcttaatcagtggtgtgattttttcctcacgttatcctgaagtgattatttatggtatagagcttaggaacatcaagagtgcggtaggaattctgtatgaccgaaaaggaggttgtaggaaggaccagccacttgtacatagggtaaagtttccctgcgtctgtgttccatcgctatg

SEQ ID NO: 88748 - DNA, 591 bp, Chicken  19866894394099_1
aaaagccttggtaaaaatcccgttattgagtgaaaagcagatattgcctgctgactcagtgagagaccagaaaattctcacagctctggaggttcttccctcttcctacaagtagataatctccttttgggagtcagattcctgactttgagtatgtcttctcaatgttctgtacaagcttttacactgaagaagaaaacaaaagggagaagttcctgaaaaaaaaggcttcacctggagcacctttattaaaatatgtgcacgtcttttttctttcctgcaaaactggcatgagatgcwggaattatgtcaatgcaactccagtaaccccactgatctgtgtaggaattgctgctacatacccttgacaaaacatgcaagtatgcagcaagttctggatttgcattcctcccaccctaacattccaaagatttggactcaggatgtggtgagtaagtgagggtctacgtgataagcttgggaagaacaaatattaggactccttgccagaagtaaccacctgagagggatggaacatgtgggtgacaaggataccccatgcagaatataaggacctcacagccacccagg

SEQ ID NO: 88749 - DNA, 600 bp, Chicken  19866894394100_1
gaagacagcagtcttaaaaggagggaaaaaaactaattcagatctccccaaaatgtgtacatttgctgcttattacctgcaaagggaaatcattaatgctgtgcaatgccaggatcacaggtcagcaccattgtcttattgcacacatctagaggaaattatctttttaatgataatacacggaagtcatgacctgctttgtccctaggaggcaagtgggaaatgccaggctgacgctctccatattctgcaggcagaaatcagccacctgacagcaaatgccatattcaggctgggctwcagcgaggcagtgtgggctcggaggtgctgaaggcagctgacacaagatggatcccagctcgcacacgaggagggcattcagtgccttgtgcagctccctggccaccagtgccagtgacacagtgacagcagattgagctggtgggagccacagtgagacagtctgtccttaggaaaggcgaaccggacagggtcttcacatttaaagaccccctcccactcccttggctgctacccaagacacaagcacgtgttgcaaagccacaagggcactgccataggctggaaaccagacatttc

SEQ ID NO: 88750 - DNA, 600 bp, Chicken  19866894394100_2
gccacagtgagacagtctgtccttaggaaaggcgaaccggacagggtcttcacatttaaagaccccctcccactcccttggctgctacccaagacacaagcacgtgttgcaaagccacaagggcactgccataggctggaaaccagacatttcagctctagggctccccaaggaaccacagcatcgttttgagctggaaaggaccctcagaggccatctggtccaaccctcctgcactgagcagggacactcacagccctagtggtgctcagagcccatccagcctgaccttggctgtckgcagggatggggccatccaatatcaaaccaacagcaaacacacaaaactcacagctttctcaccttctcgactttcaccattttcccagttttattctccatgccagtggctggggctgttactccatttccccccatttctcctgtgctgtcccccacccacagagctggacagcaagactctggcactgtgcaactcatgggaaaagcagaaggctggaacaggcccatcacagcctcctgcttccttttttctctgtcacagcagcacatggacccacccatcctcctgctctgaac

SEQ ID NO: 88751 - DNA, 600 bp, Chicken  19866894394113_1
tagtctcagaaaggtctgaacaaggtctaaggagacatctgcaccggtggtgttcatacagtgcttcctaatatatgctgttctggcatactaatataatttaagtaaggtagacaaaaatgaaacatgattcctgatgttacaaactgagtttatgagacagttatcaaacagacagtatctggcaacacctggtagggacatactcattccaagtgaaactggacttaatactaaatagcctttttcctatttacccttcacagagaagcaattcagctcacttctgctccaggcctkacaaattagtcccacttttccactgggatgtagtgtataattgcacgtctgcttaaactcttggaagggtgctaagcttaaaaaaaacccaaccaaccaaccagaaaagacaaaggttttgtttaggcagaggactacagaagagaagcaacttattattcctctggccaacttccaaacagggagagaataaaagcaacaggtgtactggagtgttagcacatgactgcacgggaaggtcaccaagtactcaattcttagacaaaatggcggcaccagaagcattctacagagagagtc

SEQ ID NO: 88752 - DNA, 549 bp, Chicken  19866894394128_1
ggaacccagggcctccaaatgccccatatccatagcccagcatgctcccagcacctccaccaaaccctgcggtgccatagaaccccccaccccttccagctgcagagatcctcttgcatccaccaaaattgtagaggcttctgctcccaaatccacctccaacccttgcaaagccgctgccagcattgcagcccccaacacgggtgacggagcgtgagctgaagctggtgcggcacgtgccaggcacgatggctgacgcagcgctgaagccgcttctccccctctggatcctgacggtgyttgggatggggtggatgctacggcacgagggaagcagtggaggtgctggcctggagcaaggagtgggagggaaagaagaaagatgaacctgtgctctgcacgggctcgggagagcccttttatgcatttatgagactgggatgggtttgatgaggtggatcgtctttctgattaattaggcttggcatgtccaacagcattctggagagagaactcactccgcacacacgcccttctgaaataatacag

SEQ ID NO: 88753 - DNA, 599 bp, Chicken  19866894394129_1
  misc_feature (1)..(134): n is any nucleotide
nnnnnnnnnnnnnnnnnnnnnnnnnnnnnnnnnnnnnnnnnnnnnnnnnnnnnnnnnnnnnnnnnnnnnnnnnnnnnnnnnnnnnnnnnnnnnnnnnnnnnnnnnnnnnnnnnnnnnnnnnnnnnnnnnnnnnnctttattgattggttatgttacaccctgctgacagttttctccctcaaaagctggtctcaaagaaaagatggcatgatttttccctattccacttctgtcaaagtcagtagggtaggagcaggctacctgtagctgtcgaaggaaatctgggctcaccagagtgasaggtactctcctactctcattcactcaygtcaaaaagatattgtcttctgtttcacttctgacctgttgcccatggcttattgattcttctgtagctgaatatgagtatggactattgagccttgtatcttgagtaatatttataatacactgttggtagtgaagaaggtgctgctgatacgtagcttggattcacatcctagaggaaggatgttgtagaaagggtcccttgcccaggatryctcaaggactgctgcagaggaggtaaataccacttcagtggcattttgttttgtact

SEQ ID NO: 88754 - DNA, 599 bp, Chicken  19866894394129_2
  misc_feature (1)..(106): n is any nucleotide
nnnnnnnnnnnnnnnnnnnnnnnnnnnnnnnnnnnnnnnnnnnnnnnnnnnnnnnnnnnnnnnnnnnnnnnnnnnnnnnnnnnnnnnnnnnnnnnnnnnnnnnnnnctttattgattggttatgttacaccctgctgacagttttctccctcaaaagctggtctcaaagaaaagatggcatgatttttccctattccacttctgtcaaagtcagtagggtaggagcaggctacctgtagctgtcgaaggaaatctgggctcaccagagtgasaggtactctcctactctcattcactcaygtcaaaaagatattgtcttctgtttcacttctgacctgttgcccatggcttattgattcttctgtagctgaatatgagtatggactattgagccttgtatcttgagtaatatttataatacactgttggtagtgaagaaggtgctgctgatacgtagcttggattcacatcctagaggaaggatgttgtagaaagggtcccttgcccaggatryctcaaggactgctgcagaggaggtaaataccacttcagtggcattttgttttgtactaaagagccatgggaaagaaagttaaata

SEQ ID NO: 88755 - DNA, 600 bp, Chicken  19866894394129_3
gtagggtaggagcaggctacctgtagctgtcgaaggaaatctgggctcaccagagtgasaggtactctcctactctcattcactcaygtcaaaaagatattgtcttctgtttcacttctgacctgttgcccatggcttattgattcttctgtagctgaatatgagtatggactattgagccttgtatcttgagtaatatttataatacactgttggtagtgaagaaggtgctgctgatacgtagcttggattcacatcctagaggaaggatgttgtagaaagggtcccttgcccaggatryctcaaggactgctgcagaggaggtaaataccacttcagtggcattttgttttgtactaaagagccatgggaaagaaagttaaatagagagggcagaaaagcaagttggctttgtctcaggctcctgtgtagaggactgttccccttttctgatacattctaatgtctttctttgtttaatggtgcaaacccagttttataatggtgatgcttctgccacttccttgcaaggctgcaattgcacataatatggatgaagcttttagtggtagtcctacttgctttttcttttgtgctttc

SEQ ID NO: 88756 - DNA, 600 bp, Chicken  19866894394129_4
tagggtaggagcaggctacctgtagctgtcgaaggaaatctgggctcaccagagtgasaggtactctcctactctcattcactcaygtcaaaaagatattgtcttctgtttcacttctgacctgttgcccatggcttattgattcttctgtagctgaatatgagtatggactattgagccttgtatcttgagtaatatttataatacactgttggtagtgaagaaggtgctgctgatacgtagcttggattcacatcctagaggaaggatgttgtagaaagggtcccttgcccaggatryctcaaggactgctgcagaggaggtaaataccacttcagtggcattttgttttgtactaaagagccatgggaaagaaagttaaatagagagggcagaaaagcaagttggctttgtctcaggctcctgtgtagaggactgttccccttttctgatacattctaatgtctttctttgtttaatggtgcaaacccagttttataatggtgatgcttctgccacttccttgcaaggctgcaattgcacataatatggatgaagcttttagtggtagtcctacttgctttttcttttgtgctttct

SEQ ID NO: 88757 - DNA, 599 bp, Chicken  19866894394133_1
  misc_feature (1)..(107): n is any nucleotide
nnnnnnnnnnnnnnnnnnnnnnnnnnnnnnnnnnnnnnnnnnnnnnnnnnnnnnnnnnnnnnnnnnnnnnnnnnnnnnnnnnnnnnnnnnnnnnnnnnnnnnnnnnnaatgttggttatgcagtaactaatttccaacctacaaagttttttgacagtctaagaacataccacatattgcaaatgaataagtaaatgcatcttatttttttttgttcccctgaagatctcctccaagctttgggacttcaactgttccaactgcatatcagacatgaggacagagagggagcacacacaracatgagctgggactgccctaatatcacatctgcagagaaaaggaggagtaggcacgtgtggtttagtgggagtggtggcgatgggttgatggttggactagatgatcctactggtctttrccaaccttaatgattctatgtatgttaggatgtaagttatccaaaactcctaaatcagacaaggataagttgcattcttccagagctaaggcatccaatagccagtagtgtgaacatacagtaggagaacagtacttcatttacttgtggcatcatgatcctaagaggggggggaaaa

SEQ ID NO: 88758 - DNA, 600 bp, Chicken  19866894394133_2
agtaactaatttccaacctacaaagttttttgacagtctaagaacataccacatattgcaaatgaataagtaaatgcatcttatttttttttgttcccctgaagatctcctccaagctttgggacttcaactgttccaactgcatatcagacatgaggacagagagggagcacacacaracatgagctgggactgccctaatatcacatctgcagagaaaaggaggagtaggcacgtgtggtttagtgggagtggtggcgatgggttgatggttggactagatgatcctactggtctttrccaaccttaatgattctatgtatgttaggatgtaagttatccaaaactcctaaatcagacaaggataagttgcattcttccagagctaaggcatccaatagccagtagtgtgaacatacagtaggagaacagtacttcatttacttgtggcatcatgatcctaagaggggggggaaaaatacggttgtacaagcaagctcctggcccccaaacccacttgcttcagctctttcttgctgctcttttttttactcttttgcagagaggaaagcctcaggcacctcatgctcttcaccacac

SEQ ID NO: 88759 - DNA, 481 bp, Chicken  19866894394137_1
gctcatttgaaaagggtagctgatcttttagagcctgctggaaagtgttcatcaatgggttttttttaaaaggtcgtgcatttcctgaaaggaaattactcctcgttctgagaagcttgagttcacagtcactcgatcagtctcctaatgtgtggctctttcagaggtgcttggctccagcttctcagctcctctcagtggcatcgccctcttttctccctgcattttggtgcttttctccagccttctcccattcctctaccactgctggcctccataagctgcttctgcaacccttcyccaaggctcctgtatgaactctctcatccttttataccctggttctgttgttgatgccttcaaggtgtgcccctctatctcccccataagagcccaccgcagtctccctttccagtttctcccattcaagctgcagaatgccaagcaatgtgttgcatatgagctgacaggagctggtgtg

SEQ ID NO: 88760 - DNA, 600 bp, Chicken  19866894394142_1
tatacgtcatgaggggatgacgtgtgcaaaaaaaaaaaaaaattcattcaaattcattcaaatcctcccgcagctgtcagtcctatgtgatttctgtaatgttgtttgtgtcacatctaaaaagtgaccagacaggatctatccacaacaaccagcaccgccggcagcgagcagcgatgttcctggcaccccactccagtgtggctgaacaacaactccactgttaagaacaacccagtgcaaagcagggtcctgaccaggtccttcccactcgctgcaccctttgccagttggctctcyccytatgtcagtcccaccaggaaacacgctcggtatctcccctgacccgcaccaccacctcgctacgccccattcttccctcatttcatcctcctcacccatctcattgcaaactcttcgcttctgagtttcacagaggtcctcgattgggatgagtcccaccagagccagccagaacgaaccttagccaaaggagaaacgctctgaaattgcagtgaatcaggaggttttggtacccttccgagtgagtcatcccccrctcccagcgagcgctccgcgggagggactccacctgcctcg

SEQ ID NO: 88761 - DNA, 600 bp, Chicken  19866894394142_2
acgtcatgaggggatgacgtgtgcaaaaaaaaaaaaaaattcattcaaattcattcaaatcctcccgcagctgtcagtcctatgtgatttctgtaatgttgtttgtgtcacatctaaaaagtgaccagacaggatctatccacaacaaccagcaccgccggcagcgagcagcgatgttcctggcaccccactccagtgtggctgaacaacaactccactgttaagaacaacccagtgcaaagcagggtcctgaccaggtccttcccactcgctgcaccctttgccagttggctctcyccytatgtcagtcccaccaggaaacacgctcggtatctcccctgacccgcaccaccacctcgctacgccccattcttccctcatttcatcctcctcacccatctcattgcaaactcttcgcttctgagtttcacagaggtcctcgattgggatgagtcccaccagagccagccagaacgaaccttagccaaaggagaaacgctctgaaattgcagtgaatcaggaggttttggtacccttccgagtgagtcatcccccrctcccagcgagcgctccgcgggagggactccacctgcctcgtta

SEQ ID NO: 88762 - DNA, 600 bp, Chicken  19866894394142_3
ggtccttcccactcgctgcaccctttgccagttggctctcyccytatgtcagtcccaccaggaaacacgctcggtatctcccctgacccgcaccaccacctcgctacgccccattcttccctcatttcatcctcctcacccatctcattgcaaactcttcgcttctgagtttcacagaggtcctcgattgggatgagtcccaccagagccagccagaacgaaccttagccaaaggagaaacgctctgaaattgcagtgaatcaggaggttttggtacccttccgagtgagtcatcccccrctcccagcgagcgctccgcgggagggactccacctgcctcgttagtgggtgggtattttcagaaacctcaaattctttcagcagttgaaatagagaacaaaaacagaatctcgatctctgccaacgctggatgacatccagcaggaacaacgtgggttaccagtagggctgaagtcaggctaggagcacgctcatgcacaaggtcggcactcccagcgggtctcagaaagctctgctctgtttgctcgtgtcatcaaacatttgtttttgcggtcagcttcaactcctgctaatgttcct

SEQ ID NO: 88763 - DNA, 599 bp, Chicken  19866894394143_1
  misc_feature (1)..(54): n is any nucleotide
nnnnnnnnnnnnnnnnnnnnnnnnnnnnnnnnnnnnnnnnnnnnnnnnnnnnnnacagtgaaattgcaccctagagttataaagcaattgtctagctcagcagcagaatgagcatgaaatggtgcagaaagcaactaaataaaattgggtaaggcagatgcatgaaaataatgacatctctatagtggagtcaggcacgctcgctctcgtgagaacagataaactttcagagcagccttagcatttattttcccagggtctcttttggagtgggagcacggcagcttggccgagccctgygccttctctttggctatggggccgtgctgagcccctctccccsccgccgctccccccaaccccctctgctttccctgctcgtttcccaagcgggtttttctgctcggccaagcacccaagcgataacctttgcaacttcatttccccgctgtgcagcgcagggctcggggatgctgygagcgggtggccgtgcaggagccctgcctggtgcggtggcagtgacaccgagcagcaatcctggctcaccctgcggctctccttctgtttcccagcctgaagcgtggcgctgtgctcctgcc

SEQ ID NO: 88764 - DNA, 599 bp, Chicken  19866894394143_2
  misc_feature (1)..(11): n is any nucleotide
nnnnnnnnnnnacagtgaaattgcaccctagagttataaagcaattgtctagctcagcagcagaatgagcatgaaatggtgcagaaagcaactaaataaaattgggtaaggcagatgcatgaaaataatgacatctctatagtggagtcaggcacgctcgctctcgtgagaacagataaactttcagagcagccttagcatttattttcccagggtctcttttggagtgggagcacggcagcttggccgagccctgygccttctctttggctatggggccgtgctgagcccctctccccsccgccgctccccccaaccccctctgctttccctgctcgtttcccaagcgggtttttctgctcggccaagcacccaagcgataacctttgcaacttcatttccccgctgtgcagcgcagggctcggggatgctgygagcgggtggccgtgcaggagccctgcctggtgcggtggcagtgacaccgagcagcaatcctggctcaccctgcggctctccttctgtttcccagcctgaagcgtggcgctgtgctcctgccccatcccttgccctgctcccaggcgctgtctctcttggtgctt

SEQ ID NO: 88765 - DNA, 600 bp, Chicken  19866894394143_3
ctctatagtggagtcaggcacgctcgctctcgtgagaacagataaactttcagagcagccttagcatttattttcccagggtctcttttggagtgggagcacggcagcttggccgagccctgygccttctctttggctatggggccgtgctgagcccctctccccsccgccgctccccccaaccccctctgctttccctgctcgtttcccaagcgggtttttctgctcggccaagcacccaagcgataacctttgcaacttcatttccccgctgtgcagcgcagggctcggggatgctgygagcgggtggccgtgcaggagccctgcctggtgcggtggcagtgacaccgagcagcaatcctggctcaccctgcggctctccttctgtttcccagcctgaagcgtggcgctgtgctcctgccccatcccttgccctgctcccaggcgctgtctctcttggtgcttggatgctgcctggagcctttaacctcagcaaaggcacgttcccctctgtcagctcggggaagctgagatgcttcctgacattgtctgacgttctgcgcccggattcctcccaggctggaaacaagctgctaatcc

SEQ ID NO: 88766 - DNA, 600 bp, Chicken  19866894394147_1
cggcagtcccagttgctgcaatggacccagcaccaggtgaatagccccaaccccactccagaatgctgctgagacaataaggaggccaggtgaactgcagctctgttattcagacagttgcatggtttaaatacattacatacatttctacagtgcattagaacaatacatttggggtcagtcagagatgtagccaggcctgggagatgaggtctcacttctacacccctgtgctttcagcaccctcaggacagccactgctgagccccttgtgcaagtaggagaggagtgagctgcccwcccctcccagccccaagcagcacagtcccagccttcgcttccctcccagcccccagggctgggcagacaggacagtgagacccaaccccagctttcccctgcacagggaaagtgacagctcaaggcaagcagatgcaggcagcagccctggtaccattttatacaagacagctcagcagctttgggggagagggagcaccaactgcctcacccactcacatcaggcccacgaggttagcagcactggggcagccaggagcttgcaccagccttcaggtgcttgcaatacaccagttcctg

SEQ ID NO: 88767 - DNA, 599 bp, Chicken  19866894394155_1
  misc_feature (1)..(88): n is any nucleotide
nnnnnnnnnnnnnnnnnnnnnnnnnnnnnnnnnnnnnnnnnnnnnnnnnnnnnnnnnnnnnnnnnnnnnnnnnnnnnnnnnnnnnnnncctacacagctcttagagcatgatagacagtaaaagggagcagaagcattcacctgagatgttcttgctgtatgataaagaactaagatttaaatatcaacggatgctttttcagatcaggaaagcacgggcaattcagtgcggctgccttggagatagctgataaagcagagaagtggttattcccaggggaaaaggaaggaaaaaaaaawgggaaaaaatgacatgtcttaaacagactaaaaaacccaaaccaattaaagtcagtgaaagcaaaatgaagaggagaaactatgtatattggaaactatgctattttaagccacagactgccaacctatgcaaattttaatgtgagttttgttccaaggcatctggcctttgtagattagttcccgcttgtgaaacataagtcggcttttggcaaaatttggttatctcttctatgcttggtataatgagaaggaacttaactgcttgagggaatggagcactgaaaaatgagaaagca

SEQ ID NO: 88768 - DNA, 600 bp, Chicken  19866894394162_1
cccatagaggttttgggacctatctggcattgtacctgtgtaaattccaaattcctccctgttgatactcatacaaagcctggaattgtaggcaggagttcctactcaacagaccaccgagtagggccttgtgggaatgcttgggtcctagtccttctgcccatttgagagccaagctttgtcacttcggtgatgtgccagcttcagctccaaggtgaaagcttcctctctggaagcacctcttttgggcagaaaatacttaaacatgtatcgtgtttcagaaaaagtgagagtgacgaygtactctgacgatgagaatttccagtataatgtcttaaactaaactgttgttccattgagtgcagtgactcagaggacactgttttaaaagaggcagcagttgtctcagtaacacgaaacgacaccctttgactggacagggagttgccagttttgctgatttcctaccatgtattaatgtttttggcaacgtgctcatgatgaagctgagcttgtatttctcactgcaaaaatttcttgtttgttctttgtttgaagccacgcagacatatctttctgccagcatggtctttgcttcat

SEQ ID NO: 88769 - DNA, 599 bp, Chicken  19866894394167_1
  misc_feature (1)..(60): n is any nucleotide
nnnnnnnnnnnnnnnnnnnnnnnnnnnnnnnnnnnnnnnnnnnnnnnnnnnnnnnnnnnntttctttgaaacacggaggcaatctgaatgtgtgttcctgtttagcatgattaaggtgtcacatagcactcccacgcaccccgacacagagaacttcttgccggctgctgatgtcaaagcaaatcagctgaaaacactgagggtttctgagaagcacaagtaggacacggcaggcagctgacactgagctgtatggcccatacagaccgggcagcttcggggagggggacagcacggtgrcatcccaccccagcaggattttgggatatgcatcaagcacgtcttcacagtgcagattcctgcatgtgagaggcttgtttctcttgcttttatccagctctttgtcttgtttatttttgcctgtgccctgcggtttgtccactattagcatgaataatttagggaattgcctgcttctgctgaaatcaattcctgtgctactgctgttaagtgctgggcctgagcctgagaaacgctgtggtggggcccaaataaagcaaacaaaatgaaatgaaagcagaggagaacagaatctccat

SEQ ID NO: 88770 - DNA, 600 bp, Chicken  19866894394168_1
tttgttgttctagcaactttgaagttgagagatattctactttctgaacactcagtacttttccctaccactgcttaggtagttacatgtaaaaaaaaattactctgatttgaatttaaggctggagaggaatgtcaaagcctagccatgattattacttcttacaaacatgtgaagagtctatgaactttaattctatcagtaaacatatgaattgcaacattacatgaataacccacaaaatatgaaatatctttgaagtgattggtactgtatgtctggtaaaggatgcatctctgygaaaagaaaaatgaagtactctgcctagaaatatatgcatacagtataagctaaccagaaagwgcacatcggaataatatagcctatctcctttacataaaggaaacaacttcttgctgaatgtcaaagattaaaaagtcacccaaactgctttacaaagctcatattttccaaaaattccttgactcagatttcttggcgtttactgtcactcaagccatctgaaaggctccacaagtacaatactaaaatgcatgcttccagattttcctccctttcaggaaggtagctgtgaagcaa

SEQ ID NO: 88771 - DNA, 600 bp, Chicken  19866894394168_2
cctaccactgcttaggtagttacatgtaaaaaaaaattactctgatttgaatttaaggctggagaggaatgtcaaagcctagccatgattattacttcttacaaacatgtgaagagtctatgaactttaattctatcagtaaacatatgaattgcaacattacatgaataacccacaaaatatgaaatatctttgaagtgattggtactgtatgtctggtaaaggatgcatctctgygaaaagaaaaatgaagtactctgcctagaaatatatgcatacagtataagctaaccagaaagwgcacatcggaataatatagcctatctcctttacataaaggaaacaacttcttgctgaatgtcaaagattaaaaagtcacccaaactgctttacaaagctcatattttccaaaaattccttgactcagatttcttggcgtttactgtcactcaagccatctgaaaggctccacaagtacaatactaaaatgcatgcttccagattttcctccctttcaggaaggtagctgtgaagcaagtactcatcttttaaagttataaaaacctcaaaaagaggcaatataagtacagctggtactga

SEQ ID NO: 88772 - DNA, 600 bp, Chicken  19866894394172_1
ctagaagtattttggggagcacgtggcttctctcctctgtcccctccaatatcttgtatgggtgactgctttcagcagtgcagtttctcttcagaggccatctagactttactaaatgtgtttttctggttacattttccttgagattgaaagatactgagcaattacatttatagaaccattcataatctctgggtatcatgcttcaatttatttcagtgaagaaaagaatattttcacatgttgctccaaacactgaaatatcatttccaccccttggaactattcattttacctgckatccagtgagcaccagtatacattaatggatgcagaattattaaaactgctgcacagttattttgggttgcacactccttccaaattaatcctgtggtaggaatggcaggtcatggttagaggaactctgctggggaacaccttcacttttaaaataatatttcacagttagattttgactccagaaggggggaaaattccctccgtgttctcctactcacatttttctatttatttaaacatttatgtttgcccttgggtgtcttaaatttataaaacattcattactaaacagcaggc

SEQ ID NO: 88773 - DNA, 600 bp, Chicken  19866894394179_1
ggcagcctaagctgacagcagcacacccacagccctgcaaccaaaaagaccttttgctgcagctctcagtgatttcagcatcacatttgtatctgtcaaattcaggaggtgacgtggtgacaactaaagattggagcggccttctgtgtttccaagaaaagaaattggagaaagacgataaaataagcaaaggacatttcttgtgcctgctgcctgcttctaggaaatgtgctggttgatagattaagaaaaaataatgattgatgcttgtttatcattgcaactctgagggtgagaagygtgcactagaatatcccaagggaattatgaaagcctcagcaaactggcagagaacaaagagccaactccatagtctctatggacgaggttgcatcagtgatcttttgtagcacaaaacttctggcaagggatttacttcgtacatgaacaaaaatgtttttggtgttggtattacctgtctcatttcctgctgtgatattacatctttttggctcacggggacttctgaagtgagtaatgaggaggttaaaccaaagagcgtgattacattaaggtgtttgctattctctccaggaaacg

SEQ ID NO: 88774 - DNA, 600 bp, Chicken  19866894394179_2
aaacttctggcaagggatttacttcgtacatgaacaaaaatgtttttggtgttggtattacctgtctcatttcctgctgtgatattacatctttttggctcacggggacttctgaagtgagtaatgaggaggttaaaccaaagagcgtgattacattaaggtgtttgctattctctccaggaaacgtacccattctgccctcttcctgagccagcagattttccatgtgaccagcagtggtggtgaggctgatgaatcccacaaggttgtactgatggtatcacagggacattctgatargccctgyggggaaagcaaggtttaaaaatcagtcctgactatcttctgggaccgtgagaatcctcatttctatatgtacttcagcacagtggccagaatggtcttttggcccttatcttctcaaacttgaagactttctgtagtgtttacctgcagaaactcaaccaagtttggtgtgttttcattcatacagaaagtgcacgcttcagggaaaccaggactgctttgcatcttggcttgcgggtaaatgatactaatgtgggagatcagcagttggcatgagaggttgcattcagccct

SEQ ID NO: 88775 - DNA, 600 bp, Chicken  19866894394179_3
tggcaagggatttacttcgtacatgaacaaaaatgtttttggtgttggtattacctgtctcatttcctgctgtgatattacatctttttggctcacggggacttctgaagtgagtaatgaggaggttaaaccaaagagcgtgattacattaaggtgtttgctattctctccaggaaacgtacccattctgccctcttcctgagccagcagattttccatgtgaccagcagtggtggtgaggctgatgaatcccacaaggttgtactgatggtatcacagggacattctgatargccctgyggggaaagcaaggtttaaaaatcagtcctgactatcttctgggaccgtgagaatcctcatttctatatgtacttcagcacagtggccagaatggtcttttggcccttatcttctcaaacttgaagactttctgtagtgtttacctgcagaaactcaaccaagtttggtgtgttttcattcatacagaaagtgcacgcttcagggaaaccaggactgctttgcatcttggcttgcgggtaaatgatactaatgtgggagatcagcagttggcatgagaggttgcattcagccctggaagtt

SEQ ID NO: 88776 - DNA, 600 bp, Chicken  19866894394180_1
tttacaaaatgtgtcagataaagtaacttctaatagagaggtgcttgtcagcatctgtgagctcaaagccagaaatatgcgggtcataaaaataaatttgagtgaatttttttctgttctccctcctctcactcagtgtgtccatggagtgtttgctgaattgagtaattctgagtgcttctggtgctctcagtatgactgcctgtgagccccgagaggcaaagggattcacagctgcttggtgcggagtaagtggagatggttgggcatgtttctaattgctctgagcttgacaagttrgaagatggagaatgattgcacccccataacactgtgaaaagaagtcagaccctgatgagagcaggggagtctactacccatcactaagtagtcagcatttctcaacgtacttcagcaatgcctcatcaccatacaacatgcaaacaacacctaatattcatttcaccaacctcacagcattgccttggatgtagaagctccctgckgttgacagccccttttagatttctgcctccagtctttttcccatccctaagattagaaaraagacaatccctgccttgcctctcctcatacaga

SEQ ID NO: 88777 - DNA, 600 bp, Chicken  19866894394180_2
gagccccgagaggcaaagggattcacagctgcttggtgcggagtaagtggagatggttgggcatgtttctaattgctctgagcttgacaagttrgaagatggagaatgattgcacccccataacactgtgaaaagaagtcagaccctgatgagagcaggggagtctactacccatcactaagtagtcagcatttctcaacgtacttcagcaatgcctcatcaccatacaacatgcaaacaacacctaatattcatttcaccaacctcacagcattgccttggatgtagaagctccctgckgttgacagccccttttagatttctgcctccagtctttttcccatccctaagattagaaaraagacaatccctgccttgcctctcctcatacagagtgtccttggaaacatgctggggtgcagcgtagctgtgatccccctgccccaggcagcagctgtggcagcagaaggcccctgccctgccctgccggggggctccttccccccacacgtttccccgcagcgccctgggcagctccccgggcaggctgagtgctgagcctggcaggcggcagtccctgtcccggcacacagcccctgt

SEQ ID NO: 88778 - DNA, 600 bp, Chicken  19866894394180_3
gcatgtttctaattgctctgagcttgacaagttrgaagatggagaatgattgcacccccataacactgtgaaaagaagtcagaccctgatgagagcaggggagtctactacccatcactaagtagtcagcatttctcaacgtacttcagcaatgcctcatcaccatacaacatgcaaacaacacctaatattcatttcaccaacctcacagcattgccttggatgtagaagctccctgckgttgacagccccttttagatttctgcctccagtctttttcccatccctaagattagaaaraagacaatccctgccttgcctctcctcatacagagtgtccttggaaacatgctggggtgcagcgtagctgtgatccccctgccccaggcagcagctgtggcagcagaaggcccctgccctgccctgccggggggctccttccccccacacgtttccccgcagcgccctgggcagctccccgggcaggctgagtgctgagcctggcaggcggcagtccctgtcccggcacacagcccctgtgtggggcacagcagggaccctgctctgcaccacagccctgggcacccggctgcacccccg

SEQ ID NO: 88779 - DNA, 456 bp, Chicken  19866894394196_1
caagaaatatttttttatatggtttactgactctgttaaggtaacttgactattttaaaaaggtacttaactctattaggttaaaatctttcttcctctaatactctttttcaaataaaatctgaaatatgtgactcacggacggtaactgcaggcttttcctccttgtctttgaggaagagttctgctcctacccatctctatccaataaattgtttcttaaattgttttaaaggcaaacacaaaaaaaacagagtttactttctaaaactttgcttccaacaacctattaattcccaraatgggtaggagtagagtgatattttcttggatatatgtgccaattttcttaccaaactgttctcccctcctcctcagcaagttagtgggagactatgcaatagaaaagctcatagatgaagaaaaagggaaattagaaagagaccagttaacaga

SEQ ID NO: 88780 - DNA, 599 bp, Chicken  19866894394197_1
  misc_feature (1)..(165): n is any nucleotide
nnnnnnnnnnnnnnnnnnnnnnnnnnnnnnnnnnnnnnnnnnnnnnnnnnnnnnnnnnnnnnnnnnnnnnnnnnnnnnnnnnnnnnnnnnnnnnnnnnnnnnnnnnnnnnnnnnnnnnnnnnnnnnnnnnnnnnnnnnnnnnnnnnnnnnnnnnnnnnnnnnnnncatggcctcttgggaactaagttaaaattgttgtggagctcagagcacagtggtaatgtaaatgcattattacatgacttttttattattattttctgctttgcatttcaatctgtttaagcctctcagcgctgyggcacagttggacggggcgagggggatttctcctccctaaaacctgtcctgtttggccttgtacaagtctgaataatgacaggagacccgagcaatggcaactaggatgagaaatgccagatgtgcaagaagtctgattttcagcaggtcatgcaactcatgatgagtctctctaaatggcctttgaaacctcagtatctgtgtgaagatgatgagcacctgcaaaaagtcagcatggtccctcttgcggtgtgcctgttaggaaatgccatttacacgcgccccagagtcaccaggat

SEQ ID NO: 88781 - DNA, 600 bp, Chicken  19866894394197_2
gacggggcgagggggatttctcctccctaaaacctgtcctgtttggccttgtacaagtctgaataatgacaggagacccgagcaatggcaactaggatgagaaatgccagatgtgcaagaagtctgattttcagcaggtcatgcaactcatgatgagtctctctaaatggcctttgaaacctcagtatctgtgtgaagatgatgagcacctgcaaaaagtcagcatggtccctcttgcggtgtgcctgttaggaaatgccatttacacgcgccccagagtcaccaggatatctggtaaasctaatattttcctttgggtcctaacagcttytacaagctgatctccactcatgttaaaagaagagtatcactgtggttgcactgccattagaactccagccccttttacacttaataagcatcctttgggggacagctgtgtaacaacaatctatatttctgagctagattcacccagctggctccagataggatacttagggcttgttggggcacgaggctgggcttagctccgtccatgcaacctaattacatgtgacaatattcagagagtctgagagcttattgatttgttttatc

SEQ ID NO: 88782 - DNA, 600 bp, Chicken  19866894394197_3
acctgtcctgtttggccttgtacaagtctgaataatgacaggagacccgagcaatggcaactaggatgagaaatgccagatgtgcaagaagtctgattttcagcaggtcatgcaactcatgatgagtctctctaaatggcctttgaaacctcagtatctgtgtgaagatgatgagcacctgcaaaaagtcagcatggtccctcttgcggtgtgcctgttaggaaatgccatttacacgcgccccagagtcaccaggatatctggtaaasctaatattttcctttgggtcctaacagcttytacaagctgatctccactcatgttaaaagaagagtatcactgtggttgcactgccattagaactccagccccttttacacttaataagcatcctttgggggacagctgtgtaacaacaatctatatttctgagctagattcacccagctggctccagataggatacttagggcttgttggggcacgaggctgggcttagctccgtccatgcaacctaattacatgtgacaatattcagagagtctgagagcttattgatttgttttatcatcacattgtacgtcctcaagagctgaacaa

SEQ ID NO: 88783 - DNA, 599 bp, Chicken  19866894394201_1
  misc_feature (1)..(93): n is any nucleotide
nnnnnnnnnnnnnnnnnnnnnnnnnnnnnnnnnnnnnnnnnnnnnnnnnnnnnnnnnnnnnnnnnnnnnnnnnnnnnnnnnnnnnnnnnnnnntgaattggaagtttgatagctgagattacagaagttgcttttaagtcataaaagtatccctgtgaaatatattgtatgcagagattggcttcaggttagtttttaatgtattcagtaacactgctatggattttttatttgtgcaattttcctaaactgattataaatatcctttttaagttttaatttctaatatttttagactaygattttaagggcagtctgaaaatgcatctgtcttatgtctctgagaagtacctgggtgaggaaaacacrttgtcccagtcactttgtaccttcagaagatcattaaagttgaggtgtaaaatgttgtcagatgtgccctcaagtctgaagcagcgttgacaatttcaataatttcacttttgatttagactggatgaaggaattcttatgtgaatggagacaacgtgaactttttggcctttttgctggrcataaartatttgccaaatgcctgatacgacttctgataattcacccaa

SEQ ID NO: 88784 - DNA, 599 bp, Chicken  19866894394201_2
  misc_feature (1)..(24): n is any nucleotide
nnnnnnnnnnnnnnnnnnnnnnnntgaattggaagtttgatagctgagattacagaagttgcttttaagtcataaaagtatccctgtgaaatatattgtatgcagagattggcttcaggttagtttttaatgtattcagtaacactgctatggattttttatttgtgcaattttcctaaactgattataaatatcctttttaagttttaatttctaatatttttagactaygattttaagggcagtctgaaaatgcatctgtcttatgtctctgagaagtacctgggtgaggaaaacacrttgtcccagtcactttgtaccttcagaagatcattaaagttgaggtgtaaaatgttgtcagatgtgccctcaagtctgaagcagcgttgacaatttcaataatttcacttttgatttagactggatgaaggaattcttatgtgaatggagacaacgtgaactttttggcctttttgctggrcataaartatttgccaaatgcctgatacgacttctgataattcacccaacttattcatgtatttagtaataagactatttatgttacttccagaaacttcagttccttttcyctacaa

SEQ ID NO: 88785 - DNA, 600 bp, Chicken  19866894394201_3
tgattataaatatcctttttaagttttaatttctaatatttttagactaygattttaagggcagtctgaaaatgcatctgtcttatgtctctgagaagtacctgggtgaggaaaacacrttgtcccagtcactttgtaccttcagaagatcattaaagttgaggtgtaaaatgttgtcagatgtgccctcaagtctgaagcagcgttgacaatttcaataatttcacttttgatttagactggatgaaggaattcttatgtgaatggagacaacgtgaactttttggcctttttgctggrcataaartatttgccaaatgcctgatacgacttctgataattcacccaacttattcatgtatttagtaataagactatttatgttacttccagaaacttcagttccttttcyctacaaggacatgcatgttcttgaaaataaaatctttcttgaaggagttactgtgttcttgccttcagatgaagcataccttgctaggattgcgaggaagctgcctaggccaccctacaagagaagcaaaattgtttgtgagatcaatagtcctgatgatttctttcatatacttttccataatgcct

SEQ ID NO: 88786 - DNA, 600 bp, Chicken  19866894394201_4
aaatatcctttttaagttttaatttctaatatttttagactaygattttaagggcagtctgaaaatgcatctgtcttatgtctctgagaagtacctgggtgaggaaaacacrttgtcccagtcactttgtaccttcagaagatcattaaagttgaggtgtaaaatgttgtcagatgtgccctcaagtctgaagcagcgttgacaatttcaataatttcacttttgatttagactggatgaaggaattcttatgtgaatggagacaacgtgaactttttggcctttttgctggrcataaartatttgccaaatgcctgatacgacttctgataattcacccaacttattcatgtatttagtaataagactatttatgttacttccagaaacttcagttccttttcyctacaaggacatgcatgttcttgaaaataaaatctttcttgaaggagttactgtgttcttgccttcagatgaagcataccttgctaggattgcgaggaagctgcctaggccaccctacaagagaagcaaaattgtttgtgagatcaatagtcctgatgatttctttcatatacttttccataatgccttcctgag

SEQ ID NO: 88787 - DNA, 600 bp, Chicken  19866894394201_5
aaacacrttgtcccagtcactttgtaccttcagaagatcattaaagttgaggtgtaaaatgttgtcagatgtgccctcaagtctgaagcagcgttgacaatttcaataatttcacttttgatttagactggatgaaggaattcttatgtgaatggagacaacgtgaactttttggcctttttgctggrcataaartatttgccaaatgcctgatacgacttctgataattcacccaacttattcatgtatttagtaataagactatttatgttacttccagaaacttcagttccttttcyctacaaggacatgcatgttcttgaaaataaaatctttcttgaaggagttactgtgttcttgccttcagatgaagcataccttgctaggattgcgaggaagctgcctaggccaccctacaagagaagcaaaattgtttgtgagatcaatagtcctgatgatttctttcatatacttttccataatgccttcctgagatggtgattacttgaagcactggtagcaaaattaactcaatgtgtgttgcacatgatgtctgtagatcattcttccaaggtctccagagccatccaccagcaaga

SEQ ID NO: 88788 - DNA, 599 bp, Chicken  19866894394203_1
  misc_feature (1)..(205): n is any nucleotide
nnnnnnnnnnnnnnnnnnnnnnnnnnnnnnnnnnnnnnnnnnnnnnnnnnnnnnnnnnnnnnnnnnnnnnnnnnnnnnnnnnnnnnnnnnnnnnnnnnnnnnnnnnnnnnnnnnnnnnnnnnnnnnnnnnnnnnnnnnnnnnnnnnnnnnnnnnnnnnnnnnnnnnnnnnnnnnnnnnnnnnnnnnnnnnnnnnnnnnnnnnnnnaacaaatcagccattacacaataaaccactcaaaagactacaaaaaactgcgtgtcagcacagttttaattttgtaacgggagttagtgaagttkgtgtgtaagaacttaaagaaagaaaaagagaagcttgttctgagaagatgcacttccataaactcagtgacagatgagagcagactttgtaactctcacactgaaagtgatctatccacttagacatgcaaatgtcgttttgaataagtctaacatyttgaattgtcaacggtggraagaggtttctctaaaggcaagttgtattcttcagttatcctaagcttgtaaaccatgtagaaccaagggggaaaaaaaagaacaaaattgaaagattctgctttactagcatttggtgactg

SEQ ID NO: 88789 - DNA, 599 bp, Chicken  19866894394203_2
  misc_feature (1)..(48): n is any nucleotide
nnnnnnnnnnnnnnnnnnnnnnnnnnnnnnnnnnnnnnnnnnnnnnnnaacaaatcagccattacacaataaaccactcaaaagactacaaaaaactgcgtgtcagcacagttttaattttgtaacgggagttagtgaagttkgtgtgtaagaacttaaagaaagaaaaagagaagcttgttctgagaagatgcacttccataaactcagtgacagatgagagcagactttgtaactctcacactgaaagtgatctatccacttagacatgcaaatgtcgttttgaataagtctaacatyttgaattgtcaacggtggraagaggtttctctaaaggcaagttgtattcttcagttatcctaagcttgtaaaccatgtagaaccaagggggaaaaaaaagaacaaaattgaaagattctgctttactagcatttggtgactgaaagattccgctttactagcatttggtgactgaaagagctcattaagataacattttccactttataacccgcttcacaagcaaatattcctggcagcactgctcctctcatacttagggatactttaaagaggatggccaggacctttgcctgggc

SEQ ID NO: 88790 - DNA, 599 bp, Chicken  19866894394203_3
  misc_feature (1)..(29): n is any nucleotide
nnnnnnnnnnnnnnnnnnnnnnnnnnnnnaacaaatcagccattacacaataaaccactcaaaagactacaaaaaactgcgtgtcagcacagttttaattttgtaacgggagttagtgaagttkgtgtgtaagaacttaaagaaagaaaaagagaagcttgttctgagaagatgcacttccataaactcagtgacagatgagagcagactttgtaactctcacactgaaagtgatctatccacttagacatgcaaatgtcgttttgaataagtctaacatyttgaattgtcaacggtggraagaggtttctctaaaggcaagttgtattcttcagttatcctaagcttgtaaaccatgtagaaccaagggggaaaaaaaagaacaaaattgaaagattctgctttactagcatttggtgactgaaagattccgctttactagcatttggtgactgaaagagctcattaagataacattttccactttataacccgcttcacaagcaaatattcctggcagcactgctcctctcatacttagggatactttaaagaggatggccaggacctttgcctgggccagaagagaagcaagcgca

SEQ ID NO: 88791 - DNA, 600 bp, Chicken  19866894394210_1
cccaggggaaaaagaaaaaagcttttttctgatttattatttgtcattagattcatgtattgcaatgacataattatttcttgaatctaaggctttttcttctaattatagtacacattgcaagttcataataaagctggataagaaagagaacataagcactttagaagagaaagaagaaataggcaaaattcgtaagttatgctttaaacacagtctcatcagattaactgtcatgtctttacagttgacttccaagtacctaaaaaagccctcttaattttaaataaaaataattgrtttttttgaataacataaatgcataaaaaatacagactttctgatttttggggagcatggagggggagatatgtatatgtaaaaaaaactttcatataaagttgctgactacattaataaagcatttttgattttgaaaatattatctgtaacaattcttgagaacacaaatgcatttctcaawgtttataatgtagctcagttttcttagttgcattttgatagtatggagtggctcgtgctttttttctctctgtttcaaagcatatagctttgcatttgtggtttctctataaagag

SEQ ID NO: 88792 - DNA, 579 bp, Chicken  19866894394210_2
ggcaaaattcgtaagttatgctttaaacacagtctcatcagattaactgtcatgtctttacagttgacttccaagtacctaaaaaagccctcttaattttaaataaaaataattgttttttttgaataacataaatgcataaaaaatacagactttctgatttttggggagcatggagggggagatatgtatatgtaaaaaaaactttcatataaagttgctgactacattaataaagcatttttgattttgaaaatattatctgtaacaattcttgagaacacaaatgcatttctcaawgtttataatgtagctcagttttcttagttgcattttgatagtatggagtggctcgtgctttttttctctctgtttcaaagcatatagctttgcatttgtggtttctctataaagagaagtctgaacttctgaggcattgagcaaaaaacttgaaagtaattaggcaaaatgcagtattgttaaaaaaaaaaagctgtaaaacataccttgtttgaataacctggttaatggtataagcaatttttatgcttcacggcaatctatgttaatgcttctttg

SEQ ID NO: 88793 - DNA, 600 bp, Chicken  19866894394215_1
gcttttaaggaatgtttacactgaagtgataggatgaagcttctgctcctcagcccttcacctgtgcactgagtcagtctcacattggagtaatggaagcagacgtagagcccctgcatgtgtgcaccctgcagtgataggcactgtgtccattgctcatctgagcagattcaagtgatctgctgtcacacactgtgccaggtccatgcatgatataaggaagtctacaggaggttctgctgacatgtgatgcactaacctgtgtatcctgatccatcatgcatatatccgttagctccycagcccctaccacctaatgcctgttgcccaaagccaggagacgctctgcaaaagtgtgtcaaagccataggagaaagccgatggccaaggagagaaaaggcacatctgatgtgtttgttctactattcagagacaactaggattggagaaaggtgggacaggaaagactgaggccctctaggacaagaataatcaaaagctgctcttgtagcttctagagacccaatcttggacaggatggaaaaatgctcacaaggctccatgaagcaggggatgtccagtctcctctcagcatggctt

SEQ ID NO: 88794 - DNA, 600 bp, Chicken  19866894394217_1
tcttaaaaattggttttagtcatggctgttagtacggagtagctttggggagttggtttggtttcaaaatatcctcaaaggattttcatttgaacttgagaagctttttatcttgtcaggtcttaaagttttggctgataaattttgtggcacgcaggaagaagctcacattgtaaagaaacttgaagaggagtcagttgagaaggaaatctcctgttccttttgaagatcaaatccatggagtgcagttagaccatgtctggattttctgtgctatttcttttgcttcgtagctgtttyrttgtaatagtttctgacctcctactgtggaggagtttgttgtttatggaatggaaagcagaatgacttcaaaagacaaacaaacaaaatgaaccaaccaaacaaaaacaccaaaaataaattggtaagtgtttggaagggccttgatggacaggaaggatcatcttaccgcaaaattgattcagtacagtaactctatatagacttcaagctctttcatttctacccaaggaaacgtaactttttttttccatgcaattccagattggttttggcttaaatttcatgggttcagctcaa

SEQ ID NO: 88795 - DNA, 600 bp, Chicken  19866894394217_2
cttaaaaattggttttagtcatggctgttagtacggagtagctttggggagttggtttggtttcaaaatatcctcaaaggattttcatttgaacttgagaagctttttatcttgtcaggtcttaaagttttggctgataaattttgtggcacgcaggaagaagctcacattgtaaagaaacttgaagaggagtcagttgagaaggaaatctcctgttccttttgaagatcaaatccatggagtgcagttagaccatgtctggattttctgtgctatttcttttgcttcgtagctgtttyrttgtaatagtttctgacctcctactgtggaggagtttgttgtttatggaatggaaagcagaatgacttcaaaagacaaacaaacaaaatgaaccaaccaaacaaaaacaccaaaaataaattggtaagtgtttggaagggccttgatggacaggaaggatcatcttaccgcaaaattgattcagtacagtaactctatatagacttcaagctctttcatttctacccaaggaaacgtaactttttttttccatgcaattccagattggttttggcttaaatttcatgggttcagctcaat

SEQ ID NO: 88796 - DNA, 600 bp, Chicken  19866894394222_1
ggcctgggggtactgagctgagcatgagccagcagtgggtcctgctgctaagaaggccagtggtgttcttagcttcattaggcaaagtattgccagcaggaaaagagaggtgatcctgcccctctgtccagcactggtggggctgcatgtggagaactggagccagtgctgggctcccagtatcagagatgccatggcacactgggtatataatcaatagtaaaatccctaggagagtgcacagattaatctacgtgaatcattgaggatgggcaagttctgaagactgggaaaaaagcwatcagaagactgggaacagaggagaaactgagggtgggtgggtaggcacctggaacagtgtccagttctaggcyccaagatgggacaggctgacccaaagttcctccaacctgaacctttctgtgataaagcctacatttaataaggccgctcatgtactttcatcaacaagttcagctccatacactccataaacaccaaccccatccacaacaaagttctgggagcactggagttacgtatttgcaggataatagccttgttaacaactcagtgctaatatctcagaacgtacagcat

SEQ ID NO: 88797 - DNA, 600 bp, Chicken  19866894394222_2
tcattaggcaaagtattgccagcaggaaaagagaggtgatcctgcccctctgtccagcactggtggggctgcatgtggagaactggagccagtgctgggctcccagtatcagagatgccatggcacactgggtatataatcaatagtaaaatccctaggagagtgcacagattaatctacgtgaatcattgaggatgggcaagttctgaagactgggaaaaaagcwatcagaagactgggaacagaggagaaactgagggtgggtgggtaggcacctggaacagtgtccagttctaggcyccaagatgggacaggctgacccaaagttcctccaacctgaacctttctgtgataaagcctacatttaataaggccgctcatgtactttcatcaacaagttcagctccatacactccataaacaccaaccccatccacaacaaagttctgggagcactggagttacgtatttgcaggataatagccttgttaacaactcagtgctaatatctcagaacgtacagcatttacactgcagttaaaarcaatctcccagattttgtttccagctgtgaattagttgaaatggccctaaccttct

SEQ ID NO: 88798 - DNA, 600 bp, Chicken  19866894394222_3
gaggagaaactgagggtgggtgggtaggcacctggaacagtgtccagttctaggcyccaagatgggacaggctgacccaaagttcctccaacctgaacctttctgtgataaagcctacatttaataaggccgctcatgtactttcatcaacaagttcagctccatacactccataaacaccaaccccatccacaacaaagttctgggagcactggagttacgtatttgcaggataatagccttgttaacaactcagtgctaatatctcagaacgtacagcatttacactgcagttaaaarcaatctcccagattttgtttccagctgtgaattagttgaaatggccctaaccttctgtagttacattacttgtcccttttatatacaaaatattctttcattcatgatataatttcctagattatccattattaaaattcccctctcgaaaatgaatttacatctgaattatctcattacttctgaacaagccagttattgcctctagtgaacaaaataattagacttgtgctcactgcattcgagatcttctgcagcagttccagtgtagtcacagcccctgaacacagaagtacataa

SEQ ID NO: 88799 - DNA, 600 bp, Chicken  19866894394223_1
tatttgcctgtgttaagcttcctaacaaacaacagaagtggaatgagcaccttgcagattcaagcttttctctggtaaatgcagcttaatcactgaaaggcatttagatgaacagtgttattagagaaccaaaaacacttttaaattcattcattgcactatgcaagttaaaatgatacaagacactttgaagcataaataacaacatttccacaagatgaattctctctttgagaaagcctacagactcggtttccttcagcagcccaagtcagcaactgaaaagatgcaaatgtttcrattcaaaacatttcaaattcatgccacgcgtgtcagctggggctcctcacgctagttcttgatgcaatctttcagctttttgagatcacttcataactcctagaaaagctaccagaaggaatgtctgaagtgaactgtataagacccatggtggcaaacccaactgttgctctctttgatcaccaaagaatgtgaatgtcattgatatatttctcatggatgcttcacagctgccagttaaggagcacatgaacagcctgagaaatagtttacaggagcttgaactctagagcatacact

SEQ ID NO: 88800 - DNA, 600 bp, Chicken  19866894394226_1
agaatgcacttaagtgtttcatggtgatatttacacttgccaaattacttgcgtttatgaattgtctaaattaccttctgtagaagaggatggggaccacagtccatgaataaaaatgagaaattaagatttcaaatgcctttgtcagaggtgattcagaagtgttttcacatgacaaaaatccgttgctgttcatacatcttcgtcttgaagacacacaccttggtttagcttgaaatttttatattacatcatgccagcaggcaagagaaagttattattttatgagaatgagatggwtgagctaggaatgtggcttctcttgtcatctttgggctcgacatagtatccatggtaaaatgatccttatccatccataaaatcatagaattacagagtatcccaagctgcaaagaaattaaaaggatcatcaagttcaactcctggctccacatgaggagtctatttccatattgaactgtaacttattctgcttgccagggtgagtattcctattaagttaagggctcaatgtgagtatattatagacctggattttgagttcttgagtgactcccacttttatatcaagctaaattt

SEQ ID NO: 88801 - DNA, 600 bp, Chicken  19866894394235_1
ttagagaccaagcaagaggagtgtctttgtgtccagacaagatgtaggaagtgccagttgtcccagtacgcttgtgtctcaaacatggtgcctgtcttggtcctgtgccctgtggtaatagcactcctctggagcagggaaggaccttcttctgcctaacccatgttgttccatgctttgctccgtgagctatagctgaacacaagagaagattgcctgaactcgttctggactactgcactgtggtttgtgtgtgttttctaagatgtattaccttatatataaaaaggaacttcaggytttttctttctggaatctcctctgtgaacctctcctattcagtgcccgtatctgttgattaaacagctgaatacataatttatcacacgggggaaaacacgggggaaacgcagcactgatccatgatgtacagtggtgctcaggattctgatgaaaatgttttgtttgctctgttcccagtgataagaagataatagctgaagggcctggggaaacgctacttgctgcagaggaagaagctgcccgcgtggcgctgcggaagctgtatgggtatactgagaacaggaggccgtgggatta

SEQ ID NO: 88802 - DNA, 600 bp, Chicken  19866894394235_2
gagacgtttttctgtaaatcacaggaggtggctcttaatgatgtttaatagtgtgtgtccacatctatagaaaaaagtttgctgaatgcttccttggggctggttttgagggcattgctaataagatgagcagaatttaatatgcagcgttggtctgtgagttgcatctggatccatttgtccttgatgtggtgaaaacgtagaatgtgatgtcagtggtattgacgctggtgatccgatgtaagaaggaagtaattggcacttaggagatcttcctgcttggatgcagctattttcttygctgtacatcggtttctattcttggaatactctctggaaggcagtatttttgattttaaaatctgtaaaaagggaaataagagttatgagggcttgtgctgaaagaaatgagaacgctgctggttgatgtgtttttccattatctccaggaacttcatttttctccactctttcagacgtttatctgaagcagtcccatggccggggtattggactcagtgacatctgtgtctgttttatttgcaccctctgtagctgtcttaacagctttcaattacttgagttacacttaggtacccc

SEQ ID NO: 88803 - DNA, 600 bp, Chicken  19866894394240_1
ggcctccatcacaccacgtccctgctctgccagtgccctgggaccacctcgggacaccgccagcatgcagtgctgctcagcccagcgtcagcagcattgcatcattcacctgctcctcccgaaatcaggacctggaggcacagcctccctcattggccaaactaggctgagtagggtcagtgctggtgcccaccccaatgctggtgcccaccccaatgctcaccttggtcagcacaaacagtcctcgtcactgccaggagggcagtggggagaagctggggatgggaaccacgtcaacarcacagacagaggatgctccaggaaggccgagayggcagctcccagtcaaccctgtgcacccctttcgaccaccgtgggctgacactgctccggaggcagccaggagcaatgcactgctcccctagctggcacgctgctggctgtggggtgggacacacgcgctcatccgcaccactgcagctccccaatcactgccaccatctgctaccagtggtcaaggtcccccaacggctcatgggcacgtgccaacctgctgctgtgcacccagtgccagcaccaacaccagagccagcaaacacc

SEQ ID NO: 88804 - DNA, 600 bp, Chicken  19866894394240_2
tgccctgggaccacctcgggacaccgccagcatgcagtgctgctcagcccagcgtcagcagcattgcatcattcacctgctcctcccgaaatcaggacctggaggcacagcctccctcattggccaaactaggctgagtagggtcagtgctggtgcccaccccaatgctggtgcccaccccaatgctcaccttggtcagcacaaacagtcctcgtcactgccaggagggcagtggggagaagctggggatgggaaccacgtcaacarcacagacagaggatgctccaggaaggccgagayggcagctcccagtcaaccctgtgcacccctttcgaccaccgtgggctgacactgctccggaggcagccaggagcaatgcactgctcccctagctggcacgctgctggctgtggggtgggacacacgcgctcatccgcaccactgcagctccccaatcactgccaccatctgctaccagtggtcaaggtcccccaacggctcatgggcacgtgccaacctgctgctgtgcacccagtgccagcaccaacaccagagccagcaaacaccccaacgcttcaccttctgccccatccccggttg

SEQ ID NO: 88805 - DNA, 600 bp, Chicken  19866894394256_1
agtacaagtggttttctgggctcgttttccacttgaagagagtaaagcagcaaaaaaatgagcagcagtgggctgagattgcctgccttgtgctccagtgacccgaccctgtgcctggtcctggtgctgtgcagctcactgacgttccctgagttgggagaaccaggaggagggctctgcttggtgtcactgaaggttcccggggtgtttggggtttatgggcggctttattgaacagtaccccaaaatgggagcacccgaacagctcccgagtggctgcagtgggtgaaataaccaacrtgctgagacctcaggaagtgtgactgtgtgttaatattgtcctctgcattgaagagggcaaccccaggggtttgtgctgcagctcctcaccccacagagccacgcgttcctccagagcagccccctggggagtgccctgcagccccccgtgggccaaaggtcgataggagcagctgtgggagccccaaacagataagtgtgggtggggaggggtggctcagagctgcagtgtgggctctgtttgggtcagaggtgcttccatgcttcatcctgtttctgcctgtgcgcatccaatgctgt

SEQ ID NO: 88806 - DNA, 600 bp, Chicken  19866894394261_1
ttttctgcccctctgattctattctctcacatatatcacacagtgttgatgttaggagttaagtcccaagctgatgtggaagacatgaccacaaccaaaaggtaaagctcctctgcaaaaagggacaaacaaaatccatgtgttggagaggttacaagtgtctgtattcacaaactgtttagggcaagtaggtttgcccagctctgtgtttcagctcatgctgctaacatacaaaaaccccagtgatgtggggctgtttcttgtgcagacaaacaaatgagtggatgcagcacatgcagyttagccggagtcccctactggaactgcttctgtgttgtgtggagctgttggaagttgacataaggcagaactctctgctgagaccttcagtgatttgcttaaccagaggtcattaacaagtttgtaaacatcccaggcttctgaatttgttgtttacaaatatagattaatcagcatccctctgaagaagtgttctggggccttacagctttttgttttgcatttcatggttgagaattatttttaggaatgatacaggcaaaacctgcatgtttataagcagctctaagagggtaattc

SEQ ID NO: 88807 - DNA, 459 bp, Chicken  19866894394271_1
aacgcggggaaagtaattaaccaatctaagacacagtttaataagctgtattttactgtatgcatctgctctttatcctcacaccaataacaagatatgatttttatccgaggtgtagaagacagtctggggaaggagaaaagcagtgcccaggttagccacggctgcactggtagtgtcattgcgaggccaacaggagctgcttgctcctcagcacatgtgctagcatttgggatgaaggtttgaattcttctggttctataaattgctttagcatcaagcttcatttgaaaaaaaaaraaaccaaaaaacgaaagaacaataacaacaaacaaatgggtaaaactggacaaaatgagataaaataaatgggctgtgcagatgtcctaagaagaactccaacataggaactacctccttcaaggaaaacgcatttcctttaatacactggatgtgcag

SEQ ID NO: 88808 - DNA, 599 bp, Chicken  19866894394278_1
  misc_feature (1)..(72): n is any nucleotide
nnnnnnnnnnnnnnnnnnnnnnnnnnnnnnnnnnnnnnnnnnnnnnnnnnnnnnnnnnnnnnnnnnnnnnnncatattattgtctaatttatttataatcaccaaagtcaccaaatctcttaacttatcctttttctattctacctcttttgccataggctggaaatatgtcagattgagaggaattgcattagtctgtgctgaatcttgtatttcatatttatgcaaataaatcattcccaagccagtttatcagctaatgataaattcagactctcagtcattctaccagcaataacrcttgtcaaagttaaagtaaattctttgtgctgcaatgaaacaaaatgactggaagggctgataaatgctggtaagcccgggacatratgcacagacctgggatgtcagcaattccttagmtgccaccaccttgtccaaactcagactgggactagcacagaacaaggtttatttgcttagcagctgtctgcaactggctgcttttctacatctcatctctcacctccagtggatctcagctaatgctccccayactgttttgaagscaaaagtgaatcaaaactaattaagctacaakt

SEQ ID NO: 88809 - DNA, 600 bp, Chicken  19866894394278_2
atttatttataatcaccaaagtcaccaaatctcttaacttatcctttttctattctacctcttttgccataggctggaaatatgtcagattgagaggaattgcattagtctgtgctgaatcttgtatttcatatttatgcaaataaatcattcccaagccagtttatcagctaatgataaattcagactctcagtcattctaccagcaataacrcttgtcaaagttaaagtaaattctttgtgctgcaatgaaacaaaatgactggaagggctgataaatgctggtaagcccgggacatratgcacagacctgggatgtcagcaattccttagmtgccaccaccttgtccaaactcagactgggactagcacagaacaaggtttatttgcttagcagctgtctgcaactggctgcttttctacatctcatctctcacctccagtggatctcagctaatgctccccayactgttttgaagscaaaagtgaatcaaaactaattaagctacaaktatgttgtctaacgtacaaacacttctgggctttgtgttacctttgtgttcagagagatgtccaacgcaggtattttctaatctgtgt

SEQ ID NO: 88810 - DNA, 600 bp, Chicken  19866894394278_3
taacttatcctttttctattctacctcttttgccataggctggaaatatgtcagattgagaggaattgcattagtctgtgctgaatcttgtatttcatatttatgcaaataaatcattcccaagccagtttatcagctaatgataaattcagactctcagtcattctaccagcaataacrcttgtcaaagttaaagtaaattctttgtgctgcaatgaaacaaaatgactggaagggctgataaatgctggtaagcccgggacatratgcacagacctgggatgtcagcaattccttagmtgccaccaccttgtccaaactcagactgggactagcacagaacaaggtttatttgcttagcagctgtctgcaactggctgcttttctacatctcatctctcacctccagtggatctcagctaatgctccccayactgttttgaagscaaaagtgaatcaaaactaattaagctacaaktatgttgtctaacgtacaaacacttctgggctttgtgttacctttgtgttcagagagatgtccaacgcaggtattttctaatctgtgtttactccacagcttagtttgatcatttctaggaa

SEQ ID NO: 88811 - DNA, 545 bp, Chicken  19866894394278_4
cagctaatgataaattcagactctcagtcattctaccagcaataacrcttgtcaaagttaaagtaaattctttgtgctgcaatgaaacaaaatgactggaagggctgataaatgctggtaagcccgggacatratgcacagacctgggatgtcagcaattccttagmtgccaccaccttgtccaaactcagactgggactagcacagaacaaggtttatttgcttagcagctgtctgcaactggctgcttttctacatctcatctctcacctccagtggatctcagctaatgctccccayactgttttgaagscaaaagtgaatcaaaactaattaagctacaaktatgttgtctaacgtacaaacacttctgggctttgtgttacctttgtgttcagagagatgtccaacgcaggtattttctaatctgtgtttactccacagcttagtttgatcatttctaggaacatctgttaagcttgcaagtacaagagttaactaatgaaaatggctgcttgatctgactcttgtctaaaatggactgg

SEQ ID NO: 88812 - DNA, 532 bp, Chicken  19866894394278_5
attcagactctcagtcattctaccagcaataacrcttgtcaaagttaaagtaaattctttgtgctgcaatgaaacaaaatgactggaagggctgataaatgctggtaagcccgggacatratgcacagacctgggatgtcagcaattccttagmtgccaccaccttgtccaaactcagactgggactagcacagaacaaggtttatttgcttagcagctgtctgcaactggctgcttttctacatctcatctctcacctccagtggatctcagctaatgctccccayactgttttgaagscaaaagtgaatcaaaactaattaagctacaaktatgttgtctaacgtacaaacacttctgggctttgtgttacctttgtgttcagagagatgtccaacgcaggtattttctaatctgtgtttactccacagcttagtttgatcatttctaggaacatctgttaagcttgcaagtacaagagttaactaatgaaaatggctgcttgatctgactcttgtctaaaatggactgg

SEQ ID NO: 88813 - DNA, 500 bp, Chicken  19866894394278_6
crcttgtcaaagttaaagtaaattctttgtgctgcaatgaaacaaaatgactggaagggctgataaatgctggtaagcccgggacatratgcacagacctgggatgtcagcaattccttagmtgccaccaccttgtccaaactcagactgggactagcacagaacaaggtttatttgcttagcagctgtctgcaactggctgcttttctacatctcatctctcacctccagtggatctcagctaatgctccccayactgttttgaagscaaaagtgaatcaaaactaattaagctacaaktatgttgtctaacgtacaaacacttctgggctttgtgttacctttgtgttcagagagatgtccaacgcaggtattttctaatctgtgtttactccacagcttagtttgatcatttctaggaacatctgttaagcttgcaagtacaagagttaactaatgaaaatggctgcttgatctgactcttgtctaaaatggactgg

SEQ ID NO: 88814 - DNA, 600 bp, Chicken  19866894394280_1
cccttcgtgtcggaagattagaaaaaaaagaaaagaaaagaaaataaataaaaaagaaaaaaagaaaaaaaaagaaaaagaaaaactctggggaaaaaaaaaagagaaaaaaaaaagggaaaaacacgcagaaaccacaaaatctacgaaacgatccttatgctgcaaaatgtccccgctaaagaatgtccctataagtgcgtgtgtcgtgtctgtaggttcctgtgaaagcagctttctgtctgcgttctgtttccgtatgaaacccaagatgatctatcgtgttgtgctcgggtctcygtttcatgataaagctgtgggtaggttgcatgattcattcttccactgatttcagcacttattctcccgtttcagtgcaggcggttcagcactaaaagctaatggttatcacttttttccccctctttgtcgcaaagcaaaaccaaatcccttccagatctaccgtggattttttgctctgctgtcggtccccgtgccgggctctgcgtttatgggcagggagaaggggagcacatcgttaggagagtttgtgctcagggggtgcagcagagagcacagagccaacgcttacagacagac

SEQ ID NO: 88815 - DNA, 600 bp, Chicken  19866894394289_1
ccggtgaacttagcatattcagtctgatccaggagatgcgcacacaaaggccttccatagtgcagaccaaggtatgcccaggaaattctgactactagaacactctcagaactgaaacctcagtacgtccccaggagggctcacagcaaggaagcacagaatgactgtggggctgggaactgggtgtgcagttgttctgcaaggtcccttttctgagcagaagaatgattttgcagaaatgaacttctggccatttctctgtagacagctgggatagtttagtgcttgcagagccatttytttgaacacttacgctgcgaaacaagtgaccatccaggaaataaagtggaaactcttctcaactgaggccaattgaagaggaagctcagtgcagaacagcgctgtatgcgcagctgacaaaaaaaaaaaacaaatgctttggtctcagccctgtggaaactgcagcttctacttcttctgagaacttgtcctgccaccagaccacagagtggcagcttctcacaggggctgatgtttgatttgggtgatagctgaccacaggggactcgtactgcaggtgctggctgtcacatctctttt

SEQ ID NO: 88816 - DNA, 600 bp, Chicken  19866894394294_1
ttggcccatcgatccagtctatccaggtccctctgtagagcccttctaccctctggcagatcaatactccctcccagcttggtccctggtcacatccctcgccaacttctgttccatgtgtgccttggggctttcctgatctcatttctgaatgtcttgatggcatccctatattattcctcagcctcacatccccacttttgctgcctgtacatgcccctttttccctcagtttaaccagcagatccttgctcatccatgccagtttcctgcctcttctgcttgttttcctatactggkggacagagagctcagaaaggtgtccttgaagagctgccagctctgctccgttgtccataaggacagtttcccagggaatcccatccagtaatttcttaaacagccagaattttgctctcctgaagttcaggttcctgacttcactttttgctaggcccgtattccttgagatcgcaaactcaaccaggtcatgattgctgcttccaatcttaacctctttaatgatctcctttatgttggtcagcagcaggtccattaatgtttcatagctggttgatttatctactacctggaccagga

SEQ ID NO: 88817 - DNA, 599 bp, Chicken  19866894394302_1
  misc_feature (1)..(29): n is any nucleotide
nnnnnnnnnnnnnnnnnnnnnnnnnnnnnaacagggctttaattagtacccatctgcttcctgttttatactacagagctaactttcacctgcttcagcaaaacaccccttcccccaaatgcaagtcacacacacacacacaccaagttagcaaacaccattacacttaagcaatgaacatcaggaagtctcattccaagtatgtgggctatttatttgcttttttagagaatgaagctttgacactgttgtgcaatttcacagcgtacaccttcaaaccacacacatggttgcatgaakgcaatggcacccagggatcccaaatggggatgggctccgtatcactcagagcctgcccagagaactcccaagtcaggtctgggtttttcttaacgtccgtcacacacatgaaaggatttatgaataaacaatggcgaggctgatagttaagaatggattcaaactcaccccattgtttgaagggaagaaataacacacggagagaaaaaaaaagtattacttagggaggaaatagcttcacctttgaatttcctgacatttttcctcccacgcttttccccttcacacatcatttattt

SEQ ID NO: 88818 - DNA, 600 bp, Chicken  19866894394302_2
gggctatttatttgcttttttagagaatgaagctttgacactgttgtgcaatttcacagcgtacaccttcaaaccacacacatggttgcatgaakgcaatggcacccagggatcccaaatggggatgggctccgtatcactcagagcctgcccagagaactcccaagtcaggtctgggtttttcttaacgtccgtcacacacatgaaaggatttatgaataaacaatggcgaggctgatagttaagaatggattcaaactcaccccattgtttgaagggaagaaataacacacggagagkaaaaaaaagtattacttagggaggaaatagcttcacctttgaatttcctgacatttttcctcccacgcttttccccttcacacatcatttatttatttattttccacacaggagacaagtgaaagttaaggacagcagcacagctacgtgctgtcagccctgcctacctctccggcacggactcactcaagcttgaaagtttgccaggcacgtggtatctccagagagcaaaacaacagcaagcaaagcaccggcagaaagaattgcctggtgatggccaaacaagaagcactgcttgca

SEQ ID NO: 88819 - DNA, 600 bp, Chicken  19866894394307_1
ctctcatctcactgcctcagatttaggatcagtgtttgctgtcctggatttttgtagagcttgtagaaactgactgagacagtgggcaataatccagttgctagagtccggatatctgatgtgcaagcagtttaagttcaagtcttagatacatttttctctgatgttctatatggtttactgaaattgatattaaaaagtaatagtgtgggttagaaagaattccttttaagtcttttattatgtaaggactttattgcttcctgagcaaatgaaatttgtggttatgagaattaagtrtgatttggtaggatattgattctcttgcagttctggtgaagcaaagagaggtcagtgaaaggagtaaagaagaaatattttcagtctctttttctggatgttgttgctggctctagaatgcatcttctagatgtgtattggatcaggattttaggttgtacactcttaagatcatggagagttctaaaattatgccataagcgatttatatcctgcttcacataaattctggctacagctaccagaacagcattgtaatcataactgcatcaaagtttattacaaagcctctcattctgt

SEQ ID NO: 88820 - DNA, 600 bp, Chicken  19866894394307_2
gtagaattggctggttcaaagatgcagaacttcttgaggctgtgacttcgtccatatacgtgctcagggaagaagaaactcagattaatactccttttatacctggaacttctaatgtctcactggacaactgatggatacagaccatgcatcctgtctttccaaagttcatgctgcatgaagtcacaatctacacattatcacaatcaatattgtatttatttaccaaataaaatatttattgttttacttgccattattttcagaatctctggacacaattattgcattatgtatacytaaggatatgttagtttgtgccaagatgaagatggtaccacacagatcttaattgttaagtaaaatctaactacatataaagaacaactkagacattagatgtattatgttatgctaaatcaaatgatgttactttttactacttccctctggaaaagagacacgtttttgagatgaaatccagcaattcaaatgaattttttatataacttgcatgcgtacagaattcattttcttcatcatctaatggattgtcttatgtaaatgtggcagtcttgagaaaccgagctttcagatgca

SEQ ID NO: 88821 - DNA, 581 bp, Chicken  19866894394307_3
ctccttttatacctggaacttctaatgtctcactggacaactgatggatacagaccatgcatcctgtctttccaaagttcatgctgcatgaagtcacaatctacacattatcacaatcaatattgtatttatttaccaaataaaatatttattgttttacttgccattattttcagaatctctggacacaattattgcattatgtatacytaaggatatgttagtttgtgccaagatgaagatggtaccacacagatcttaattgttaagtaaaatctaactacatataaagaacaactkagacattagatgtattatgttatgctaaatcaaatgatgttactttttactacttccctctggaaaagagacacgtttttgagatgaaatccagcaattcaaatgaattttttatataacttgcatgcgtacagaattcattttcttcatcatctaatggattgtcttatgtaaatgtggcagtcttgagaaaccgagctttcagatgcagtgggaaacaactgcctgcatttgtttgggatcatcagtttatcaagactttcagcttagaaacatagaat

SEQ ID NO: 88822 - DNA, 599 bp, Chicken  19866894394308_1
  misc_feature (1)..(116): n is any nucleotide
nnnnnnnnnnnnnnnnnnnnnnnnnnnnnnnnnnnnnnnnnnnnnnnnnnnnnnnnnnnnnnnnnnnnnnnnnnnnnnnnnnnnnnnnnnnnnnnnnnnnnnnnnnnnnnnnnnnntaaagaatgccatttatataccttagcactgaatccctgggcctgatttttcacactaagacaactcttacagtcactggctgcatgacccagtgttgtgcagtggcctggttttgcatggctcagagttgctgcttcaagctggggaaggcaaaggcactccttgctgtgcttgggcaccgarctgcagcatygtcagtatatattattctgttgaaacaaacagaaaagcttgaacatagtttattttctgtgctatcccagaataggaaaaaagaaagttttttaaacatcttcacttttctaaattaaatataatggaaaacttgattgccctcttgtttcaaggacaacattgcttaggaaaaaaataaaacatgcaagatttttacctcaacctggtaaatgaacttcacttagttgcaaactatgcagcttttgaacaactcacatcctattttgtgtccagataacttcattttg

SEQ ID NO: 88823 - DNA, 599 bp, Chicken  19866894394308_2
  misc_feature (1)..(106): n is any nucleotide
nnnnnnnnnnnnnnnnnnnnnnnnnnnnnnnnnnnnnnnnnnnnnnnnnnnnnnnnnnnnnnnnnnnnnnnnnnnnnnnnnnnnnnnnnnnnnnnnnnnnnnnnnntaaagaatgccatttatataccttagcactgaatccctgggcctgatttttcacactaagacaactcttacagtcactggctgcatgacccagtgttgtgcagtggcctggttttgcatggctcagagttgctgcttcaagctggggaaggcaaaggcactccttgctgtgcttgggcaccgarctgcagcatygtcagtatatattattctgttgaaacaaacagaaaagcttgaacatagtttattttctgtgctatcccagaataggaaaaaagaaagttttttaaacatcttcacttttctaaattaaatataatggaaaacttgattgccctcttgtttcaaggacaacattgcttaggaaaaaaataaaacatgcaagatttttacctcaacctggtaaatgaacttcacttagttgcaaactatgcagcttttgaacaactcacatcctattttgtgtccagataacttcattttgaaggttccaa

SEQ ID NO: 88824 - DNA, 444 bp, Chicken  19866894394309_1
taaagtcatcctgcttaatgccaaccagaaatttttgtttgccaattgaaggaggtggagagggaaatgaggaatcaagtatgagaaaataaatgttatatggtgaatgaatcatataggagctgatattttgaagtataggctgggaaagggtgtatgaggaggaggaaaagaaagttctgctcttggagcaattgctgtcaacacaaagagagcgggtttgctagaaagatctgcaaaagagtaaagatggttgagaaggacaagcaaatgtaggaagcaggttgcaagagaagtgayggtgtaagtaggaggaggagcaaaggtgaaaagagtgggtagagcattgggatgaggcaggatgggaagaatagtcatacaggcacagggcagatctcagaatcgaggaaggggaatatccacctctctcccaacaaaaaagtt

SEQ ID NO: 88825 - DNA, 600 bp, Chicken  19866894394312_1
ttgtgcagagtctttccatacaagatacacaagatactaccctagcacgaagtgtcctgcagtctcactcatgtttcaccttcatactccagcataccaggtggtttacttgactgatggaagcaacttttgtggaaataagaagctgggtgaaagagatacgattccatgactgaagaagagactttaatatgaaatgatgctttgttgtgcaccagaaaatcaacatgaaagggagaattatgaaacctggcagtttgcagccaacccaatgcacaaagaaaaccacatatagttcartcctggtccacctgcttctgttttctccgtgtggcattgtacaactgctatatacagaagcaaatcttggcagtatttgtgaagtgtcctagaagaatcatacgattctgcttgatggtttctcctgacagagtagaaccagaaatcatttgcccttttctaaacaggaaaggtcaaaagtgaatgacattatagtgctctcatgatttcgtgtccaggtctgtattgccctgaggaattattatagataacatttatgagcgtgtatctgtatctatgtgcatgtgtggataatgcatg

SEQ ID NO: 88826 - DNA, 600 bp, Chicken  19866894394313_1
cattttattttatttttttaagggaaagttgcataattcttagcaaactaatgaattttgcctcttgagacacacagtggaaagttaacttttttcccttaataggagagtgcagagaagtaaagtatatgtgtgtctctctctcttcctctatacactcagagtttctttacttgcagaaacacaaagtctacccctaaggatttcagtgtcacataagtgttatacatatactttgactgtcagtgctttcagcaggcaaaagtgacatattaaaaaacagttctattcataaatatrtgtttgttatgaaaactaaacattttattatgttattcaattatatattcaaacaaattattgaaatatatgacagtatatgacatctttttgttaccttacaggcatcctttccaccttcatcatagccagcacagatctctttgtcatctattctgcgcttccggtatcttgcctggcattcctcttttgacattaggggaacagtaactttctgaagaatatcttctacacgacctatgtaataggtgttacgatcaaacagatgttcagctctagcaaaataaaagttaaaagtat

SEQ ID NO: 88827 - DNA, 600 bp, Chicken  19866894394313_2
atgtttcaaaactccccagagatttgctatgaagctgtgtatatgtattgttttcaggggcattgagtcttggagcctgtattcccatgaagagcattgctttgcattcttgataattatttcttagtaatgtgttttcagtttccagatgtgtgttgcccaacaacctagttgtctacaggatggtgaaaatttcatgtaaagtaaataaaagtatttgagaacagccttttctgacaaattaacagaagctattagaattcatttaaatttcacattaaaatctaattctgaaatggrgaggtgtgcagaggagggaactctgtttaaacacttttatctgtatatatattgtaataaagtttaattattaacagctacttggccaacctccgggtaagattagagaagttcaaatcacacaattaaaacacaagggtcatcgatatttttcataaacaacctttagaatcataaaagtagtatacattgatctctgatttctgaagtcatatgaataaaatcacatatttaaaaaaccatgagttatgtgcagactgtaattcaagaacccactgtacagcaattactctgttatct

SEQ ID NO: 88828 - DNA, 599 bp, Chicken  19866894394314_1
  misc_feature (1)..(121): n is any nucleotide
nnnnnnnnnnnnnnnnnnnnnnnnnnnnnnnnnnnnnnnnnnnnnnnnnnnnnnnnnnnnnnnnnnnnnnnnnnnnnnnnnnnnnnnnnnnnnnnnnnnnnnnnnnnnnnnnnnnnnnnnntcgcaggtctgtgctccatggtttgggagggtgtgtgacccacggctgccccacggggacaaagtggaaaccacacagtgaggagaggaggcagggaagtgatgctctgcatccttagctggtagggatgcccaaggatgcaggcagggaaggggctgtgtggggactcccctatcagygytgctgccttcaagagtttttaggctctccgtgcrctcgccttgattgcacaagggataaggagctgtctgcakcatggccagaggctcctttgctgagttacagcagccccaaggccccaggggtggtagttggagcctggagtgcacagaaatagggaaggagtgctggaaagacgcggagccaaggaagagaaagccgtgccgtggccacccagagatagtaaaaaggagatgctgataatgttgctatgccttaggtttgtggtccagctgctggggctggtgggactgtgagc

SEQ ID NO: 88829 - DNA, 599 bp, Chicken  19866894394314_2
  misc_feature (1)..(119): n is any nucleotide
nnnnnnnnnnnnnnnnnnnnnnnnnnnnnnnnnnnnnnnnnnnnnnnnnnnnnnnnnnnnnnnnnnnnnnnnnnnnnnnnnnnnnnnnnnnnnnnnnnnnnnnnnnnnnnnnnnnnnnntcgcaggtctgtgctccatggtttgggagggtgtgtgacccacggctgccccacggggacaaagtggaaaccacacagtgaggagaggaggcagggaagtgatgctctgcatccttagctggtagggatgcccaaggatgcaggcagggaaggggctgtgtggggactcccctatcagygytgctgccttcaagagtttttaggctctccgtgcrctcgccttgattgcacaagggataaggagctgtctgcakcatggccagaggctcctttgctgagttacagcagccccaaggccccaggggtggtagttggagcctggagtgcacagaaatagggaaggagtgctggaaagacgcggagccaaggaagagaaagccgtgccgtggccacccagagatagtaaaaaggagatgctgataatgttgctatgccttaggtttgtggtccagctgctggggctggtgggactgtgagcac

SEQ ID NO: 88830 - DNA, 599 bp, Chicken  19866894394314_3
  misc_feature (1)..(85): n is any nucleotide
nnnnnnnnnnnnnnnnnnnnnnnnnnnnnnnnnnnnnnnnnnnnnnnnnnnnnnnnnnnnnnnnnnnnnnnnnnnnnnnnnnnnntcgcaggtctgtgctccatggtttgggagggtgtgtgacccacggctgccccacggggacaaagtggaaaccacacagtgaggagaggaggcagggaagtgatgctctgcatccttagctggtagggatgcccaaggatgcaggcagggaaggggctgtgtggggactcccctatcagygytgctgccttcaagagtttttaggctctccgtgcrctcgccttgattgcacaagggataaggagctgtctgcakcatggccagaggctcctttgctgagttacagcagccccaaggccccaggggtggtagttggagcctggagtgcacagaaatagggaaggagtgctggaaagacgcggagccaaggaagagaaagccgtgccgtggccacccagagatagtaaaaaggagatgctgataatgttgctatgccttaggtttgtggtccagctgctggggctggtgggactgtgagcaccccagcctggctcatagaagtggctctgtggctc

SEQ ID NO: 88831 - DNA, 599 bp, Chicken  19866894394314_4
  misc_feature (1)..(46): n is any nucleotide
nnnnnnnnnnnnnnnnnnnnnnnnnnnnnnnnnnnnnnnnnnnnnntcgcaggtctgtgctccatggtttgggagggtgtgtgacccacggctgccccacggggacaaagtggaaaccacacagtgaggagaggaggcagggaagtgatgctctgcatccttagctggtagggatgcccaaggatgcaggcagggaaggggctgtgtggggactcccctatcagygytgctgccttcaagagtttttaggctctccgtgcrctcgccttgattgcacaagggataaggagctgtctgcakcatggccagaggctcctttgctgagttacagcagccccaaggccccaggggtggtagttggagcctggagtgcacagaaatagggaaggagtgctggaaagacgcggagccaaggaagagaaagccgtgccgtggccacccagagatagtaaaaaggagatgctgataatgttgctatgccttaggtttgtggtccagctgctggggctggtgggactgtgagcaccccagcctggctcatagaagtggctctgtggctcggggattgcccagagccttcctgcagaaagaggaaggac

SEQ ID NO: 88832 - DNA, 599 bp, Chicken  19866894394317_1
  misc_feature (1)..(101): n is any nucleotide
nnnnnnnnnnnnnnnnnnnnnnnnnnnnnnnnnnnnnnnnnnnnnnnnnnnnnnnnnnnnnnnnnnnnnnnnnnnnnnnnnnnnnnnnnnnnnnnnnnnnncctaagccttccctagtgcaacttgaggtcattacctctcctcctatcactgttacatgggagaagaggccaaccaccacctcaacacaatcttctttcaggcagttatagagagatataaggtctcccctgagcttcctcttctccaaactgagcaattccagttccctcagcctgctatggtgcacacccatgaggwgaagcttgggcttctgcttgaggagtgyttggcagaactgggacagytgtgggaagcagttacctccctcgtgttgtgatagctctcagtgctgccctgtgttaaatgacatcagagagctgagctggatggaaaatatttatatttttttattcagctgcgtgagtttttagccagatgatagttctccaggccagctcacggtgcagattcaggttggcttgtgatgacatggcatgactagagaacaaaarcagactgaaggcacagggcagactcttttcaaatgaaaatgctta

SEQ ID NO: 88833 - DNA, 599 bp, Chicken  19866894394317_2
  misc_feature (1)..(73): n is any nucleotide
nnnnnnnnnnnnnnnnnnnnnnnnnnnnnnnnnnnnnnnnnnnnnnnnnnnnnnnnnnnnnnnnnnnnnnnnncctaagccttccctagtgcaacttgaggtcattacctctcctcctatcactgttacatgggagaagaggccaaccaccacctcaacacaatcttctttcaggcagttatagagagatataaggtctcccctgagcttcctcttctccaaactgagcaattccagttccctcagcctgctatggtgcacacccatgaggwgaagcttgggcttctgcttgaggagtgyttggcagaactgggacagytgtgggaagcagttacctccctcgtgttgtgatagctctcagtgctgccctgtgttaaatgacatcagagagctgagctggatggaaaatatttatatttttttattcagctgcgtgagtttttagccagatgatagttctccaggccagctcacggtgcagattcaggttggcttgtgatgacatggcatgactagagaacaaaarcagactgaaggcacagggcagactcttttcaaatgaaaatgcttaaattactgcagcctgaatgtactccaaa

SEQ ID NO: 88834 - DNA, 599 bp, Chicken  19866894394317_3
  misc_feature (1)..(54): n is any nucleotide
nnnnnnnnnnnnnnnnnnnnnnnnnnnnnnnnnnnnnnnnnnnnnnnnnnnnnncctaagccttccctagtgcaacttgaggtcattacctctcctcctatcactgttacatgggagaagaggccaaccaccacctcaacacaatcttctttcaggcagttatagagagatataaggtctcccctgagcttcctcttctccaaactgagcaattccagttccctcagcctgctatggtgcacacccatgaggwgaagcttgggcttctgcttgaggagtgyttggcagaactgggacagytgtgggaagcagttacctccctcgtgttgtgatagctctcagtgctgccctgtgttaaatgacatcagagagctgagctggatggaaaatatttatatttttttattcagctgcgtgagtttttagccagatgatagttctccaggccagctcacggtgcagattcaggttggcttgtgatgacatggcatgactagagaacaaaarcagactgaaggcacagggcagactcttttcaaatgaaaatgcttaaattactgcagcctgaatgtactccaaagctcctccttctgaacagt

SEQ ID NO: 88835 - DNA, 600 bp, Chicken  19866894394317_4
agcaattccagttccctcagcctgctatggtgcacacccatgaggwgaagcttgggcttctgcttgaggagtgyttggcagaactgggacagytgtgggaagcagttacctccctcgtgttgtgatagctctcagtgctgccctgtgttaaatgacatcagagagctgagctggatggaaaatatttatatttttttattcagctgcgtgagtttttagccagatgatagttctccaggccagctcacggtgcagattcaggttggcttgtgatgacatggcatgactagagaacaaaarcagactgaaggcacagggcagactcttttcaaatgaaaatgcttaaattactgcagcctgaatgtactccaaagctcctccttctgaacagttaacaaagggtgtgttaggcaatgtccacagagattgtgaggctttatgctgaggcaggtctgctcttcttccaaacatctgtccttgcatgccagcttccccctccccaccaaacgtgcaggacaagcagatgtgataaggaagacaagtaggagaatagttactgaagatctgggtgaaacccactcctgtaccttcctgctgtca

SEQ ID NO: 88836 - DNA, 600 bp, Chicken  19866894394317_5
cagttaacaaagggtgtgttaggcaatgtccacagagattgtgaggctttatgctgaggcaggtctgctcttcttccaaacatctgtccttgcatgccagcttccccctccccaccaaacgtgcaggacaagcagatgtgataaggaagacaagtaggagaatagttactgaagatctgggtgaaacccactcctgtaccttcctgctgtcaaaacatgcctgtgagtggtggcgatcaaggcctggcccatgcagagaagctcagctttgcaatggatccactgcatctgagcaggatrcagaggatcagacgtgaaatgaatgtacasacagagaagtcgatttacaatttagttttgttttttttttcttaatgatgaaaaaaaaccaagcactgagttgttgaggactgatggcacttggctgaatgacagccaggcaggctgaatggggcagatgtctrtaaacatcatctgaaggatgcaacgtgctcaactctgcgtgctgtcctaagcacactggaagaaaactgagaaatcttagtaaattctgtgagaaatgacatcgctctcctctgtgtctgagaagcctacttcatc

SEQ ID NO: 88837 - DNA, 600 bp, Chicken  19866894394317_6
cacagagattgtgaggctttatgctgaggcaggtctgctcttcttccaaacatctgtccttgcatgccagcttccccctccccaccaaacgtgcaggacaagcagatgtgataaggaagacaagtaggagaatagttactgaagatctgggtgaaacccactcctgtaccttcctgctgtcaaaacatgcctgtgagtggtggcgatcaaggcctggcccatgcagagaagctcagctttgcaatggatccactgcatctgagcaggatrcagaggatcagacgtgaaatgaatgtacasacagagaagtcgatttacaatttagttttgttttttttttcttaatgatgaaaaaaaaccaagcactgagttgttgaggactgatggcacttggctgaatgacagccaggcaggctgaatggggcagatgtctrtaaacatcatctgaaggatgcaacgtgctcaactctgcgtgctgtcctaagcacactggaagaaaactgagaaatcttagtaaattctgtgagaaatgacatcgctctcctctgtgtctgagaagcctacttcatcccaaatagcatgttttacaggaatttcttc

SEQ ID NO: 88838 - DNA, 600 bp, Chicken  19866894394317_7
gttactgaagatctgggtgaaacccactcctgtaccttcctgctgtcaaaacatgcctgtgagtggtggcgatcaaggcctggcccatgcagagaagctcagctttgcaatggatccactgcatctgagcaggatrcagaggatcagacgtgaaatgaatgtacasacagagaagtcgatttacaatttagttttgttttttttttcttaatgatgaaaaaaaaccaagcactgagttgttgaggactgatggcacttggctgaatgacagccaggcaggctgaatggggcagatgtctrtaaacatcatctgaaggatgcaacgtgctcaactctgcgtgctgtcctaagcacactggaagaaaactgagaaatcttagtaaattctgtgagaaatgacatcgctctcctctgtgtctgagaagcctacttcatcccaaatagcatgttttacaggaatttcttcaagctctaagctgaaggacatttttcagcaagccacttcctttgtgcatttcccagcacgcagctgacatgaacagacacagcacgtcacagcctggaacaatttccatccttggtgtaggtcagagactatgc

SEQ ID NO: 88839 - DNA, 383 bp, Chicken  19866894394317_8
tcaactctgcgtgctgtcctaagcacactggaagaaaactgagaaatcttagtaaattctgtgagaaatgacatcgctctcctctgtgtctgagaagcctacttcatcccaaatagcatgttttacaggaatttcttcaagctctaagctgaaggacatttttcagcaagccacttcctttgtgcatttcccagcacgcagctgacatgaacagacacagcacgtcacagcctggaacaatttccatccttggtgtaggtcagagactatgccatatctacagagcaatctggcacattytgagtttaaccagtaaatcagatcagcttcttaaaatgcttttgttttctgcagtccaagaaatgctgtgtacttcagctgaa

SEQ ID NO: 88840 - DNA, 600 bp, Chicken  19866894394318_1
aattgtaatagaaaaagaatgctacaagcataatgggagaaaacagctgtaagcatctgatgtctaaagccatgactcacccttgcttccattttcttttccattttccttcatttcagattgaaattccctaaggtaatgactggagttacgataagtcctggacacttttcattttacagaaatggagcaaactgccttctcacagaaaattagtttattgggtaaaaaaatatcactgaactgggaaataatatggggagcagaaaaagttacaaaatgaagagaatagacatatgkgagggaaaaaaaatgaaagggaaaagaaaattaatgtagaatgaatgagagaataatgaggaaaatttcaagtaataatattttctggagagctacatatgttcaaggagaaagtaagtttatatcctacaaattgaactaaatacagctattttgttatgggcatgtggtttgccacaatgggaatcataaaaggatcatgtctattacagttttttaagtgtcatgtaatcaagatgatggggaagtagcagagacaggttcctgggcaggcggaatgaaacataaagcagcatggtg

SEQ ID NO: 88841 - DNA, 600 bp, Chicken  19866894394320_1
ttaccaaataaatctataatccataaatgaacttaatgcttatttgtaacacataatggaaggtaaaatgaggcaagtaaggaaaacacaagtacaaagaaagttaaccaagctagattttaaagacatacatataactctaaagaggaagataaggatagaaatcaataccaaaacaaatttgctcttcactcgacataattttagttttgtaagacttttggaatatatattattgttatttataaatagctgaaaaacacctattccatgatttggaatagcaattgattggcatartttgagtatagtgtaattactgtatccatgggctgattttgaaggtactgaaagaacaccgatctcgtgcatgggatgcataaatcttgtaagtagtcaccttaatgccaaattatacttagagatctgtttctacggcttgcgtgcttgtattaagatgtatatatttcacgttgtgactgtatttcatggyaaaactgttctgcgtaacaaataaatagattgcaggtcagagaattcttctggtttttgtttgtttaaggcaaggcttaaactcctcgtggctatgattttaaatgt

SEQ ID NO: 88842 - DNA, 600 bp, Chicken  19866894394320_2
cgacataattttagttttgtaagacttttggaatatatattattgttatttataaatagctgaaaaacacctattccatgatttggaatagcaattgattggcatartttgagtatagtgtaattactgtatccatgggctgattttgaaggtactgaaagaacaccgatctcgtgcatgggatgcataaatcttgtaagtagtcaccttaatgccaaattatacttagagatctgtttctacggcttgcgtgcttgtattaagatgtatatatttcacgttgtgactgtatttcatggyaaaactgttctgcgtaacaaataaatagattgcaggtcagagaattcttctggtttttgtttgtttaaggcaaggcttaaactcctcgtggctatgattttaaatgttttgaaaggtcaggcctggtttcctgcttgtttttctgcttggtagtaagttaatatgagaatggagtgaaatagattatatctttcaaaagtcagttttcagcagacctatggctttttttttttcctgataacacaatatatcatagataaactatctaaagtatatctggataaactatctgggttacca

SEQ ID NO: 88843 - DNA, 600 bp, Chicken  19866894394332_1
tacaagaggatgcttccgctcacataggagcagtagattaaaaaaaaaaatgcacacgttctggaacgccagaattggtcatcgtacagtggatgatatttaactcatcattcaacctcaaggagggaaggtttagattggatgtcaggggaagttcttcacagggagagtggagaggtgctggaacaggctgtccagagaggctgtgaatgctccatccgtggtggtgctcaagaccaggttggatggggccctgggcagccttgtctagtattagatacggaggttggtggccctgcycrtggaagggggttggaacttgatggtccttgagtcctttctaacccaagccattctgtgactgatcaaccgtatgctgggttaagctgaattaaaaacacattcgaacatttcacatacctctacattacaggtatttgtacaactcctttcctctcaggatcaaaagactgacaacaaatgcacacttaatggcactcaaggacagcagtgtcttcattcctgatcatgctactgagaaaataaaatggtcagcagttcaactgcaaatgttgatttgatgaacatcactggatgttt

SEQ ID NO: 88844 - DNA, 600 bp, Chicken  19866894394332_2
caagaggatgcttccgctcacataggagcagtagattaaaaaaaaaaatgcacacgttctggaacgccagaattggtcatcgtacagtggatgatatttaactcatcattcaacctcaaggagggaaggtttagattggatgtcaggggaagttcttcacagggagagtggagaggtgctggaacaggctgtccagagaggctgtgaatgctccatccgtggtggtgctcaagaccaggttggatggggccctgggcagccttgtctagtattagatacggaggttggtggccctgcycrtggaagggggttggaacttgatggtccttgagtcctttctaacccaagccattctgtgactgatcaaccgtatgctgggttaagctgaattaaaaacacattcgaacatttcacatacctctacattacaggtatttgtacaactcctttcctctcaggatcaaaagactgacaacaaatgcacacttaatggcactcaaggacagcagtgtcttcattcctgatcatgctactgagaaaataaaatggtcagcagttcaactgcaaatgttgatttgatgaacatcactggatgtttga

SEQ ID NO: 88845 - DNA, 600 bp, Chicken  19866894394335_1
catagcacagtctcttagagatgataaccactgaaaaagtgataaccagtcaaaacagatatgtaatattgattttgaagatgcattcaggttaaccagatatgactgcagaatttcctaccatctgtccctctggggagtgctctgcagcagaactgaagatacatggcagatctcatgctcaggctcttcaggctgttttgtcctcctggatgttgtcaattgcatttgcatttccttttgttctcagtattttacaccctggtatccacagaggaacagattcctgagtataaatcytgtgacagtgctacaggcagatggtttctctcccagtgcatcatcagctgtcctacaatactggatttctaytgtaaggattttatctaatgtccactgtaccttcagaagatcttttgcagattcattacatcctctgcagctgtcagaataagaaaaaattatcaaaggcgttcagaactgtgttccattaaataatctaaattaawttcacctcaccaaaatgtttatgagattgttaccctagaagaaaaaggcaatgtcaatgttgaagagwtggaaaatcaaactaaaagcatc

SEQ ID NO: 88846 - DNA, 600 bp, Chicken  19866894394335_2
ttttgaagatgcattcaggttaaccagatatgactgcagaatttcctaccatctgtccctctggggagtgctctgcagcagaactgaagatacatggcagatctcatgctcaggctcttcaggctgttttgtcctcctggatgttgtcaattgcatttgcatttccttttgttctcagtattttacaccctggtatccacagaggaacagattcctgagtataaatcytgtgacagtgctacaggcagatggtttctctcccagtgcatcatcagctgtcctacaatactggatttctaytgtaaggattttatctaatgtccactgtaccttcagaagatcttttgcagattcattacatcctctgcagctgtcagaataagaaaaaattatcaaaggcgttcagaactgtgttccattaaataatctaaattaawttcacctcaccaaaatgtttatgagattgttaccctagaagaaaaaggcaatgtcaatgttgaagagwtggaaaatcaaactaaaagcatccagaacagaagcaatatgccgatatttactagtggcagtaattaacccttgaaagatctgattacagaaaga

SEQ ID NO: 88847 - DNA, 600 bp, Chicken  19866894394335_3
tggatgttgtcaattgcatttgcatttccttttgttctcagtattttacaccctggtatccacagaggaacagattcctgagtataaatcytgtgacagtgctacaggcagatggtttctctcccagtgcatcatcagctgtcctacaatactggatttctaytgtaaggattttatctaatgtccactgtaccttcagaagatcttttgcagattcattacatcctctgcagctgtcagaataagaaaaaattatcaaaggcgttcagaactgtgttccattaaataatctaaattaawttcacctcaccaaaatgtttatgagattgttaccctagaagaaaaaggcaatgtcaatgttgaagagwtggaaaatcaaactaaaagcatccagaacagaagcaatatgccgatatttactagtggcagtaattaacccttgaaagatctgattacagaaagagtataataactttcactctgtgaataaagtttatatctctcgttcttgacaggtctactcagaaacagatctttcatgagaattattgattcatatgatctgttttgtaccaggtaaaaagttagaatataacataa

SEQ ID NO: 88848 - DNA, 600 bp, Chicken  19866894394335_4
aacagattcctgagtataaatcytgtgacagtgctacaggcagatggtttctctcccagtgcatcatcagctgtcctacaatactggatttctaytgtaaggattttatctaatgtccactgtaccttcagaagatcttttgcagattcattacatcctctgcagctgtcagaataagaaaaaattatcaaaggcgttcagaactgtgttccattaaataatctaaattaawttcacctcaccaaaatgtttatgagattgttaccctagaagaaaaaggcaatgtcaatgttgaagagwtggaaaatcaaactaaaagcatccagaacagaagcaatatgccgatatttactagtggcagtaattaacccttgaaagatctgattacagaaagagtataataactttcactctgtgaataaagtttatatctctcgttcttgacaggtctactcagaaacagatctttcatgagaattattgattcatatgatctgttttgtaccaggtaaaaagttagaatataacataaggaatatttgtaacctgaagttttcacactcagcttcacttggagtttatgttctttgactttatgaa

SEQ ID NO: 88849 - DNA, 600 bp, Chicken  19866894394346_1
gtacagtgacatcagtcacactgtgagtagctgcacaatacaaatattgtttcaacagaaacatttgagctatttttgaaagtgataaaaatatttctagttgtactctgtaatgagtgtagaacttctgcatattaatacctacctcttttcgataatcatgaattataatttactgtacctatcagaatacttaccctatacaaaaaaaaaaaaaaaaaaaaaaaaaggaatcctattactgctttaatatcttgctctatatgaggaaaaaagaacatatgtagtctccaagaggcrtggaattcaaattgagattacagttgctactatgcacatgctatattgcttcaacttttagacagaatggcttaatgcataaagacagaacttcagtattgggagagtatggtaaacaggtctagaagctcaggaggaaagaatagtgacattgaaagaagacagaaatattagctgttggaattacagaataaaaggagttcaaaacatatttaaatattagatttgagaagtaaatagttgtcatctaaatgttcaccaatatatactgaaatgatcaaaatggtagtctcttgaaga

SEQ ID NO: 88850 - DNA, 599 bp, Chicken  19866894394349_1
  misc_feature (1)..(18): n is any nucleotide
nnnnnnnnnnnnnnnnnnctttttcatgctgtatttggtttctgtaatgagtttcccacgcgttgttgaaaaggaaagattttttgaagctgcttagttcagaaaagcatccagtgatgtatatttgaaacccctttaaatttataagcttgcaattttctgtatctcatctctgtatctagcctctattgaaagttctttgggatgcagatactttcatctgtccgtaaagggcgtgcatacctgtgaagttccagaagcaacagatgcagtgattatagcatcttagaaaatatctgragagaaagagatcgccctgtaactggtctgtggttatacctaagtttgtgtcttgctgtgtgaactcttgcagacttgtaggaagagctaggggatactttgactgacctgaaaaagacacatctgttacttataaagacagggagtgggcacacttagtgcttctcttatgtcacacatcttgtttttcttctagcaaaatatttttctctgacatattaatagtgtttggtcataaaacagagtccataattcagtgtgtataccttgagcatatacttgtagggagtggtgagcaa

SEQ ID NO: 88851 - DNA, 600 bp, Chicken  19866894394349_2
tttgtgtcttgctgtgtgaactcttgcagacttgtaggaagagctaggggatactttgactgacctgaaaaagacacatctgttacttataaagacagggagtgggcacacttagtgcttctcttatgtcacacatcttgtttttcttctagcaaaatatttttctctgacatattaatagtgtttggtcataaaacagagtccataattcagtgtgtataccttgagcatatacttgtagggagtggtgagcaaaggtgatgatgtgaaaactgcctgtaatcctacagagtcagtagrgatatataggaagaagttggctaattcactgcgtgcattaatcaaattggaattgtctttttgttcttcacttactgcttaacagactgtagccagctgctgccttctggaccagctgcactgcctgatgagttgatggctatcagtcagccaggtcagccacagagcgagggacaagcagcagtgccagcgcttctctcccagcagatacctgagacttctccactaccttcagctatggcacccagtcagaatattgagaaaatagatgatctgcttgtttcactgcaaaaccagggg

SEQ ID NO: 88852 - DNA, 599 bp, Chicken  19866894394357_1
  misc_feature (1)..(92): n is any nucleotide
nnnnnnnnnnnnnnnnnnnnnnnnnnnnnnnnnnnnnnnnnnnnnnnnnnnnnnnnnnnnnnnnnnnnnnnnnnnnnnnnnnnnnnnnnnnntctgcattcccaactggatgcagcacaacagatttctcagcagctgggctggcaggacactttgattagactcttcctgaaagaaaactctgaggtccagattggatttatagagaacagggctgactcctcaagggaagaggaaaagaagtctcctgctgaagaacttcagaagtatcacactgataagatggagggagataaatcygatacctttgtgtctgtgaatggtttgtttgatcaatggagtttggaagacaataaatccttggatgtcccagctcatttctctgctatgccactggaagatgcatccacagcagagatgtcttttaagtcagaggaccgagaagaattgtggcacagtaatccttcacatttgagtctagatctgtccagcgttgactcttatgaactggctgatgttgtgaatcagatgacagatagcctgcccagcacaccatcacctgtagagaacagaaaacccttctctgggcagcctgaaaa

SEQ ID NO: 88853 - DNA, 600 bp, Chicken  19866894394359_1
gcagagtgagtgggcacaggaaaagcagaccgtgggggtgggggggaatttacaaatctttgaaaaaaaacccaaagctgcataatctgctgtatttcagttggtctttatccgcaaaatcccagatctttgtttaagctacaaacggactataaaaatcagctcgctggcctctctccttattatccacatccctgcacaaatcaaatgaagcttttgctgtaaagctgataaaaaacacggcgcacatgagcaagctgatgtatttaaaaagtggttatcgtttctaatcctttcctytctctccagggaatatcatctttccaaggaacacacaaaactccaccactgagcacacatcagcacttacacttgttttgattagggattttctaaaataacaatgaccgaagcactccagcgttatcattgatttttagcacctggggacccggtgtgacagtcgtgcaattgtttaaaatcagtgagtagcccagaccggttctgacaaatatttgcaatcccataatctattttagggaccttgtgaaatgaactgcggtgcccrggtgacagagcggagctgctgctgtcatttct

SEQ ID NO: 88854 - DNA, 600 bp, Chicken  19866894394359_2
aaaaagtggttatcgtttctaatcctttcctytctctccagggaatatcatctttccaaggaacacacaaaactccaccactgagcacacatcagcacttacacttgttttgattagggattttctaaaataacaatgaccgaagcactccagcgttatcattgatttttagcacctggggacccggtgtgacagtcgtgcaattgtttaaaatcagtgagtagcccagaccggttctgacaaatatttgcaatcccataatctattttagggaccttgtgaaatgaactgcggtgcccrggtgacagagcggagctgctgctgtcatttctttgtatacaacccaggtccccgtgtgtaacccagarcaagagaackggtcacagatgataactgtctgctgtcccagcaggaggtgggaccggggtgggatttgggttattggctgagatgctctccagttccagctccctgcaaacaaagccatttttattacctagttcagactyacccaaatgagctctcctcagccactcttagctaccaggcttagattgaagaatgagagactaatactaaaactagtcttgcaactcacct

SEQ ID NO: 88855 - DNA, 600 bp, Chicken  19866894394359_3
aaaactccaccactgagcacacatcagcacttacacttgttttgattagggattttctaaaataacaatgaccgaagcactccagcgttatcattgatttttagcacctggggacccggtgtgacagtcgtgcaattgtttaaaatcagtgagtagcccagaccggttctgacaaatatttgcaatcccataatctattttagggaccttgtgaaatgaactgcggtgcccrggtgacagagcggagctgctgctgtcatttctttgtatacaacccaggtccccgtgtgtaacccagarcaagagaackggtcacagatgataactgtctgctgtcccagcaggaggtgggaccggggtgggatttgggttattggctgagatgctctccagttccagctccctgcaaacaaagccatttttattacctagttcagactyacccaaatgagctctcctcagccactcttagctaccaggcttagattgaagaatgagagactaatactaaaactagtcttgcaactcacctgaagccaatgagttacagcgctggaaaacaaaggttagaacagattcaggccccacccgctacaattc

SEQ ID NO: 88856 - DNA, 600 bp, Chicken  19866894394359_4
cactgagcacacatcagcacttacacttgttttgattagggattttctaaaataacaatgaccgaagcactccagcgttatcattgatttttagcacctggggacccggtgtgacagtcgtgcaattgtttaaaatcagtgagtagcccagaccggttctgacaaatatttgcaatcccataatctattttagggaccttgtgaaatgaactgcggtgcccrggtgacagagcggagctgctgctgtcatttctttgtatacaacccaggtccccgtgtgtaacccagarcaagagaackggtcacagatgataactgtctgctgtcccagcaggaggtgggaccggggtgggatttgggttattggctgagatgctctccagttccagctccctgcaaacaaagccatttttattacctagttcagactyacccaaatgagctctcctcagccactcttagctaccaggcttagattgaagaatgagagactaatactaaaactagtcttgcaactcacctgaagccaatgagttacagcgctggaaaacaaaggttagaacagattcaggccccacccgctacaattccctcttttaa

SEQ ID NO: 88857 - DNA, 600 bp, Chicken  19866894394359_5
aaaatcagtgagtagcccagaccggttctgacaaatatttgcaatcccataatctattttagggaccttgtgaaatgaactgcggtgcccrggtgacagagcggagctgctgctgtcatttctttgtatacaacccaggtccccgtgtgtaacccagarcaagagaackggtcacagatgataactgtctgctgtcccagcaggaggtgggaccggggtgggatttgggttattggctgagatgctctccagttccagctccctgcaaacaaagccatttttattacctagttcagactyacccaaatgagctctcctcagccactcttagctaccaggcttagattgaagaatgagagactaatactaaaactagtcttgcaactcacctgaagccaatgagttacagcgctggaaaacaaaggttagaacagattcaggccccacccgctacaattccctcttttaaagggagactttcccccacagaatgaaacytctctcaaaagattgaaccaacagcactcccttatttcaactccatttgttacacattgtagacaggtactagaaagttacactgacaatttagtactgcag

SEQ ID NO: 88858 - DNA, 517 bp, Chicken  19866894394359_6
agcaggaggtgggaccggggtgggatttgggttattggctgagatgctctccagttccagctccctgcaaacaaagccatttttattacctagttcagactyacccaaatgagctctcctcagccactcttagctaccaggcttagattgaagaatgagagactaatactaaaactagtcttgcaactcacctgaagccaatgagttacagcgctggaaaacaaaggttagaacagattcaggccccacccgctacaattccctcttttaaagggagactttcccccacagaatgaaacytctctcaaaagattgaaccaacagcactcccttatttcaactccatttgttacacattgtagacaggtactagaaagttacactgacaatttagtactgcagagagggaggggttcagtgtccctcttcgcactatgcaccttaaaattttgccctctgctttaaaaataaaaatgcaaataagttatgagtttaatctcttgcaaatatacacata

SEQ ID NO: 88859 - DNA, 599 bp, Chicken  19866894394364_1
  misc_feature (1)..(133): n is any nucleotide
nnnnnnnnnnnnnnnnnnnnnnnnnnnnnnnnnnnnnnnnnnnnnnnnnnnnnnnnnnnnnnnnnnnnnnnnnnnnnnnnnnnnnnnnnnnnnnnnnnnnnnnnnnnnnnnnnnnnnnnnnnnnnnnnnnnnntctgtaacgtgtgaaattcaattacacaacaatgcctaggtgtctgcatttcaagcaattttcagatcagaaccacataaaattaaaacaaattcagtgcagaaagagcaagtctgtatcttaatacccatgagattatccatttttactgcattctgactaagttstaaaacttgctcatcccagttcacttaaacaagtaccatcagctcaattaatgcagctctcagctcgtgtgcattaaacagatagatctaaacggtgcagaaataatctttgacagctttaagagctccactctgcttacacactctaagtccaaaactattcacaattttaaggaaatgaacacctgaagcagttggatcatttgccatttgccacattctgcatcttggtgcaatgattagcacaaagggttttctgcagtcctgcagaactggacaaagtcctgcttwcaaatgga

SEQ ID NO: 88860 - DNA, 600 bp, Chicken  19866894394364_2
actaagttstaaaacttgctcatcccagttcacttaaacaagtaccatcagctcaattaatgcagctctcagctcgtgtgcattaaacagatagatctaaacggtgcagaaataatctttgacagctttaagagctccactctgcttacacactctaagtccaaaactattcacaattttaaggaaatgaacacctgaagcagttggatcatttgccatttgccacattctgcatcttggtgcaatgattagcacaaagggttttctgcagtcctgcagaactggacaaagtcctgcttwcaaatggacaaagcctcagcgttcataccagttagtagttcataccagactaaaaagccatgtcatctgattagcatgctcaggtttttatgcactctgaaaggaaacagaacccatctgctgaattctgaaggcaatctgtgggatcctacatttcctcctgattctggaagaggaaattctaatagcaaaggcagaactttgctcttcctagacatgagaagagatggcatttgataacattcatttctggtaaatcaaatgatgtatttatatttttactacaggtaatatagggag

SEQ ID NO: 88861 - DNA, 599 bp, Chicken  19866894394387_1
  misc_feature (1)..(134): n is any nucleotide
nnnnnnnnnnnnnnnnnnnnnnnnnnnnnnnnnnnnnnnnnnnnnnnnnnnnnnnnnnnnnnnnnnnnnnnnnnnnnnnnnnnnnnnnnnnnnnnnnnnnnnnnnnnnnnnnnnnnnnnnnnnnnnnnnnnnnntacataggtgtaggaaggatcccccagccactgaatgctgcacatctagaaactgtcaatagagagtatgaaaaatgtaaaggacaaagcaaaactaggagaagttccagctcgtttttctgcttgctgaagcaatctctcacttcagcatatcctggtcccctarggaagagttgttcttagggcttgatcttgcttctattcgcagccaaagtaagtctcctttaggttaaaagtggataggatcacatcattaatgatcatctctccaaaaatagaaccagcaaaagtaacagtgcttcatgttatactatactctgctatactctgtatacaaagtagctctctattcttgtgtaaaaatttgttcaaatttagaggtatttagagatgtgtattaaatctttaaagctgatttttccagttctcttaattagtggaccaaatgatggatacaattgctgy

SEQ ID NO: 88862 - DNA, 600 bp, Chicken  19866894394387_2
rggaagagttgttcttagggcttgatcttgcttctattcgcagccaaagtaagtctcctttaggttaaaagtggataggatcacatcattaatgatcatctctccaaaaatagaaccagcaaaagtaacagtgcttcatgttatactatactctgctatactctgtatacaaagtagctctctattcttgtgtaaaaatttgttcaaatttagaggtatttagagatgtgtattaaatctttaaagctgatttttccagttctcttaattagtggaccaaatgatggatacaattgctgygcacttgtggtattgaggacaatttctatttgaggagggaaaaatgtgaagaaattttctgtrtgctgaattaaatcccttgaagtcgattgtggccaggaatgtaagtaaattagcatggtgctcttgaattcagtggagccacactgrtggctgttacctgtgattgattatcattgaataatgcaatgaaattccttgtttattaacacaaggataaaacgagaaagggagaaaagctgctacctttctaccacaactggccaaagaaatgagaactgctaaagatttacacctttg

SEQ ID NO: 88863 - DNA, 600 bp, Chicken  19866894394387_3
gttaaaagtggataggatcacatcattaatgatcatctctccaaaaatagaaccagcaaaagtaacagtgcttcatgttatactatactctgctatactctgtatacaaagtagctctctattcttgtgtaaaaatttgttcaaatttagaggtatttagagatgtgtattaaatctttaaagctgatttttccagttctcttaattagtggaccaaatgatggatacaattgctgygcacttgtggtattgaggacaatttctatttgaggagggaaaaatgtgaagaaattttctgtrtgctgaattaaatcccttgaagtcgattgtggccaggaatgtaagtaaattagcatggtgctcttgaattcagtggagccacactgrtggctgttacctgtgattgattatcattgaataatgcaatgaaattccttgtttattaacacaaggataaaacgagaaagggagaaaagctgctacctttctaccacaactggccaaagaaatgagaactgctaaagatttacacctttgatgtgctcttcttttacctaaaactgccataaatagcaacaaacctatgaacttcataggacc

SEQ ID NO: 88864 - DNA, 600 bp, Chicken  19866894394387_4
ctctgctatactctgtatacaaagtagctctctattcttgtgtaaaaatttgttcaaatttagaggtatttagagatgtgtattaaatctttaaagctgatttttccagttctcttaattagtggaccaaatgatggatacaattgctgygcacttgtggtattgaggacaatttctatttgaggagggaaaaatgtgaagaaattttctgtrtgctgaattaaatcccttgaagtcgattgtggccaggaatgtaagtaaattagcatggtgctcttgaattcagtggagccacactgrtggctgttacctgtgattgattatcattgaataatgcaatgaaattccttgtttattaacacaaggataaaacgagaaagggagaaaagctgctacctttctaccacaactggccaaagaaatgagaactgctaaagatttacacctttgatgtgctcttcttttacctaaaactgccataaatagcaacaaacctatgaacttcataggaccatgggtctgtacacagaattctttctggttggaagggcaatgttaagggaggtactcatggtgtaaagcaagcacagcatcttgttt

SEQ ID NO: 88865 - DNA, 599 bp, Chicken  19866894394390_1
  misc_feature (1)..(79): n is any nucleotide
nnnnnnnnnnnnnnnnnnnnnnnnnnnnnnnnnnnnnnnnnnnnnnnnnnnnnnnnnnnnnnnnnnnnnnnnnnnnnnnctaattggataaatgcaaaatgtgactgaaaaggatattctatatataagagtgtagtccctttaaattcttgtagttaaacgtggtaggtgttttaggttacagcttgtaaagatccagattaatctggtgacagattcttatcagacgtctatttcagtgtctccattacctcagaatccaaaaacaaactgtgtttggagctttcttccccactcctyatgctgcagggctttcctaaatggatgtaatcatgaaaactatttattttaagagggtaataaatcgtactgagtgttgtgttttgtttttgatgcagacccaacagccgtaatgctttggacagtgagctgcagctttgagaccctgaaacaactgtgtgtctggaaggggctgttttgcagcctgcccattgccttcttgctagattscctttgctgcccctgcacttgccccagtgctgtctgtactgtatgtgcagttgcttgaaggtagccaggacttgttacacctgtgcagt

SEQ ID NO: 88866 - DNA, 600 bp, Chicken  19866894394390_2
gacagattcttatcagacgtctatttcagtgtctccattacctcagaatccaaaaacaaactgtgtttggagctttcttccccactcctyatgctgcagggctttcctaaatggatgtaatcatgaaaactatttattttaagagggtaataaatcgtactgagtgttgtgttttgtttttgatgcagacccaacagccgtaatgctttggacagtgagctgcagctttgagaccctgaaacaactgtgtgtctggaaggggctgttttgcagcctgcccattgccttcttgctagattscctttgctgcccctgcacttgccccagtgctgtctgtactgtatgtgcagttgcttgaaggtagccaggacttgttacacctgtgcagttaagttgtgccttcacaggagggctatcaggggccctgacataacctgacacatttgtagctctatcagtgcagtctctggcttgacaagagctgatttgccaatgaagatatgagttctggagggttaaaatgataaggagatctgatacccttcttcatatatactttagttgctgaactgaagaaccctagaatatttaccagctccc

SEQ ID NO: 88867 - DNA, 600 bp, Chicken  19866894394398_1
tgatttcacagtgctattggtacacagcatttttgggtcagcaattctgtaaaaccaggcaaaactaaaacaaacagttggaaagtgctgtccctgtgtttctatctacggataggataatatatttaaatgatctatttgagggcttttttagtagttcttgtatcagttttggccatcaaaaagattgctgttaacctgtacatttactgagtagattaaccaagatttcttaaacatgtttagcattggtgacaataagtaaaatagtcttgcattttgtcttctgtcttcttgtgycttgagtaatggaaaggagaaagaaagagtggagtaagaaggcaaataacatgagtcaaattcaactttgtggtcatcttctaacctgaacaagataaattctttttctctaagggcttgtccatgtgccaaagctgagctacctgttaaagcttgcagttgttcaaatgattttggaagaagaatataaattccagagaaaaggaggtcaaattttctcgttcagttgtctcgcactgagatagcttgttcagagacgtgttccattttcagctatttcagtatggttgggattttttt

SEQ ID NO: 88868 - DNA, 379 bp, Chicken  19866894394402_1
ggaagagaatgtcttgggccttgcagctcatgggatgccactgcagctccctgcttccccaggagggatgcggagggatgcaaaaggggaaggaaccaaggtgctggggagaaagttcggtgccatcgccagcatacagcggaatactaatgaagaggcgagtgagctccagcctcatctatcatattatgtaatggcttacttctctgcacttcatttatttggagattgctcccaggctggctcctcgccagcagccaccaaatccaagtctacagaaatcaatctcgcgctgactgytgtccccagagccctcctcggggacacctgatggcccaatccttgcactgtgccaccgtgccgcagtcaaactgcagag

SEQ ID NO: 88869 - DNA, 600 bp, Chicken  19866894394403_1
tttttattacttgcctgtaattctgaattataattactcctgttgatttcttccatacttgcctaaagttacacttcagcgtaggacagatcacagggtaaatcaggctggaaaggacttcagcatgtctcccatccaacctgctgctgaaagcaaggccagctaaggggtaaggccaagttgctcaggaacgtgaccagctggaacttggaaatctcccaaaggtggaaactgtacagttcctatgagctatatctactgctggactgtcctcaggggggaaaaaatctcttccctatrgcttatctgaaaaccctctcatttcagcttacatcaacagtcctgccatcgctgtatcatctgataattgacacacactcagtctggtttcatctgcaaacgttacatggaataagcactccgtcacttcctctacatcactgttaaagaagctgagcaggacagctcccgtgccaaacacaacctcccttagaaacatttccagtcatgaacctaaatgagatgcagacttgctgaccacatcattttgccattacaaaatgaggaagctagcaggtggccaaagctcctgctttgcac

SEQ ID NO: 88870 - DNA, 492 bp, Chicken  19866894394425_1
gtctgcagcccttcccatggtagttagattgtgttctttttttgagaagttatttcagtcagtgccagaaagtgacaatttatggttttgagggcatttgctctatttaattttgataaatataaatgcattccaaatatttacactgtaatatttttacaaatatttatactgtaaaaaaacaataaaagatatatatatatttcttaaagcaatgaaaataacttcctggcttttatttaatatattttttagagatgatcgtatgccttacaagttcttctcctataaaatgtattmtgtttttgagcattttgtattgaaatcagtgatctctytgaaaagattatccatatccaggccaaggagcaggctgttgtttgacatctattcatggtgcattccactgtgaatattatgagaatgttagtaggtgtgtatgaggcatgtttattgtcaaatgggaatgggtattcagtaactttattggga

SEQ ID NO: 88871 - DNA, 454 bp, Chicken  19866894394425_2
tttttgagaagttatttcagtcagtgccagaaagtgacaatttatggttttgagggcatttgctctatttaattttgataaatataaatgcattccaaatatttacactgtaatatttttacaaatatttatactgtaaaaaaacaataaaagatatatatatatttcttaaagcaatgaaaataacttcctggcttttatttaatatattttttagagatgatcgtatgccttacaagttcttctcctataaaatgtattmtgtttttgagcattttgtattgaaatcagtgatctctytgaaaagattatccatatccaggccaaggagcaggctgttgtttgacatctattcatggtgcattccactgtgaatattatgagaatgttagtaggtgtgtatgaggcatgtttattgtcaaatgggaatgggtattcagtaactttattggga

SEQ ID NO: 88872 - DNA, 600 bp, Chicken  19866894394448_1
agtaaaggacgtgatcctttatacagtcaccctcccgctgcagaggaattcaacggtacagagggggtaggaaggtacctctggattaagcactgactgcttcagtgttaaggtgatcttgatgtcagagctggctataaatgcctaccccagtttagatatgggtaagtacaatctcagttttacttatggggaaagttttctgataggatataatacctgacctgctgtgcaatcctgccttgtttaactggatttatggagactggaagtactgcagttataccaggtgtttatccrgagtgatatttatgcactgacctcgatatttatgctggatkgtatatgagccgagcagaggaaactggcagccaagcaccaacttggaaaagcctggaaaygattgtagtgatgcccttttgctgggttctgaaggcaggcacagaatgtgctgtggccatgaggatgaggatggtggcaccatttctgaacaatagttgcagggacacatttactgcaccaagaaacgtaaatgtcacattgacattttttctcttaaagtcattttgataacatcagacggggggaagtttactgcta

SEQ ID NO: 88873 - DNA, 600 bp, Chicken  19866894394448_2
agaggaattcaacggtacagagggggtaggaaggtacctctggattaagcactgactgcttcagtgttaaggtgatcttgatgtcagagctggctataaatgcctaccccagtttagatatgggtaagtacaatctcagttttacttatggggaaagttttctgataggatataatacctgacctgctgtgcaatcctgccttgtttaactggatttatggagactggaagtactgcagttataccaggtgtttatccrgagtgatatttatgcactgacctcgatatttatgctggatkgtatatgagccgagcagaggaaactggcagccaagcaccaacttggaaaagcctggaaaygattgtagtgatgcccttttgctgggttctgaaggcaggcacagaatgtgctgtggccatgaggatgaggatggtggcaccatttctgaacaatagttgcagggacacatttactgcaccaagaaacgtaaatgtcacattgacattttttctcttaaagtcattttgataacatcagacggggggaagtttactgctatctgtgctttgtttgaaagttttcccatagtacggtttcca

SEQ ID NO: 88874 - DNA, 600 bp, Chicken  19866894394448_3
tcagtgttaaggtgatcttgatgtcagagctggctataaatgcctaccccagtttagatatgggtaagtacaatctcagttttacttatggggaaagttttctgataggatataatacctgacctgctgtgcaatcctgccttgtttaactggatttatggagactggaagtactgcagttataccaggtgtttatccrgagtgatatttatgcactgacctcgatatttatgctggatkgtatatgagccgagcagaggaaactggcagccaagcaccaacttggaaaagcctggaaaygattgtagtgatgcccttttgctgggttctgaaggcaggcacagaatgtgctgtggccatgaggatgaggatggtggcaccatttctgaacaatagttgcagggacacatttactgcaccaagaaacgtaaatgtcacattgacattttttctcttaaagtcattttgataacatcagacggggggaagtttactgctatctgtgctttgtttgaaagttttcccatagtacggtttccagggtgttacactaataaattttctgtgcacacaaagaatttgtttcagttagggggctct

SEQ ID NO: 88875 - DNA, 600 bp, Chicken  19866894394455_1
tcgtctccttgtgtcttaggcagtttccattgttctcatactttttcctctttcctctttctctctgaatgtggaagtgcactcctacttgctgatggaagaggatgttatccctccctaccttaaataatgacctccattgagaatgattgttaatggctacttcaggaaacttctggcacattgctgaatttctcagaaactggttatagggtggaaagaagagctgaaagctaaatttcatgtctgtatttgtttcccatgtcacacatatactccccttcctctgctttttgctgyatgtataaatgaaatattccttttccatcaaacatttcattttccatcttactgtttttcttccttaatcattttttagttagaatcacttactcaagcattttagtttccccctttctcccttctctatacacctttcttccttccactggatagtcttgtcatcygtacacaactcatctttttcctgtgcctctgtacctcctatcttctgggttcaccagcttgttatttcacagtgggattctttctgcatcttggtcagaacttcactcagcctgttctttgagttgttttcca

SEQ ID NO: 88876 - DNA, 600 bp, Chicken  19866894394455_2
ggaaacttctggcacattgctgaatttctcagaaactggttatagggtggaaagaagagctgaaagctaaatttcatgtctgtatttgtttcccatgtcacacatatactccccttcctctgctttttgctgyatgtataaatgaaatattccttttccatcaaacatttcattttccatcttactgtttttcttccttaatcattttttagttagaatcacttactcaagcattttagtttccccctttctcccttctctatacacctttcttccttccactggatagtcttgtcatcygtacacaactcatctttttcctgtgcctctgtacctcctatcttctgggttcaccagcttgttatttcacagtgggattctttctgcatcttggtcagaacttcactcagcctgttctttgagttgttttccattaagatcagtttcccaaggattctaatcccttcttttttctccatggtgatgtgagttgttcttgatatgttaagataaatacaaaccaaaactcccactgagtcttgtatttgtttaagatagcaatgatccggtctgtttctgtttcttaaagtcctctagatc

SEQ ID NO: 88877 - DNA, 600 bp, Chicken  19866894394456_1
tcaaaccagagcctaataatacattttcaaaactttataaaactttcattcatgcttctctgacacagaaatctgcagagtgtggtcagaaaaccagggacaccttgtcctcacaaagcgcaaggaatgtctgctactagtttgctatgtgttgttctaaacatttctgtgttttacagtctcttcacccgtatggtctcctgtgatctgcaagcattaaatatttgcattaaaaatataatgcatatcacaggaataggagagaaagaagcattttaaagctcctcgtaactaatgacrtgaaatgggtaggaaacctcggagagtgcagtaattacagagactttcttcctgccttataattgagaccgagtgaattggccagatcagtagtgcgctgcgcatgtcaagcaggcacagaactgtgagctatgtgaaaagttatctgctgcgtaagtaggcttaccctgtgctgttgggatgtacctgaatttagcttggaaactggatggctcrcctgtactatttgaggccactgggactgcttttggtgactatcattttttggaattgaaagggccagcttctggagcatatcac

SEQ ID NO: 88878 - DNA, 600 bp, Chicken  19866894394456_2
ttaaatatttgcattaaaaatataatgcatatcacaggaataggagagaaagaagcattttaaagctcctcgtaactaatgacrtgaaatgggtaggaaacctcggagagtgcagtaattacagagactttcttcctgccttataattgagaccgagtgaattggccagatcagtagtgcgctgcgcatgtcaagcaggcacagaactgtgagctatgtgaaaagttatctgctgcgtaagtaggcttaccctgtgctgttgggatgtacctgaatttagcttggaaactggatggctcrcctgtactatttgaggccactgggactgcttttggtgactatcattttttggaattgaaagggccagcttctggagcatatcactcattccaataagcaaatattggttcagaacaagcattcaaaagggtagctaactacaccccttcctcacttttctaccttttctttccctgcgtgatccattgtggagtattgcacaccaatgtgagctctgtgagtgcgtttgctgttatttccacgttttagtggtattaaccatctctccggttgagatcatatgacgcttttggaatgtga

SEQ ID NO: 88879 - DNA, 600 bp, Chicken  19866894394459_1
tactgtttcattatacattctgcaaacaaacgaagttgtaggcttaccaccaagtaccatgtttacttacgctgaacaataggcaaagcaagtcttcgaatgagcacaccaacaggaaaaacaaaactctcaaattaggtaaccattagaatgaataacaataaaataaagtatagggaaatctacattcattcttaaaatgtcctgtattttgttataatacttaatttcagtagacatcactgcaagtagctgggcgtatcgtaatggatgcctactctgtggaagctagaacaataraacacttttgaattacacatggcaaaaaggaaaaatgcctacttcatgagtgcgtggatactacagtgtcatagagaaaagtgtttgccagcaagtgtgtttagttggacaagtaaaatgcttgtaaccaggaattacagatacatgtccattacctgtgctagctttgaaatgggtactaaacccatactggtacgtagcgataagaaacagctgctctcagcttttgggcttctgccaaaaatggaatgattattcttgcagcatagctgtaaaaagtaccgcatattttgtcaactc

SEQ ID NO: 88880 - DNA, 600 bp, Chicken  19866894394463_1
agctgggtggtacggtgggtgatattgagagcatgcccttcatcgaggccttccgccagttccagttcaaagccaggagggagaacttctgtaacattcatgtcagcctcgttccacaggtatggagctcagctgtgggctgggtggctgcttcccctgagccacctgtagaactgcattctgaaacaccacctctgcatgcaccgttctattggggtttccgtatgtagaagcttgtaaacgtgctttgtagggcttggttcagaaatgcaaccaaaaagctgttgtgaagcagtgctrtgagaagagaaatgtaattagaaatcacagaggaaaacaaagttttcttatgttccaagtcrgtggtgcaagctccagtcaataccaaaagcataatggaactccttcgtggcatgcaatgcctggtacaacctcatctgtattatctgacctggctctgaaggcaatttacagtcttacccacctaaaaaggctctattttgaatcacagctgaaraaatgactcttgcatggttgttgacagtaccagagagcatcgtctgtagcactgtaactctgtgaatgagagctcctcatcac

SEQ ID NO: 88881 - DNA, 600 bp, Chicken  19866894394463_2
cagttcaaagccaggagggagaacttctgtaacattcatgtcagcctcgttccacaggtatggagctcagctgtgggctgggtggctgcttcccctgagccacctgtagaactgcattctgaaacaccacctctgcatgcaccgttctattggggtttccgtatgtagaagcttgtaaacgtgctttgtagggcttggttcagaaatgcaaccaaaaagctgttgtgaagcagtgctrtgagaagagaaatgtaattagaaatcacagaggaaaacaaagttttcttatgttccaagtcrgtggtgcaagctccagtcaataccaaaagcataatggaactccttcgtggcatgcaatgcctggtacaacctcatctgtattatctgacctggctctgaaggcaatttacagtcttacccacctaaaaaggctctattttgaatcacagctgaaraaatgactcttgcatggttgttgacagtaccagagagcatcgtctgtagcactgtaactctgtgaatgagagctcctcatcacggaactggatgtggagtaatttgatggagttcctgaagtgcacatcgctcccttttctgctc

SEQ ID NO: 88882 - DNA, 600 bp, Chicken  19866894394463_3
tttccgtatgtagaagcttgtaaacgtgctttgtagggcttggttcagaaatgcaaccaaaaagctgttgtgaagcagtgctrtgagaagagaaatgtaattagaaatcacagaggaaaacaaagttttcttatgttccaagtcrgtggtgcaagctccagtcaataccaaaagcataatggaactccttcgtggcatgcaatgcctggtacaacctcatctgtattatctgacctggctctgaaggcaatttacagtcttacccacctaaaaaggctctattttgaatcacagctgaaraaatgactcttgcatggttgttgacagtaccagagagcatcgtctgtagcactgtaactctgtgaatgagagctcctcatcacggaactggatgtggagtaatttgatggagttcctgaagtgcacatcgctcccttttctgctctcctctctttccttccctttgcatccaggctgggtgatttagggggagaagacaaggaatggaaaacgtgaggtattcagagggaacagtgagggaaaaaaaccttgggctctctgtcctgcagtagaatgaattcctgctcagtgtgcagactt

SEQ ID NO: 88883 - DNA, 600 bp, Chicken  19866894394469_1
ggaatggctgaagcacccgtggccagcgagtcactgtgctttccctgtttcaaagagcagccagcgtgaagaaacatcaaagagggctttccagtctgcacttcctaaaacacagcactaggcaacagcagatgggagctggtgttattaaatatgcatcacctcatggatcataaggtagcacttagctatcctctaattaaaaggcagctgcctgatagattttcccttcacgatggcttattgatgaggagccacgtggccctttccagaggtgctgagggtcattgctcaagaccyaccaacgaggcaggcagttgagattcctcttggtttgtacacccagcastgaagaggttaatgctgagactaggtggaagtacttctggacatccatgccagctacagagcagcttcctgcacagaagagcttggaatgaataaaagaaatattgttgcactgaatcagcccytctagcaatgagctctgacttcccactggttattttcattaattaattacatttgtattcacagaacatgccagcgttccaaccatggtccaagatcccactatattggggtctaaatggatgaaat

SEQ ID NO: 88884 - DNA, 600 bp, Chicken  19866894394469_2
tcaaagagcagccagcgtgaagaaacatcaaagagggctttccagtctgcacttcctaaaacacagcactaggcaacagcagatgggagctggtgttattaaatatgcatcacctcatggatcataaggtagcacttagctatcctctaattaaaaggcagctgcctgatagattttcccttcacgatggcttattgatgaggagccacgtggccctttccagaggtgctgagggtcattgctcaagaccyaccaacgaggcaggcagttgagattcctcttggtttgtacacccagcastgaagaggttaatgctgagactaggtggaagtacttctggacatccatgccagctacagagcagcttcctgcacagaagagcttggaatgaataaaagaaatattgttgcactgaatcagcccytctagcaatgagctctgacttcccactggttattttcattaattaattacatttgtattcacagaacatgccagcgttccaaccatggtccaagatcccactatattggggtctaaatggatgaaataggagctccttacccagagagagtcaagtatgggaaaaargagatgaca

SEQ ID NO: 88885 - DNA, 600 bp, Chicken  19866894394469_3
taaggtagcacttagctatcctctaattaaaaggcagctgcctgatagattttcccttcacgatggcttattgatgaggagccacgtggccctttccagaggtgctgagggtcattgctcaagaccyaccaacgaggcaggcagttgagattcctcttggtttgtacacccagcastgaagaggttaatgctgagactaggtggaagtacttctggacatccatgccagctacagagcagcttcctgcacagaagagcttggaatgaataaaagaaatattgttgcactgaatcagcccytctagcaatgagctctgacttcccactggttattttcattaattaattacatttgtattcacagaacatgccagcgttccaaccatggtccaagatcccactatattggggtctaaatggatgaaataggagctccttacccagagagagtcaagtatgggaaaaargagatgacaaggctgtagccagcaagctgcagggtgcaggagaccatcctggccaggatggggctgcaaactgcatttattttgggaaaccactgtcagattgcatgccagtgtgatgccaagggcatcgtgc

SEQ ID NO: 88886 - DNA, 600 bp, Chicken  19866894394469_4
acccagcastgaagaggttaatgctgagactaggtggaagtacttctggacatccatgccagctacagagcagcttcctgcacagaagagcttggaatgaataaaagaaatattgttgcactgaatcagcccytctagcaatgagctctgacttcccactggttattttcattaattaattacatttgtattcacagaacatgccagcgttccaaccatggtccaagatcccactatattggggtctaaatggatgaaataggagctccttacccagagagagtcaagtatgggaaaaargagatgacaaggctgtagccagcaagctgcagggtgcaggagaccatcctggccaggatggggctgcaaactgcatttattttgggaaaccactgtcagattgcatgccagtgtgatgccaagggcatcgtgccctcgtgcacgagatgtgcaaagcacaaatggatcatcaaagtgatcattctctggaagacaagttctgatccatgggctcagcactccttttttcctttgtgtaggaagcaaagggtgaaggaggtattgcagcatctttggcacccaagtgctgccagagcatcc

SEQ ID NO: 88887 - DNA, 493 bp, Chicken  19866894394471_1
ggaaaagtttgagcttattagatctcagctatgaacgctgcatgggaggcagagggctacagtgatttctgtataatccctcccagggatgtgagctactaaatctgcaaatatttgccaaaggtaaacaaagagaaaagggttacttaagtggaaataatgcacagcgctgtgccatcctggaacaaacttaaggaagacggaacacttactggagcagagtctgctacagagaccagctccagggagcaagggtgagatcccattaaccacagtgctcagccctggatgagggtcctrtatgggacaattgtgtttctggcagctcctgaccagtggagtcctctccccatgcacatggggtcttgtccacctgggcagaagctgtaaggtgagatgccagatttcttggctccctcttcacagctccgcagaagcccttgggaccatcaatgtcaggctggaggaaacactgccatattcccagatcaaa

SEQ ID NO: 88888 - DNA, 600 bp, Chicken  19866894394472_1
gaaggcttaggtaacaaatactcataccttacattgacaaagatggaaaccagaactatctcattccatagcactttttcagactgtccaaaagaaaagcaacagctttatcagctaataaacttaagttcattacacttcacccaaggcattacactacccctactttgagcaccaggaaaagcatgaaaagagcactttcaggaaaaaaaaaaaaaaaagaaatgggaatagcaaagcagaattaagaatattaatatgtctgctcagtgcactaggtaggagacatgatctcccctractgcatttcacattatcaaacaaataaggagctttttcattgcaggagaagayctaatacaaggtaagtttacaatagctgtggactagtttctacagtctccttgcaaaactgaaacacaattcaacacaccaacttaaaaacaacaacaaaaacccataaaactaaccaccttgaaagactggaaagcaaagtacttttctcctctagtacaacactggatgacctggaggaccaagtcaagaggaatcctttctatctactactactgcagacatgctgctggttcatgtatgaac

SEQ ID NO: 88889 - DNA, 600 bp, Chicken  19866894394472_2
actatctcattccatagcactttttcagactgtccaaaagaaaagcaacagctttatcagctaataaacttaagttcattacacttcacccaaggcattacactacccctactttgagcaccaggaaaagcatgaaaagagcactttcaggaaaaaaaaaaaaaaaagaaatgggaatagcaaagcagaattaagaatattaatatgtctgctcagtgcactaggtaggagacatgatctcccctractgcatttcacattatcaaacaaataaggagctttttcattgcaggagaagayctaatacaaggtaagtttacaatagctgtggactagtttctacagtctccttgcaaaactgaaacacaattcaacacaccaacttaaaaacaacaacaaaaacccataaaactaaccaccttgaaagactggaaagcaaagtacttttctcctctagtacaacactggatgacctggaggaccaagtcaagaggaatcctttctatctactactactgcagacatgctgctggttcatgtatgaacacagattctctcaactgactttggcacatcccaaagcgctaccagtacaatctc

SEQ ID NO: 88890 - DNA, 600 bp, Chicken  19866894394474_1
aggagcacctcagagcctcaaaaaactgagcctggggtatccagatccgtaggtttttgctccatcttctcaaaaccacaacgctgattaattctcagactagtcatgaaagacctacgctacatcttcacttcactgcagccattttggctcagttgttctcctatttggctgctctgttgtttgtggggttctttttctgtttgtttgttcttcttttgatacaacacaaacaataaaccatttggtgaatgttaaaatatagcatttcccccactcaataggcaaagacactgcccrtgtcctgtagtcagggcacagatgccaaatgctatttgcacatggcagctttgtgcatgcagtaacttcaactatctgtagacataagcgatgctgtgtacagaaccgaagtcatgcccactgtcagtgccctcaacacaccatggaacctctcctacttcagtaacctcccgctccccacttccccttttttccaccaacccagtattctgaaactcctacaggggaaaaaaagttgtgatcctmtcaagtttcaccagaactgaactcttgttccaaatttcccttacacaacggaca

SEQ ID NO: 88891 - DNA, 600 bp, Chicken  19866894394474_2
ggtgaatgttaaaatatagcatttcccccactcaataggcaaagacactgcccrtgtcctgtagtcagggcacagatgccaaatgctatttgcacatggcagctttgtgcatgcagtaacttcaactatctgtagacataagcgatgctgtgtacagaaccgaagtcatgcccactgtcagtgccctcaacacaccatggaacctctcctacttcagtaacctcccgctccccacttccccttttttccaccaacccagtattctgaaactcctacaggggaaaaaaagttgtgatcctmtcaagtttcaccagaactgaactcttgttccaaatttcccttacacaacggacaactccagctttatacatacagtctgaacttgaagcaattgttctgtttgtacccatctcctacctattcgagtattggcaaatacatcagctagtgacccactggtccctttgccttctccatgggaaagtgtagaggatgctgatgaagatgtggatgacccctgaatagatcggttgatccaagactcagcattctgtaagctctgatgcaatgcagcagaaagagcagcttgacgccttagtg

SEQ ID NO: 88892 - DNA, 600 bp, Chicken  19866894394485_1
gttcttccatctctgctgacagtacctcatctgatattttctattcaactaatccataaggatgcctttcagaccacctagaagccttctgttcagtgctatcttttggctgaagctgtgacatactggtagggttacctatatagttcttgccttaagttgatccgccatattttatttaaagaaaaataaaaccaaccaaccaaccgaaacggaacgtaaattagaaaccacaatatgaaggagctgccactatccttgtccagtatgcaaggctggttcaacatctcagcccactcygttcttgaggcttgctaatgaggagaaaaaaaatgaaggggtgctgmcttttctagcatttttgttttgtctcyaaccatcttttaatagtctgtttagtgcacgatctcatgctaagtgattggcatcttctgttattctaaactggagtccctatagcagaaaagatttggggcttctgttagctttgcttgagaatgttctccagctttaaaatgtaagagagcacaactgaatcatagaactgtaggactgattaggttgaaggagatttctggaggtggtttcaatcgatgtcct

SEQ ID NO: 88893 - DNA, 600 bp, Chicken  19866894394485_2
actaatccataaggatgcctttcagaccacctagaagccttctgttcagtgctatcttttggctgaagctgtgacatactggtagggttacctatatagttcttgccttaagttgatccgccatattttatttaaagaaaaataaaaccaaccaaccaaccgaaacggaacgtaaattagaaaccacaatatgaaggagctgccactatccttgtccagtatgcaaggctggttcaacatctcagcccactcygttcttgaggcttgctaatgaggagaaaaaaaatgaaggggtgctgmcttttctagcatttttgttttgtctcyaaccatcttttaatagtctgtttagtgcacgatctcatgctaagtgattggcatcttctgttattctaaactggagtccctatagcagaaaagatttggggcttctgttagctttgcttgagaatgttctccagctttaaaatgtaagagagcacaactgaatcatagaactgtaggactgattaggttgaaggagatttctggaggtggtttcaatcgatgtcctactccaagcaggacyggttagagcagcctgactggggtcttgtccag

SEQ ID NO: 88894 - DNA, 600 bp, Chicken  19866894394485_3
cacctagaagccttctgttcagtgctatcttttggctgaagctgtgacatactggtagggttacctatatagttcttgccttaagttgatccgccatattttatttaaagaaaaataaaaccaaccaaccaaccgaaacggaacgtaaattagaaaccacaatatgaaggagctgccactatccttgtccagtatgcaaggctggttcaacatctcagcccactcygttcttgaggcttgctaatgaggagaaaaaaaatgaaggggtgctgmcttttctagcatttttgttttgtctcyaaccatcttttaatagtctgtttagtgcacgatctcatgctaagtgattggcatcttctgttattctaaactggagtccctatagcagaaaagatttggggcttctgttagctttgcttgagaatgttctccagctttaaaatgtaagagagcacaactgaatcatagaactgtaggactgattaggttgaaggagatttctggaggtggtttcaatcgatgtcctactccaagcaggacyggttagagcagcctgactggggtcttgtccagctgaacggatccaataacagagatcct

SEQ ID NO: 88895 - DNA, 449 bp, Chicken  19866894394485_4
taatgaggagaaaaaaaatgaaggggtgctgmcttttctagcatttttgttttgtctcyaaccatcttttaatagtctgtttagtgcacgatctcatgctaagtgattggcatcttctgttattctaaactggagtccctatagcagaaaagatttggggcttctgttagctttgcttgagaatgttctccagctttaaaatgtaagagagcacaactgaatcatagaactgtaggactgattaggttgaaggagatttctggaggtggtttcaatcgatgtcctactccaagcaggacyggttagagcagcctgactggggtcttgtccagctgaacggatccaataacagagatcctacagcctccccaggcccatttcagtgtcttgacaacccttagggtcaatataattttcctaatacataatcaaaatctcccatgctccac

SEQ ID NO: 88896 - DNA, 599 bp, Chicken  19866894394486_1
  misc_feature (1)..(198): n is any nucleotide
nnnnnnnnnnnnnnnnnnnnnnnnnnnnnnnnnnnnnnnnnnnnnnnnnnnnnnnnnnnnnnnnnnnnnnnnnnnnnnnnnnnnnnnnnnnnnnnnnnnnnnnnnnnnnnnnnnnnnnnnnnnnnnnnnnnnnnnnnnnnnnnnnnnnnnnnnnnnnnnnnnnnnnnnnnnnnnnnnnnnnnnnnnnnnnnnnnnnnnattaaaggagatggtactcggaccgctttacttttctaccctatgcttgttaatatgttttaagtttggctatgtatcatacaataacatttgaatttattrttcaatttaaattgtatttgagtgagaaatggtgtcttcaaagtcatattcctgcaagattcataaaaatagacagtctgaaatagaaggtgacaaagaaagaggaattagaagttcatctattacaagtagagaattgacaggaagggaataccagaagtcatatttcataaatcgtggacatttgattttggaactattttgttcttagtttggttggaggctggatagaatagaatcatagaatggcttggactggagaagacatgaaaaatcttctagttcacctacaccttcta

SEQ ID NO: 88897 - DNA, 600 bp, Chicken  19866894394490_1
ctgaaagtgagtaaatactttaaatgctctttggattctgtcaaatagcgaagtctttgtgtcttttcctgctttgaagtggtaaggaagtaattactaaaatcaaagtctattcagacaaaatagcattcctgcgaagaaggatgtgcatgaaaatctgctgcatggtgcccacctttgatttgatttttaagtttcattatgtatccaaatgtaaagatgccagcagaaattcaaacaagctgatgtcaaacttcagctattgcctcagcacagccgatacatgttttactgataacrtgtgtagttctaacagtggcaggctgaaatctawctgtagtggcaggaaaagctgtaatatttttgttctggagtcttccctgaagctgagattttgttgctcaagagaagggtagacagtcrttgtgattctagattctttagaaagttcaacttctagcttttccttctaaaatcttgttctctggctttgcatctgtattttttyttaagctcagaatagggccactgcctatattttcacatctggatatgattttgttgatacagcttgcctgtgtccatggttatattctgaga

SEQ ID NO: 88898 - DNA, 600 bp, Chicken  19866894394490_2
attctgtcaaatagcgaagtctttgtgtcttttcctgctttgaagtggtaaggaagtaattactaaaatcaaagtctattcagacaaaatagcattcctgcgaagaaggatgtgcatgaaaatctgctgcatggtgcccacctttgatttgatttttaagtttcattatgtatccaaatgtaaagatgccagcagaaattcaaacaagctgatgtcaaacttcagctattgcctcagcacagccgatacatgttttactgataacrtgtgtagttctaacagtggcaggctgaaatctawctgtagtggcaggaaaagctgtaatatttttgttctggagtcttccctgaagctgagattttgttgctcaagagaagggtagacagtcrttgtgattctagattctttagaaagttcaacttctagcttttccttctaaaatcttgttctctggctttgcatctgtattttttyttaagctcagaatagggccactgcctatattttcacatctggatatgattttgttgatacagcttgcctgtgtccatggttatattctgagattcagcttggataaattatttctgcatgtgaatc

SEQ ID NO: 88899 - DNA, 600 bp, Chicken  19866894394490_3
tagcattcctgcgaagaaggatgtgcatgaaaatctgctgcatggtgcccacctttgatttgatttttaagtttcattatgtatccaaatgtaaagatgccagcagaaattcaaacaagctgatgtcaaacttcagctattgcctcagcacagccgatacatgttttactgataacrtgtgtagttctaacagtggcaggctgaaatctawctgtagtggcaggaaaagctgtaatatttttgttctggagtcttccctgaagctgagattttgttgctcaagagaagggtagacagtcrttgtgattctagattctttagaaagttcaacttctagcttttccttctaaaatcttgttctctggctttgcatctgtattttttyttaagctcagaatagggccactgcctatattttcacatctggatatgattttgttgatacagcttgcctgtgtccatggttatattctgagattcagcttggataaattatttctgcatgtgaatcacgatgttcatataatctcacctttgccacttcatttcaggggctacctttctcttcagacttggtggagtgagggagagattcctgca

SEQ ID NO: 88900 - DNA, 600 bp, Chicken  19866894394490_4
caaatgtaaagatgccagcagaaattcaaacaagctgatgtcaaacttcagctattgcctcagcacagccgatacatgttttactgataacrtgtgtagttctaacagtggcaggctgaaatctawctgtagtggcaggaaaagctgtaatatttttgttctggagtcttccctgaagctgagattttgttgctcaagagaagggtagacagtcrttgtgattctagattctttagaaagttcaacttctagcttttccttctaaaatcttgttctctggctttgcatctgtattttttyttaagctcagaatagggccactgcctatattttcacatctggatatgattttgttgatacagcttgcctgtgtccatggttatattctgagattcagcttggataaattatttctgcatgtgaatcacgatgttcatataatctcacctttgccacttcatttcaggggctacctttctcttcagacttggtggagtgagggagagattcctgcagaaagttgcactatgaactacctttgacaagagattctttggtgtaaggccaggagtgaatataaccaggagaaaaggaaatttg

SEQ ID NO: 88901 - DNA, 599 bp, Chicken  19866894394500_1
  misc_feature (1)..(15): n is any nucleotide
nnnnnnnnnnnnnnnacccaaaggttggtagtaccccctctcaaacaggctgggcaaatccctctgggatggagaactacattcaccctgccttgcatgtagggaatgaaccctcttgcattctgtagcttttcagagatttactacatattatagtggtttaaatgtgttcagcgtaattgaactcaaggggaaatgcaagcatttaatgtctcatgatttctaaaatatgtaaaaaagtacatttttctcctctgttctgcagtagtcctgcccatggtgacaggtttgaggaacccrtagctgaggcttaatccactgagctgagaagctgcacgtgtgtgtgcgtgcaaaatcatyataatgatccctagtggaagggcaagtgggagaggawgggtgggtgacaagtggggcacgttcctgcaatgcagagataattggccctgcaatggtaatggcaagctggctgtcagcctctaacaaagtgtgcaagagatgaagtgacaccctgacaggtcccgccgacgtcctgcactgccctgcctcygccaaacaaatgattacagccttcctactgacatccaggaagctaaatt

SEQ ID NO: 88902 - DNA, 600 bp, Chicken  19866894394500_2
cctctgggatggagaactacattcaccctgccttgcatgtagggaatgaaccctcttgcattctgtagcttttcagagatttactacatattatagtggtttaaatgtgttcagcgtaattgaactcaaggggaaatgcaagcatttaatgtctcatgatttctaaaatatgtaaaaaagtacatttttctcctctgttctgcagtagtcctgcccatggtgacaggtttgaggaacccrtagctgaggcttaatccactgagctgagaagctgcacgtgtgtgtgcgtgcaaaatcatyataatgatccctagtggaagggcaagtgggagaggawgggtgggtgacaagtggggcacgttcctgcaatgcagagataattggccctgcaatggtaatggcaagctggctgtcagcctctaacaaagtgtgcaagagatgaagtgacaccctgacaggtcccgccgacgtcctgcactgccctgcctcygccaaacaaatgattacagccttcctactgacatccaggaagctaaattggaggtaatgactttcctgaagggcttggaatagggatggcacaagggagccttgcagcat

SEQ ID NO: 88903 - DNA, 600 bp, Chicken  19866894394500_3
tgtagggaatgaaccctcttgcattctgtagcttttcagagatttactacatattatagtggtttaaatgtgttcagcgtaattgaactcaaggggaaatgcaagcatttaatgtctcatgatttctaaaatatgtaaaaaagtacatttttctcctctgttctgcagtagtcctgcccatggtgacaggtttgaggaacccrtagctgaggcttaatccactgagctgagaagctgcacgtgtgtgtgcgtgcaaaatcatyataatgatccctagtggaagggcaagtgggagaggawgggtgggtgacaagtggggcacgttcctgcaatgcagagataattggccctgcaatggtaatggcaagctggctgtcagcctctaacaaagtgtgcaagagatgaagtgacaccctgacaggtcccgccgacgtcctgcactgccctgcctcygccaaacaaatgattacagccttcctactgacatccaggaagctaaattggaggtaatgactttcctgaagggcttggaatagggatggcacaagggagccttgcagcattacacctcgcttgggacgtcctctctattctgctctt

SEQ ID NO: 88904 - DNA, 455 bp, Chicken  19866894394500_4
tcctctgttctgcagtagtcctgcccatggtgacaggtttgaggaacccrtagctgaggcttaatccactgagctgagaagctgcacgtgtgtgtgcgtgcaaaatcatyataatgatccctagtggaagggcaagtgggagaggawgggtgggtgacaagtggggcacgttcctgcaatgcagagataattggccctgcaatggtaatggcaagctggctgtcagcctctaacaaagtgtgcaagagatgaagtgacaccctgacaggtcccgccgacgtcctgcactgccctgcctcygccaaacaaatgattacagccttcctactgacatccaggaagctaaattggaggtaatgactttcctgaagggcttggaatagggatggcacaagggagccttgcagcattacacctcgcttgggacgtcctctctattctgctcttgtccccat

SEQ ID NO: 88905 - DNA, 600 bp, Chicken  19866894394506_1
gtgctaaagaaaatgaccataaatgatttcctagtattctgttgaaaacagtagtagaaaaactttgcacataaattttgtttcttagaagtacttgtggtcttcacttcttttctgacatagctatgtatgtatctcatctgctgaggaatgttccttattcttactagctctgtctagtgggagaagggaaaatattggtgagatgtaggatgactctcataaacctctggtttgtgtactagctactgatatttttttccagttcgatgagaagcctacccttagactagctggagratgcctgtgtagagatgaaatgagttagtgagtgcagcctacagcacatcggatgcacgtgtgctggttcctcctgctaacatccacaaaggctctgcagggtgtttataatgcacccagacaagcattccttcacagtacctaacagacattgtatataccactgtagattgttttgtataatcttacctagagtttgactaatgggatcacattgtggcttgctctttccagcttcaggcaagttgccagtgtactctttccacttaatgcactaaaaatcacccagaataagatgca

SEQ ID NO: 88906 - DNA, 599 bp, Chicken  19866894394507_1
  misc_feature (1)..(110): n is any nucleotide
nnnnnnnnnnnnnnnnnnnnnnnnnnnnnnnnnnnnnnnnnnnnnnnnnnnnnnnnnnnnnnnnnnnnnnnnnnnnnnnnnnnnnnnnnnnnnnnnnnnnnnnnnnnnnntcctgtatgttattcttttctagcaaggctattgcaaagtatgattgtgtgtattaacatattagcaacggacctccagatggtaaagagctttccacttaggggcttgaagtctaaaaattagacttcattgcattcacaaatgcagtattttctgtaataccgttgcctctaaggatcctaaatagcwtcaaggctttgggctaatgacaaagggaccagggtttggtagtggtgaaagaagaaagagatgggatgtggcagaaatgggaagtgccrtaggtcagccctacttgcaccacccttgaaggtgaacccacaggtgcctctctrctttaagggcattgtaagcagtgctgccttctttttgctgtctccttgggagccctggcaaaaataaataaataaaaataagaaaaaaaaattctgagcatggaaacagaacaatctacaggggaaaggcagcaaggagagaaggtgccaaagaca

SEQ ID NO: 88907 - DNA, 599 bp, Chicken  19866894394507_2
  misc_feature (1)..(21): n is any nucleotide
nnnnnnnnnnnnnnnnnnnnntcctgtatgttattcttttctagcaaggctattgcaaagtatgattgtgtgtattaacatattagcaacggacctccagatggtaaagagctttccacttaggggcttgaagtctaaaaattagacttcattgcattcacaaatgcagtattttctgtaataccgttgcctctaaggatcctaaatagcwtcaaggctttgggctaatgacaaagggaccagggtttggtagtggtgaaagaagaaagagatgggatgtggcagaaatgggaagtgccrtaggtcagccctacttgcaccacccttgaaggtgaacccacaggtgcctctctrctttaagggcattgtaagcagtgctgccttctttttgctgtctccttgggagccctggcaaaaataaataaataaaaataagaaaaaaaaattctgagcatggaaacagaacaatctacaggggaaaggcagcaaggagagaaggtgccaaagacacctggaggagcctcttttgtttttcctggactcctcctgagctgagccgtgttccagtcccatttttctttcatcttctccaccttggg

SEQ ID NO: 88908 - DNA, 600 bp, Chicken  19866894394507_3
gcaaagtatgattgtgtgtattaacatattagcaacggacctccagatggtaaagagctttccacttaggggcttgaagtctaaaaattagacttcattgcattcacaaatgcagtattttctgtaataccgttgcctctaaggatcctaaatagcwtcaaggctttgggctaatgacaaagggaccagggtttggtagtggtgaaagaagaaagagatgggatgtggcagaaatgggaagtgccrtaggtcagccctacttgcaccacccttgaaggtgaacccacaggtgcctctctrctttaagggcattgtaagcagtgctgccttctttttgctgtctccttgggagccctggcaaaaataaataaataaaaataagaaaaaaaaattctgagcatggaaacagaacaatctacaggggaaaggcagcaaggagagaaggtgccaaagacacctggaggagcctcttttgtttttcctggactcctcctgagctgagccgtgttccagtcccatttttctttcatcttctccaccttgggttccttccacccccctctgctcctctcttcgagccttttcttgccattgatttgc

SEQ ID NO: 88909 - DNA, 599 bp, Chicken  19866894394508_1
  misc_feature (1)..(17): n is any nucleotide
nnnnnnnnnnnnnnnnnatagctctacgagcctaaaatgaaacataatcattcaagaaaaaaaaaaatgctgattctgacgttaagaaaaacaaaatcgaaaccttaagctctcaactttcagttcctaaactttgtcaaacatttttgaactagagcaatgacagcaagagtttgcatctgagcccctgtagcccgtgtaggctggagataatgaggttgctagcagaacaattctgcattcattgcaagtctttagcatccattttgttttgagccacagcttgttagtttctcaacygatgaatgaaattctaacccacacaatcttagaacacattttgttttgatctctccaaatcttgtttcatgataagactaggaaaccaaggcttatctctttcttctgcaatccaaatacgctcaagtctacctaaccaagccatgcatctctctcatttccttcaaagcycatttttttccatcatgtttgttaatcctattcaaaacaatttatctgatgacttaactcgtgcaacattcattaatattaactgaaagaatgctttgtacttgagtattccaagagtctgcatggat

SEQ ID NO: 88910 - DNA, 600 bp, Chicken  19866894394508_2
gtttgcatctgagcccctgtagcccgtgtaggctggagataatgaggttgctagcagaacaattctgcattcattgcaagtctttagcatccattttgttttgagccacagcttgttagtttctcaacygatgaatgaaattctaacccacacaatcttagaacacattttgttttgatctctccaaatcttgtttcatgataagactaggaaaccaaggcttatctctttcttctgcaatccaaatacgctcaagtctacctaaccaagccatgcatctctctcatttccttcaaagcycatttttttccatcatgtttgttaatcctattcaaaacaatttatctgatgacttaactcgtgcaacattcattaatattaactgaaagaatgctttgtacttgagtattccaagagtctgcatggattcagcccatgctcctacgtcacatgaaaattmaagtacaaaacaaatttaaacaggaagttcactaaccttcttcaaatgtttctaacttacattttctaatcataagccttayagggtgtgattttatgacagcacagaagccgccttcagatgatggaaactaaagattt

SEQ ID NO: 88911 - DNA, 600 bp, Chicken  19866894394508_3
gaacacattttgttttgatctctccaaatcttgtttcatgataagactaggaaaccaaggcttatctctttcttctgcaatccaaatacgctcaagtctacctaaccaagccatgcatctctctcatttccttcaaagcycatttttttccatcatgtttgttaatcctattcaaaacaatttatctgatgacttaactcgtgcaacattcattaatattaactgaaagaatgctttgtacttgagtattccaagagtctgcatggattcagcccatgctcctacgtcacatgaaaattmaagtacaaaacaaatttaaacaggaagttcactaaccttcttcaaatgtttctaacttacattttctaatcataagccttayagggtgtgattttatgacagcacagaagccgccttcagatgatggaaactaaagattttgtactgatgtcttttttttcacagcgagctgccctatggccttgctttgctgaaacctatcttacagacaattaatactcgtgatggacaaaccattctgactgatgctgtgcagtgactacagagcatggatctgggctacaggcaggctgccttctg

SEQ ID NO: 88912 - DNA, 600 bp, Chicken  19866894394508_4
caaatacgctcaagtctacctaaccaagccatgcatctctctcatttccttcaaagcycatttttttccatcatgtttgttaatcctattcaaaacaatttatctgatgacttaactcgtgcaacattcattaatattaactgaaagaatgctttgtacttgagtattccaagagtctgcatggattcagcccatgctcctacgtcacatgaaaattmaagtacaaaacaaatttaaacaggaagttcactaaccttcttcaaatgtttctaacttacattttctaatcataagccttayagggtgtgattttatgacagcacagaagccgccttcagatgatggaaactaaagattttgtactgatgtcttttttttcacagcgagctgccctatggccttgctttgctgaaacctatcttacagacaattaatactcgtgatggacaaaccattctgactgatgctgtgcagtgactacagagcatggatctgggctacaggcaggctgccttctgctctcatctctagccctctagctctccagctcctaccacagctttacttagtcagcaaaatgctccattacttctactttgg

SEQ ID NO: 88913 - DNA, 600 bp, Chicken  19866894394508_5
gatgtcttttttttcacagcgagctgccctatggccttgctttgctgaaacctatcttacagacaattaatactcgtgatggacaaaccattctgactgatgctgtgcagtgactacagagcatggatctgggctacaggcaggctgccttctgctctcatctctagccctctagctctccagctcctaccacagctttacttagtcagcaaaatgctccattacttctactttggcttgagacagccttgtcccactaactggtggctactgcagaacaccacagctacgttcgagacwctcaaaagcacaaccatactgaggtccgtgcaacagagcagttttctttcaaggmgagctcagatgggtcctgaaaccccatggcagtatacacagatcactgtttataaagtttctacaagaaacgcaaaatgcaccaagtaagttttttgcttaactggaggaagtatgattatgcatcttcactgataaggatcagtcacagaataattagatatgagatacaagttgaagttaagaaaagcaacagctcattagaagggctcatgtattaagagggaagtgtaccaacgaaaaaaa

SEQ ID NO: 88914 - DNA, 600 bp, Chicken  19866894394508_6
cttacagacaattaatactcgtgatggacaaaccattctgactgatgctgtgcagtgactacagagcatggatctgggctacaggcaggctgccttctgctctcatctctagccctctagctctccagctcctaccacagctttacttagtcagcaaaatgctccattacttctactttggcttgagacagccttgtcccactaactggtggctactgcagaacaccacagctacgttcgagacwctcaaaagcacaaccatactgaggtccgtgcaacagagcagttttctttcaaggmgagctcagatgggtcctgaaaccccatggcagtatacacagatcactgtttataaagtttctacaagaaacgcaaaatgcaccaagtaagttttttgcttaactggaggaagtatgattatgcatcttcactgataaggatcagtcacagaataattagatatgagatacaagttgaagttaagaaaagcaacagctcattagaagggctcatgtattaagagggaagtgtaccaacgaaaaaaagcataaggaaaaaaggcgtaagagcagatcagttctttgcctccccccagagacc

SEQ ID NO: 88915 - DNA, 599 bp, Chicken  19866894394510_1
  misc_feature (1)..(40): n is any nucleotide
nnnnnnnnnnnnnnnnnnnnnnnnnnnnnnnnnnnnnnnnccaaaccccatgagaacaccacagtggccaccaggactcctttggagtcaccaggaccccctgtagggccaccaaacccccttgtaggaccaccaaacctcacagggacaccacaatgaccaccagagctcctttggggtcaccaaacccccctgtagggccaccaactcccttgtagggccaccaaaccccctgtagggccaccagacctcacagggacaccacagtggccaccagaactcctttggggtcaccaaacycccctgtagggccaccaaaccccttgtagggcaaccggagctcatgagaataccacagtggccaccagagatcctttggggtcaccaaacgcccttgtagggccaccaaacctcacagggacaccacagtgaccaccaaagctcctttggggtcaccaaacctccctgtagagccaccaaacctcacagggcaccacagtggccaccaaagctcctttggggccaccaaacccccctgtagggccaccaactcccctgtagggccaccaaaccccatgagaacaccacagtggccacca

SEQ ID NO: 88916 - DNA, 599 bp, Chicken  19866894394512_1
  misc_feature (1)..(185): n is any nucleotide
nnnnnnnnnnnnnnnnnnnnnnnnnnnnnnnnnnnnnnnnnnnnnnnnnnnnnnnnnnnnnnnnnnnnnnnnnnnnnnnnnnnnnnnnnnnnnnnnnnnnnnnnnnnnnnnnnnnnnnnnnnnnnnnnnnnnnnnnnnnnnnnnnnnnnnnnnnnnnnnnnnnnnnnnnnnnnnnnnnnnnnnnntattttttctgtattctaagagaaaatgaagttaacgctacatttttcagtcaaaagagttctctaataagggatttctcagccctagggctaacacatccccctgtgagatttmagaagcagagattttgccctgattccttatcagtgagagcatatactaaatatatatattcaataaagtgaaggcaccaacagaataggtttaggacgtatgcacagctaaggcaagtaatttacaggtccagaggcagttcagttaagaatcagacagggtatatttttattcatcattttttgttattattatttacagaacagatttcaacttatccatttaccagcatgtcatatctgccctctgcttttctcattagggattatcttgtatgtacacagatggctacagagctc

SEQ ID NO: 88917 - DNA, 600 bp, Chicken  19866894394514_1
gttcaaaaatgttacactgtgaaatctgaactgtttgcagtccagccagagagatgaattcactgattcctaactcaaagcataagtggaaacttgctcttccagatatatcagcatctaagtgtactacagcaaatctggaattttgttgtcctacatgattttcctctccttttctcactcaggtaaaaggactggtaggctgttctgcagtcattttttcatggcctttagattttccattaggctgagaattcctactcaagcagaagtcaatgaagtttattctgtagaatgagsatcaagctgagagttgactagtagtatttccttttctgctgtgccactgcattatcaaatgcatatcaagcayttacggtaaatggctcttttcacttcaaccatctttatttattcagattgtgtccttatcctgcttcttgtccaagcagttgaactagctcaacagatgaggtgagcagaaagcatgmgcttcagcaaccactacagttcaactcaagcattttaagaatgaaccttgaggcacaatatactcctgtatgctgtttcagcccacaagatagaaagatcagaggtaac

SEQ ID NO: 88918 - DNA, 600 bp, Chicken  19866894394514_2
ctcaaagcataagtggaaacttgctcttccagatatatcagcatctaagtgtactacagcaaatctggaattttgttgtcctacatgattttcctctccttttctcactcaggtaaaaggactggtaggctgttctgcagtcattttttcatggcctttagattttccattaggctgagaattcctactcaagcagaagtcaatgaagtttattctgtagaatgagsatcaagctgagagttgactagtagtatttccttttctgctgtgccactgcattatcaaatgcatatcaagcayttacggtaaatggctcttttcacttcaaccatctttatttattcagattgtgtccttatcctgcttcttgtccaagcagttgaactagctcaacagatgaggtgagcagaaagcatgmgcttcagcaaccactacagttcaactcaagcattttaagaatgaaccttgaggcacaatatactcctgtatgctgtttcagcccacaagatagaaagatcagaggtaactgaattgtggttcagtattactgagataggactaccaagaatactgacatcctggataagctctgcataacac

SEQ ID NO: 88919 - DNA, 600 bp, Chicken  19866894394514_3
ggactggtaggctgttctgcagtcattttttcatggcctttagattttccattaggctgagaattcctactcaagcagaagtcaatgaagtttattctgtagaatgagsatcaagctgagagttgactagtagtatttccttttctgctgtgccactgcattatcaaatgcatatcaagcayttacggtaaatggctcttttcacttcaaccatctttatttattcagattgtgtccttatcctgcttcttgtccaagcagttgaactagctcaacagatgaggtgagcagaaagcatgmgcttcagcaaccactacagttcaactcaagcattttaagaatgaaccttgaggcacaatatactcctgtatgctgtttcagcccacaagatagaaagatcagaggtaactgaattgtggttcagtattactgagataggactaccaagaatactgacatcctggataagctctgcataacacagataaacaagaaccctgtccctggagcttgtcagcatctcattttcccaggtaaatgactttttccagaattattactttttccagaattataggctgtaagtttattcaagctgct

SEQ ID NO: 88920 - DNA, 600 bp, Chicken  19866894394518_1
gtagcctagaaaagataagatagccttctgctaatgcgagtgaataatgttctacataattgatgagcatgccactattataatggatttttccaagagtctgattagaattcatacagcagaaaagcattttattcattacagaacaatttaattacctttggctgccttttactggttattgcaggaactcttcgcttcccatcactttgtccaataaaataccaagctcagaagttattttcaactactttcagtagttgacagcatgctgtagcctaagcacatgagcagagcagraacgcatgctgctataaatgacccaacgtacctaatttaggtaactgacagatctatttaagtgcacaactgtgttttgtaatattccatcaattttccaccagcaaagtcttcgggaagagaagaaaagagtactaacctttctgggaaagcagtttgtcaaaagattcaccccacttcattgcttcctcaggagacacactgcgtaagaaacaaaatatggttttgtggaactgtgcatactatgtattcgtcaagctattttgatatgctatccattactattattgctctggacca

SEQ ID NO: 88921 - DNA, 600 bp, Chicken  19866894394528_1
aaatcactatatgctcacaacttagcttttaagtcaaaaatgccacagaatacagttgacttggactcctgaatgcatctctcctaatatacccatatctggggcacaaagggcagtgctgaagcacatgtggggtttttcttgtgatcagttttgtgttgttgtttttgaatacacatggatgattctaggagcagaggagccccagtgcctcaccgctgttagcagaccagtccatctccttggccatcttctacctagaaagccaatgttcctatcctatcctttaggtgttgtacygagagacatggtttagtgggaaacgttggtgataggtggatggttggactggataatctcaggtcttttccaaccttggtgattctacgattctatagaagtgcagaacaaatcagtttaggctgtttaggaattttgttagaaacaaagttcaaattcacaatactatgcatcattctattcacatttagtttgcagaaaacatttgtaaaactaaaaagttacatcagagggctgcaaaaataattcaagtttttaggaaggagatgatagtgaggggagctcagctggcctctacag

SEQ ID NO: 88922 - DNA, 600 bp, Chicken  19866894394529_1
gacaagatggcattagtcatagcactttcttagcctccatttaatctaaatttcaccctcttcccagagatctgctttggctgattaaatgagaactcatcatgtgtcactcatgatctgcacaacacctctgcaggctcacttcacattatgcctacagacagttgccccagaaggaaatgagcagtatccagggtgctacatctaagattcactttggaaggttatgaataacttactgcagtacttgaaaaaaaagataataaaaaaattaagactgatcaacttcacacctgacgrttaccttattctggaagcatgaagaactgttatctatatgccccaaagaccctgtccagtttgacagcaaccccttgctgctggattcaccttccagtcccaaagtacatcagcagtcagaactgtcatttatacttagtgactcaattttggcatttaatagggaaaacattcatctttcaatagctgctcattcattgtaatttccattacaatggctacagaactcttgggcactgaagtagactttgaaagagtgtgaacgtgactggaggcagacctggcagactgatgcaggtt

SEQ ID NO: 88923 - DNA, 600 bp, Chicken  19866894394532_1
tcttatactcgattgaagttgtatgagatctgctctgaaagtattacctcctcctattttgttggcccacgacatcagaggcggatgttggtggtttggcagtaaaggttgaaccttccaccaatactttgttttgttctgttcccttgtgaaagatggcagcggaggagcagtctgacagaatagcacctgacacggaagtgcaaatgaagcaaaggtgtggaattgacttcctccacgtggaaaatgtggcactcactgacattcatcaatgcttgctgaatgtttacggtgaccaargagtggacgcgaacacagtgaagtagtgggtgctgtgactgaacagtggcaacagtgacagggggtcaccttcactgacgcacagatgttaacaagtgtggcaagcaggctcttgctctttgctgacaaaaattcatagctaacagtcactatgttgaaaaaacggcattttgtagctgagaatttgctctatcaaatagcaaggctctgagatgaaaggtggggctgcaacttgcttttcactgcaatccycatgtcaaatattgttgtaattgtaactgatacttcacttctattgtc

SEQ ID NO: 88924 - DNA, 600 bp, Chicken  19866894394532_2
cactcactgacattcatcaatgcttgctgaatgtttacggtgaccaargagtggacgcgaacacagtgaagtagtgggtgctgtgactgaacagtggcaacagtgacagggggtcaccttcactgacgcacagatgttaacaagtgtggcaagcaggctcttgctctttgctgacaaaaattcatagctaacagtcactatgttgaaaaaacggcattttgtagctgagaatttgctctatcaaatagcaaggctctgagatgaaaggtggggctgcaacttgcttttcactgcaatccycatgtcaaatattgttgtaattgtaactgatacttcacttctattgtccctgactggtcagtttatcatttggtgaccccacgcttatctctgtatacatttgaaatgagatttcataataacacaaatacctcaggaagtttcaaatttatgctatgggcacatagaaagataattaatagtttccttatccacagcatgaagcatattggatgagatcaggacgatacctgtcaaaacatgtctaaggcatataaaaagaataacatttttctgtctatcattgaaaatgcaaataat

SEQ ID NO: 88925 - DNA, 600 bp, Chicken  19866894394535_1
cagctcagcggagttgaagacttagttgtgaaaacccatgctgattggacaagggataaaagcagcagctgtggcagtagtttagtaggttagcatgcctctgtgtattttgggggtttgtcgctgtcaacccattaaaatggtttgaggctgaattgcttttattgaacaggcggtaggcaaaacagagatcacagacaaaaaataacctctctgctcacgtctaagatttatcataaatagaatgtgttaaagtgaaacaattggactaaattgtaacaaaatgaggcagtttagtaycctgttctggaagctgagaatacaccttatattcatgtagtgctgtgttgtttgttttaggattgcctgagagaagaactaaggcttatcagccaygcttcacygtatgatgattatctgtaagtgtgatggcagaaaaggcagcgttgtcctttcacgtctagcaagcaaagagcaatcttgtcctgcgtatagccccagtatagtcctagtctctcttcttctttctctgtcagtgtagtttctgcagaggaagggggctgaggcagaaagaactaacttgtcagttctcattaatct

SEQ ID NO: 88926 - DNA, 600 bp, Chicken  19866894394535_2
gcctctgtgtattttgggggtttgtcgctgtcaacccattaaaatggtttgaggctgaattgcttttattgaacaggcggtaggcaaaacagagatcacagacaaaaaataacctctctgctcacgtctaagatttatcataaatagaatgtgttaaagtgaaacaattggactaaattgtaacaaaatgaggcagtttagtaycctgttctggaagctgagaatacaccttatattcatgtagtgctgtgttgtttgttttaggattgcctgagagaagaactaaggcttatcagccaygcttcacygtatgatgattatctgtaagtgtgatggcagaaaaggcagcgttgtcctttcacgtctagcaagcaaagagcaatcttgtcctgcgtatagccccagtatagtcctagtctctcttcttctttctctgtcagtgtagtttctgcagaggaagggggctgaggcagaaagaactaacttgtcagttctcattaatctggatcttgcatggtgtgggtttagatttcatttttaaactgctcttctcagccttctctactaacagagcttcctctaaaaatcttgtgagttcra

SEQ ID NO: 88927 - DNA, 600 bp, Chicken  19866894394535_3
gtattttgggggtttgtcgctgtcaacccattaaaatggtttgaggctgaattgcttttattgaacaggcggtaggcaaaacagagatcacagacaaaaaataacctctctgctcacgtctaagatttatcataaatagaatgtgttaaagtgaaacaattggactaaattgtaacaaaatgaggcagtttagtaycctgttctggaagctgagaatacaccttatattcatgtagtgctgtgttgtttgttttaggattgcctgagagaagaactaaggcttatcagccaygcttcacygtatgatgattatctgtaagtgtgatggcagaaaaggcagcgttgtcctttcacgtctagcaagcaaagagcaatcttgtcctgcgtatagccccagtatagtcctagtctctcttcttctttctctgtcagtgtagtttctgcagaggaagggggctgaggcagaaagaactaacttgtcagttctcattaatctggatcttgcatggtgtgggtttagatttcatttttaaactgctcttctcagccttctctactaacagagcttcctctaaaaatcttgtgagttcracaagtcgg

SEQ ID NO: 88928 - DNA, 600 bp, Chicken  19866894394535_4
ygcttcacygtatgatgattatctgtaagtgtgatggcagaaaaggcagcgttgtcctttcacgtctagcaagcaaagagcaatcttgtcctgcgtatagccccagtatagtcctagtctctcttcttctttctctgtcagtgtagtttctgcagaggaagggggctgaggcagaaagaactaacttgtcagttctcattaatctggatcttgcatggtgtgggtttagatttcatttttaaactgctcttctcagccttctctactaacagagcttcctctaaaaatcttgtgagttcracaagtcggcattgcccatccactctgtagcacactggggaaaaataccattaaaaaagcaggaggctgtctctatcgcttcattctgtacagcctgaaagcagtagggaaagtaaaggaaagggagagaggctctctctgtctcctttcagtgtcagactagcattccactggaatgttattatttccagtgcttggactgatttatacttgatagtaatggagaatgctttagggaataacacatggcagcatttgcacgtgtttttgtatctgtaaactctgaacttccccatgagg

SEQ ID NO: 88929 - DNA, 578 bp, Chicken  19866894394549_1
gagacaatttctagcttgtgaggagaaggaagcaactgtgtttctactgcctttcatagttatttccataatctatcatgtaattcctattctgtgaataaaaggtggacctacacccaggcaactaatatcaaaataaaggttaacaaagggtgatagaacagattagagaatacagacttcattaatctagggaaagagccagaagttgcaaaagcaaaaatgtttcagatagagttggatgacttgtgaaaactggtacaaattgcagaacaaatggttagaagaaagaaaagagcwtaacaggtacataatatacycacttctgctttttggcggttttttgttttcattttctctaattgctttttttcctttggaggcttgtaggtgcttggaggaacctaaaaaaaaaaaggcaataatatccacaatatgggatataaaacattcaaagtgatatagtcttgcaatgagaacactgcattcacctccactataaatcagctgcagatatttttaaaatattggttattttctattagtgccaacacagaagccatggacagattccaatt

SEQ ID NO: 88930 - DNA, 558 bp, Chicken  19866894394549_2
aggagaaggaagcaactgtgtttctactgcctttcatagttatttccataatctatcatgtaattcctattctgtgaataaaaggtggacctacacccaggcaactaatatcaaaataaaggttaacaaagggtgatagaacagattagagaatacagacttcattaatctagggaaagagccagaagttgcaaaagcaaaaatgtttcagatagagttggatgacttgtgaaaactggtacaaattgcagaacaaatggttagaagaaagaaaagagcwtaacaggtacataatatacycacttctgctttttggcggttttttgttttcattttctctaattgctttttttcctttggaggcttgtaggtgcttggaggaacctaaaaaaaaaaaggcaataatatccacaatatgggatataaaacattcaaagtgatatagtcttgcaatgagaacactgcattcacctccactataaatcagctgcagatatttttaaaatattggttattttctattagtgccaacacagaagccatggacagattccaatt

SEQ ID NO: 88931 - DNA, 600 bp, Chicken  19866894394553_1
ccccgtttgctctctccatgaggtttcctcagttttgtcagaggtgtttgtcaccacaggagcccaggtgatggaattcagctcccctgtattgcagcttttcttgttatttatttttaaggatgatacctccctcagtaattgaactcagcctttcttgttacttgttcctcttagaagactaagaattagaacactaattcttagaacactagaattttaccacttgttagctcctcatagttcattaccagattttcttctttatctcccccctaaggagggcgcagtcactgaagwggcttgaggacatagtgttttaaaggaagtgactgcagtgttaagaactgtcatgtttgattcaggcaacacctgatgttcctgcacgcaataaacctagaattcaagagtaggacacttagctctggcctgtcagaagaaatgttctggatgcataatcagtaaagccctggataaactgcaaaatcccatagttttatatgtggtcagttctgtagcttttttgtatttatgaagatttcttatcagaatgcatatataaacaaaaaatcacagtataaaattaaaatctctcattat

SEQ ID NO: 88932 - DNA, 600 bp, Chicken  19866894394581_1
tggagctgcttctgatttcaccagactgggcaaaggaacccctgaacctcaacctaagtcttggcaaatatgtaaaggaattactgactttccaaccacttgtctattatctgtaattttaagcctacacacatgctctgttaatgagcttacacagctttcatcattctttctaagatgtagtaaaaaaaaaatctactctctggaagtgatggtgatatactgaataatggagaactaagcaagtttggaggaggccaacaagacgcagggatagtgctggtagcaaaagcattttcyagaatcccatgttatagtcttttacattagggcactctctgtacaataaatgatgccttaggtccttgatcaaaaggtgcctaagacagtgaggcaacagtaaatgaagtaatctgcaagggaagacaatgtgtgatgtgtagactttcactgtcattttttccaacagaccacctgtgctatgtgaaggtttgtatcctcaatacagacataattcatataaaggtcatgacacaagttacgactaacagtaccagaaaggttatgtcagcactaaggtcacctggtaaatagcaaatt

SEQ ID NO: 88933 - DNA, 600 bp, Chicken  19866894394584_1
ttatgctaatataaatatctcctcttctagtttaaagccattcctccttgtcctatcactatctacccatgttaaagtcagtcccaatagtacaatttgtttacctaatgccagtatgtttttttctgttattctttatttttattttacttaaattgttgagcatttcaaactatcaacataactaaaacaatacttagcattttaagttatgatttcttttctttattgtgccataatatacttttatttggttagctgttggatcaaggagaaatagaaacagcaagcttcttgccrttgtgactactgaatacaggagtttctagtgaacttggtaataaaggtaatggaaaagactaacgtactattaaagctaataggaatcctaggtccctgagatctctgtgaaaatctaaagaaaaytgtcgttcatggaggaggaccaagttagggaacttttaaataagctgaactgtaaccaagtctatgccagccacaaatgccaagggagatgtctgatgtcattttgagaccacttttgattatctttgaaaggtcatggagactgggaattttctgatgactagaagaaagaaa

SEQ ID NO: 88934 - DNA, 600 bp, Chicken  19866894394584_2
tgttattctttatttttattttacttaaattgttgagcatttcaaactatcaacataactaaaacaatacttagcattttaagttatgatttcttttctttattgtgccataatatacttttatttggttagctgttggatcaaggagaaatagaaacagcaagcttcttgccrttgtgactactgaatacaggagtttctagtgaacttggtaataaaggtaatggaaaagactaacgtactattaaagctaataggaatcctaggtccctgagatctctgtgaaaatctaaagaaaaytgtcgttcatggaggaggaccaagttagggaacttttaaataagctgaactgtaaccaagtctatgccagccacaaatgccaagggagatgtctgatgtcattttgagaccacttttgattatctttgaaaggtcatggagactgggaattttctgatgactagaagaaagaaaatgtcatccctgtcttcaagaagagcaagaaagagggtccagagaactactgaagttagcctcactgattgcaagctgtatgatgcagggaagaatctatccaggaaagtacttttggacacacga

SEQ ID NO: 88935 - DNA, 599 bp, Chicken  19866894394585_1
  misc_feature (1)..(262): n is any nucleotide
nnnnnnnnnnnnnnnnnnnnnnnnnnnnnnnnnnnnnnnnnnnnnnnnnnnnnnnnnnnnnnnnnnnnnnnnnnnnnnnnnnnnnnnnnnnnnnnnnnnnnnnnnnnnnnnnnnnnnnnnnnnnnnnnnnnnnnnnnnnnnnnnnnnnnnnnnnnnnnnnnnnnnnnnnnnnnnnnnnnnnnnnnnnnnnnnnnnnnnnnnnnnnnnnnnnnnnnnnnnnnnnnnnnnnnnnnnnnnnnnnnnnnnnnnnnnnnnnnnnnnntttggacacccatgatagatgttcagggccagataagygtctgtactaaagatggaagtcacagactcgacactgtgaatcagaaattgatcagaattactctaamgtgtataaaaatatataagaggaatggattacttcgtataaaacatttaaacataatgccaagtaaagaagaaaaagattgctttgtagttggagaataaattattttgtcacagagtttagactcaggaagaattgctattctgtgccctatcacttaaaataaatcaattctytgtgcttcatctccttcaattctgaggttttagtacctagaaaaggtctgtgtagt

SEQ ID NO: 88936 - DNA, 599 bp, Chicken  19866894394585_2
  misc_feature (1)..(194): n is any nucleotide
nnnnnnnnnnnnnnnnnnnnnnnnnnnnnnnnnnnnnnnnnnnnnnnnnnnnnnnnnnnnnnnnnnnnnnnnnnnnnnnnnnnnnnnnnnnnnnnnnnnnnnnnnnnnnnnnnnnnnnnnnnnnnnnnnnnnnnnnnnnnnnnnnnnnnnnnnnnnnnnnnnnnnnnnnnnnnnnnnnnnnnnnnnnnnnnnnntttggacacccatgatagatgttcagggccagataagygtctgtactaaagatggaagtcacagactcgacactgtgaatcagaaattgatcagaattactctaamgtgtataaaaatatataagaggaatggattacttcgtataaaacatttaaacataatgccaagtaaagaagaaaaagattgctttgtagttggagaataaattattttgtcacagagtttagactcaggaagaattgctattctgtgccctatcacttaaaataaatcaattctytgtgcttcatctccttcaattctgaggttttagtacctagaaaaggtctgtgtagtgcttttgaaagtggccatgtttcaaactaatagtgttcttttcctgtagtcttctgagctgagaaaaa

SEQ ID NO: 88937 - DNA, 599 bp, Chicken  19866894394585_3
  misc_feature (1)..(19): n is any nucleotide
nnnnnnnnnnnnnnnnnnntttggacacccatgatagatgttcagggccagataagygtctgtactaaagatggaagtcacagactcgacactgtgaatcagaaattgatcagaattactctaamgtgtataaaaatatataagaggaatggattacttcgtataaaacatttaaacataatgccaagtaaagaagaaaaagattgctttgtagttggagaataaattattttgtcacagagtttagactcaggaagaattgctattctgtgccctatcacttaaaataaatcaattctytgtgcttcatctccttcaattctgaggttttagtacctagaaaaggtctgtgtagtgcttttgaaagtggccatgtttcaaactaatagtgttcttttcctgtagtcttctgagctgagaaaaatccaggcctgctaatggggaacagggaataagagattattttgcagatttctcccttgtcygaaatgatragggattggtgagcataacaytgagcagagaaaagagaaggaagtgacaaaggttataatgtaacagcccagtgaggaaaaataaaatgtaaaaaggagtgggaa

SEQ ID NO: 88938 - DNA, 483 bp, Chicken  19866894394585_4
aagtaaagaagaaaaagattgctttgtagttggagaataaattattttgtcacagagtttagactcaggaagaattgctattctgtgccctatcacttaaaataaatcaattctytgtgcttcatctccttcaattctgaggttttagtacctagaaaaggtctgtgtagtgcttttgaaagtggccatgtttcaaactaatagtgttcttttcctgtagtcttctgagctgagaaaaatccaggcctgctaatggggaacagggaataagagattattttgcagatttctcccttgtcygaaatgatragggattggtgagcataacaytgagcagagaaaagagaaggaagtgacaaaggttataatgtaacagcccagtgaggaaaaataaaatgtaaaaaggagtgggaagagacataactgaagatgcattgtttgtttttgaaagaaagaggttaagaagagtagcaggggagtggg

SEQ ID NO: 88939 - DNA, 474 bp, Chicken  19866894394585_5
agaaaaagattgctttgtagttggagaataaattattttgtcacagagtttagactcaggaagaattgctattctgtgccctatcacttaaaataaatcaattctytgtgcttcatctccttcaattctgaggttttagtacctagaaaaggtctgtgtagtgcttttgaaagtggccatgtttcaaactaatagtgttcttttcctgtagtcttctgagctgagaaaaatccaggcctgctaatggggaacagggaataagagattattttgcagatttctcccttgtcygaaatgatragggattggtgagcataacaytgagcagagaaaagagaaggaagtgacaaaggttataatgtaacagcccagtgaggaaaaataaaatgtaaaaaggagtgggaagagacataactgaagatgcattgtttgtttttgaaagaaagaggttaagaagagtagcaggggagtggg

SEQ ID NO: 88940 - DNA, 453 bp, Chicken  19866894394585_6
tggagaataaattattttgtcacagagtttagactcaggaagaattgctattctgtgccctatcacttaaaataaatcaattctytgtgcttcatctccttcaattctgaggttttagtacctagaaaaggtctgtgtagtgcttttgaaagtggccatgtttcaaactaatagtgttcttttcctgtagtcttctgagctgagaaaaatccaggcctgctaatggggaacagggaataagagattattttgcagatttctcccttgtcygaaatgatragggattggtgagcataacaytgagcagagaaaagagaaggaagtgacaaaggttataatgtaacagcccagtgaggaaaaataaaatgtaaaaaggagtgggaagagacataactgaagatgcattgtttgtttttgaaagaaagaggttaagaagagtagcaggggagtggg

SEQ ID NO: 88941 - DNA, 600 bp, Chicken  19866894394589_1
tgaatcgtgtggatgcgcccctgtcagccccacgttcctgggcagctgtgatgagtgcaaggctttgcagactctcctgggaggatgggctgtggatgaggatttctagtggctgctcaagtggtctttgttaaattggtcacggtgggctgcgtcgcctgctgtccacacggttctgtggtttatttgtcaggctccagaagagagcaggtatgaatctctcatttaaaggccatgtatttctatgacatcttttgtggttttaaggctgtttcttacattcctggataatgaagtttkgggtttgtttttcttttcttccaagctcaacgaagccaatttgatgcactttggaaagcaattgaaaacaggcttctccactgcaaattctgccaaggttcaggcgccctgggaacaaagcatcaaggataaaatcctctgacccacactcagaaagttttttttatccctcctgaaggccagcctgtgctgtatggagcacaggctgaccttcaggagcccaggttgtgctgtaygtccacgtgatgcgtgagcacatacattgtttgctccttggtgtcctggaatgagcagcacatc

SEQ ID NO: 88942 - DNA, 574 bp, Chicken  19866894394589_2
gtatttctatgacatcttttgtggttttaaggctgtttcttacattcctggataatgaagtttkgggtttgtttttcttttcttccaagctcaacgaagccaatttgatgcactttggaaagcaattgaaaacaggcttctccactgcaaattctgccaaggttcaggcgccctgggaacaaagcatcaaggataaaatcctctgacccacactcagaaagttttttttatccctcctgaaggccagcctgtgctgtatggagcacaggctgaccttcaggagcccaggttgtgctgtaygtccacgtgatgcgtgagcacatacattgtttgctccttggtgtcctggaatgagcagcacatctctgaagccttttaatgggtgtttagttagctcgcctgctgggaaatgtacctaatttctagagaagacgtgctgtactgtcagtttgtcaagctggcaaagcggagcagtatggatggttttcatttcaggctgaattgaagccgtagcttcaagtgcagcattttttacagcatgagctggagaagttctctttagaaaaggcttacc

SEQ ID NO: 88943 - DNA, 600 bp, Chicken  19866894394590_1
ataaaagttttcccgtcgtttatgtgacgtagagctcatgactatgttaactataggtgctgtttgacagtgtactgttagttcatttgaaatctatacaattattgtgtgcttaattgactgaggttgtgttttttgtatttttcctcctaggcaagaacttctaatatattcctaagtatttttgatattttgcatattttatatatatatcgtgtatagtaagcaactatttgaaaaaataaaatgcattttcatttattttcttgtttcatcagctcacggccaggaagacccccraagcgttcacttggagttgcgatacaggaaaacgcacgccttctgccccatggagttccaggcctcttatcaccaggccttatctctccgacaggtaataaaatccatcagatgatcagcctcatctcttcatactgcacggcagttaaaataaactaatattgatctaagtgccttgtccttcagggctttttcaagctttaccagaggttacattattggattttttgagtgttcatgaaaattctgttttgttgctgcagtgactgaaatctagtggatttgtaatttagttctgta

SEQ ID NO: 88944 - DNA, 600 bp, Chicken  19866894394590_2
gcacgccttctgccccatggagttccaggcctcttatcaccaggccttatctctccgacaggtaataaaatccatcagatgatcagcctcatctcttcatactgcacggcagttaaaataaactaatattgatctaagtgccttgtccttcagggctttttcaagctttaccagaggttacattattggattttttgagtgttcatgaaaattctgttttgttgctgcagtgactgaaatctagtggatttgtaatttagttctgtattaattgtaatttccttacaggaaattccattwaatgttattttagtaaaaggggggaggaaaaaaagacaaaatgaaaattgtctcagagagccctgtagcatgcatttcttcctttcaaatgcatgtgtgttttagttctcatgggatatgaacagcgtggctaatgtgtattgtgttgtaacatcgttaatgtatgctgggaagatagcaaaatgcttttacgagcggtagaagaaacactcaaaaagcagataagttcatgttaccacagtggattctattttaataatctgcgttaaatatcataatataaaaagaagcataaaaacg

SEQ ID NO: 88945 - DNA, 599 bp, Chicken  19866894394592_1
  misc_feature (1)..(90): n is any nucleotide
nnnnnnnnnnnnnnnnnnnnnnnnnnnnnnnnnnnnnnnnnnnnnnnnnnnnnnnnnnnnnnnnnnnnnnnnnnnnnnnnnnnnnnnnnncagaacgtgaagatgtgtcacttggctcagatgcataagcgaggccttacctgtagagcaagtgtgatggtgagaagtcctaacgccaaggccatagcagtgtgggatttccatagcagtgccttcctcccagcacggtccaccaggaagccctgcaaacaggagcatctgctgtcagcactcaggacaggtctcacaggagtggacaarctgctcagcagctgccttcagcagccaggcaggggatctgcagggagctggccctaggaagtgccccctacttgtcctactggcaggtgagatggtggtgtgtgatcagtgcaaagtactcctgttggtttgctgaagggggctgattcctggatctccatttgcagtagtttctaaaggttgaaatgaaacaggcactgcagcagaatgaaattctgctgaagatccacttacacacagagctgtggtgaggatctcggtgatcccaactcccagggagacgtagcgggtttgggaag

SEQ ID NO: 88946 - DNA, 600 bp, Chicken  19866894394592_2
ggctgattcctggatctccatttgcagtagtttctaaaggttgaaatgaaacaggcactgcagcagaatgaaattctgctgaagatccacttacacacagagctgtggtgaggatctcggtgatcccaactcccagggagacgtagcgggtttgggaaggggagagtccaacttttaagaagacattgtatgcataaaagtaaacctggaaagaatagaaatgtgtgaagtttgcacccacgtgatcatgtgtacactagcttctgccttttttggcagataacaactaattagggcttmagtaaagagaaaatgttcttgattttagcaactactcctcagtggttttttgctcatttgctcatctgctcatttgtgcagatgaacttttaccagcagctctgcttctaactcagtaacaaagatagactaacctttttcttcctacttttagcattagcttttgtctcatgttacaagttgtaattccatccagcatctttcataagttgtagtgtctcatgtgcaggacacggagcacatacaaatactgatggtacttactaagcaattggtttaaatgaacattgtgtatcatct

SEQ ID NO: 88947 - DNA, 542 bp, Chicken  19866894394592_3
ctgatggtacttactaagcaattggtttaaatgaacattgtgtatcatctttaaacctttgcagtgatcctgatagtcaccattttttctgaatgtaagtactcctaacacataagaaattccattttagcattttagcactgctccaattagcattttactcattgcagaacacttcttgccaagaaactgtaaacagtgagtttgtaagcagagaaaagtagcacatgtaccacattgactccaattaactgcatgcatgaggagacaagaaagagagtgatgaactgccaacggacrgatttgtcacgaacaaggtcacaaacactcttagatttctccccacggatggcttcttgctctgcaatcatgtcatccacttcggccatgtggtcaccatccccccagagctgcttcacagctgcagggagaggaggaggagaagatgactctgggcccacgctcaccgacacacattaatgcagaggattacttcctgcctgtcttattaaagcatccggctctttgcttgtctgaacttc

SEQ ID NO: 88948 - DNA, 599 bp, Chicken  19866894394598_1
  misc_feature (1)..(121): n is any nucleotide
nnnnnnnnnnnnnnnnnnnnnnnnnnnnnnnnnnnnnnnnnnnnnnnnnnnnnnnnnnnnnnnnnnnnnnnnnnnnnnnnnnnnnnnnnnnnnnnnnnnnnnnnnnnnnnnnnnnnnnnnntggctgtgtaaaggatgtgctgtgcatttttcaggattatgagagaagttaatattggatctctaacaaagaaaccccaagcacttctgccagaaagaaaaaaaattcattttcatatgatgcatattaacttagatgaacttttcggcaaaataaacttgacctgatagatcccattrkagagatctgaacctgtgattttggcccatgccagagtcaagatagaggcctcaccagtctatcaagtgttcctttaagcgtctctgcttacttgtgtctgcgtgctttagaragacaacartttatgtaacgatttcaaaaaatggttgataaaataggacctcattccgtggcaggtttcctagttactgaaatggaatctgttttccctattgcctctgcttcagcatccaacaaaatcttcagtttccttagtatttttaaagctctgtgatttgatgtcagtrggttgcaactc

SEQ ID NO: 88949 - DNA, 599 bp, Chicken  19866894394598_2
  misc_feature (1)..(120): n is any nucleotide
nnnnnnnnnnnnnnnnnnnnnnnnnnnnnnnnnnnnnnnnnnnnnnnnnnnnnnnnnnnnnnnnnnnnnnnnnnnnnnnnnnnnnnnnnnnnnnnnnnnnnnnnnnnnnnnnnnnnnnnntggctgtgtaaaggatgtgctgtgcatttttcaggattatgagagaagttaatattggatctctaacaaagaaaccccaagcacttctgccagaaagaaaaaaaattcattttcatatgatgcatattaacttagatgaacttttcggcaaaataaacttgacctgatagatcccattrkagagatctgaacctgtgattttggcccatgccagagtcaagatagaggcctcaccagtctatcaagtgttcctttaagcgtctctgcttacttgtgtctgcgtgctttagaragacaacartttatgtaacgatttcaaaaaatggttgataaaataggacctcattccgtggcaggtttcctagttactgaaatggaatctgttttccctattgcctctgcttcagcatccaacaaaatcttcagtttccttagtatttttaaagctctgtgatttgatgtcagtrggttgcaactcc

SEQ ID NO: 88950 - DNA, 599 bp, Chicken  19866894394598_3
  misc_feature (1)..(8): n is any nucleotide
nnnnnnnntggctgtgtaaaggatgtgctgtgcatttttcaggattatgagagaagttaatattggatctctaacaaagaaaccccaagcacttctgccagaaagaaaaaaaattcattttcatatgatgcatattaacttagatgaacttttcggcaaaataaacttgacctgatagatcccattrkagagatctgaacctgtgattttggcccatgccagagtcaagatagaggcctcaccagtctatcaagtgttcctttaagcgtctctgcttacttgtgtctgcgtgctttagaragacaacartttatgtaacgatttcaaaaaatggttgataaaataggacctcattccgtggcaggtttcctagttactgaaatggaatctgttttccctattgcctctgcttcagcatccaacaaaatcttcagtttccttagtatttttaaagctctgtgatttgatgtcagtrggttgcaactcctcttgaaggtaaattagaacaaaacagtaggttaaaaagttctaaaaataaagaaaaacagaagcgtgaatgataaaaggaaaaggaatagtgaatgcataataaaatattt

SEQ ID NO: 88951 - DNA, 600 bp, Chicken  19866894394598_4
ggctgtgtaaaggatgtgctgtgcatttttcaggattatgagagaagttaatattggatctctaacaaagaaaccccaagcacttctgccagaaagaaaaaaaattcattttcatatgatgcatattaacttagatgaacttttcggcaaaataaacttgacctgatagatcccattrkagagatctgaacctgtgattttggcccatgccagagtcaagatagaggcctcaccagtctatcaagtgttcctttaagcgtctctgcttacttgtgtctgcgtgctttagaragacaacartttatgtaacgatttcaaaaaatggttgataaaataggacctcattccgtggcaggtttcctagttactgaaatggaatctgttttccctattgcctctgcttcagcatccaacaaaatcttcagtttccttagtatttttaaagctctgtgatttgatgtcagtrggttgcaactcctcttgaaggtaaattagaacaaaacagtaggttaaaaagttctaaaaataaagaaaaacagaagcgtgaatgataaaaggaaaaggaatagtgaatgcataataaaatatttagtgcttttc

SEQ ID NO: 88952 - DNA, 600 bp, Chicken  19866894394598_5
tagatcccattrkagagatctgaacctgtgattttggcccatgccagagtcaagatagaggcctcaccagtctatcaagtgttcctttaagcgtctctgcttacttgtgtctgcgtgctttagaragacaacartttatgtaacgatttcaaaaaatggttgataaaataggacctcattccgtggcaggtttcctagttactgaaatggaatctgttttccctattgcctctgcttcagcatccaacaaaatcttcagtttccttagtatttttaaagctctgtgatttgatgtcagtrggttgcaactcctcttgaaggtaaattagaacaaaacagtaggttaaaaagttctaaaaataaagaaaaacagaagcgtgaatgataaaaggaaaaggaatagtgaatgcataataaaatatttagtgcttttcaattaactgttcaaatgattagtatactagtatattatatcataaaaataatgtctattaattttttgcagctattatcttgactgtgatttactcccctcaaatcattaacaatgctattaaaaaggtggatatagatgaacattctggatagtgtgcaggaaaa

SEQ ID NO: 88953 - DNA, 600 bp, Chicken  19866894394599_1
tgacaaaatgaactatgtggatgaatactgggagtaggagtacagaagaaaatgaagagggaggataatgtaggaagaacaaaattatttatagcattgaagataaatacatttttatgtaaagttgttaaaaatccatgaagtattcagagactatagttatgataccacataaaatcacaccatgagtagacagaaaacttcacattttttaatgctttttaggagaaaaaaagacccttatccaagaaaaatatatgtacttaagatgctgtgccacaaaggcagttttgccttcaygaatttgtttttttttcagctagcatacatcaagacatgttgttcacactaagattactcccaaaagacaggttggaagagtaatcattagcttagtcctatattattcctgttgataggtgccaagcatgggcacccaaaggggcaccatgccttctgagtgaagccacttgtagtatattgttttacacctaaacacaacatttatgtgtaccacagtaaatgtggtgtacatctgctgaaaattaagatgaacacaagtgaatgaagaacaaagaacaagtacaaacacagctgagt

SEQ ID NO: 88954 - DNA, 600 bp, Chicken  19866894394599_2
tagtggagattctacattaaggactatgccataaagcaagatgtatgaaaattttgccttaaagttgttactcttaatactgaatacttggctttttaacctttattttcttctgaaacatttattcttaaatgtttttatccttttttatagagcagtatcacctagaaatctcaggtcagtatctgctgtttaaagaactgaacaagcttatggtgacagctgatgtgtttattttaacagcaaaagagaagaatgagtgaaataaacaaaatgatgcaggagaaagaaggatacaargtgtaatcataataaacttagcatagccttgtgtacaatttgtagaagtaataccaaaaaaagaacaaaacaatgcaccgtctgctgtaacactgctgtagctctgcggctatccctgcagagtgatatgtgaacatggaaaggcaacttcagtagcaaatctgtagactaacatgagtgagatcagtctgaaaaatgttttgagtacatgtgggaatttttcagttttaaaatcatagaaaagggatttttctccattaagtctgaagatgtgtttacttaagtaagtccttgcagtca

SEQ ID NO: 88955 - DNA, 568 bp, Chicken  19866894394605_1
aaaagaggatttgctagtttttgtccagttatataaagtctttcatagaatcgtagtttgggttggaaggcacctttaatgtcatctatttccaaccccccttgctataggcagggacacctccatctagaccagtttgctcaaagccccatccagactagccttgaatacttccagggagggggcatccaaaatctctctgggcaacgatttcagtgtctcatcatcctcatggtaaagaatttcttcctgatatctagaccaaatccaccctcttccagttttaaaccattaccctcrtcctgtcactacctgctcttgtataaagtccctctccaaatttcctgtaggcccccgtcaggtactggaaggcagctataagktctcctcacagccttctcttctccagtttaattttcattactgtacagttgaaagcccaaatttggcatagaggaatacatgtacagaaagtgtaaatttctactaatgctattggtaaggaagtctattttatcaactgctcatagtgacagaaaaggtatttgctaggactattccatgtgta

SEQ ID NO: 88956 - DNA, 485 bp, Chicken  19866894394605_2
atctatttccaaccccccttgctataggcagggacacctccatctagaccagtttgctcaaagccccatccagactagccttgaatacttccagggagggggcatccaaaatctctctgggcaacgatttcagtgtctcatcatcctcatggtaaagaatttcttcctgatatctagaccaaatccaccctcttccagttttaaaccattaccctcrtcctgtcactacctgctcttgtataaagtccctctccaaatttcctgtaggcccccgtcaggtactggaaggcagctataagktctcctcacagccttctcttctccagtttaattttcattactgtacagttgaaagcccaaatttggcatagaggaatacatgtacagaaagtgtaaatttctactaatgctattggtaaggaagtctattttatcaactgctcatagtgacagaaaaggtatttgctaggactattccatgtgta

SEQ ID NO: 88957 - DNA, 600 bp, Chicken  19866894394606_1
cacagcccatgtttaattaaatgttcgcatcaactgggcaaataccatttcgccagtcattagctacagacagacatttataattccttgttgtcgccgtatatattcaggttattagaagatattattgtaagattatcacatgcttaccgactgatgcaagcagatgtctgtgagctcacctaaaatgccacagaagatctgcttcactgccagacgctgctaaagtttccatgccaagtttcatttccattgcctatgacactgaagaacaggtttttgcctttagaacttaccatrtgacaccaaatcatagacattgctcaaacacttctcctccttgggaagcrcagtccacaggcttttgctatccrccctgtggggcgctgtttgaaaaacaaaactctaccatagtgggtaagatgagactgtatttattaattataaaatatacaagtgaacaacaytggyttggtacaatcccgtaaaaacaagagcagttgggtgacagctgctggacttgcctggctgtggttacaccaacgacgctaatcgcagggtgctgcagcccctgcagagatgtgctctgagtggttctga

SEQ ID NO: 88958 - DNA, 600 bp, Chicken  19866894394606_2
cgccagtcattagctacagacagacatttataattccttgttgtcgccgtatatattcaggttattagaagatattattgtaagattatcacatgcttaccgactgatgcaagcagatgtctgtgagctcacctaaaatgccacagaagatctgcttcactgccagacgctgctaaagtttccatgccaagtttcatttccattgcctatgacactgaagaacaggtttttgcctttagaacttaccatrtgacaccaaatcatagacattgctcaaacacttctcctccttgggaagcrcagtccacaggcttttgctatccrccctgtggggcgctgtttgaaaaacaaaactctaccatagtgggtaagatgagactgtatttattaattataaaatatacaagtgaacaacaytggyttggtacaatcccgtaaaaacaagagcagttgggtgacagctgctggacttgcctggctgtggttacaccaacgacgctaatcgcagggtgctgcagcccctgcagagatgtgctctgagtggttctgagaaaaggcattatctgaacactgatactctttcgtcttcaagggaacata

SEQ ID NO: 88959 - DNA, 600 bp, Chicken  19866894394606_3
catttataattccttgttgtcgccgtatatattcaggttattagaagatattattgtaagattatcacatgcttaccgactgatgcaagcagatgtctgtgagctcacctaaaatgccacagaagatctgcttcactgccagacgctgctaaagtttccatgccaagtttcatttccattgcctatgacactgaagaacaggtttttgcctttagaacttaccatrtgacaccaaatcatagacattgctcaaacacttctcctccttgggaagcrcagtccacaggcttttgctatccrccctgtggggcgctgtttgaaaaacaaaactctaccatagtgggtaagatgagactgtatttattaattataaaatatacaagtgaacaacaytggyttggtacaatcccgtaaaaacaagagcagttgggtgacagctgctggacttgcctggctgtggttacaccaacgacgctaatcgcagggtgctgcagcccctgcagagatgtgctctgagtggttctgagaaaaggcattatctgaacactgatactctttcgtcttcaagggaacataatgttgtagagaagcagctttctg

SEQ ID NO: 88960 - DNA, 600 bp, Chicken  19866894394606_4
tgtctgtgagctcacctaaaatgccacagaagatctgcttcactgccagacgctgctaaagtttccatgccaagtttcatttccattgcctatgacactgaagaacaggtttttgcctttagaacttaccatrtgacaccaaatcatagacattgctcaaacacttctcctccttgggaagcrcagtccacaggcttttgctatccrccctgtggggcgctgtttgaaaaacaaaactctaccatagtgggtaagatgagactgtatttattaattataaaatatacaagtgaacaacaytggyttggtacaatcccgtaaaaacaagagcagttgggtgacagctgctggacttgcctggctgtggttacaccaacgacgctaatcgcagggtgctgcagcccctgcagagatgtgctctgagtggttctgagaaaaggcattatctgaacactgatactctttcgtcttcaagggaacataatgttgtagagaagcagctttctgataacgagcgtgattaaggactttaatccaggagggcttggcttgtcctttatagccaagcatagcaaaactccctgtaaaacagacacaaag

SEQ ID NO: 88961 - DNA, 600 bp, Chicken  19866894394606_5
tgtgagctcacctaaaatgccacagaagatctgcttcactgccagacgctgctaaagtttccatgccaagtttcatttccattgcctatgacactgaagaacaggtttttgcctttagaacttaccatrtgacaccaaatcatagacattgctcaaacacttctcctccttgggaagcrcagtccacaggcttttgctatccrccctgtggggcgctgtttgaaaaacaaaactctaccatagtgggtaagatgagactgtatttattaattataaaatatacaagtgaacaacaytggyttggtacaatcccgtaaaaacaagagcagttgggtgacagctgctggacttgcctggctgtggttacaccaacgacgctaatcgcagggtgctgcagcccctgcagagatgtgctctgagtggttctgagaaaaggcattatctgaacactgatactctttcgtcttcaagggaacataatgttgtagagaagcagctttctgataacgagcgtgattaaggactttaatccaggagggcttggcttgtcctttatagccaagcatagcaaaactccctgtaaaacagacacaaagagtg

SEQ ID NO: 88962 - DNA, 600 bp, Chicken  19866894394609_1
atagattcacctctgtgaggatgacagatgaacagaggggagtgcaaacacagttttgaaagcactttatgtcttactgtttcaactattcagcagctgtctgcacgagacagttaactaccccttcctgtggcattagaaatacctatggaggaaaccttgataaagtacaattcaagctgatttacagattccatacagtagacataagaggtctgttgcaagaagcagaactttgcttgtgaaacatgtactttaagcatatttgacaccgtatagcaaactccattagccttgctrctgtgctcctgtgrgagcatacgttcagttacacgttttttacatggcagtgagacctgtgaaggtgcacttcattcccaaaaccgtcccagtctgcctcgtaaataagaccagttataatcattaaaagatccttccttgagtcagcactttgcgttatcactaagctattcttttttcttctaacttaaggcagctctaaagtgtactttttttttttttttaataactttgactggactgagactactgagagggataataaattgttagaagtggtctgggcatactaatctcttc

SEQ ID NO: 88963 - DNA, 600 bp, Chicken  19866894394609_2
gtgaggatgacagatgaacagaggggagtgcaaacacagttttgaaagcactttatgtcttactgtttcaactattcagcagctgtctgcacgagacagttaactaccccttcctgtggcattagaaatacctatggaggaaaccttgataaagtacaattcaagctgatttacagattccatacagtagacataagaggtctgttgcaagaagcagaactttgcttgtgaaacatgtactttaagcatatttgacaccgtatagcaaactccattagccttgctrctgtgctcctgtgrgagcatacgttcagttacacgttttttacatggcagtgagacctgtgaaggtgcacttcattcccaaaaccgtcccagtctgcctcgtaaataagaccagttataatcattaaaagatccttccttgagtcagcactttgcgttatcactaagctattcttttttcttctaacttaaggcagctctaaagtgtactttttttttttttttaataactttgactggactgagactactgagagggataataaattgttagaagtggtctgggcatactaatctcttcaaaaatctatcaga

SEQ ID NO: 88964 - DNA, 600 bp, Chicken  19866894394609_3
accctgccagcaccacccagcaaggcagtgctagagttcacattaagacttcctcacgatagctggttagaacagaaacctgaagcagccgtaatcttaccttgagtgtacaagatccaaggagagaagatcactggttcaaaacagtggaaggctgagaaagtgctctgatcagctgctggtagcatgcacttggcttttatgtgcaggtgggaggagctgctccctacggtaggtgggcagtaaggacagcaagcagacagccttcagaaggcactgcacagtaggattttgctcttyggggacagaaggaggggggaaaagcaagctgaatggcattcacaggagaaatagtgttggatctgttggtttgtttttaaatgatttagttaactaaggattttatactgtatttgtttctgtgaatctggtgcattattccggtcgcagttagaatgctactaggtctcagttagccttttggaaagatttttacctcagtmgtaacagtagatagtaacacaaagttgttatcagaaaggcttgtgcttccctttctaaaaaggaataactacgaataaacagcttgctttctattca

SEQ ID NO: 88965 - DNA, 502 bp, Chicken  19866894394609_4
gtgcaggtgggaggagctgctccctacggtaggtgggcagtaaggacagcaagcagacagccttcagaaggcactgcacagtaggattttgctcttyggggacagaaggaggggggaaaagcaagctgaatggcattcacaggagaaatagtgttggatctgttggtttgtttttaaatgatttagttaactaaggattttatactgtatttgtttctgtgaatctggtgcattattccggtcgcagttagaatgctactaggtctcagttagccttttggaaagatttttacctcagtmgtaacagtagatagtaacacaaagttgttatcagaaaggcttgtgcttccctttctaaaaaggaataactacgaataaacagcttgctttctattcagaacatctattcgatcacatctctggaaccctcctcagtttctcttgtgcagtgctacccagcttttctttgatgcagctgtaacttgttccatctacacactaa

SEQ ID NO: 88966 - DNA, 600 bp, Chicken  19866894394610_1
gccccatcctgccggtgccactggggattcggccggtgctgagtaaatacagagtggaggtaattgcattgcagtgccagatcttaatgttcaacagcgacgtgggctgtgcgcatctcacaaacttgatcttcttgtgttcattgaggtcccagaacagaaaagggactggggagagcagcagagatcttgggttattctggatcagccgtgggttggattacgtggggtgtcagactgtgttgcagccccaggccatgtggatgagaagaggaatgctcagggatccaccagtccccragcaatggcatctgtttccctgctcctttatacagcttctttataccaactccttcggccccagctggactccatccaagagcagtccttctcacactcatgctttctcctcctgtcctagatcttgttttggggactcagggacctgaagagagtgaacctggcccaggtggaccggccccgtgtggacattgagtgtgctgggaagggagttcagtcagctctcatccagaactacaagaaaaacccaaacttcagcacttggtcaagggtttgaagtggtgagtgcttcccttctcc

SEQ ID NO: 88967 - DNA, 600 bp, Chicken  19866894394611_1
gcagggtagctgaaggagggtggcaaaggtgaagctttgctccttgtgccaacatcaaataacctatgtgaatacagaggagagtgctaggattgaaatgcaaacattttgctctcaaatcatggggtgataaccaccaagtgaaaatttcgctgtaggattagtcagctgcagggtctgtgtgtagaagcccacatccgacagtacttggtcaccccagggagcagccaaacagtggagaaaaatgcagtgtgtgaagggggaaagaagggatgtgaaatctacaggagatctgcgaartggaggcaacagctgtactacccagggtctatatggagcagctggatggagaaggaggagaaagggaatatggagttgtgtcttgaaaactcctcacattgctgtttgtctattccattttaaccatctggcattgcagccagggaatgtgatcttccactgcacaggacagagatgtgccctggttatgaggcagtgtatttggactctaaattttccatcttttactctccatgatctccatgatttcagtatcttgaccacaacaccatgttcagtgtaagtgagacggtgcacatc

SEQ ID NO: 88968 - DNA, 599 bp, Chicken  19866894394631_1
  misc_feature (1)..(70): n is any nucleotide
nnnnnnnnnnnnnnnnnnnnnnnnnnnnnnnnnnnnnnnnnnnnnnnnnnnnnnnnnnnnnnnnnnnnnnacataaagccctcccacaattctattttttcctgaatgcctacagtatactttttgagtcatcactgccaaaatttgacctatctgccatgtttcctgctgaacataattatatctttgccacaaagatggaattggactacaaagacaactagtccttgggatgctatatgctgttgaggtcactggggaatgaagttgctgagcatgtgatattgattttgagaaaaytctcagtaagagataccctgtcaaatgaagagccccaccagtactaggaaaaagcaggctagggatatctggtaacttgcatgaatttgaggatcttaagttacaagggcagttgtatcagtattaaagctgcatgaaaatatctttcaggatcaggttacagatgtatattgtgacctattctttaatttttaattacttttctccccatggaagtgttaggtttttagagactttacaaagcagacagcctgtgcaaagataatgccattcaaatgagatttgccaagctataagga

SEQ ID NO: 88969 - DNA, 600 bp, Chicken  19866894394631_2
gtaagagataccctgtcaaatgaagagccccaccagtactaggaaaaagcaggctagggatatctggtaacttgcatgaatttgaggatcttaagttacaagggcagttgtatcagtattaaagctgcatgaaaatatctttcaggatcaggttacagatgtatattgtgacctattctttaatttttaattacttttctccccatggaagtgttaggtttttagagactttacaaagcagacagcctgtgcaaagataatgccattcaaatgagatttgccaagctataaggaatattmaaaattcatgcaagcacagaaaccaagaaaattctttgtataagttgacttatgactgctgttaatttacatagatatataaatatggtgtattttttctcctcctrattagatgtttcctcttcaccaataaccctgtgtctgaatgcagagattggttttgccacttgtaaatgtctgaagagcatcaaaagcctgccccaacttttgcccatggagtgaaccattccagagagttcattcatattaaagatgactgagtagaaggaggggcgagtgagtcaattgctttaactcatg

SEQ ID NO: 88970 - DNA, 600 bp, Chicken  19866894394631_3
ttgtatcagtattaaagctgcatgaaaatatctttcaggatcaggttacagatgtatattgtgacctattctttaatttttaattacttttctccccatggaagtgttaggtttttagagactttacaaagcagacagcctgtgcaaagataatgccattcaaatgagatttgccaagctataaggaatattmaaaattcatgcaagcacagaaaccaagaaaattctttgtataagttgacttatgactgctgttaatttacatagatatataaatatggtgtattttttctcctcctrattagatgtttcctcttcaccaataaccctgtgtctgaatgcagagattggttttgccacttgtaaatgtctgaagagcatcaaaagcctgccccaacttttgcccatggagtgaaccattccagagagttcattcatattaaagatgactgagtagaaggaggggcgagtgagtcaattgctttaactcatgctgtcactagtggaaatgaaagtggaaggacagtcctggaattttgataatcttccttgttaggtattaacaaacaaatatgggcagtggtatggataggtagggat

SEQ ID NO: 88971 - DNA, 600 bp, Chicken  19866894394631_4
atccatctgtgtactcagaagttcaggtctgaatggatgcgttccttcttggtaagtgtctggaaaattcatttgagtcctatgatttatcatagttatgtgtactcctgcatatagcgatcatcacactcgtgcatgtggttcaaaccatgcagcctctcattggtactagtaggtggtcattcatcttcagcagtttgggtgctgtatcagttcagaataagaatttatcagtttttctggagatcactgccaatgtctagagcaaaccaattcctgggagacccaacaatattaccycaaactactctgcccagatgagaccatgcaggaggtctggaaaggtcctttcctttcrcctgatggactttagacttcacatactagagtggagcatttagatttctgggttgaaaagcagaaattgtttttaaaataatcagtcctttaaaaaaaaaacaacattggtgtcataagtttttatcccacatttagaattctaaccacttttagtcttacatttcctgggtgaacttaaatgaacttgaaatttgccccccagctctggcactaatgtgtcactgacagggaacagtaact

SEQ ID NO: 88972 - DNA, 600 bp, Chicken  19866894394631_5
tctggaaaattcatttgagtcctatgatttatcatagttatgtgtactcctgcatatagcgatcatcacactcgtgcatgtggttcaaaccatgcagcctctcattggtactagtaggtggtcattcatcttcagcagtttgggtgctgtatcagttcagaataagaatttatcagtttttctggagatcactgccaatgtctagagcaaaccaattcctgggagacccaacaatattaccycaaactactctgcccagatgagaccatgcaggaggtctggaaaggtcctttcctttcrcctgatggactttagacttcacatactagagtggagcatttagatttctgggttgaaaagcagaaattgtttttaaaataatcagtcctttaaaaaaaaaacaacattggtgtcataagtttttatcccacatttagaattctaaccacttttagtcttacatttcctgggtgaacttaaatgaacttgaaatttgccccccagctctggcactaatgtgtcactgacagggaacagtaactgacagaagagataacctgaatggggtcaggaccatgtttcctcagctaaaaatataat

SEQ ID NO: 88973 - DNA, 600 bp, Chicken  19866894394641_1
catcacattcatgtcacctttggaggtcctgctgggctcctaaaagtggcaaactcattcactgatctgaccaaaactagaagcaggccaagcttaaacccactggccaaaatcagttgaaagtagatcccttagaagcagggtttactattcacaatctgcagctcctcacctagcagctaactattgctattaaatagaaagttgtttttttaaaagttaaataagaggtatatttggactgggaataatgttaaaccagttcacacaacactgagttactagcagttggtttacagyatcaatgcaaaacagagcgacttggtaataacatcatctgtatcttggagggtttgttgctttcttaggccgagtactactccatgggcaaccacgataccaacacagcactttagaacttaaagatttaaagcacaataaagatatacacagagtgagtgtgatgtgaaaacatctccatttaattcttactggtgtagccactccaggcaacatcctaatcccaatctcaaattgcatttgttgtgctgcagagccccctgtgttgagcatacacgctaagtaatgttacctacattt

SEQ ID NO: 88974 - DNA, 600 bp, Chicken  19866894394659_1
taaaaccgaactgccatctcagccgcctcagtgaagtcactgtccttgggaaatacttcagataaatgtgatgctgggttggtactggagcagggctgatgacacaccagtgtgatggctcagtacttggtcagcatcaggatgacatctttctaccaaatcccaaatacagtcccagggagcagaccgagggtgaccaagaggctgggagtgaccaagaggctgtgaggaatgcagccaggacagctggccccatatcaccaaagggatacttcatgccgtatgacttcatgctcagcratgacatgcagaagacagtcgcactgaggagggtggttttgccttccaaggtgtctgttgctcagagaatagtgatgctctctctgctgtcagtctctgctttgactgcttacgagaaaaggagagtgattgtttttgcatcgtgtagtggttttcttgttttggtttgttttgtttttttcctgaccttcacatattatactgtctctatcttgacataaaagtcttcttacttctgtatttcttatctctcccctatcccactggaaagtgatggaatcgtgtaagtggctgttccag

SEQ ID NO: 88975 - DNA, 599 bp, Chicken  19866894394663_1
  misc_feature (1)..(74): n is any nucleotide
nnnnnnnnnnnnnnnnnnnnnnnnnnnnnnnnnnnnnnnnnnnnnnnnnnnnnnnnnnnnnnnnnnnnnnnnnnctcccacacagcccacagtgccagaggcggccccagccacaggggtgggcacacatgggggattggctggaaaccatcagatggacagaatgagttcctctttctctacatcttccctctcaccctcctcctccacccgaccaagcaaaactttaaatatatgattaaaatgacctattaaagaggaaagagtcattccatttcagtatattagtggtgattctgygctggctgaggcagaaaaaaaatccataatcataagccttattaaagaacaatatcctttgagggctttttgttttcctctttagataatgtaaagccttgaaaaatagacatagaaatagaaagaaatagagacatggtgttacactgctagagaccacggcactcagggaaattaccttcctatttttaggcatgtttacaacacacctatttgcagcattacctttgatcctaaactctaatttataggattctttttatatgcctgggagatccagaatggaaactactgtaagc

SEQ ID NO: 88976 - DNA, 599 bp, Chicken  19866894394666_1
  misc_feature (1)..(14): n is any nucleotide
nnnnnnnnnnnnnntattcacccctgaggttgtggtgtcttagcttaatttcttccacttctctgtccgtataactaatcagctctgagatctggaatgtatatgctcttttcaaagaacagcactgcagccactccttcctctggccttatgttcattcttttattacagtcaatggttatattgaaaaactgtaacctcaagcagttaactgtgaaaaacaaggtagatataatgaagagcactgcttcctgctattcagaaatggaattaggaatgatccttgctttggtttctggygcgtaataaaaagtcgtattgacttactatttggattttttwattctcattaagaagttgcagggcatggtagaaaaaagatatacttcatagacctttctcagtatccagtaaagtattactttccattgtaggatacgtttgcatagtctacttcagaatttttagaaagaattgttatgataattgtatatgcagagcattttaaaaatgcatttgatcctgtgatttaataatggtgagattcagttgcctaaatgtggggtctagtgccattttaaacatctttcaamttcagt

SEQ ID NO: 88977 - DNA, 600 bp, Chicken  19866894394666_2
gcttaatttcttccacttctctgtccgtataactaatcagctctgagatctggaatgtatatgctcttttcaaagaacagcactgcagccactccttcctctggccttatgttcattcttttattacagtcaatggttatattgaaaaactgtaacctcaagcagttaactgtgaaaaacaaggtagatataatgaagagcactgcttcctgctattcagaaatggaattaggaatgatccttgctttggtttctggygcgtaataaaaagtcgtattgacttactatttggattttttwattctcattaagaagttgcagggcatggtagaaaaaagatatacttcatagacctttctcagtatccagtaaagtattactttccattgtaggatacgtttgcatagtctacttcagaatttttagaaagaattgttatgataattgtatatgcagagcattttaaaaatgcatttgatcctgtgatttaataatggtgagattcagttgcctaaatgtggggtctagtgccattttaaacatctttcaamttcagttacatctccggaagttcataggtatcttgcagctcctgtcttg

SEQ ID NO: 88978 - DNA, 477 bp, Chicken  19866894394666_3
ttctggygcgtaataaaaagtcgtattgacttactatttggattttttwattctcattaagaagttgcagggcatggtagaaaaaagatatacttcatagacctttctcagtatccagtaaagtattactttccattgtaggatacgtttgcatagtctacttcagaatttttagaaagaattgttatgataattgtatatgcagagcattttaaaaatgcatttgatcctgtgatttaataatggtgagattcagttgcctaaatgtggggtctagtgccattttaaacatctttcaamttcagttacatctccggaagttcataggtatcttgcagctcctgtcttgtatttgttagccctggataagctagcccttcttaaatggcaccagaaacttctttgtcaggtccagcctaattcctctgaaggttttgtttaatgccttgaattagaaaaatgcttagcactttcata

SEQ ID NO: 88979 - DNA, 600 bp, Chicken  19866894394668_1
agtgggaccagatttacagcagcagcaaatatggccaacggtagcagtggaggtataaaatcacagcccatgacagaaggctttacacaacagtcagccaaattcctcatcagatgcctgcagtgtgggtctgtaccaagaagaacacccgtatttcagctgctgaactactgagtcagcttggggtgaaggcagggcattggagccctgacgagatgcagcacacatttggctgtcacttgaaggtttgacttctgagcctgtacaattagtataggttagtactcagaggtgtgtgtmaagctgaactctacagtatctgaaatgcattttaagtccaggagctacaaaacactgtcacaataacccgctctaatactagccagtatgcaatacaattttaaaagctcaggctagcaagaacactgatattacaacttacagagcagaagacagggctgaacattgcctaaaacatcttccagctatttggaaaattatttacagaattgcatacactgaagaatgcttccaccttcttctgttatgagacaaatccacactctgttttgaaagccatgaggacagaaggtgccggca

SEQ ID NO: 88980 - DNA, 534 bp, Chicken  19866894394678_1
ttttttttttctattttgaggattgtccaggagtgagagatatacacactgacagatcaattatatataatgcttccatacaagactgctctttgtattccccatcctatccatacaagaaacatcctgttctactttttgttatactctttttgtaccaatgtcttggcaggctggcagcatcatataaggttcatatgcataaattaagtggttactgaaggctctcactctatcctttgtataggaggcactgattgataaagtgagtaggatttcatgtcttaggcacaaaaaaawtgttggttcttttcaggtgaattattgaactatgtagtgaacaatacaccctgttataactaaaatgatttttctggaagtataaagatgaactggatttacaggtcctgagactgtggctgttacttcagagcatgatatatgcgaaaaactctgcaaattttttacatgcttgtggagagctgagtggtgatgctgttttgtgttattaaaatgcataatgtcattaatctg

SEQ ID NO: 88981 - DNA, 600 bp, Chicken  19866894394680_1
aaatgacaattaaaaacattggatgtctctggagaacaaatatagtagcagaagggtttaaaactgatttttaagtagactagatttgaaattactgtcagttcttcaagcagaaaggtaataggtaacagcaatctactgccaaagaggaatggtgctaagacctatacaagacagattttaaaggttacttgtagatcgttgcaaagcagatgataaaggcaccacaacttgccttcctctatggtgttacagtttggatagattgcaccctaccttgcagtccaaacaccagtgtawtcaattttctcttcctatttttctgacagtaatttgcaatttaccccactgtcagaacaccaagagaactgcaaaactgaaggagaacactccccatccagcttggcaggatagagcagacactcactccatcctgagggctggtacctcaaaaatcagagttcccacaaactcccaagcacaagaagggtggctaacctcttctatgcagagatgactatcatggataccagacatcccaccacatcacaaagaaattcatggtgtttcttcccaggagatgttgcctgtgtgaaagga

SEQ ID NO: 88982 - DNA, 600 bp, Chicken  19866894394685_1
ctctctcctgtcacagcaggccctgacaaagagtatttccccttctttcttacagccccccttttgatactgaaaggtcactctgaggtctccttgcagccttctcttctccagactgaacagtgaacagcccctgctctctcagcctgttctagtaagggaggtgttccatcccttggatcatttttgtggccctcctctgtatgcactccaacaggtctacgtctttcttgtactgaggactccacatcttgatgcagtactccagatgagatcttacctaccaaagtagagggacargatcacctccctyaccctcctggtcatgcttcttatgatggaacccaggatatggttggctttctgggctctgaggggacattgctagctcatgcccagcttgtcacctaccagtacccataaatccttctaggtagggctgtggtctacccttacaccccccagcttgtactgatagtgggggttgccatgaccctcatgcaagaccttgccctcatgaagttctcctgggcccattgcttgagcctgtctaggtctctctggatggcattccatcactcaggcaagttgactgcacca

SEQ ID NO: 88983 - DNA, 591 bp, Chicken  19866894394685_2
cagcaggccctgacaaagagtatttccccttctttcttacagccccccttttgatactgaaaggtcactctgaggtctccttgcagccttctcttctccagactgaacagtgaacagcccctgctctctcagcctgttctagtaagggaggtgttccatcccttggatcatttttgtggccctcctctgtatgcactccaacaggtctacgtctttcttgtactgaggactccacatcttgatgcagtactccagatgagatcttacctaccaaagtagagggacargatcacctccctyaccctcctggtcatgcttcttatgatggaacccaggatatggttggctttctgggctctgaggggacattgctagctcatgcccagcttgtcacctaccagtacccataaatccttctaggtagggctgtggtctacccttacaccccccagcttgtactgatagtgggggttgccatgaccctcatgcaagaccttgccctcatgaagttctcctgggcccattgcttgagcctgtctaggtctctctggatggcattccatcactcaggcaagttgactgcaccactca

SEQ ID NO: 88984 - DNA, 600 bp, Chicken  19866894394690_1
taacaagagcaaataatcaattcagaaaatatcacaaaataaaatagggggtagaattaaggtggctggaaactgtgtttcaacaccaaaagccacaggaagccaaaaccaaaggatgaaagggtcactaaaaatatttttaataaggctttatttgaaattctataatttacattttattagctccactatgttgcagtagcatagaagtggtaatataaacaacttatttgtattatagcaaactaaaactcctcaagggtatatatactccaaataattatattttactcctctttkctacctttcctgaatgttatcaacttgatgcctggccagctggattagcacaaaagatcttgcaaataatataactcagtgatctcagggaagacgaatcctgcacaacagttagtaacttgaacagggacaggataatacttttagaaaacaaccctctccacagctaattgactttacagtgataaatatcacaaaattgccttcaagagacatgatatcaattgcatgcatttaatggcttaataaatgtaatgtatgattaaacgtgtgtattatctcaaaatatgcttctgagtt

SEQ ID NO: 88985 - DNA, 600 bp, Chicken  19866894394725_1
aacgactgcgcttctttaatggccatcatcattaagaagagaacatgagcaaacgaatcattaactacgggcttctaaattgcatcgttctcacgcagctctcagaaggcaacctgggagcagaggaccctcttgctctgacagcacccaaccctgcacccatcgtcagtgggcgctgctctgcttgcagtctccaactgcagtacatctttccaggctctgaaggggacatctgaaaactgcaaacctctttgttgcgtatgaaagacaaacgcagtctgatatcatagagcagcagcrccggggcagtgcagagcagggctttgatgttgccaaacacctctgacattcggcgtgggagcctttatttgtttaaagtactcctccagataaaaagcagacaagtgtgctgagagccacgtcctgcccttaatgaagagcaaccatttatctttaaagatatgcaaaactggccctatccgggctcctgggcatgtttgacctttcagtgaactgctcctagctccttactgataattacagaatggatggttcacttttcctgattaaatgaggggaaagtatcttcaggttcctcac

SEQ ID NO: 88986 - DNA, 600 bp, Chicken  19866894394738_1
tctgaaagagtttaatgatttttttttcagtttccatattaaatgaataaataatttgctgtgtttttgtaatataacttctgggatgaaacaacattgagcaaatcattgtgccattacagaacagaaggaatgcataatagtatggccattctgagttagttttattgttaattcaaaaggaaaatcacctgatttataataaacaatttaaaccacgttagctcttaggctgaaggttaaggcttgttcttgttctgctagagcaatgagacagtagaaaataaatatctttgagayagyrtatgctgtggctacctggtcagtttaactgggagaaggtagacatcttgctaaaacaggtgaaagcataggaggtaaaatgtgagagctcaataagtgacccttgtttctgattgttgtttttatcttggtagtgtcgggagaaaattttacggaggtgctttgtttgctttataatagaagtagcaactgaatcgatcagattcaagcctcttccagcgctccctaataccctgtaacactccattgcactaagtttgcagtgtcttgttacaggagcgttcactgcgtgctgtc

SEQ ID NO: 88987 - DNA, 600 bp, Chicken  19866894394738_2
gaaagagtttaatgatttttttttcagtttccatattaaatgaataaataatttgctgtgtttttgtaatataacttctgggatgaaacaacattgagcaaatcattgtgccattacagaacagaaggaatgcataatagtatggccattctgagttagttttattgttaattcaaaaggaaaatcacctgatttataataaacaatttaaaccacgttagctcttaggctgaaggttaaggcttgttcttgttctgctagagcaatgagacagtagaaaataaatatctttgagayagyrtatgctgtggctacctggtcagtttaactgggagaaggtagacatcttgctaaaacaggtgaaagcataggaggtaaaatgtgagagctcaataagtgacccttgtttctgattgttgtttttatcttggtagtgtcgggagaaaattttacggaggtgctttgtttgctttataatagaagtagcaactgaatcgatcagattcaagcctcttccagcgctccctaataccctgtaacactccattgcactaagtttgcagtgtcttgttacaggagcgttcactgcgtgctgtcagc

SEQ ID NO: 88988 - DNA, 600 bp, Chicken  19866894394738_3
aaagagtttaatgatttttttttcagtttccatattaaatgaataaataatttgctgtgtttttgtaatataacttctgggatgaaacaacattgagcaaatcattgtgccattacagaacagaaggaatgcataatagtatggccattctgagttagttttattgttaattcaaaaggaaaatcacctgatttataataaacaatttaaaccacgttagctcttaggctgaaggttaaggcttgttcttgttctgctagagcaatgagacagtagaaaataaatatctttgagayagyrtatgctgtggctacctggtcagtttaactgggagaaggtagacatcttgctaaaacaggtgaaagcataggaggtaaaatgtgagagctcaataagtgacccttgtttctgattgttgtttttatcttggtagtgtcgggagaaaattttacggaggtgctttgtttgctttataatagaagtagcaactgaatcgatcagattcaagcctcttccagcgctccctaataccctgtaacactccattgcactaagtttgcagtgtcttgttacaggagcgttcactgcgtgctgtcagct

SEQ ID NO: 88989 - DNA, 600 bp, Chicken  19866894394739_1
atctgggctcttcagcaggtaattcgtgctgacgtagcaccctgcagctgatcctttcaagtttttaacccaaatactggtgaaataccgtagttggtcctggaaaaggagtgcaagcctctggctgggagctcttctggatggataatgaatggcacatgtggacgtgctatttgcagagcgtgtaagtctgctttcatggtgcctgtaccttatttccccaattacttttctgggaacggctgtggattcgttttacatcagggtgtgtgtacaaagtgattgatgtgtttatagccrtggctgcagagcctcagaaagggtttctcttgagcagatctttctttgtctcaaaatcattcccattcctggttttcaagtttcatcccagacctgtgctggcgggtcataggatgataaaatcattaaggttggagaagaccactaagatcatcaagtccaaccatcaacctgccccgccatgcccaataaccttgttcctcagtgctgtcatctgaatgatggcaaccacagtggttttgtacccagaaatgatttttgtcccaatccgtacccaaacatctgaccaaaccctgcagg

SEQ ID NO: 88990 - DNA, 600 bp, Chicken  19866894394743_1
cttctactgaaactttcttcaagtaagagtaacagtccagatctgaagtcaagaagttcgttacaagagcacctaagaaagaagtacacagagcaacttgaccacatgtacttactaatccgaaaggcttggtaaaacaaacaatactacagaagatatcttccaccaacagaatgtaacagtaagcaaaaaaaataaacattccttcataaatggagaaataaaaaatataaataatatcccatcatacctcttccttttgcatttttgtcagttgttggctgcatatagtttgtcagkgctgccatcctgcctttcttactgattcccagccacgtcccaccttcttttccctcctccatatccagaccttataaaatatgtaagaattaggctactacattcatcttcaaaaatctcaaggttaagtaattttttaatacagacactgagccttgatcaggctgaataaaagtacgtgcgagggtaagagcacttctattacaaaccaacaagtttctgcaataacagatgatggagaatgatgtcaaagttgtattaggtgtaaaagtgcaattataagctatgcctgtaagccaa

SEQ ID NO: 88991 - DNA, 600 bp, Chicken  19866894394748_1
tcatcatttttgattatgtgtacggaagacatgtggataaacaggcagcaggatttccacaatttcagagaactgtagaaatgcagaatcatagcatagtttgagttgaaaagaccctcaaaggtcatctagtccaacttctttgcaatgaacagggacacctacagatagatcagggtgcgcagaggctcaacaaggagcctgaacttgaaagtctccagggatggggcatgcactacctctctggataacctgttccagttatatacaatcttaatctccccccttttagctgaaacsatttgcccctgtcctgtcacaatgaactctgctagagagcctgtccctttctttcttatagmcatctgttagatactggaaattctttgaacatgataatttcttgttgtatctggttactgctcatctcctcagagcccacctcttacctctgtgggttctcatggcttcagacaactcttagagaaatagttccaagctttactcctcaccttggcttccctgctttgattttcagtgttctgtctcctgctagtgtcaattcatggagtctaagctggctcaacccctccttttcct

SEQ ID NO: 88992 - DNA, 600 bp, Chicken  19866894394748_2
tttcagagaactgtagaaatgcagaatcatagcatagtttgagttgaaaagaccctcaaaggtcatctagtccaacttctttgcaatgaacagggacacctacagatagatcagggtgcgcagaggctcaacaaggagcctgaacttgaaagtctccagggatggggcatgcactacctctctggataacctgttccagttatatacaatcttaatctccccccttttagctgaaacsatttgcccctgtcctgtcacaatgaactctgctagagagcctgtccctttctttcttatagmcatctgttagatactggaaattctttgaacatgataatttcttgttgtatctggttactgctcatctcctcagagcccacctcttacctctgtgggttctcatggcttcagacaactcttagagaaatagttccaagctttactcctcaccttggcttccctgctttgattttcagtgttctgtctcctgctagtgtcaattcatggagtctaagctggctcaacccctccttttcctaaaataaatattttcatcattgctactgccatttcaggagataaatcagatctgggtttgac

SEQ ID NO: 88993 - DNA, 599 bp, Chicken  19866894394753_1
  misc_feature (1)..(4): n is any nucleotide
nnnncatactataatgagtttcagaatgttaaaaatcaaattgcacataggctaagtgcttccttatttctagatacgaaaaaagcctccattctgctttaatttcctgctgttgcctaaataatgggcatccccaataacgggcaggtccccgttgagaacctcagcttcaaatatggaaataatggactagaagcaactttctgtgccactcttgcctccttttagcgcaggaatataagcaagagtctgcctattcagtctgcaaatcatagaatcgcttaggttagcttgagaccrctaaggtcattaagtccaagcattagatcactgggctgaatctggagaaagactggaggactaggaacagggcaaaaccctatgtttgtatytagagttacattcacagtaagtttcaaagtggcagaaagttagtgtgtcacaagccacagtgaaagcctagtctgaaggaaraatttacaaaaatcagagccttacaatttcacagttacttctgtgataacacagagtggaattttgtggttcttctctaaaagtagattccttttggtttgaaatatggcctattttaaatgtta

SEQ ID NO: 88994 - DNA, 600 bp, Chicken  19866894394753_2
tctgctttaatttcctgctgttgcctaaataatgggcatccccaataacgggcaggtccccgttgagaacctcagcttcaaatatggaaataatggactagaagcaactttctgtgccactcttgcctccttttagcgcaggaatataagcaagagtctgcctattcagtctgcaaatcatagaatcgcttaggttagcttgagaccrctaaggtcattaagtccaagcattagatcactgggctgaatctggagaaagactggaggactaggaacagggcaaaaccctatgtttgtatytagagttacattcacagtaagtttcaaagtggcagaaagttagtgtgtcacaagccacagtgaaagcctagtctgaaggaaraatttacaaaaatcagagccttacaatttcacagttacttctgtgataacacagagtggaattttgtggttcttctctaaaagtagattccttttggtttgaaatatggcctattttaaatgttacatactgtacaacgtgacacaatacaagcaattatgcaaatcattttcttaagtatagaacactggaatgcatacaaaagcactttggccacc

SEQ ID NO: 88995 - DNA, 600 bp, Chicken  19866894394753_3
tatggaaataatggactagaagcaactttctgtgccactcttgcctccttttagcgcaggaatataagcaagagtctgcctattcagtctgcaaatcatagaatcgcttaggttagcttgagaccrctaaggtcattaagtccaagcattagatcactgggctgaatctggagaaagactggaggactaggaacagggcaaaaccctatgtttgtatytagagttacattcacagtaagtttcaaagtggcagaaagttagtgtgtcacaagccacagtgaaagcctagtctgaaggaaraatttacaaaaatcagagccttacaatttcacagttacttctgtgataacacagagtggaattttgtggttcttctctaaaagtagattccttttggtttgaaatatggcctattttaaatgttacatactgtacaacgtgacacaatacaagcaattatgcaaatcattttcttaagtatagaacactggaatgcatacaaaagcactttggccaccctactgaatggaaaaaaatatgagattctgcatagaaatgaagaaactgtctgaaggtaatgtcacatctctctattcaaaa

SEQ ID NO: 88996 - DNA, 600 bp, Chicken  19866894394753_4
ttttaaatgttacatactgtacaacgtgacacaatacaagcaattatgcaaatcattttcttaagtatagaacactggaatgcatacaaaagcactttggccaccctactgaatggaaaaaaatatgagattctgcatagaaatgaagaaactgtctgaaggtaatgtcacatctctctattcaaaaagctagggagtttccacactttgcagccttttctagcagtttcatatatggtagaatatgcataagtacctacatcatcatagatgttatagtttctcctgggggaaaaaaawtaataataatttgcagtatttggaagaaggatcaggatactcagaaagagtataaggatgtcaatagcaagagtaaggccaaggaaaatctgtcattattgaatgaggcagggaacgttatcactgaggatgaggaaaaggctggtgtcatcaattctttctttacttctgtcttttatagacaggccagttatyctcgggctactcagccccctaagatggaagacagtgatggtgaggtaaataaacccccacaattcaagagaagacagttagtggccttcttctgcacctagacca

SEQ ID NO: 88997 - DNA, 465 bp, Chicken  19866894394753_5
agtttccacactttgcagccttttctagcagtttcatatatggtagaatatgcataagtacctacatcatcatagatgttatagtttctcctgggggaaaaaaawtaataataatttgcagtatttggaagaaggatcaggatactcagaaagagtataaggatgtcaatagcaagagtaaggccaaggaaaatctgtcattattgaatgaggcagggaacgttatcactgaggatgaggaaaaggctggtgtcatcaattctttctttacttctgtcttttatagacaggccagttatyctcgggctactcagccccctaagatggaagacagtgatggtgaggtaaataaacccccacaattcaagagaagacagttagtggccttcttctgcacctagaccatcacaagtctatgggaccagacggaatccacctgtgggtactgaggaagctggtgaaagt

SEQ ID NO: 88998 - DNA, 599 bp, Chicken  19866894394772_1
  misc_feature (1)..(150): n is any nucleotide
nnnnnnnnnnnnnnnnnnnnnnnnnnnnnnnnnnnnnnnnnnnnnnnnnnnnnnnnnnnnnnnnnnnnnnnnnnnnnnnnnnnnnnnnnnnnnnnnnnnnnnnnnnnnnnnnnnnnnnnnnnnnnnnnnnnnnnnnnnnnnnnnnnnnnnccacctgatacacaccaagtggatgaggccctctatgaacagataggagcagcttcacattcacaaaacatggccctcataggcaacttcaaccaccccaatatctgttggagggacaacacagtaatgcaccagaaatcgaagaggttyctggaatatattgataataacttcctcttccaagtagtactggaacccacggggaaaggtactacgctgaaccttgtcctcagcaatacagaggggctggtgagtaatgtgaagctcaagggcagccttgactgcagtggctgtgacatggtggagttcaagatcctcaggatgtcaaagagagtgagcagctaggttgctactatggacttcaggagatcagaccttgacctcttcagggaactgcttggcagggtgacatgggataaagccctggagggaagaggggcccaaaaaag

SEQ ID NO: 88999 - DNA, 600 bp, Chicken  19866894394775_1
tgcttgcccctctctgccacaaaatacttactcatatttgatgtctcctgttcacaacacacagctcagcaagagcctctgttgtacagggcattactttttcttgcagtgggagagatccggcagaaaccaaactatagataatatacggccaaaagagcttaatggaccctcagcttttcctcccgggtgccaacaagcacgcacagcctttggcatatccaggagtgccttacagggagaggttcgtactgcagccacctgtaatgggcagccccagggtgcatctgctgtgccccrtgtcctctctgctggggatgcgggcagcccagcagtgcagctgtgccactgtgagcttctctccagcatctgcctgtcggctcgctggaaaaatcatggagctactgctaatttcattagcaggcccatcaagcggttcatcaatctgtgatttcctggcttgctgcctcgagaaaacaagcgggatctgctctgcattcgcaaagccatcctccggggtaatttgtctgacggcttaaagtttcccgagtggattattatcttggattaaaactgaggagagaggggggggggcgggga

SEQ ID NO: 89000 - DNA, 600 bp, Chicken  19866894394815_1
tcccaattatagagtttaagtaatatatgtagaatagaaagaatgcctaccatgtatcttatggccaacaatgagattatatgggatttcagtcctcagtgtgcagcaaaaatattcacaagaaagtatctggagcagttccctttaaatgaagggggcaggaggaaagacaaaaaccctctagcaccatttttttacccatgtgtacacacagacagtgttctagttaagaaaaaaagaacacgaagaaaacaggatagcaataaagcaactgtatcacagaagtcatctcacttttayccccattttctggctcatcatttttcacctcagtttaagaactggcagatacactgtgaaaatgaatgcaaaacatttagaactcagaaatgtaataaacgttcctcaatccatgttatataatgaaaaagaactagaactgcgtttcttcatcttgagatcatagaagtctaaattgccattttctcactaacaaactagcttttcaagtctcaatattttaataataaatgactgagaattgtgaggtttttgtttaaaaagtgttttcactttaatgggtttagttaataacatcac

SEQ ID NO: 89001 - DNA, 600 bp, Chicken  19866894394817_1
ttcccttcactcaccctctcccacttcctctcccccaggtgctgcaggtaaatggggaatggaaattgcagtcagcccataatgctttgtctcttccactcctctatggtcattctgccccttctccacctggttccctcccatggaatgccatccttcccaagctgatcccacatggacttcccacaggcctcagctctcccagaactgctccatcacagctccatcccatgggggcccatctttcaggctctgcttcagcacagtcccatgagtgacagctctcccagccctcctgcycctccacaggctcctctgcatgggctgcagctccagcctggactgctcctgcagggatatccatgggctgtgcttctttcagccctcatccactgctgcaccagggccttaagttcagtgagattaaggttggctgttaccagggttgctcctaacaaactgaacattactgctatgttcttctgttttcaccagctcttatttatttcttgatctatatttggactacacaccctcattcacattttttcacggcttcaagcttcactacaataaagactataataactaaataataac

SEQ ID NO: 89002 - DNA, 600 bp, Chicken  19866894394831_1
caacagacttctgaagcacaggttaaattttaaacataaattacaagggaatgtttctacatctctgatttgatcaatgaatacaaactggacacaattccttgttgtcataagaaggggaaaaagaaccatttgtattaggaaggaatttgggtgggtttggtgttctctgcacactgacattgtgcctatactaccagatccaggtactcataaactattacctagttaatttttttcataagtatcttcagataaaatgttccttctgtttcctatgctggtaaaatatttctaagyttttgtttgggacaggcatctttgtttgcagctagaggtttaggcctcttttttccataagggatgacatcatcagtgaattcaaaactgcttgatctcagatattaggttagaaaaatacaccactgtctgttcttttctttcaagtattaatgacattacaacattaacttgacacatgataagcaaattctcaaccaacaartgatttaacaaagatttcagttctctaagagctttggttagtttttaagaacttcaagttattcttaccactcctggtcaatattcggatgtgtg

SEQ ID NO: 89003 - DNA, 600 bp, Chicken  19866894394831_2
ggtactcataaactattacctagttaatttttttcataagtatcttcagataaaatgttccttctgtttcctatgctggtaaaatatttctaagyttttgtttgggacaggcatctttgtttgcagctagaggtttaggcctcttttttccataagggatgacatcatcagtgaattcaaaactgcttgatctcagatattaggttagaaaaatacaccactgtctgttcttttctttcaagtattaatgacattacaacattaacttgacacatgataagcaaattctcaaccaacaartgatttaacaaagatttcagttctctaagagctttggttagtttttaagaacttcaagttattcttaccactcctggtcaatattcggatgtgtggttcaacttaggaatgacgaataagtcttcygttacagctatgggaaaataagatctgaataaatccagaaaactgagtaaatacatggggttttgcttgtttaaaaatgagcctcagctctctgttatgtattagaaattaatacatacactgtgtattagtgaaaattcactgtttcagaaagcacatccatacaatgagtgg

SEQ ID NO: 89004 - DNA, 600 bp, Chicken  19866894394831_3
ctagaggtttaggcctcttttttccataagggatgacatcatcagtgaattcaaaactgcttgatctcagatattaggttagaaaaatacaccactgtctgttcttttctttcaagtattaatgacattacaacattaacttgacacatgataagcaaattctcaaccaacaartgatttaacaaagatttcagttctctaagagctttggttagtttttaagaacttcaagttattcttaccactcctggtcaatattcggatgtgtggttcaacttaggaatgacgaataagtcttcygttacagctatgggaaaataagatctgaataaatccagaaaactgagtaaatacatggggttttgcttgtttaaaaatgagcctcagctctctgttatgtattagaaattaatacatacactgtgtattagtgaaaattcactgtttcagaaagcacatccatacaatgagtggcaaacttcgatacctgtctaattctaatattttttttttgctttacctataagacagagagagagaaagaaagactttgcacatgtatgtggatgtgccagtgtaatatacattattttttcgatc

SEQ ID NO: 89005 - DNA, 600 bp, Chicken  19866894394836_1
ggttgggacatatcctgtatggcattctaacacaaaaaccaagtgagaaagcacaagaagtgcaccctctgcattacacaggaagaccatttcccagcctcaaggaagcagcagaagcaaatgtgtcttttcttgctggaggatttaagatgcaaggaaagttctgcttgctcccaggtctggaagagactccccacccacatccaagactttctatccttttaagcagcaaagcaagcagtcacataccgggctagaaaaaaaggaacacatacaaacagacagacacagggaggaagragtagttcagatgtttatttttttttctaaccaagygctaacacatctcctcaatttctcaagaaacaaacagctgaacaccgaaaacctcctatttatgtactgacatggaaatgcttgatagcaatttctgatctcaagatatgtacggaaaaggtctgcctgcctctctcagctattttttgtaggtagcaaaagaacacttgaacttgcagagcactttgtattttctcagtcctctataaatgttggctagcaccagccaatgtaacaagagcttcctagtacagtttatataca

SEQ ID NO: 89006 - DNA, 600 bp, Chicken  19866894394836_2
aaccaagtgagaaagcacaagaagtgcaccctctgcattacacaggaagaccatttcccagcctcaaggaagcagcagaagcaaatgtgtcttttcttgctggaggatttaagatgcaaggaaagttctgcttgctcccaggtctggaagagactccccacccacatccaagactttctatccttttaagcagcaaagcaagcagtcacataccgggctagaaaaaaaggaacacatacaaacagacagacacagggaggaagragtagttcagatgtttatttttttttctaaccaagygctaacacatctcctcaatttctcaagaaacaaacagctgaacaccgaaaacctcctatttatgtactgacatggaaatgcttgatagcaatttctgatctcaagatatgtacggaaaaggtctgcctgcctctctcagctattttttgtaggtagcaaaagaacacttgaacttgcagagcactttgtattttctcagtcctctataaatgttggctagcaccagccaatgtaacaagagcttcctagtacagtttatatacaaaaccatcggaccattaaaataaatacagacctgac

SEQ ID NO: 89007 - DNA, 479 bp, Chicken  19866894394839_1
agtatttgcttcctcatctgaaaataaataaataactaaaataaataattaaaatatttttaaatttccacgacattttaaaatgaagttcatcttaataccgcatagtactgtgttgaatgtaaatttcatatctagtcaacacaactactgcattgcttttaaaagcctatgggatatctaactagcgctgctctatcaagaatctaagcttttacatttggaaaaaggaaaataaatcaaactgagatagtacctgacagtggttttatctccttgcaaagtacacctgatagcatwtcttctcatttatagacagaagatatggaataaactagctttagctttcagtgtcatgagaatatacattccatatagcaatctttcagtgagttttacactgcttaagggtaatctgacagactaaaagctgtataatgatggattcactaaatagtccttaattttaccaaattatg

SEQ ID NO: 89008 - DNA, 600 bp, Chicken  19866894394846_1
ctctccccataggccgtccctgttctccctgtctgttgtgctcatcttcctgcctgtggccctgaagagtacatccccccagcagtgtgctgcagtaaggagcccttctgcaggcactgacggggacatgaaataatccttgtgataaacgtgtagatgtgtctgtccatagatcctaccccatgtgtgaggtgttggcttctctctgcctgtccagcaatgagataagaaaatctatcttgaaaaaagctgctcgtgggggaacaaagtgcagaccgttaatatctgttaaagaaaaamgtgtaatgtctgtgtataatacaaaaacagcttcttgataccacatgcctagaaatcatgaattctcagttacttgatgggtggttgctggagaacygcctgccatgcctaccctgtgcagtttttaggactgcaaacaggctttacctgcaattaggctggcaaacatgaaatctgcgyggattattctgcagcacttttctggttgtgttttgacagaccagtgacttattttattgccgtcttttgaagccaaataaatcgttggctttctgaaatcacccaggagaggtggctgtc

SEQ ID NO: 89009 - DNA, 600 bp, Chicken  19866894394846_2
aggagcccttctgcaggcactgacggggacatgaaataatccttgtgataaacgtgtagatgtgtctgtccatagatcctaccccatgtgtgaggtgttggcttctctctgcctgtccagcaatgagataagaaaatctatcttgaaaaaagctgctcgtgggggaacaaagtgcagaccgttaatatctgttaaagaaaaamgtgtaatgtctgtgtataatacaaaaacagcttcttgataccacatgcctagaaatcatgaattctcagttacttgatgggtggttgctggagaacygcctgccatgcctaccctgtgcagtttttaggactgcaaacaggctttacctgcaattaggctggcaaacatgaaatctgcgyggattattctgcagcacttttctggttgtgttttgacagaccagtgacttattttattgccgtcttttgaagccaaataaatcgttggctttctgaaatcacccaggagaggtggctgtcataccatggcttccttaatggctgtttggtagatctttattgatgtgggatttgaattactctgttctaagatttctggctagaagcaatgtaaatg

SEQ ID NO: 89010 - DNA, 600 bp, Chicken  19866894394846_3
ccatgtgtgaggtgttggcttctctctgcctgtccagcaatgagataagaaaatctatcttgaaaaaagctgctcgtgggggaacaaagtgcagaccgttaatatctgttaaagaaaaamgtgtaatgtctgtgtataatacaaaaacagcttcttgataccacatgcctagaaatcatgaattctcagttacttgatgggtggttgctggagaacygcctgccatgcctaccctgtgcagtttttaggactgcaaacaggctttacctgcaattaggctggcaaacatgaaatctgcgyggattattctgcagcacttttctggttgtgttttgacagaccagtgacttattttattgccgtcttttgaagccaaataaatcgttggctttctgaaatcacccaggagaggtggctgtcataccatggcttccttaatggctgtttggtagatctttattgatgtgggatttgaattactctgttctaagatttctggctagaagcaatgtaaatgtgcatttccagtgcttggagctgctgaaaggaaccttttgcccagactcaaaggaagtgcaaggatgcccattcactcaagga

SEQ ID NO: 89011 - DNA, 578 bp, Chicken  19866894394853_1
tcagagcaggagcatggggaaggatgtgtgggccactgtgcccccctcgcgatggtgccactcgcctccacagagatgcacacagatgggatcggaatgctgctcgtgcctccttcccgggatgctggtgggaatgcaggaccagctcactgctcaccgtgccacatccctgcccgtcaggtaagctggtgtgcctggtcattgctggagtgatgcccccgggccgtgtgggttttgtcactgtcagtgtcccatctgtggggtcagaagcatccctgcaggtttttgtagctgctgctkcttttgtggcagcgttgtacgtgtgcttgtttgtgcaatgcccaggaggcccataagagacaagggatgaggcgagggcactrccrcagtgaggacagggcggtggcacattgcggggtstgtgcctgggttttctttctttcctgtaggatggaaaacagggcagcagcagaatttgtatggggaaagatacacagcatcagctctcaagtcatcttgcttttggagggagaaagaaaagggaagggtggggagacatcagttccccagggacacaa

SEQ ID NO: 89012 - DNA, 495 bp, Chicken  19866894394853_2
agatgggatcggaatgctgctcgtgcctccttcccgggatgctggtgggaatgcaggaccagctcactgctcaccgtgccacatccctgcccgtcaggtaagctggtgtgcctggtcattgctggagtgatgcccccgggccgtgtgggttttgtcactgtcagtgtcccatctgtggggtcagaagcatccctgcaggtttttgtagctgctgctkcttttgtggcagcgttgtacgtgtgcttgtttgtgcaatgcccaggaggcccataagagacaagggatgaggcgagggcactrccrcagtgaggacagggcggtggcacattgcggggtstgtgcctgggttttctttctttcctgtaggatggaaaacagggcagcagcagaatttgtatggggaaagatacacagcatcagctctcaagtcatcttgcttttggagggagaaagaaaagggaagggtggggagacatcagttccccagggacacaa

SEQ ID NO: 89013 - DNA, 492 bp, Chicken  19866894394853_3
tgggatcggaatgctgctcgtgcctccttcccgggatgctggtgggaatgcaggaccagctcactgctcaccgtgccacatccctgcccgtcaggtaagctggtgtgcctggtcattgctggagtgatgcccccgggccgtgtgggttttgtcactgtcagtgtcccatctgtggggtcagaagcatccctgcaggtttttgtagctgctgctkcttttgtggcagcgttgtacgtgtgcttgtttgtgcaatgcccaggaggcccataagagacaagggatgaggcgagggcactrccrcagtgaggacagggcggtggcacattgcggggtstgtgcctgggttttctttctttcctgtaggatggaaaacagggcagcagcagaatttgtatggggaaagatacacagcatcagctctcaagtcatcttgcttttggagggagaaagaaaagggaagggtggggagacatcagttccccagggacacaa

SEQ ID NO: 89014 - DNA, 458 bp, Chicken  19866894394853_4
gatgctggtgggaatgcaggaccagctcactgctcaccgtgccacatccctgcccgtcaggtaagctggtgtgcctggtcattgctggagtgatgcccccgggccgtgtgggttttgtcactgtcagtgtcccatctgtggggtcagaagcatccctgcaggtttttgtagctgctgctkcttttgtggcagcgttgtacgtgtgcttgtttgtgcaatgcccaggaggcccataagagacaagggatgaggcgagggcactrccrcagtgaggacagggcggtggcacattgcggggtstgtgcctgggttttctttctttcctgtaggatggaaaacagggcagcagcagaatttgtatggggaaagatacacagcatcagctctcaagtcatcttgcttttggagggagaaagaaaagggaagggtggggagacatcagttccccagggacacaa

SEQ ID NO: 89015 - DNA, 600 bp, Chicken  19866894394861_1
ggttacagatgacagcagtattgaaagactctgaaaatgcttctctgagctctccagacctaagtgaaaactttgagagaacaacagcttagaagtgttggagcctggagtgtgttgcccttgtaaacaagttctgcagaaagctggaagccctggagctgtggctgtacatcccttgcagcaggacttggcacagccacctcactcttatctttaagaagccttggttgaatggaacagtgtagtgttacttggtctgtgatctgtgagatctgattttgacaggcttcaggacctttwgttagcttggaagaagtcagcagctcccttcctttgaggttaagcagctgtgttacgggataccctacagaaatcatgcataggatccacatcaagatttaatttcagctgcattycaagacagcactttgttcctggttctacaggttcatattagaactttgtaggcaacaggtaaacttgcatttgtaagagaaagaaaaaaaatcacaatggtgtagcaattactcatttcttgaatagacccagttaaatcacagcatgaaaaatgaaggctacattggtatgtgcctaacctgc

SEQ ID NO: 89016 - DNA, 600 bp, Chicken  19866894394861_2
gcccttgtaaacaagttctgcagaaagctggaagccctggagctgtggctgtacatcccttgcagcaggacttggcacagccacctcactcttatctttaagaagccttggttgaatggaacagtgtagtgttacttggtctgtgatctgtgagatctgattttgacaggcttcaggacctttwgttagcttggaagaagtcagcagctcccttcctttgaggttaagcagctgtgttacgggataccctacagaaatcatgcataggatccacatcaagatttaatttcagctgcattycaagacagcactttgttcctggttctacaggttcatattagaactttgtaggcaacaggtaaacttgcatttgtaagagaaagaaaaaaaatcacaatggtgtagcaattactcatttcttgaatagacccagttaaatcacagcatgaaaaatgaaggctacattggtatgtgcctaacctgctgggaaatccttccatgacaaaatccttcttgagaatataaatatttcacagaagtgggttacacatggtctgaaccctgatataaatcactgcctactcagaccctgacctagtt

SEQ ID NO: 89017 - DNA, 600 bp, Chicken  19866894394864_1
atctcacctgggacaactgctgatgtttcctctgcatctgctttaagtcacgtctgcttgtttgctgctaccaacactctggacttcataccagaagagcccaggaccagtccccagcctgccaatgatttactaaaagacaacgtcccactgcttactgattaactggacttgacttggaaagagaaaaaaaatatacactgtttctgtaatatctcactggaaacaaattcatttccaggtgaaaagtagaagattcctagcaagagcttattgagatgaagcctctgtattcatcayctacatcaccaggagctcagctctgcaggaaggaaacaaacagaagggctttaatagtcctgcagtgctacaaactatgacagctggggggaaaaaaaaagagaagtaaagctgtgcaagtacataaatcctaggaagaacgactcagcagcacctttataagcccttagcagagcaaaagcaaacaaaagatcatcaaattaatagtttttctttgtaggaacaagtgttaaacgttcctggaaacgacagcactcagattttgtgtcagactttgcacggtcgttaactgcttgctcc

SEQ ID NO: 89018 - DNA, 568 bp, Chicken  19866894394866_1
cccaacctgaggcatgatgaatgtacactcctgcggctcacaactggaaagaacaatccttcaacagctttaggaggctgatattctctgagatgcttttgcagagggctggttgttaagaaaatgcagcactgccaactattcgctgataaaactgcagtgccacaaattcttcaagtgacaaagacatcgctgatcttgaaatcaaactatttaagcaagtactaggatttttctctcatttacaagtaatattaaatgaaacttcatggctcttttttaaaaatagaaaaggggagraatgctgtaaagataatgaagtacaatggcttttaatcttaaaaaacatcacaccacctaagcaatacggtctaccaaaacgatgtccagataaagtatatgtcttttcccttaatgcccatattgcatgtgaaacactggagcttagagtctccacacagattcatgcataaccaccagcttctcttgcagaaacctgcttttcttcacaattttaccaaggcactctggtctctcttaaggtcaaatatacttcactacatgataa

SEQ ID NO: 89019 - DNA, 600 bp, Chicken  19866894394870_1
gcattgagtaagtcagaggaaagtctaacctcactccaagtaatataaaagccaaaaaacctgtgtagtatgatacagacttcccttgagaagtaataagaggcaggaatatacagtccaggtgtgcgtcaggataaagaaggcagcagcttctttgtatgtcaactgttaattataatgcatcagcattttgacttaggtgagagtgtcagaacagtgagatgcaattcatacatatgcagtattgtaacacagcttttctgttacatttttcttaggaattctgattctgaaaaatcractagaagaatcaacaaaagaaaatttattccacctgccatgagcctggtaggcaaaaagacctatggatctgtcagcactgaagtggcaatggaactagctgaaaagatgatcctgacgttctcattgaatccagatcaagctayrtctctgattcacatagctcagatgatgacctcacatgaaaatatgaaaccagcggaagaacatcagattttccctatcacaatcatacatggtatatagcaaataattgtaaartctgcttttttattctttgcaaaaatgctggttgataag

SEQ ID NO: 89020 - DNA, 600 bp, Chicken  19866894394870_2
cagcttctttgtatgtcaactgttaattataatgcatcagcattttgacttaggtgagagtgtcagaacagtgagatgcaattcatacatatgcagtattgtaacacagcttttctgttacatttttcttaggaattctgattctgaaaaatcractagaagaatcaacaaaagaaaatttattccacctgccatgagcctggtaggcaaaaagacctatggatctgtcagcactgaagtggcaatggaactagctgaaaagatgatcctgacgttctcattgaatccagatcaagctayrtctctgattcacatagctcagatgatgacctcacatgaaaatatgaaaccagcggaagaacatcagattttccctatcacaatcatacatggtatatagcaaataattgtaaartctgcttttttattctttgcaaaaatgctggttgataagtaacacttgcattagtgaaatatccctaaattctcttagtgatgaaacagtagacttgctgcctttgtattaatcatatttacagtcctacacagacttagaaagaagtccttaagtttgggtaaacactgactaatttttaaagg

SEQ ID NO: 89021 - DNA, 600 bp, Chicken  19866894394870_3
agcttctttgtatgtcaactgttaattataatgcatcagcattttgacttaggtgagagtgtcagaacagtgagatgcaattcatacatatgcagtattgtaacacagcttttctgttacatttttcttaggaattctgattctgaaaaatcractagaagaatcaacaaaagaaaatttattccacctgccatgagcctggtaggcaaaaagacctatggatctgtcagcactgaagtggcaatggaactagctgaaaagatgatcctgacgttctcattgaatccagatcaagctayrtctctgattcacatagctcagatgatgacctcacatgaaaatatgaaaccagcggaagaacatcagattttccctatcacaatcatacatggtatatagcaaataattgtaaartctgcttttttattctttgcaaaaatgctggttgataagtaacacttgcattagtgaaatatccctaaattctcttagtgatgaaacagtagacttgctgcctttgtattaatcatatttacagtcctacacagacttagaaagaagtccttaagtttgggtaaacactgactaatttttaaaggc

SEQ ID NO: 89022 - DNA, 600 bp, Chicken  19866894394870_4
tgttacatttttcttaggaattctgattctgaaaaatcractagaagaatcaacaaaagaaaatttattccacctgccatgagcctggtaggcaaaaagacctatggatctgtcagcactgaagtggcaatggaactagctgaaaagatgatcctgacgttctcattgaatccagatcaagctayrtctctgattcacatagctcagatgatgacctcacatgaaaatatgaaaccagcggaagaacatcagattttccctatcacaatcatacatggtatatagcaaataattgtaaartctgcttttttattctttgcaaaaatgctggttgataagtaacacttgcattagtgaaatatccctaaattctcttagtgatgaaacagtagacttgctgcctttgtattaatcatatttacagtcctacacagacttagaaagaagtccttaagtttgggtaaacactgactaatttttaaaggcactataagaccactcttcatgcatttccttaaaagtcatgccttgcgtgagatccttctgataaggaccttgacattagaatcataacatatattctgtcagcatagaactttt

SEQ ID NO: 89023 - DNA, 600 bp, Chicken  19866894394871_1
ttagtcgatcacaaccatgttcccctgccctatttaatgaagataaaatgagtcatgctagccttttgttatttgataatggtgcatgaaaactgagaggctctagaatgtttgagcacttaaagcaactgtagttgaagtcatgttaaattctttctagttagcttatgcacacatgtgcctgttctggaggccagtgcaagtatgaggataagcacacctaaccgcacaaactaagtttaggtaggtatagctaagcgtatgccaagatttgcacatacagaaccgtagattaaaaaytaaatatcagatttggtaaatatgagcatcttctcttagattggactgtgtctcagtttcacagaaacataaaacttaygttttgtgtttcataatcttatcacatgccttttttttttttcttttgtgtagagcatggcaaggcaaaagtattccatctgtagattatcactttgctttcctccctatttacgacaacatgaaaagtatcatctgactggactttttgctcatgataagtacaggaagccctggacaagaagtaagttgtctggtccctaaggtttagtttaaattcac

SEQ ID NO: 89024 - DNA, 600 bp, Chicken  19866894394871_2
tggtgcatgaaaactgagaggctctagaatgtttgagcacttaaagcaactgtagttgaagtcatgttaaattctttctagttagcttatgcacacatgtgcctgttctggaggccagtgcaagtatgaggataagcacacctaaccgcacaaactaagtttaggtaggtatagctaagcgtatgccaagatttgcacatacagaaccgtagattaaaaaytaaatatcagatttggtaaatatgagcatcttctcttagattggactgtgtctcagtttcacagaaacataaaacttaygttttgtgtttcataatcttatcacatgccttttttttttttcttttgtgtagagcatggcaaggcaaaagtattccatctgtagattatcactttgctttcctccctatttacgacaacatgaaaagtatcatctgactggactttttgctcatgataagtacaggaagccctggacaagaagtaagttgtctggtccctaaggtttagtttaaattcactttggactgacagaagagtttctgcttgagcataatatggtgtagtctaataggaaaaaatgtatttccagaattggca

SEQ ID NO: 89025 - DNA, 600 bp, Chicken  19866894394871_3
tttgagcacttaaagcaactgtagttgaagtcatgttaaattctttctagttagcttatgcacacatgtgcctgttctggaggccagtgcaagtatgaggataagcacacctaaccgcacaaactaagtttaggtaggtatagctaagcgtatgccaagatttgcacatacagaaccgtagattaaaaaytaaatatcagatttggtaaatatgagcatcttctcttagattggactgtgtctcagtttcacagaaacataaaacttaygttttgtgtttcataatcttatcacatgccytttttttttttcttttgtgtagagcatggcaaggcaaaagtattccatctgtagattatcactttgctttcctccctatttacgacaacatgaaaagtatcatctgactggactttttgctcatgataagtacaggaagccctggacaagaagtaagttgtctggtccctaaggtttagtttaaattcactttggactgacagaagagtttctgcttgagcataatatggtgtagtctaataggaaaaaatgtatttccagaattggcagtcttatagcatttgaaggtaggatttattc

SEQ ID NO: 89026 - DNA, 600 bp, Chicken  19866894394879_1
caaaaaggcccaaatacacggtcatattatgccattttctggaggccagagcactgctatgtattgaatagacatgcaacagaaaaattctccaggaaaacttatgcaagcataaggaataacattaaatggattataataatatctcttgtagtagttagttttctacttgacttaattcatacttgttctaaacctgcagtggcagctgaagcagctgttcctgccctaaagaaatctgtacaaaatttggtcagatttaagctgtattagctcaaaacaaacaggcattaaaaaaayaagcaaacaacaaaacaaacaaacaaacaaaaaaaacacccaacatgcacacaggcaaacaaaagtaatgctgaaaactagagtttggtaattcagatgcttttctaagatcaaacaggaggaatcatggatgcatatgcagtagacagtcccatggtgctggaggattcyacagcacttggaaggagtggctatgagaaatccttcagccagacagcagatctgtttctctggttactctggaataatgaaggactcccagaaaaaagttaggatttgctcaatcaaatattttgttaa

SEQ ID NO: 89027 - DNA, 434 bp, Chicken  19866894394879_2
gacttaattcatacttgttctaaacctgcagtggcagctgaagcagctgttcctgccctaaagaaatctgtacaaaatttggtcagatttaagctgtattagctcaaaacaaacaggcattaaaaaaayaagcaaacaacaaaacaaacaaacaaacaaaaaaaacacccaacatgcacacaggcaaacaaaagtaatgctgaaaactagagtttggtaattcagatgcttttctaagatcaaacaggaggaatcatggatgcatatgcagtagacagtcccatggtgctggaggattcyacagcacttggaaggagtggctatgagaaatccttcagccagacagcagatctgtttctctggttactctggaataatgaaggactcccagaaaaaagttaggatttgctcaatcaaatattttgttaaaatgt

SEQ ID NO: 89028 - DNA, 600 bp, Chicken  19866894394880_1
ctttcctcttcctgttgtcctctatctgccttcaccacttctccctttttgccatctttacagggttttcctttcctgacctgagtctcctctttgctggaccttgacaggttttgtttgctctaagctggctttctctgagactgaactagcaacttgtctaactgctgtttctgactagacactaatccatttaccatctttgagtgactataccgtagtttcttggcctttgtttcgttccttgctgtgtcatgtggatgggcctgtggtagcagtgtccttgctcaggctctgacytgacaggtgtgggtggagaccaagtgagataagtgctcatagctccttctagaggagcagagaagcctcttatctagggacaaatgtaaaaccacatgcatggaccgatgtaggtgtgcagtgagaaccttggtttattctgcttgactcagtgcttttttttatctttctagatcatgtttgagaccttcaacaccccagccatgtatgtagccatccaggctgtgctgtccctgtatgcctctggtcgtaccactggtattgtgatggactctggtgatggtgttacccacactgtgc

SEQ ID NO: 89029 - DNA, 599 bp, Chicken  19866894394881_1
  misc_feature (1)..(27): n is any nucleotide
nnnnnnnnnnnnnnnnnnnnnnnnnnnaactttgtatagtgaaggataatgttggatgaagatttttgagcaaaggttattctcatatgcaagagtagcgactttgtaaattcaacagaatagacctgataaagttacaacaacagatcttcaacaaagtcaatatgaccacagagatacaaggattcttaggcacaaatgctcttatacctactgctgctgttaaaattaaccaaacatttgctgcagggaaccgtgggggaaggtttttgcttgtattttgactgcaaattgaaaatytgtcctgttgatagtatgtttgcttttgagagttatgtatttttggataaggcactaaagtaaaatacatccacctcattcttagaatttacctagagactgttctctacgtgattctactctactcaaatacagactcctaggccaaggggtgcagaacgagcattcctaccragcatctacagactcagtatattagctgtgttgtgttctgacatctgtcaagcactgatcaccacctagcctttaacgagagcagtttggagaaagasactcttcaagatgaaagactggcaaca

SEQ ID NO: 89030 - DNA, 600 bp, Chicken  19866894394881_2
agatacaaggattcttaggcacaaatgctcttatacctactgctgctgttaaaattaaccaaacatttgctgcagggaaccgtgggggaaggtttttgcttgtattttgactgcaaattgaaaatytgtcctgttgatagtatgtttgcttttgagagttatgtatttttggataaggcactaaagtaaaatacatccacctcattcttagaatttacctagagactgttctctacgtgattctactctactcaaatacagactcctaggccaaggggtgcagaacgagcattcctaccragcatctacagactcagtatattagctgtgttgtgttctgacatctgtcaagcactgatcaccacctagcctttaacgagagcagtttggagaaagasactcttcaagatgaaagactggcaacatttgcttcactctaaygatcaacagcacaatacagtgcaaagccagttcacatatttatatgtatacgtatgacctccctcagatgattatttttttaaaagtaaaattttattcatgtaccaaaatgattcaatttagatcaggaagttttttgaagaaaagtaatgtggtaca

SEQ ID NO: 89031 - DNA, 600 bp, Chicken  19866894394881_3
cttgtattttgactgcaaattgaaaatytgtcctgttgatagtatgtttgcttttgagagttatgtatttttggataaggcactaaagtaaaatacatccacctcattcttagaatttacctagagactgttctctacgtgattctactctactcaaatacagactcctaggccaaggggtgcagaacgagcattcctaccragcatctacagactcagtatattagctgtgttgtgttctgacatctgtcaagcactgatcaccacctagcctttaacgagagcagtttggagaaagasactcttcaagatgaaagactggcaacatttgcttcactctaaygatcaacagcacaatacagtgcaaagccagttcacatatttatatgtatacgtatgacctccctcagatgattatttttttaaaagtaaaattttattcatgtaccaaaatgattcaatttagatcaggaagttttttgaagaaaagtaatgtggtacagtaatttgattatgcctacaatcagatagtgcattctacaggcaaacaatttctgtgaaactgaacagtttcttgctatgtagctgcgattcgtgcat

SEQ ID NO: 89032 - DNA, 600 bp, Chicken  19866894394881_4
atgtttgcttttgagagttatgtatttttggataaggcactaaagtaaaatacatccacctcattcttagaatttacctagagactgttctctacgtgattctactctactcaaatacagactcctaggccaaggggtgcagaacgagcattcctaccragcatctacagactcagtatattagctgtgttgtgttctgacatctgtcaagcactgatcaccacctagcctttaacgagagcagtttggagaaagasactcttcaagatgaaagactggcaacatttgcttcactctaaygatcaacagcacaatacagtgcaaagccagttcacatatttatatgtatacgtatgacctccctcagatgattatttttttaaaagtaaaattttattcatgtaccaaaatgattcaatttagatcaggaagttttttgaagaaaagtaatgtggtacagtaatttgattatgcctacaatcagatagtgcattctacaggcaaacaatttctgtgaaactgaacagtttcttgctatgtagctgcgattcgtgcatttaaaatgataaatttaaagctatcaatagtaaatcaattgca

SEQ ID NO: 89033 - DNA, 460 bp, Chicken  19866894394881_5
atctgtttctaggtttttcaaggacagttcgctttacaaaactttaatgtatacacaaaaatcatccatcagcacatctgatccaaatatactaatgatttttattggtcagatctttaaagtgaggtttatttttatggagtatgcattaattaacccaacatgtactatcttccagtatatctagccaagtactttcatttaaacatgtttattgtgaaatgtttgcattcccaacatttgtggcccacacacagactatttcatacttcacttctgagcagttactaaagttaaaamgagttattgtttttgattaatgcatttttggggactttttttttttttaatgttccaaaactaagctctgaagacattgtacatgaaaacagccacatgtacttatctttaaayggagtactaagagaaaatgagtgggattcactttagatcacttcca

SEQ ID NO: 89034 - DNA, 346 bp, Chicken  19866894394881_6
ctttaaagtgaggtttatttttatggagtatgcattaattaacccaacatgtactatcttccagtatatctagccaagtactttcatttaaacatgtttattgtgaaatgtttgcattcccaacatttgtggcccacacacagactatttcatacttcacttctgagcagttactaaagttaaaamgagttattgtttttgattaatgcatttttggggactttttttttttttaatgttccaaaactaagctctgaagacattgtacatgaaaacagccacatgtacttatctttaaayggagtactaagagaaaatgagtgggattcactttagatcacttcca

SEQ ID NO: 89035 - DNA, 600 bp, Chicken  19866894394883_1
agcataacccacctttcaggacaggaaggcaggcagaaaggtgagtcctctacctttgttcactgagcatttcaagttgagctgtggagatattttctgctgctcagatgcatggagtacagagatttcttttatccactgacagtgctgttcaaggggaatcattctgaccagctctgtcttcatcttcttgtcaaactcagcctaaagaagccagaaattctcagtcccaatttctctcctgcagaaacataactgcatgaaataatgaaaatgatggaaaatagctaaaatcattcyacttaataatttctggtttgcttttgctgatattaggaaaacttcttctccaaaagagcagtggtgcattgtcacaggctgccaaggttggtggtggattcagcatccctggaggtgttcaggagcagtggagatgcagcactgaaggacatggttagagatgtggtggggatgggttggggttggacttggtgatcttagaggccttttccagcctcaatgattctattctatgattctatgaaaggagaaagggtaaatggaacaacattctgcttctaatccttgttgttgcaattc

SEQ ID NO: 89036 - DNA, 600 bp, Chicken  19866894394886_1
ctcgggtgaatctcatccagccccatggacttgtggcagtccaggtgaagtagcaggtctctgtttcctcctgaattgtgggggggttttgtctgctccccaggtgagactacgaggttggagagtggaataccccgatgataactggtctgacttttaaagatagatgtaaagaaggcattcagaacctctgccttttccttatccccagtggttgcattcccagcctcatccagtaaagaatggagattctccttggtcctcctcttattgctgacatgaggacaagggctggcaatygtgcagcttctgccagctgcttgtagaacacctcatttgtctcttcatcctggttcagtggtctataacagatgcccatcaggatgtctgccttgtcagcccttcccctgatctttacccatagggattcaaccttatcatccccagctgtaacatcaaagcactctctaacatagagagccatgccgccacccatccttccttgcctatccctcctgaagactttgtagccatccactgcagcactccagttatgggagcggtcccaccatgcttccataatggcaactaggtcatagc

SEQ ID NO: 89037 - DNA, 600 bp, Chicken  19866894394890_1
gtgcattcatggaagatctctgtctgagtaccaaactgaggtcgatgtgcccaaatataacattctaaaccagttcattagaaagcacgagcaggacacggttgtggttttgttccctgcaggaggtttcaaagtagcacaacatttttcaggacactgaataggaatgttcatacagtggagctgtgggaaaaaagaggaaatgttgtcacagcttgctgattattttatcaaggaagtaactatggataaaatgatctccatatgctcccattgcagttaccttccttccacgtgtartgcttagctcaagacgtgcgtgccaaagaccgcatctgcactgggagtgctggaatgtttaccccagacaacagctcctcttagccctgttatctgacctgagtcatagacaggcatcgtcccacatggaaaggagagttaccacctaccacaccccaccaagccatgggctctgctccaacctagggccatgcttccgtctgtcttatctgccttgggaatgtgagagctggcggagcatgacgcatcccatggagagtgagcaataggagcgtggcaaacagtctgagaacggcccac

SEQ ID NO: 89038 - DNA, 599 bp, Chicken  19866894394903_1
  misc_feature (1)..(25): n is any nucleotide
nnnnnnnnnnnnnnnnnnnnnnnnngtccttacctcccatgctgcccgaagggtgagcagaccgcagtggagaatagccagggctagaggcaaaggaggaggagtgaagatgattgaaggacattacccatcttccttggcaaagcttcagaatactgtcttggaggaaaattctttcttgctacctaagccatttgagtatgacttttgttctccttcagtcattcctgtctgcagctcccttgtaacacccaagctgggatctcctgaaaacaggttgcaaaagtagcattcctgctycccagcatcccttctggctgcagcatggagagaggcaaagcaagagagaagagcagacatctccaattttgtttgccaagcgcctttttcagatacttctgcatcaggaagcaaatggcagggtctttttcctatttggacaagagctgaccctgtagacacacagctgcactcccagctaatagtcaaccactgcagctgtgtgggatgagcctgggctgggtactcttctcagacaatggctgggaatgggcatctttggagtcttagggccatttgcatccctcggggtcccagca

SEQ ID NO: 89039 - DNA, 600 bp, Chicken  19866894394903_2
aagccatgggatcttcagtgaccacaaatggctaagacctccattttacatctcttccaaaaagcaatcatacgcattttcgcaggagagcttttattctcatgcagatagggtaggcagtgctgtgtcctctcccaagtgcatgcggatctggtcagtccgagcacacagaagaacgacatgaaacatgtttgaccttcacaacttccctttacagaccagcaagctaaaaccctgaaggaattttcctgagcgagtttgtccaaagcaacgttcaccacctcattcaatatttgcctkcaaaaaaaaatgccaattattgagagacagtcctggctgggcatcaataggcagccaggtgtgagaagttgaagagaaatacatctcattaatgtggaattgtttttaggttaataatcttgcgttaattttcctttaaaatattgtctttgaccgttaaacgctcgcactgttataaaaagaacgtaataaatgatcttgaagcaaattctcctgccaaatgtcataatttatttgcataattagctcttaattttaattcaatatgcaaatccacgcttcctttaaattgcagcagcc

SEQ ID NO: 89040 - DNA, 599 bp, Chicken  19866894394908_1
  misc_feature (1)..(73): n is any nucleotide
nnnnnnnnnnnnnnnnnnnnnnnnnnnnnnnnnnnnnnnnnnnnnnnnnnnnnnnnnnnnnnnnnnnnnnnnnacactgatcctatgttgggtaaacaatcatgcaatctgtggcaaactacataaaacaaaccataaccagcttatatttgacaaaaaaaggatcaaagcaagacagaacaaaagggataagcctaaatacgtatttcacagcaatacacgttctaaataggaaaaaagtacttttctgagcaggaaaatgtgaatgagagaacagttttaacacgcacagttgtcagwtatgtccaacatatcagaaacaaatgacaaatgaaatgtttcttgattgttgaaacaacacaatcacactaagatgcttgaagatgtcattgcaaattaccagttgtacaatccagaaagctttaagaaaagcaaaattgaacatttgcaattagaaaaccttttttttttttycctggaaaacaagatcaaaagaacaaatgatgctagatacacatacacatgtatatatacatcaatatatacatacgcacactcyaaaataaaaccaaagtttattcaataarttatttagtgga

SEQ ID NO: 89041 - DNA, 600 bp, Chicken  19866894394908_2
acagaacaaaagggataagcctaaatacgtatttcacagcaatacacgttctaaataggaaaaaagtacttttctgagcaggaaaatgtgaatgagagaacagttttaacacgcacagttgtcagwtatgtccaacatatcagaaacaaatgacaaatgaaatgtttcttgattgttgaaacaacacaatcacactaagatgcttgaagatgtcattgcaaattaccagttgtacaatccagaaagctttaagaaaagcaaaattgaacatttgcaattagaaaaccttttttttttttycctggaaaacaagatcaaaagaacaaatgatgctagatacacatacacatgtatatatacatcaatatatacatacgcacactcyaaaataaaaccaaagtttattcaataarttatttagtggatattaatgaaagtttatcctctaaaggttattgacttatttgaaagttacagtcccagtcctcaatctgcatccacaagaaagmtctgccacgtgactgcaaagctccatgagatcaaatgacttacaaactcttacagttaagttttttactgagctagtgctctgcaaacaaa

SEQ ID NO: 89042 - DNA, 600 bp, Chicken  19866894394908_3
atgtgaatgagagaacagttttaacacgcacagttgtcagwtatgtccaacatatcagaaacaaatgacaaatgaaatgtttcttgattgttgaaacaacacaatcacactaagatgcttgaagatgtcattgcaaattaccagttgtacaatccagaaagctttaagaaaagcaaaattgaacatttgcaattagaaaaccttttttttttttycctggaaaacaagatcaaaagaacaaatgatgctagatacacatacacatgtatatatacatcaatatatacatacgcacactcyaaaataaaaccaaagtttattcaataarttatttagtggatattaatgaaagtttatcctctaaaggttattgacttatttgaaagttacagtcccagtcctcaatctgcatccacaagaaagmtctgccacgtgactgcaaagctccatgagatcaaatgacttacaaactcttacagttaagttttttactgagctagtgctctgcaaacaaacaatacttcaagtttggctttctaacattaatactttttgaggtgacaggttcagaatccggaaaaggtatgcaaatgtaccaca

SEQ ID NO: 89043 - DNA, 600 bp, Chicken  19866894394908_4
cacagttgtcagwtatgtccaacatatcagaaacaaatgacaaatgaaatgtttcttgattgttgaaacaacacaatcacactaagatgcttgaagatgtcattgcaaattaccagttgtacaatccagaaagctttaagaaaagcaaaattgaacatttgcaattagaaaaccttttttttttttycctggaaaacaagatcaaaagaacaaatgatgctagatacacatacacatgtatatatacatcaatatatacatacgcacactcyaaaataaaaccaaagtttattcaataarttatttagtggatattaatgaaagtttatcctctaaaggttattgacttatttgaaagttacagtcccagtcctcaatctgcatccacaagaaagmtctgccacgtgactgcaaagctccatgagatcaaatgacttacaaactcttacagttaagttttttactgagctagtgctctgcaaacaaacaatacttcaagtttggctttctaacattaatactttttgaggtgacaggttcagaatccggaaaaggtatgcaaatgtaccacatcaacagagctaggctcagtgtgggtca

SEQ ID NO: 89044 - DNA, 600 bp, Chicken  19866894394908_5
atgtcattgcaaattaccagttgtacaatccagaaagctttaagaaaagcaaaattgaacatttgcaattagaaaaccttttttttttttycctggaaaacaagatcaaaagaacaaatgatgctagatacacatacacatgtatatatacatcaatatatacatacgcacactcyaaaataaaaccaaagtttattcaataarttatttagtggatattaatgaaagtttatcctctaaaggttattgacttatttgaaagttacagtcccagtcctcaatctgcatccacaagaaagmtctgccacgtgactgcaaagctccatgagatcaaatgacttacaaactcttacagttaagttttttactgagctagtgctctgcaaacaaacaatacttcaagtttggctttctaacattaatactttttgaggtgacaggttcagaatccggaaaaggtatgcaaatgtaccacatcaacagagctaggctcagtgtgggtcataaaaaacacctgtgacgttaaaatagggacaactttgtcaagtagagtaagataaatggttatataattcacacatgcctaggacagaattgaag

SEQ ID NO: 89045 - DNA, 600 bp, Chicken  19866894394918_1
tgagttttcatagaactcattcttggatctttacttctcagtttcttagattgttatttttgcactccttcacatgcaagtaatcagagttgttaacatgaacatttctaactctgctgggggcaagcactacttgatttcagtattaagtagcagtttttcccactcccctttatttccagttcttacatgagcaggtgcttttcgagaccattcaggtaatactttctagaaggttggtgatgctgaggcaagactatggctttgaaataattaaatttttaattataacaactaaartagtacttgccaaagtcacaacaaatcttgagaagctgcagattgagacagtttcctcactaatgtacatcatcttaacatatttaagctgatgtacagcrggtgaaaactgagcccatctgctttcatactagcctaaaaactatgcatttcttaagtagttgccagaattgccagcaaaaatctctatacattttcacttcagaatccaaaaaacacttcctacttcctccagatcttgcagaaataatcttcacaggagtgacttttcctcttaggtagcttctgctggcttatata

SEQ ID NO: 89046 - DNA, 600 bp, Chicken  19866894394918_2
acatttctaactctgctgggggcaagcactacttgatttcagtattaagtagcagtttttcccactcccctttatttccagttcttacatgagcaggtgcttttcgagaccattcaggtaatactttctagaaggttggtgatgctgaggcaagactatggctttgaaataattaaatttttaattataacaactaaartagtacttgccaaagtcacaacaaatcttgagaagctgcagattgagacagtttcctcactaatgtacatcatcttaacatatttaagctgatgtacagcrggtgaaaactgagcccatctgctttcatactagcctaaaaactatgcatttcttaagtagttgccagaattgccagcaaaaatctctatacattttcacttcagaatccaaaaaacacttcctacttcctccagatcttgcagaaataatcttcacaggagtgacttttcctcttaggtagcttctgctggcttatataagtggattcaggaagaattgctcttactatattagataccacaccccatactcattatcaatgtatgccttaaacaaagaaggtaaagatgcacaatattg

SEQ ID NO: 89047 - DNA, 600 bp, Chicken  19866894394920_1
gatgtattttgagtgccagataatgttagggtaggttaaatgttaaggagtttaaccccatatgccaaggctggagtcatggtcccactttccaggggagacttacatttgacagacattgaaagatgagctcagtggaacggtagagagaaaactaaacccatagcacagactgagcctgcgctcacattcatgatgccagtgggatttgtgatgctggagctctggctgtgggtgtggggccacaccaaatgcatttaagtgcaacaggtggcacagtatgtgctgccaaatcatctktttgctgagcttggacttgtggaaagcagacttattgctgaaaaggacatctgatttacagtgccgattcccttttctcaccttcttttatttctcataagccaaccaaacttcatcctttaagcagttttgttttctgctcccacagctccatctgaagggctgtcctgagcttcccttcttggacaggctgaaatctcccagtctgaacatcattcacagccatttgcttccatgccagcaaaacccattagcttaaacatttagcttgttccctagcatttactccttctcatgtgt

SEQ ID NO: 89048 - DNA, 599 bp, Chicken  19866894394926_1
  misc_feature (1)..(10): n is any nucleotide
nnnnnnnnnnttttttttgttgcttgaaaaatgttgtagggtttgtgtagagcgaggaccgtgaaagagtaggtcaagcataattaatagtccacaggctaaaattatccatgtctgatttatttttggtaccaaatacaatccttgctcttatgtccatgccgaagattgtcaaattcttgtcaagtaaaagtaaaatgtgattcagcatgcctcttttggctgagcaggtgtatgattatcttggtttacctttcatctgtgtatatgattctgcttctagcaacttaaaatacttawcattatgatttcaaaggcatcttattgttaataatgtatttcaagataagatgctagctattctgattgaatttctcagggtaccactttgactaaacttaggtttattgcaagaakcttgccgaggaataaacttcatgattatcctcttgtcattcaaatcagtctcagaattattttcactccaagcttcaaaaaaaaaaaaaaaaaaaaaagacaaaataatactcatctttcatctttctgaacaatgattgatatcttttgatttatagaattttgactgatgatgtaagtgt

SEQ ID NO: 89049 - DNA, 600 bp, Chicken  19866894394926_2
atttatttttggtaccaaatacaatccttgctcttatgtccatgccgaagattgtcaaattcttgtcaagtaaaagtaaaatgtgattcagcatgcctcttttggctgagcaggtgtatgattatcttggtttacctttcatctgtgtatatgattctgcttctagcaacttaaaatacttawcattatgatttcaaaggcatcttattgttaataatgtatttcaagataagatgctagctattctgattgaatttctcagggtaccactttgactaaacttaggtttattgcaagaakcttgccgaggaataaacttcatgattatcctcttgtcattcaaatcagtctcagaattattttcactccaagcttcaaaaaaaaaaaaaaaaaaaaaagacaaaataatactcatctttcatctttctgaacaatgattgatatcttttgatttatagaattttgactgatgatgtaagtgtacagactcaaggacctaaaaatttcacaaaatcatagaatcattaaggttagaaaagacctcaaaaatattctaatcctaccatcaacccacttccaccatgcccactaaaacatgta

SEQ ID NO: 89050 - DNA, 600 bp, Chicken  19866894394936_1
ggttgaggatgcctcctccctggaagcattccatacaagcaatagagtctccttgataatgacaacactgatggataatatgaaagtattgaagcaaataaactatatattgctgttcagatcattctcattagatcatctttggtagccttcagcttagcacacactagggttgtgggacctttgggactttttttctctgaataatttgcttcccatccactttttgagattgatctttaactttcgctctcaaaggtaagggttttgctggacaggcaagattagagatgtgctcartttttcaagttggcaaggtagacacttacacttagttctaagctttggactgacaagaggtaaaacgtgattgcttacagcccccagtcagatatcaaacttctctgggtacaaccctgtgctcctctttctataagatagtagtaaattacccacgtggcatactaaatattttttaaaatacttcatttcccctgaactttttatcagaaacattaatttctgctgtactaatacacagttcttatttcttattatatagaggcttgataagtctaaaagctaagtatcctggcattt

SEQ ID NO: 89051 - DNA, 600 bp, Chicken  19866894394940_1
cttgtttttgtcttatgtggggaagggaccaatactgttcatttctggttgaggtttaatagttctccaagagtgattttcagtggtcactgatattttaaagtgatttcaagggcttggcagcctcctgacgccacctggtcaaacagacatgggaggctgcaggagggttttgtccaggagtgctcagcaccagcacatgttggcaaatgggagaagggatgtggacttttaagacaaatactctgtttgcagtatgatctatactttgaatacttgagttttccctgacggcttttktgggctgattaggatgggacaatacggacatctagtggctgtgtaggaccattatgacagacmgaatacctcagcagcagcagagcgagcagtcctgcctggtcgttgtgtagtttcctggtttgatttatgtgctgtgaaatcatagaagcatagaatgattaaggtttgaaaagacctctaagatcatctagtccaaccatccacctaccatcaatactgccctctaaaccacatccaagatgttttgcagtagatgttttgcagcagcatgcctctgaagttctacgttagggggaa

SEQ ID NO: 89052 - DNA, 600 bp, Chicken  19866894394940_2
tctccaagagtgattttcagtggtcactgatattttaaagtgatttcaagggcttggcagcctcctgacgccacctggtcaaacagacatgggaggctgcaggagggttttgtccaggagtgctcagcaccagcacatgttggcaaatgggagaagggatgtggacttttaagacaaatactctgtttgcagtatgatctatactttgaatacttgagttttccctgacggcttttktgggctgattaggatgggacaatacggacatctagtggctgtgtaggaccattatgacagacmgaatacctcagcagcagcagagcgagcagtcctgcctggtcgttgtgtagtttcctggtttgatttatgtgctgtgaaatcatagaagcatagaatgattaaggtttgaaaagacctctaagatcatctagtccaaccatccacctaccatcaatactgccctctaaaccacatccaagatgttttgcagtagatgttttgcagcagcatgcctctgaagttctacgttagggggaaacacagggagttgttttgcctgctgttttgacagtgtatcagatcccatttctgcaggagcag

SEQ ID NO: 89053 - DNA, 599 bp, Chicken  19866894394953_1
  misc_feature (1)..(176): n is any nucleotide
nnnnnnnnnnnnnnnnnnnnnnnnnnnnnnnnnnnnnnnnnnnnnnnnnnnnnnnnnnnnnnnnnnnnnnnnnnnnnnnnnnnnnnnnnnnnnnnnnnnnnnnnnnnnnnnnnnnnnnnnnnnnnnnnnnnnnnnnnnnnnnnnnnnnnnnnnnnnnnnnnnnnnnnnnnnnnnnngctgcgtggactcggctttgatcggcgcaggggctgctgcagaccgtgcggagcagtgctgctaatggaattgttccagcactaacgggatttcactgaatgcgtggggatggcggagcagccrgggctgctggcagattgctctttacagtgccaggcactccaacagcctgagaaaactgcccctagagcccgccatcaacacgggacccccagggttcygcactcagccccgtcagcttcccaccgcagtaggctttgatcaaaacggggtaagaaagccaggacgggagcaaggaggmcccccccctcccccagcaattaatccracagctttaagcaaastcccgatgaaaacaaatagaccgccttccacccgcaaatgtttgcaaagctcggcagcctgggacaggggaaagttcc

SEQ ID NO: 89054 - DNA, 599 bp, Chicken  19866894394953_2
  misc_feature (1)..(78): n is any nucleotide
nnnnnnnnnnnnnnnnnnnnnnnnnnnnnnnnnnnnnnnnnnnnnnnnnnnnnnnnnnnnnnnnnnnnnnnnnnnnnngctgcgtggactcggctttgatcggcgcaggggctgctgcagaccgtgcggagcagtgctgctaatggaattgttccagcactaacgggatttcactgaatgcgtggggatggcggagcagccrgggctgctggcagattgctctttacagtgccaggcactccaacagcctgagaaaactgcccctagagcccgccatcaacacgggacccccagggttcygcactcagccccgtcagcttcccaccgcagtaggctttgatcaaaacggggtaagaaagccaggacgggagcaaggaggmcccccccctcccccagcaattaatccracagctttaagcaaastcccgatgaaaacaaatagaccgccttccacccgcaaatgtttgcaaagctcggcagcctgggacaggggaaagttcccaggaaattaaaggagggtgagcaagcgtccgggctttctggcacaaacgtactgctgtaatgagtaaccagcctgagccacccagggcagcagttgc

SEQ ID NO: 89055 - DNA, 600 bp, Chicken  19866894394953_3
tgcgtggactcggctttgatcggcgcaggggctgctgcagaccgtgcggagcagtgctgctaatggaattgttccagcactaacgggatttcactgaatgcgtggggatggcggagcagccrgggctgctggcagattgctctttacagtgccaggcactccaacagcctgagaaaactgcccctagagcccgccatcaacacgggacccccagggttcygcactcagccccgtcagcttcccaccgcagtaggctttgatcaaaacggggtaagaaagccaggacgggagcaaggaggmcccccccctcccccagcaattaatccracagctttaagcaaastcccgatgaaaacaaatagaccgccttccacccgcaaatgtttgcaaagctcggcagcctgggacaggggaaagttcccaggaaattaaaggagggtgagcaagcgtccgggctttctggcacaaacgtactgctgtaatgagtaaccagcctgagccacccagggcagcagttgctttgcagtgtcatgcaaggaaataaatagcatgactatcatatattaacttccagtggaaaggctgtcctgacagcgcgtg

SEQ ID NO: 89056 - DNA, 600 bp, Chicken  19866894394953_4
ggggctgctgcagaccgtgcggagcagtgctgctaatggaattgttccagcactaacgggatttcactgaatgcgtggggatggcggagcagccrgggctgctggcagattgctctttacagtgccaggcactccaacagcctgagaaaactgcccctagagcccgccatcaacacgggacccccagggttcygcactcagccccgtcagcttcccaccgcagtaggctttgatcaaaacggggtaagaaagccaggacgggagcaaggaggmcccccccctcccccagcaattaatccracagctttaagcaaastcccgatgaaaacaaatagaccgccttccacccgcaaatgtttgcaaagctcggcagcctgggacaggggaaagttcccaggaaattaaaggagggtgagcaagcgtccgggctttctggcacaaacgtactgctgtaatgagtaaccagcctgagccacccagggcagcagttgctttgcagtgtcatgcaaggaaataaatagcatgactatcatatattaacttccagtggaaaggctgtcctgacagcgcgtgggcctaygggggaccataaacatttgg

SEQ ID NO: 89057 - DNA, 600 bp, Chicken  19866894394953_5
gtgcggagcagtgctgctaatggaattgttccagcactaacgggatttcactgaatgcgtggggatggcggagcagccrgggctgctggcagattgctctttacagtgccaggcactccaacagcctgagaaaactgcccctagagcccgccatcaacacgggacccccagggttcygcactcagccccgtcagcttcccaccgcagtaggctttgatcaaaacggggtaagaaagccaggacgggagcaaggaggmcccccccctcccccagcaattaatccracagctttaagcaaastcccgatgaaaacaaatagaccgccttccacccgcaaatgtttgcaaagctcggcagcctgggacaggggaaagttcccaggaaattaaaggagggtgagcaagcgtccgggctttctggcacaaacgtactgctgtaatgagtaaccagcctgagccacccagggcagcagttgctttgcagtgtcatgcaaggaaataaatagcatgactatcatatattaacttccagtggaaaggctgtcctgacagcgcgtgggcctaygggggaccataaacatttgggcactgctatgagcag

SEQ ID NO: 89058 - DNA, 589 bp, Chicken  19866894394953_6
ctcccccagcaattaatccracagctttaagcaaastcccgatgaaaacaaatagaccgccttccacccgcaaatgtttgcaaagctcggcagcctgggacaggggaaagttcccaggaaattaaaggagggtgagcaagcgtccgggctttctggcacaaacgtactgctgtaatgagtaaccagcctgagccacccagggcagcagttgctttgcagtgtcatgcaaggaaataaatagcatgactatcatatattaacttccagtggaaaggctgtcctgacagcgcgtgggcctaygggggaccataaacatttgggcactgctatgagcagccataaaacaagaaatgggactcaatcacatttaattgctttagagaagtgtgtccatcactggtgtgtccatcagttatcttcccctccacactgctgctccatcacagaccaagagctggcaacgagcccatcagggcatgcatggcaggggcaaggtctggaagggaagtgtcctaaaagaagtttgctgtgtagaagctgaagtccaacctgctgaaagcatggggaagttaactgatgaaaggatgcg

SEQ ID NO: 89059 - DNA, 600 bp, Chicken  19866894394958_1
caaggcccctttcttccttggagccaggacagccgggtactgacagcacagagcagcctgcagagctgaagcccatggacagggcagagagctccagccctgcactgaggagagacttcccccgacccccccagcacgcggctgcgctctgccagcccaaaggacagctccacccaaggatacctcagcacgttgaactcttcctcgttgaatttccaccatgccacaaagagcctggaggggcaagctgctggccacgaacaagatgccagcgtcagaaggtgtgaggacagcaaagarcagggagcaggtaaggcgctagtggaaggctacatctctgtcaaagtggccaatgtgaacggcagtgaggatggcctggacagctgtctgggctcccagaagagctccttcagggctctgccggaggagccctgggaccctggcttttctgtcagctctcctcaccgtgcggacaaagagaacacgttacaatgtggctcgaaagcatctttgcaccaggacctcgatgcgaaagaacaagacatgagaccaaagccagacaaccacctgcacgcagtggccaagggcaaggtgggctgc

SEQ ID NO: 89060 - DNA, 600 bp, Chicken  19866894394971_1
gaaggaatccctgccatcgtgaaactattttagctgtctcttttctaattgctgttctgtatatctttcttttctcctctttcatttccctaatattctctttatttttaatttgtgatcccaacccagccatctggaaagacagacaagagggaaagtttgcatagaaacaaatttctgcacttctccccatgcagagttcagaaagtccttatggtaaagaagtgtacagccactatcacagaatcacagaattgcagggtttggaagggacctcaagagatcatcgagtccaactcmcctgctaaagcaggttctctataacaggttgcacaaatacacatccagataggtcttgactatttccacagaaggagcctccacaacctctctgggcaacctgttcyggtgctctgtcacctttactgtaaagaacttcttctgcatgtttgtatggtacttcgtttattcaagttttaggccactggcccttgtcctatcactacataatactgagaagagcctggcttcattcatttgcctcycagctccctttagatatttataaacattaatcagattccccctcagtcttctttt

SEQ ID NO: 89061 - DNA, 600 bp, Chicken  19866894394971_2
ttaatttgtgatcccaacccagccatctggaaagacagacaagagggaaagtttgcatagaaacaaatttctgcacttctccccatgcagagttcagaaagtccttatggtaaagaagtgtacagccactatcacagaatcacagaattgcagggtttggaagggacctcaagagatcatcgagtccaactcmcctgctaaagcaggttctctataacaggttgcacaaatacacatccagataggtcttgactatttccacagaaggagcctccacaacctctctgggcaacctgttcyggtgctctgtcacctttactgtaaagaacttcttctgcatgtttgtatggtacttcgtttattcaagttttaggccactggcccttgtcctatcactacataatactgagaagagcctggcttcattcatttgcctcycagctccctttagatatttataaacattaatcagattccccctcagtcttctttttcccaggctaaacagacacaggttactgagcctttccttgtacaggagwtgctccaggtcctttatcatctttgtgcccctccactggacttcttctaggagattcc

SEQ ID NO: 89062 - DNA, 600 bp, Chicken  19866894394971_3
atcacagaattgcagggtttggaagggacctcaagagatcatcgagtccaactcmcctgctaaagcaggttctctataacaggttgcacaaatacacatccagataggtcttgactatttccacagaaggagcctccacaacctctctgggcaacctgttcyggtgctctgtcacctttactgtaaagaacttcttctgcatgtttgtatggtacttcgtttattcaagttttaggccactggcccttgtcctatcactacataatactgagaagagcctggcttcattcatttgcctcycagctccctttagatatttataaacattaatcagattccccctcagtcttctttttcccaggctaaacagacacaggttactgagcctttccttgtacaggagwtgctccaggtcctttatcatctttgtgcccctccactggacttcttctaggagattcctgtcttttttgaggaatccagaactggacacagcattctaaatgtgatctcaccacggcagagtaaagagagaagatcacctcccttgatctgctggccattctctttttaatgcaccccaggataccattcgctctc

SEQ ID NO: 89063 - DNA, 600 bp, Chicken  19866894394971_4
taggtcttgactatttccacagaaggagcctccacaacctctctgggcaacctgttcyggtgctctgtcacctttactgtaaagaacttcttctgcatgtttgtatggtacttcgtttattcaagttttaggccactggcccttgtcctatcactacataatactgagaagagcctggcttcattcatttgcctcycagctccctttagatatttataaacattaatcagattccccctcagtcttctttttcccaggctaaacagacacaggttactgagcctttccttgtacaggagwtgctccaggtcctttatcatctttgtgcccctccactggacttcttctaggagattcctgtcttttttgaggaatccagaactggacacagcattctaaatgtgatctcaccacggcagagtaaagagagaagatcacctcccttgatctgctggccattctctttttaatgcaccccaggataccattcgctctcccagccacaaaagtgcacttctggctcatggccaacctcttattcaccaggacactcacgtccttctctgcaaacctcctccccatcaggtcattgcccaacct

SEQ ID NO: 89064 - DNA, 599 bp, Chicken  19866894394973_1
  misc_feature (1)..(28): n is any nucleotide
nnnnnnnnnnnnnnnnnnnnnnnnnnnnataaatcttagaggcacacaataaattacttttatggcttttcacaaagtaattctctcactgttacctgcacgctgctgggccagggcagacatgggcaatgatcccagcacaaaaacacccatgctcacctttgcccagtcacagtggtggaagttgacagcctctcactgtagagcccagccagcaagaacaaacctgcagaaacagcaaagagcattgctgccgcttaacatggttggatggtctaaatcatatgcagtgctttgctrtgttgttaggcacactcaccaatccagagcatagatgtcaccaacctttgaaggtgatgatgtgctggcacagctgcccagagaagctgtgttgccccatccctggaggcactcagggccaggttggatggtgccctgggcagtctgagctggtgggggcagcccttccaattgcagggctgggtgagctgtgaggtctgttccagcccatatagttctatgattctgtggtgtttgccatgtggcagagactgctgcagttactcttccctccctttttcttaaaaatggctgtctgc

SEQ ID NO: 89065 - DNA, 600 bp, Chicken  19866894394974_1
aattttgacattaacttttatactcatgaacttttctgtgttgattcttcttgcttcatctcttcattcgaccctcagcttttgtacaactttccagtttgcttaaggtccattcacaagttggactttaagtgctgtttccctttgtcctttgaacacatacaagaggctattttagaattcatctgttttgaccatctcctagtctcactcctcatgacccttctgcctttacactcacataatgtaaatctgcctttcatggtttccagtgccatcagtatttttaccctctcttcwtctttcaacaaaggtaaatgcagatcygttagtgtgttataggtaaagtaagttagcaagcatgaattatgaactgctcaagaaatagcagctgttgagcttgtgtgcacagcaaggattgtctgatgctgatcaataaaaatcagagtcagtagccatgctaccagagagaccatctgtggctagagagccagaatcttgctgaccgggatagatgctgctggcctgaaggaggatggggacaggtcatattcatataaccccagagaaggacatatttaattgtcagtaagtgctagc

SEQ ID NO: 89066 - DNA, 600 bp, Chicken  19866894394974_2
gaacttttctgtgttgattcttcttgcttcatctcttcattcgaccctcagcttttgtacaactttccagtttgcttaaggtccattcacaagttggactttaagtgctgtttccctttgtcctttgaacacatacaagaggctattttagaattcatctgttttgaccatctcctagtctcactcctcatgacccttctgcctttacactcacataatgtaaatctgcctttcatggtttccagtgccatcagtatttttaccctctcttcwtctttcaacaaaggtaaatgcagatcygttagtgtgttataggtaaagtaagttagcaagcatgaattatgaactgctcaagaaatagcagctgttgagcttgtgtgcacagcaaggattgtctgatgctgatcaataaaaatcagagtcagtagccatgctaccagagagaccatctgtggctagagagccagaatcttgctgaccgggatagatgctgctggcctgaaggaggatggggacaggtcatattcatataaccccagagaaggacatatttaattgtcagtaagtgctagctgacaacctgtggtcaaaagtacacta

SEQ ID NO: 89067 - DNA, 600 bp, Chicken  19866894394981_1
tggacaggtaactttgtcctgatatcccctcctgactcaggtaaagttttatattatatatatatagaaggccatgaacagcagggtaactggggagctaaggcaatggaaacaatcattctgcttcactatattgttagtacagatagttagtctgctagtacagatagaccataatcttccatttgttttgcaagtataaacctcatcttgtgacctgttcattaaggcatgttgctgtaagtatcgctaactggcatcagacagtcctcttgaagttgtggtttctattttgtttcyttctttgtacctcaagcattttgctcattaattagtaagcagattcctacctactacatcttatcaagagagtaaatggctctgcattgtgttatttatatgttgtgttaattagttaaagatgttataaccttcaccattggattatagggcaatctgtgacagagtggttgtataaaaatagaaaaggctcttcaattttaatcttacctcatttaccttttgtctgatgttaaatcaagtaagtgaaactggtaatgtccttgtgacaagaaggcatggctagcattcttaaactca

SEQ ID NO: 89068 - DNA, 600 bp, Chicken  19866894394984_1
ttccaaagcctaaattattaatctacaataaagtagtttttagtattttaaaggttccatttgaaaaactttgtatatgattatcagaagcatatgcctatctaaactgtctgaaaacttgtgctgaaaggaaatgaatagaaactgaatatgaacagaaccccataatgtgtcctttcagacactgcacactcaggaaatttcacaacttacaaagaaagttcatgtcttggcatgttaggactcctctcaatgaatcatggaactgcagagctgaaaaaacctccagaaacaatttarcccatcctccttcccagcagtgggttcagtttcatctctgtcaatacggacaggcacttttttttctagaagacttcgatgaacagcccacagtcttcccagtcaatctattccagtcttatactattattccagtcatatgctactacatttyctacctcttaatgtagaattttaaacttaggttcagtttattatttcttgccttgtgcaaagtaaacagggaaaacacacaatattattctcctctttacaatgactttttatatctttgaagactgtcatcatgttgcctctggt

SEQ ID NO: 89069 - DNA, 600 bp, Chicken  19866894394984_2
acagaaccccataatgtgtcctttcagacactgcacactcaggaaatttcacaacttacaaagaaagttcatgtcttggcatgttaggactcctctcaatgaatcatggaactgcagagctgaaaaaacctccagaaacaatttarcccatcctccttcccagcagtgggttcagtttcatctctgtcaatacggacaggcacttttttttctagaagacttcgatgaacagcccacagtcttcccagtcaatctattccagtcttatactattattccagtcatatgctactacatttyctacctcttaatgtagaattttaaacttaggttcagtttattatttcttgccttgtgcaaagtaaacagggaaaacacacaatattattctcctctttacaatgactttttatatctttgaagactgtcatcatgttgcctctggtcctctcacattcaaacctttctgaaatatagtgcccaaaatcaaactggtgctttagctgtggcctacacagtgtaagagaaagcagaagtattatttcttgtgccctgcagcttactctcctgtttatgtcttgcaattatgtggcctttttg

SEQ ID NO: 89070 - DNA, 600 bp, Chicken  19866894394987_1
gccaactgtatagctttagctgactggaagattgtatagtcagcaaagaaacttgtttctgccattgacaaagacatgcatctcccttggggtaacctgagtacttaccatgttagtcagcatagcagttacaagttaaaagttctaaatcagttttgtgaaacacatctgctcattcgaacttcttgccctttaattctgactggtcttactcaaggttctgctaacagttcccatccatccctgtggcagtgagtgtttctggctgttggctgcatggctacttggatgtagtggatragctgattgttgcacaattaagtgaaacagaayagatgggtttgatctgactgcaagggtccagtggcaccttgtttctctgaggaacctagatgccttgcttgcactgaccactatctccttggtcccttcatcacgccttgacagtctttgtaatatgctagtgctttcttgagtgttatcccataatctttgtttttctctgcttgcatttggataggcaatcttaattatctactctagcttttagtttaaattaaatgtattaatttttgttctcctacaataataatcagaaat

SEQ ID NO: 89071 - DNA, 600 bp, Chicken  19866894394987_2
gtatagtcagcaaagaaacttgtttctgccattgacaaagacatgcatctcccttggggtaacctgagtacttaccatgttagtcagcatagcagttacaagttaaaagttctaaatcagttttgtgaaacacatctgctcattcgaacttcttgccctttaattctgactggtcttactcaaggttctgctaacagttcccatccatccctgtggcagtgagtgtttctggctgttggctgcatggctacttggatgtagtggatragctgattgttgcacaattaagtgaaacagaayagatgggtttgatctgactgcaagggtccagtggcaccttgtttctctgaggaacctagatgccttgcttgcactgaccactatctccttggtcccttcatcacgccttgacagtctttgtaatatgctagtgctttcttgagtgttatcccataatctttgtttttctctgcttgcatttggataggcaatcttaattatctactctagcttttagtttaaattaaatgtattaatttttgttctcctacaataataatcagaaatcttttgttaccagaagaaatgtgaggcactaat

SEQ ID NO: 89072 - DNA, 574 bp, Chicken  19866894394991_1
taccagcagagccacgctgtatgaaataggctaagagatgcctcatgttttctctcttcccctaggacctggcctgggccatcagctactacatgcgctatttcatcacatacatcccattctatggcattctgggatccctgtttctcctcacttttgtcaggtaggagataaaggacctccagtgttgggctaaccaatctccagctccgctatgatcttcctcattatggttctctgcagtcatttgccacactgtgttgttttattggctattcctactgctttgctttcttcccrtcatctcccagttctacctcctcacagcagaactgattctggtgctcagcaccttcctcagcccttgggatggttcagccaggattcttgtatctctcctcaatccccattctcacacactgcccaatcccaacacttgtgcattttccacactggccaaggccagacccttccatagtgcttcaggccaaactcttcccagctcacttggaaggtgcctcgtgagccctcctgagcaccagaatggaaatgctccccatttctcccatgcaga

SEQ ID NO: 89073 - DNA, 599 bp, Chicken  19866894394993_1
  misc_feature (1)..(72): n is any nucleotide
nnnnnnnnnnnnnnnnnnnnnnnnnnnnnnnnnnnnnnnnnnnnnnnnnnnnnnnnnnnnnnnnnnnnnnnnatcttgaaaagagagagatggaggcggaaggatgtctctgtgtgcactgtttaatgttgatttagttgagctgttgaaagtctggattaggacatggtattgcttttctgtgcagaccaggagagggtgcaagactgccaatgagtgctgcagctgctatgaagaaagtcaatcaagatgaagtcttgctctcgcttgcaagtgaaattgaacatggggaatcataamtctttatttgtgatagcagccttaggttgatctaagtagtaacagtactgagaaggaaggcagtgcaaaccatggaagttttctattgtccttggagatgcagattgaacatagaaagcattcagttatgtttaggaagagaacctactgagaacacacaattttttttccttcatcttctaatatattcttgaccagttgccattctgctcaagttgctctttgataaacatgtaaaatatgccttaagatttcatttgaaatttccacattgctctgcaagactaaagacagtttct

SEQ ID NO: 89074 - DNA, 600 bp, Chicken  19866894394994_1
gaacttcctccccccccggctgtgagccctgccagcagggtgggcacagaggcaggttctcggcacgccgggctgccctgccccaaacaccttcccctcacgttaaagtaccgtcaccagctctgagtttcacccggcacggggcacgcttttcgcagtgcaaaaagcatcccggaaacacgcgcacatagatagctccctgcgggacagttcgcgtgcgatggaggccacggccccgagagagggctcagggcggcggggcggtgcggggcggtgcggggcagccggcactgccggacrgctggggcacggcgaggaagcgcccggcagccggagctgcgcaccgaaggaaggatgttcgggcgcacgcagctgccgggagatgaggttacartgcaaagctaaacaaagatccccgcgaggaggaaacggatccctcccgccgcctgtaaggtaggagccgagcggcggctgcttgacatcatcgggccgagcattggattacagcaggcagggactcacccggcggggagcagaacacgcccctcggccccacaagtgcaacttcattttagcggctcccggcgcgaggaagccgcg

SEQ ID NO: 89075 - DNA, 600 bp, Chicken  19866894394994_2
ccctcacgttaaagtaccgtcaccagctctgagtttcacccggcacggggcacgcttttcgcagtgcaaaaagcatcccggaaacacgcgcacatagatagctccctgcgggacagttcgcgtgcgatggaggccacggccccgagagagggctcagggcggcggggcggtgcggggcggtgcggggcagccggcactgccggacrgctggggcacggcgaggaagcgcccggcagccggagctgcgcaccgaaggaaggatgttcgggcgcacgcagctgccgggagatgaggttacartgcaaagctaaacaaagatccccgcgaggaggaaacggatccctcccgccgcctgtaaggtaggagccgagcggcggctgcttgacatcatcgggccgagcattggattacagcaggcagggactcacccggcggggagcagaacacgcccctcggccccacaagtgcaacttcattttagcggctcccggcgcgaggaagccgcgagcgtggagctgcccgcagccgtcccggccgccccgcagcgccgcttccagctccgctcctccggaggcagcgggacgcgggaccccgtaagtg

SEQ ID NO: 89076 - DNA, 599 bp, Chicken  19866894395018_1
  misc_feature (1)..(103): n is any nucleotide
nnnnnnnnnnnnnnnnnnnnnnnnnnnnnnnnnnnnnnnnnnnnnnnnnnnnnnnnnnnnnnnnnnnnnnnnnnnnnnnnnnnnnnnnnnnnnnnnnnnnnnntgtgataactgcctttgagcctaagcccttctgtgcatagaactgagagatgttttatttaaattctgatgttctactgacagagccacaaagccatgacagattcatccttattcttgtacatttacagcttgcatgggataattaaatattaattcagctaaagagagaatgagaatcagaaaagctgtgcggawtgctacttgggagattttagtgaagagatagcaagagagaacacttaacttccagtcagtgttcaaaataacttttaaatattttacatcaaattgaccagcttgaaagcaataggtggagagtagactgctcagctaagcaatttctttagcagctgaggcatacctcttgtaaagctatatcccatgaagaagagaaaatgaaacttttagtatgtacactctacctgactatgcttgtgtaaaaagtgagaaggctgtttttttgttttttgggtttttttgtttgtttgttttat

SEQ ID NO: 89077 - DNA, 600 bp, Chicken  19866894395020_1
tctgcataacaaaactagtatttttccatcaggagtaaaaatatgtggccttgcaaaatattcacatggttgtctgagaaatactgattccaaaactgaaattcagcgatatatttttaatgttgtaaggcaaatattcaaattgcaaccaataaccaagtaaactcatggttaaatactacaaaaatcagtgggttatgacttgcacatggttttgtaggctataaagacctaatgctttttatggctaactaattccaatgggttttaaaaggatatgaaaacactacacatatgaaraagaaatttgattaccacaagtttgtgtaattagtgtaatgctcaagagactttttcataagatctattcttatgtacaggttttgttttcttagaacagacaccttttttctgctaacattttctctacagagagtttcacgtttcttttactaagtttaggagactgaagtcttttgttggtttacagagtagaaatggcacagaagcttcctaggaaaggtgacagttacccaggggatctttcaacctcagccttggtttggaaggacctctaggggtagcagggtattctgtgct

SEQ ID NO: 89078 - DNA, 600 bp, Chicken  19866894395023_1
ggagaaagaaaacaaaacaaatcacactgatggcattcaatcattcagtcagcaacatcatcttcatttcaaacatcagccttgctttttccaactctaggagtttcttaccttcactcactgcttttgaaacatctcctttcgaaatgaatttcaacattttcttcagaactttcttgtgagatttggaggtctgaaaacgcagtgcctggcatcttgaagaaaaagttatgactgcttcatatatttcttcagaatacaaggaaatttatgaaataagtggccaaatagtttatcaasactcttgatttgataaaattatgctctcctgctcttcataatatcattattatagcaatacacaygcattcaataatcacgaaaagtatatcactgtgacctgaagcactgcagaaagaaaagttctccctragaggctaacacaccagaattyttcacttatttatctayagacacmacgttgtatctaaccaccagggrcagaaaagcatatctagaatcatttttatctgttcaactgacaacctctcttattcaggctactaaaggagttttggagagacaggcattctggttcac

SEQ ID NO: 89079 - DNA, 600 bp, Chicken  19866894395023_2
atttcaaacatcagccttgctttttccaactctaggagtttcttaccttcactcactgcttttgaaacatctcctttcgaaatgaatttcaacattttcttcagaactttcttgtgagatttggaggtctgaaaacgcagtgcctggcatcttgaagaaaaagttatgactgcttcatatatttcttcagaatacaaggaaatttatgaaataagtggccaaatagtttatcaasactcttgatttgataaaattatgctctcctgctcttcataatatcattattatagcaatacacaygcattcaataatcacgaaaagtatatcactgtgacctgaagcactgcagaaagaaaagttctccctragaggctaacacaccagaattyttcacttatttatctayagacacmacgttgtatctaaccaccagggrcagaaaagcatatctagaatcatttttatctgttcaactgacaacctctcttattcaggctactaaaggagttttggagagacaggcattctggttcacctgcaccatcaaacaaaacagcagtcattgaactcttgtcttggactgcagcgcaaaacaaaggg

SEQ ID NO: 89080 - DNA, 600 bp, Chicken  19866894395023_3
catctcctttcgaaatgaatttcaacattttcttcagaactttcttgtgagatttggaggtctgaaaacgcagtgcctggcatcttgaagaaaaagttatgactgcttcatatatttcttcagaatacaaggaaatttatgaaataagtggccaaatagtttatcaasactcttgatttgataaaattatgctctcctgctcttcataatatcattattatagcaatacacaygcattcaataatcacgaaaagtatatcactgtgacctgaagcactgcagaaagaaaagttctccctragaggctaacacaccagaattyttcacttatttatctayagacacmacgttgtatctaaccaccagggrcagaaaagcatatctagaatcatttttatctgttcaactgacaacctctcttattcaggctactaaaggagttttggagagacaggcattctggttcacctgcaccatcaaacaaaacagcagtcattgaactcttgtcttggactgcagcgcaaaacaaaggggaagggtacagactgcatacaggaaaacattacagagccaatgacaacakcacagagttgccaacgt

SEQ ID NO: 89081 - DNA, 600 bp, Chicken  19866894395023_4
caacattttcttcagaactttcttgtgagatttggaggtctgaaaacgcagtgcctggcatcttgaagaaaaagttatgactgcttcatatatttcttcagaatacaaggaaatttatgaaataagtggccaaatagtttatcaasactcttgatttgataaaattatgctctcctgctcttcataatatcattattatagcaatacacaygcattcaataatcacgaaaagtatatcactgtgacctgaagcactgcagaaagaaaagttctccctragaggctaacacaccagaattyttcacttatttatctayagacacmacgttgtatctaaccaccagggrcagaaaagcatatctagaatcatttttatctgttcaactgacaacctctcttattcaggctactaaaggagttttggagagacaggcattctggttcacctgcaccatcaaacaaaacagcagtcattgaactcttgtcttggactgcagcgcaaaacaaaggggaagggtacagactgcatacaggaaaacattacagagccaatgacaacakcacagagttgccaacgtgcctgggcagaaactcactaga

SEQ ID NO: 89082 - DNA, 600 bp, Chicken  19866894395023_5
ctttcttgtgagatttggaggtctgaaaacgcagtgcctggcatcttgaagaaaaagttatgactgcttcatatatttcttcagaatacaaggaaatttatgaaataagtggccaaatagtttatcaasactcttgatttgataaaattatgctctcctgctcttcataatatcattattatagcaatacacaygcattcaataatcacgaaaagtatatcactgtgacctgaagcactgcagaaagaaaagttctccctragaggctaacacaccagaattyttcacttatttatctayagacacmacgttgtatctaaccaccagggrcagaaaagcatatctagaatcatttttatctgttcaactgacaacctctcttattcaggctactaaaggagttttggagagacaggcattctggttcacctgcaccatcaaacaaaacagcagtcattgaactcttgtcttggactgcagcgcaaaacaaaggggaagggtacagactgcatacaggaaaacattacagagccaatgacaacakcacagagttgccaacgtgcctgggcagaaactcactagaatatacttggtataatg

SEQ ID NO: 89083 - DNA, 600 bp, Chicken  19866894395023_6
gtgagatttggaggtctgaaaacgcagtgcctggcatcttgaagaaaaagttatgactgcttcatatatttcttcagaatacaaggaaatttatgaaataagtggccaaatagtttatcaasactcttgatttgataaaattatgctctcctgctcttcataatatcattattatagcaatacacaygcattcaataatcacgaaaagtatatcactgtgacctgaagcactgcagaaagaaaagttctccctragaggctaacacaccagaattyttcacttatttatctayagacacmacgttgtatctaaccaccagggrcagaaaagcatatctagaatcatttttatctgttcaactgacaacctctcttattcaggctactaaaggagttttggagagacaggcattctggttcacctgcaccatcaaacaaaacagcagtcattgaactcttgtcttggactgcagcgcaaaacaaaggggaagggtacagactgcatacaggaaaacattacagagccaatgacaacakcacagagttgccaacgtgcctgggcagaaactcactagaatatacttggtataatgaaaagta

SEQ ID NO: 89084 - DNA, 600 bp, Chicken  19866894395023_7
gcagtgcctggcatcttgaagaaaaagttatgactgcttcatatatttcttcagaatacaaggaaatttatgaaataagtggccaaatagtttatcaasactcttgatttgataaaattatgctctcctgctcttcataatatcattattatagcaatacacaygcattcaataatcacgaaaagtatatcactgtgacctgaagcactgcagaaagaaaagttctccctragaggctaacacaccagaattyttcacttatttatctayagacacmacgttgtatctaaccaccagggrcagaaaagcatatctagaatcatttttatctgttcaactgacaacctctcttattcaggctactaaaggagttttggagagacaggcattctggttcacctgcaccatcaaacaaaacagcagtcattgaactcttgtcttggactgcagcgcaaaacaaaggggaagggtacagactgcatacaggaaaacattacagagccaatgacaacakcacagagttgccaacgtgcctgggcagaaactcactagaatatacttggtataatgaaaagtagatgaacttaagtcctatgtgtt

SEQ ID NO: 89085 - DNA, 569 bp, Chicken  19866894395023_8
aagaaaagttctccctragaggctaacacaccagaattyttcacttatttatctayagacacmacgttgtatctaaccaccagggrcagaaaagcatatctagaatcatttttatctgttcaactgacaacctctcttattcaggctactaaaggagttttggagagacaggcattctggttcacctgcaccatcaaacaaaacagcagtcattgaactcttgtcttggactgcagcgcaaaacaaaggggaagggtacagactgcatacaggaaaacattacagagccaatgacaacakcacagagttgccaacgtgcctgggcagaaactcactagaatatacttggtataatgaaaagtagatgaacttaagtcctatgtgtttaagccaacaaagattggacacactttaggtggtcaaatcagttatggtactataatccaagtctcttaccttattgtgtattgaggacaacatgtttgattcatgataggtttgtagacatattttccacttctaaaaataataataaatacatactggttttcatcactgcttatcttaca

SEQ ID NO: 89086 - DNA, 599 bp, Chicken  19866894395033_1
  misc_feature (1)..(30): n is any nucleotide
nnnnnnnnnnnnnnnnnnnnnnnnnnnnnngaggagttcctttccttgcactcgagggattaacagctccagcagaatgccgtgtcagactgcagcaggcgccttgctgctgctgctgtggcatcccagggctgtgctggatgccaatcctttccaactggcgcctgggagaaaacagcacgttgcagttctgtttcatttggtcagtcctagcagggaagtactcctttccatcccactgttcagtggtgttgacttccaaatctttttcactttcaatggcaacagaaattgaaattrcatttttactttctctgttgctgctctggagaagatttcagacatatttctgtcctctgctctttggtttctcataacagagttttagggggctatatagttcactagttctctgagctgcttgacatccaaggaggagtgaaattaccccttgcaaaacaacatttggatcacagtgcaggtctcatttggcaatagcatggctgttctttgatggggaacctgtctgctggtgcttggagggatgctgagctcttttggcctgtgagccaccgctgcaaactactcagtttgctttt

SEQ ID NO: 89087 - DNA, 600 bp, Chicken  19866894395038_1
tgagtgagacaaggcaacaggatagaggagagtgtctcctgcctcccagaaacaaaagtttttactgaagcctgtttaacatgtgtgacagcctccatcagctgatatccttagagcctctggaactgtcccttctaccaaatacaagctcttcagtcaggagcaactcaggcaccttttgggtagcagcctgtccagaattccagagaccaacctcttgttacagagcactgcagtctcacacaccagaccaacacacagtccggcaggcactggctctgtgcttcttccttccaacayggggatgtgagaggcagcagactggttctcctgcctatcactgctgcacrygggcactccccaaagctctacctgtgcaagagctgtgtgcagcctgctagttcatgcttgcctgtgtgctccagcctactacgtctcctccctcgtgctttcaggctccaccatgaggaaacatcacaccccaggagtgaatgaatctgcattgtggactctaccactcgccaatgctcaggtgttctttcctaygaggctaaatggcttcctggagaacttccaaaggaaagatggaggcaacaaact

SEQ ID NO: 89088 - DNA, 600 bp, Chicken  19866894395038_2
aacaaaagtttttactgaagcctgtttaacatgtgtgacagcctccatcagctgatatccttagagcctctggaactgtcccttctaccaaatacaagctcttcagtcaggagcaactcaggcaccttttgggtagcagcctgtccagaattccagagaccaacctcttgttacagagcactgcagtctcacacaccagaccaacacacagtccggcaggcactggctctgtgcttcttccttccaacayggggatgtgagaggcagcagactggttctcctgcctatcactgctgcacrygggcactccccaaagctctacctgtgcaagagctgtgtgcagcctgctagttcatgcttgcctgtgtgctccagcctactacgtctcctccctcgtgctttcaggctccaccatgaggaaacatcacaccccaggagtgaatgaatctgcattgtggactctaccactcgccaatgctcaggtgttctttcctaygaggctaaatggcttcctggagaacttccaaaggaaagatggaggcaacaaacttttaaatggacgtgaagagctgcaagaaattactttgtattctctcctgg

SEQ ID NO: 89089 - DNA, 600 bp, Chicken  19866894395038_3
acaaaagtttttactgaagcctgtttaacatgtgtgacagcctccatcagctgatatccttagagcctctggaactgtcccttctaccaaatacaagctcttcagtcaggagcaactcaggcaccttttgggtagcagcctgtccagaattccagagaccaacctcttgttacagagcactgcagtctcacacaccagaccaacacacagtccggcaggcactggctctgtgcttcttccttccaacayggggatgtgagaggcagcagactggttctcctgcctatcactgctgcacrygggcactccccaaagctctacctgtgcaagagctgtgtgcagcctgctagttcatgcttgcctgtgtgctccagcctactacgtctcctccctcgtgctttcaggctccaccatgaggaaacatcacaccccaggagtgaatgaatctgcattgtggactctaccactcgccaatgctcaggtgttctttcctaygaggctaaatggcttcctggagaacttccaaaggaaagatggaggcaacaaacttttaaatggacgtgaagagctgcaagaaattactttgtattctctcctggc

SEQ ID NO: 89090 - DNA, 600 bp, Chicken  19866894395038_4
cagaccaacacacagtccggcaggcactggctctgtgcttcttccttccaacayggggatgtgagaggcagcagactggttctcctgcctatcactgctgcacrygggcactccccaaagctctacctgtgcaagagctgtgtgcagcctgctagttcatgcttgcctgtgtgctccagcctactacgtctcctccctcgtgctttcaggctccaccatgaggaaacatcacaccccaggagtgaatgaatctgcattgtggactctaccactcgccaatgctcaggtgttctttcctaygaggctaaatggcttcctggagaacttccaaaggaaagatggaggcaacaaacttttaaatggacgtgaagagctgcaagaaattactttgtattctctcctggctttttacattttcaaatgaagtttccaaaggagtcacagagctacagatgaaaaggaccacatcccagccctacctgtctgcagacacgtgcaagtgcttcgcaatcatatcgcacaggagcttggtgtaggtcttgttctgctgccctccaattttgccaatgctgtagaggctgcagagagcgcaaggatccg

SEQ ID NO: 89091 - DNA, 600 bp, Chicken  19866894395039_1
agaaacattcttgaaagcaattttctcaactaaccagcagtacacacattcaacaccacccatataacaactcacactaatgaaacactgcaaagttaactctgcctgttgaaaaaaagctattgggcaacagccgtttccaaagaagttagagctgtagttcacagaacattgctcataggctcctagctagaaatcccataacaacaccgaactccagcactcaccccataccccagcacagcttctttgcagcagtagcttcttactattagaaagaatagcaagacctacaagaayaccatttgttagatatgcaaaaacacagaaaactacacaaagactttgcctcaggtaaggcagaagtttgtgtttcaacgagttgtagtttcagtccctcacagatattaagcacaatcatataacacagccatagaaggcacttaagtcttcaygatcagcctgctcctttaagaatgtccaccattaacaagtcctttataaccatatagaataactttttggtgtggagataggactactctatcacttaactatcaatgtgtataagtagtaagttacaatcagaaaagtcagtgc

SEQ ID NO: 89092 - DNA, 600 bp, Chicken  19866894395039_2
tgtagttcacagaacattgctcataggctcctagctagaaatcccataacaacaccgaactccagcactcaccccataccccagcacagcttctttgcagcagtagcttcttactattagaaagaatagcaagacctacaagaayaccatttgttagatatgcaaaaacacagaaaactacacaaagactttgcctcaggtaaggcagaagtttgtgtttcaacgagttgtagtttcagtccctcacagatattaagcacaatcatataacacagccatagaaggcacttaagtcttcaygatcagcctgctcctttaagaatgtccaccattaacaagtcctttataaccatatagaataactttttggtgtggagataggactactctatcacttaactatcaatgtgtataagtagtaagttacaatcagaaaagtcagtgcagtggagtagtgatacaggagcagagcaacaaagaaattagcaaaaatggaaagataccaataaataaataaataaataaataaatgaaaagaaaagatgctcaccagtctctgaagctccaggctcctaaggaaaactccacaagcaagggatc

SEQ ID NO: 89093 - DNA, 600 bp, Chicken  19866894395052_1
ggaagccaaattaatttctgaagaaacaggttcatctcttactggcatctgcagagttgcgtcagcttgttgcggatatggattaggccttgtgcttctgagaatccagctttgtttcaattcttctgagcacttccttctttccttctgactgcacttcagttttgatccaagtatcaaagaggctcatgcagcagctaacttgcaccaaacacagcataaatttctactgacggcttacctagatgacgtgcagctcaatggagaccaaaaagggtaaggtctcagcctcttcccttrctgcagtaacaaagcacctgggggtgctcactttttttctgtctcgtaaactggttgccatggcaagttacttgtgttgcactgtcaggtagtaaaaggaaacaatttgcatcctctagaaaactcagaattttagaactctgtcgcctatcagtttgctttctgcctcgacactgcttatccctgaagctcggcgagagatgagcaagaacaacatcccagcaacagaagtacctgaaggtttattgagcctggtgtgtctgcagaaggaataaattaagtaatcatgaagaatayggt

SEQ ID NO: 89094 - DNA, 600 bp, Chicken  19866894395052_2
ttrctgcagtaacaaagcacctgggggtgctcactttttttctgtctcgtaaactggttgccatggcaagttacttgtgttgcactgtcaggtagtaaaaggaaacaatttgcatcctctagaaaactcagaattttagaactctgtcgcctatcagtttgctttctgcctcgacactgcttatccctgaagctcggcgagagatgagcaagaacaacatcccagcaacagaagtacctgaaggtttattgagcctggtgtgtctgcagaaggaataaattaagtaatcatgaagaatayggtgctgtgggaaagcacgtcagaatccctgcttttctcagcgtgctctcagagataatgatatggagagcacacacactgatacaatcttccttctgaacacttcaagaaagtttcaattacagagagaaggaaaacacatccagcaaaacagaccaacasactatctgaatgtagagacggcacaaaaggcacagaaggaaccaggaagtactcagcataattaggacgaggctgggtgagattgtggatatggcaaaggaacagaagacgcaggaaaacaacaaaaggaacctgaca

SEQ ID NO: 89095 - DNA, 600 bp, Chicken  19866894395052_3
tttctgcctcgacactgcttatccctgaagctcggcgagagatgagcaagaacaacatcccagcaacagaagtacctgaaggtttattgagcctggtgtgtctgcagaaggaataaattaagtaatcatgaagaatayggtgctgtgggaaagcacgtcagaatccctgcttttctcagcgtgctctcagagataatgatatggagagcacacacactgatacaatcttccttctgaacacttcaagaaagtttcaattacagagagaaggaaaacacatccagcaaaacagaccaacasactatctgaatgtagagacggcacaaaaggcacagaaggaaccaggaagtactcagcataattaggacgaggctgggtgagattgtggatatggcaaaggaacagaagacgcaggaaaacaacaaaaggaacctgacaccactcatctaccctctgcctactgagaacttatacccttcagctggccttcgtgcagactttctttgctgagagcaaaattgggatgtattcagatatccccgtgaagctacaaaagtgcagttgtttgccttgctggtgataccgatgatcacaagaagt

SEQ ID NO: 89096 - DNA, 599 bp, Chicken  19866894395056_1
  misc_feature (1)..(135): n is any nucleotide
nnnnnnnnnnnnnnnnnnnnnnnnnnnnnnnnnnnnnnnnnnnnnnnnnnnnnnnnnnnnnnnnnnnnnnnnnnnnnnnnnnnnnnnnnnnnnnnnnnnnnnnnnnnnnnnnnnnnnnnnnnnnnnnnnnnnnnnttaacttaggaatccaggataaatttacctttgtcatcagtgggctgcacatctaattgtgtgcaggggagctgctatgtggtgtacagccttttccaccaatgcaagcagtggctggaatcagccctcttagaagctacctatttcagtcccatggattgaacwgcagcttctttctccattctcctctactctttatgtaagctagcaggccaactagaattgaagattttgaaacttggagatgttttgcaccaaaactacaatatgaacttcaaaatctcacccagcacctgaataaagcatatacacatgtatrggaactgttgagtcacagcctgaaccactggtcaatcacctgaggcaaggactggggcagctgtgggagcagaggtgaaggcaattcacttgtrtgaccccatttaagggctgactaacactggggaaggatgtctttctggasa

SEQ ID NO: 89097 - DNA, 600 bp, Chicken  19866894395056_2
taaatttacctttgtcatcagtgggctgcacatctaattgtgtgcaggggagctgctatgtggtgtacagccttttccaccaatgcaagcagtggctggaatcagccctcttagaagctacctatttcagtcccatggattgaacwgcagcttctttctccattctcctctactctttatgtaagctagcaggccaactagaattgaagattttgaaacttggagatgttttgcaccaaaactacaatatgaacttcaaaatctcacccagcacctgaataaagcatatacacatgtatrggaactgttgagtcacagcctgaaccactggtcaatcacctgaggcaaggactggggcagctgtgggagcagaggtgaaggcaattcacttgtrtgaccccatttaagggctgactaacactggggaaggatgtctttctggasatccctcctttgcggagcttttcatcatgagtctaaatctttggatataggtgagygttccttctctgtttgctcctttgctatctcactacaacaccctttccaactgtactttgttgactgtacaacacaacatctaaacaaagtatgtacaca

SEQ ID NO: 89098 - DNA, 600 bp, Chicken  19866894395056_3
gctggaatcagccctcttagaagctacctatttcagtcccatggattgaacwgcagcttctttctccattctcctctactctttatgtaagctagcaggccaactagaattgaagattttgaaacttggagatgttttgcaccaaaactacaatatgaacttcaaaatctcacccagcacctgaataaagcatatacacatgtatrggaactgttgagtcacagcctgaaccactggtcaatcacctgaggcaaggactggggcagctgtgggagcagaggtgaaggcaattcacttgtrtgaccccatttaagggctgactaacactggggaaggatgtctttctggasatccctcctttgcggagcttttcatcatgagtctaaatctttggatataggtgagygttccttctctgtttgctcctttgctatctcactacaacaccctttccaactgtactttgttgactgtacaacacaacatctaaacaaagtatgtacacaacaatttccaatctacccaagttattctaagaataccaagactccattctagcaaaacttgaaaatttttcttttcctttcattttccttttgt

SEQ ID NO: 89099 - DNA, 600 bp, Chicken  19866894395056_4
cwgcagcttctttctccattctcctctactctttatgtaagctagcaggccaactagaattgaagattttgaaacttggagatgttttgcaccaaaactacaatatgaacttcaaaatctcacccagcacctgaataaagcatatacacatgtatrggaactgttgagtcacagcctgaaccactggtcaatcacctgaggcaaggactggggcagctgtgggagcagaggtgaaggcaattcacttgtrtgaccccatttaagggctgactaacactggggaaggatgtctttctggasatccctcctttgcggagcttttcatcatgagtctaaatctttggatataggtgagygttccttctctgtttgctcctttgctatctcactacaacaccctttccaactgtactttgttgactgtacaacacaacatctaaacaaagtatgtacacaacaatttccaatctacccaagttattctaagaataccaagactccattctagcaaaacttgaaaatttttcttttcctttcattttccttttgtttcagacacacagatcatccattagtactagacaagcaattaaatgtctc

SEQ ID NO: 89100 - DNA, 600 bp, Chicken  19866894395056_5
gaattgaagattttgaaacttggagatgttttgcaccaaaactacaatatgaacttcaaaatctcacccagcacctgaataaagcatatacacatgtatrggaactgttgagtcacagcctgaaccactggtcaatcacctgaggcaaggactggggcagctgtgggagcagaggtgaaggcaattcacttgtrtgaccccatttaagggctgactaacactggggaaggatgtctttctggasatccctcctttgcggagcttttcatcatgagtctaaatctttggatataggtgagygttccttctctgtttgctcctttgctatctcactacaacaccctttccaactgtactttgttgactgtacaacacaacatctaaacaaagtatgtacacaacaatttccaatctacccaagttattctaagaataccaagactccattctagcaaaacttgaaaatttttcttttcctttcattttccttttgtttcagacacacagatcatccattagtactagacaagcaattaaatgtctcagcccaatcagcaaattttagacactgtgtgccttcagaatcatcaatttctctgc

SEQ ID NO: 89101 - DNA, 600 bp, Chicken  19866894395059_1
atggttttctgtaagaaccaagctctagactcttagctatagagatatgttaataaataataataacagaatactaactgttaatttcaagatatagtttcccttatgaagtcttcctgattcacactgctgctgagcacgcgttgtactgtggcagagtcaatcatgcccagtgggaatcttttcaatacgttcggaagtaacaaagatgcaagactgggctgagtccttattgatcccaagaaacttgagtctcttaaaacttcatagctaccaagtgactcagtttcaaatcacctkccctgcatgacccattccctcataccacccctattttgattttttttttctccttttaagctgcatattcatatgcatgtcccattactacagccatttcagacaaagctgcagttaggtgtgctacccatgggcctttcagygtgtcacctttggtgtaggcagatgatgaattctgatgaaacatactgtagctccactcattattcaagccaaggctgcctgtgcctccctaaaataaaacctataactgctgcttgccatctgctgtggtgcaaactacatctaagataaaacaac

SEQ ID NO: 89102 - DNA, 600 bp, Chicken  19866894395059_2
ttgtactgtggcagagtcaatcatgcccagtgggaatcttttcaatacgttcggaagtaacaaagatgcaagactgggctgagtccttattgatcccaagaaacttgagtctcttaaaacttcatagctaccaagtgactcagtttcaaatcacctkccctgcatgacccattccctcataccacccctattttgattttttttttctccttttaagctgcatattcatatgcatgtcccattactacagccatttcagacaaagctgcagttaggtgtgctacccatgggcctttcagygtgtcacctttggtgtaggcagatgatgaattctgatgaaacatactgtagctccactcattattcaagccaaggctgcctgtgcctccctaaaataaaacctataactgctgcttgccatctgctgtggtgcaaactacatctaagataaaacaaccctctctaataagaagagagcacaacatttcatttatcatcagcaagtgtaataataacagctactgacctgtggccacaagcacgtcgctgttcacaaatccagaggaaggcaattaaaatctgaggtgttcaaatactaaa

SEQ ID NO: 89103 - DNA, 600 bp, Chicken  19866894395062_1
tttttttttttttaatttggggagaaatacaagtgcaaacgtctgtgtgttgttagtgacattaaggaaaaactttgtgcttttacacgaactcaacaatttttattcacattctctccaaacatataagaaaaaaatatatagagtagggattctgcaaattattcttcaagcaggtgtgtgaaattttaagatgtcctctgattatttcatttccgatctgtggttctgttggctttttgtccttggcatttcttctttttttctgtatattttttcttttgccttcagccttttgtrtatttgtattacatttgtagtgacttgtgactaaaaagctagagtctgagcagaaaagtaacagctacaggtctccagtgagttctacaaaggatacaccggtaagttatttttgttgccacaaactttttttattatcatcactgacattttcatgaagtgcatgttttagtgcaatattggtttcttgggtaatcatcacagacagattttcttttatttatcaatcagcagacgttttaaatttccatatagcctgctaactgcttgggctgattagcatgaaacttggcttgcatc

SEQ ID NO: 89104 - DNA, 600 bp, Chicken  19866894395067_1
tctgccaatctcaatgaattcaagcttgcagtcactgtggggttgcacattatcataatgccttaaactaaatggggaatctaaggtctggaaggattatatgactttccccatctttcataatctgtataaaagagtgggaactgcacagtaatgctgctggccatcttttgtgtggagcagttcgaggcatcacttaaaatggtgaaagctgttgaagctgtgcagagggctgtgccttactctgattgttgctctgtttgtggcagtttcacagtttgctatctgctcatcaccccrctctgttctgttctgttgcaattgcttgaattttgcccacaaagagcaacaacctgaagctctctctggattctccaccgacgtatttggcatcaattctttgcagtcttccagttccaaaggctggtttgaacagaagmagttacctcctgctcatttcagaatgactaccaaaaaaataattggtggtattttaatccatttcctggaagtccaaatgcaaacaccccgtgctaattaatgggctgtgggaagatgaatctgagtagcctcactccaatggaatgaatgaaaagtaaa

SEQ ID NO: 89105 - DNA, 600 bp, Chicken  19866894395067_2
gaactgcacagtaatgctgctggccatcttttgtgtggagcagttcgaggcatcacttaaaatggtgaaagctgttgaagctgtgcagagggctgtgccttactctgattgttgctctgtttgtggcagtttcacagtttgctatctgctcatcaccccrctctgttctgttctgttgcaattgcttgaattttgcccacaaagagcaacaacctgaagctctctctggattctccaccgacgtatttggcatcaattctttgcagtcttccagttccaaaggctggtttgaacagaagmagttacctcctgctcatttcagaatgactaccaaaaaaataattggtggtattttaatccatttcctggaagtccaaatgcaaacaccccgtgctaattaatgggctgtgggaagatgaatctgagtagcctcactccaatggaatgaatgaaaagtaaagagtaaacaagcgaagttttgctttctttaaacctctcagacttctcgtagcaccgaggaaagaagagcatttcatacaatcatagaattgcctggacagataaagaattgtactgtagatataaagggtggggtaataa

SEQ ID NO: 89106 - DNA, 600 bp, Chicken  19866894395078_1
tagtctgttgaagaagagaaattactactgtttgtgttagagttgcaagtgacaggaaagcctgcttttgtgcagcttcagtggtgtggtatacagtaaatgaatgaaattctgaaatgcttcctaacagctgcatgcatacggtagttctgtcaagtgaatgttatatacacatgaaaataaagacagacatgcacaagaaactaaaatcacatgaaaatgaactttacagtagttgataggtttcctaacttgctaataggaaaagacaccgtatcttgaaagcctagctaggttatwagtaacgtcaagacagaagcacaytattcayagartttayacaaaatgggacttcttcccagacaaacaccaagctcaaactttccatgtttccttagagagaggccagagagacacagctggtaccaagttttcaccagggagaggtaaggatcagacaatgcaactgcacacagctgggctggagccagctccctgcccctcatgggagcacagccactgacatgcagctgcactgctccctgtcagatagctaaccaagcctcagccatctcatcctcaactcagaaattcaccatt

SEQ ID NO: 89107 - DNA, 600 bp, Chicken  19866894395078_2
ctactgtttgtgttagagttgcaagtgacaggaaagcctgcttttgtgcagcttcagtggtgtggtatacagtaaatgaatgaaattctgaaatgcttcctaacagctgcatgcatacggtagttctgtcaagtgaatgttatatacacatgaaaataaagacagacatgcacaagaaactaaaatcacatgaaaatgaactttacagtagttgataggtttcctaacttgctaataggaaaagacaccgtatcttgaaagcctagctaggttatwagtaacgtcaagacagaagcacaytattcayagartttayacaaaatgggacttcttcccagacaaacaccaagctcaaactttccatgtttccttagagagaggccagagagacacagctggtaccaagttttcaccagggagaggtaaggatcagacaatgcaactgcacacagctgggctggagccagctccctgcccctcatgggagcacagccactgacatgcagctgcactgctccctgtcagatagctaaccaagcctcagccatctcatcctcaactcagaaattcaccattcacttcacargagcaattgccagc

SEQ ID NO: 89108 - DNA, 600 bp, Chicken  19866894395078_3
ttgtgttagagttgcaagtgacaggaaagcctgcttttgtgcagcttcagtggtgtggtatacagtaaatgaatgaaattctgaaatgcttcctaacagctgcatgcatacggtagttctgtcaagtgaatgttatatacacatgaaaataaagacagacatgcacaagaaactaaaatcacatgaaaatgaactttacagtagttgataggtttcctaacttgctaataggaaaagacaccgtatcttgaaagcctagctaggttatwagtaacgtcaagacagaagcacaytattcayagartttayacaaaatgggacttcttcccagacaaacaccaagctcaaactttccatgtttccttagagagaggccagagagacacagctggtaccaagttttcaccagggagaggtaaggatcagacaatgcaactgcacacagctgggctggagccagctccctgcccctcatgggagcacagccactgacatgcagctgcactgctccctgtcagatagctaaccaagcctcagccatctcatcctcaactcagaaattcaccattcacttcacargagcaattgccagccaccttt

SEQ ID NO: 89109 - DNA, 600 bp, Chicken  19866894395078_4
gttagagttgcaagtgacaggaaagcctgcttttgtgcagcttcagtggtgtggtatacagtaaatgaatgaaattctgaaatgcttcctaacagctgcatgcatacggtagttctgtcaagtgaatgttatatacacatgaaaataaagacagacatgcacaagaaactaaaatcacatgaaaatgaactttacagtagttgataggtttcctaacttgctaataggaaaagacaccgtatcttgaaagcctagctaggttatwagtaacgtcaagacagaagcacaytattcayagartttayacaaaatgggacttcttcccagacaaacaccaagctcaaactttccatgtttccttagagagaggccagagagacacagctggtaccaagttttcaccagggagaggtaaggatcagacaatgcaactgcacacagctgggctggagccagctccctgcccctcatgggagcacagccactgacatgcagctgcactgctccctgtcagatagctaaccaagcctcagccatctcatcctcaactcagaaattcaccattcacttcacargagcaattgccagccacctttcaga

SEQ ID NO: 89110 - DNA, 600 bp, Chicken  19866894395078_5
agttgcaagtgacaggaaagcctgcttttgtgcagcttcagtggtgtggtatacagtaaatgaatgaaattctgaaatgcttcctaacagctgcatgcatacggtagttctgtcaagtgaatgttatatacacatgaaaataaagacagacatgcacaagaaactaaaatcacatgaaaatgaactttacagtagttgataggtttcctaacttgctaataggaaaagacaccgtatcttgaaagcctagctaggttatwagtaacgtcaagacagaagcacaytattcayagartttayacaaaatgggacttcttcccagacaaacaccaagctcaaactttccatgtttccttagagagaggccagagagacacagctggtaccaagttttcaccagggagaggtaaggatcagacaatgcaactgcacacagctgggctggagccagctccctgcccctcatgggagcacagccactgacatgcagctgcactgctccctgtcagatagctaaccaagcctcagccatctcatcctcaactcagaaattcaccattcacttcacargagcaattgccagccacctttcagagcagt

SEQ ID NO: 89111 - DNA, 366 bp, Chicken  19866894395078_6
agacagaagcacaytattcayagartttayacaaaatgggacttcttcccagacaaacaccaagctcaaactttccatgtttccttagagagaggccagagagacacagctggtaccaagttttcaccagggagaggtaaggatcagacaatgcaactgcacacagctgggctggagccagctccctgcccctcatgggagcacagccactgacatgcagctgcactgctccctgtcagatagctaaccaagcctcagccatctcatcctcaactcagaaattcaccattcacttcacargagcaattgccagccacctttcagagcagttttgcatcagcgtgtaaattgttagccggatctcag

SEQ ID NO: 89112 - DNA, 600 bp, Chicken  19866894395084_1
ataaatgtggtgacgtgtgcctggcaggctatccccatgcagggtgcatccagccctgcagcgggagctggggatgcccatgccagcctcgcagggacccgtagagcccagcctggcagagccagccttgcaccaccagccccccgaggtaggtaggacggcaagcgggttgtcacataacgcggcgggacggccccacctggcttaattatctcagtctctttggtgctgggagggcgcaaagcttaaatccgtcatgggttcagcgtgaagctgggagcagctggtcacccaccctcscgtcgggggctcctgcatgcacacacagctgaaattgcattggaaagagaacacatagcaatgtgtttttccgctcccggagggcagttttaaatcacgcgtgcacatctggaccctgatgatttttacaccgaccagcgactgcgtgttggagctttggggttggcagaagagaccaccgtggtctgaagcctccccagtgctatggctaggttgctatgcggcagctcattgcagtggcttaggaaacaagctctggctttagtcgctttgattttgcatgttgtgctctttcgtgtg

SEQ ID NO: 89113 - DNA, 600 bp, Chicken  19866894395095_1
cttaaatacacgattgtacctccccctcttgccagcttttgctttttcagttcattgaacagacctatgaactgagaggagaggtgaagcagttagatctagatggaaggcattttctgtaggaattcaggctcatttaagctcaaaattgccagttttataaccagtgaggctgagacagttatgagagaggatgttcctcttcaaagtagaggcagattgttgcccatctggaatactgggacgtgtcctccctgccacgctgctcctgtgcattactggactacaaaaacaagaagrggcacaagctgcttttgttttcttccttagtttctgaagagacaaggtcaggtagcaggtttggttttaatctgatgcctctgttctgcaattattgccctcttaacccacagggctcttgggtggatacttaattaatgtttgccaagaattaatacaatttaaggctgttgttgcacaagtctccagaagagatgaagtattctatatccacaatgtgattttggacagcgtgaaacagtttagacattctatcctaaatggtttgaggggagaaatagcaaatagaagctcccttga

SEQ ID NO: 89114 - DNA, 600 bp, Chicken  19866894395103_1
acagtgtgctccctgtgcggtgaccccgtgtgtgatggggcaccggcagcttgcagtgtgttcacagccagacctctatgctggtggtgcagaggaacctggatagaagtggtccccgggtttggttctgggttcagtcttggtcagcatcttcatcgttgacctgtatgaagggatagagtgcaccctctgcaagtttgctggtggagtgactgacaccccagaaggctgcgctgccattcagcaagagctgggcaggctgagagttgggtggagaggaacctgatgaggttcaactasggcgagtgtagagtcctacacccggagaggaataactgcatgcatcagtacaggctgggggctgagctgctgaaaggagctgtacaaagaggagactgggggtcctggtggccaacagtggaccagtggttgagcaacaattgagcgacagttggccaacggttgaccaacggttggccaatggttgaccatgagccagtagtgcgccctgtggccaagaaggccaatggctccctggggtgcattgcactgagcgctgcgctgccagcagggctgggaggcgttcccctctgctctgcc

SEQ ID NO: 89115 - DNA, 483 bp, Chicken  19866894395113_1
cgtgttttatttgctttgaattttgacatctgtattaaatagagtcttttaaatgtaatgccaagtaaatgaagtatcttatctgagactatgtgatatttcatactgtgtttgtgtaaaactgaatttctttgagtactctgtaatttccatgtcatcatgttgcttacattgttttcagtacagaatctaacctgcaaaatgtagatgctgtgggaagaagaaacttgtttttgaaacataacagagaaaagaaaatataaagggaaaaacgtaggggaagggaggggagtggggggraggagaggagatgtccaactgctctatgaactgaattaaattaccatctatttatctatttatggtaacaacatttactctactgactctaataccccagttagaatgactcaaacattcacaaggaggaacagcgtacacgaatgcatgatatagcatatagaagtgtccgagctaagcgca

SEQ ID NO: 89116 - DNA, 599 bp, Chicken  19866894395116_1
  misc_feature (1)..(64): n is any nucleotide
nnnnnnnnnnnnnnnnnnnnnnnnnnnnnnnnnnnnnnnnnnnnnnnnnnnnnnnnnnnnnnnnacagcaaacctatctgaatcccaagcttcaatctgaatgccattccaattactggaagatgcccatcttctgcgagtaatgtgtttctaaagcaatctgataaagtcctaacttgaggatgcaatgccagcctgcctgaattagcatctttccgttacctagacatcaacttcaggaaataattgcctttaacagaagtctaaagaacctaacaaatttcctccttgtcttatccrtacagccaggaagaaaaaaagaaactatccgttcatttaaccaaatkcatagggactacttcaagaaataaaatatggtcacttaatcaaaggctatggttaagtcacacgttcaacatttgatcaaacaaaccaagcaatcaatattgggaaaaataaaaaatatatttatttttgtaagctaacacaccttccattcaggtttaaactaatacctacttgatttgcttccttacagctacaataaaaattccttcttacttcatacacaagttccatgaaaaacagccttcacaaag

SEQ ID NO: 89117 - DNA, 599 bp, Chicken  19866894395116_2
  misc_feature (1)..(17): n is any nucleotide
nnnnnnnnnnnnnnnnnacagcaaacctatctgaatcccaagcttcaatctgaatgccattccaattactggaagatgcccatcttctgcgagtaatgtgtttctaaagcaatctgataaagtcctaacttgaggatgcaatgccagcctgcctgaattagcatctttccgttacctagacatcaacttcaggaaataattgcctttaacagaagtctaaagaacctaacaaatttcctccttgtcttatccrtacagccaggaagaaaaaaagaaactatccgttcatttaaccaaatkcatagggactacttcaagaaataaaatatggtcacttaatcaaaggctatggttaagtcacacgttcaacatttgatcaaacaaaccaagcaatcaatattgggaaaaataaaaaatatatttatttttgtaagctaacacaccttccattcaggtttaaactaatacctacttgatttgcttccttacagctacaataaaaattccttcttacttcatacacaagttccatgaaaaacagccttcacaaagtcagtctcgggttttcttgtttcaggtggttcactgtactgagccac

SEQ ID NO: 89118 - DNA, 599 bp, Chicken  19866894395117_1
  misc_feature (1)..(86): n is any nucleotide
nnnnnnnnnnnnnnnnnnnnnnnnnnnnnnnnnnnnnnnnnnnnnnnnnnnnnnnnnnnnnnnnnnnnnnnnnnnnnnnnnnnnnntgttagagattggctgagtagataccaagtgctgcaggagcatttctgctatatttgcacaagcaactgaaaaagcaacacaatttgaaatcaagtctataaagtatctcgaccgagttcaaccatttctagctgaaaacagaatccagatacttcaagctgcatcattaattactctgccaaacagatgtttcctttgattgtgtttcactasgtgaggtgacaaaagtgattgtctgaaaygtagtgcttcacgacagcacaacagggtggtgaaaatacctgccatttacaggaattatgcaaagtgctgctgagataatggggggagagggacagcctgattttttatttctcctatacgcttcacaattaaatgtaaaacacattgtcttcagcaagagagaaattggtaaataccataccaatgctcacaaagctgtgtgagcagatgtacagaattactatcaaaaagctatcacatgctcctctggctgctgcagtgggaataca

SEQ ID NO: 89119 - DNA, 599 bp, Chicken  19866894395117_2
  misc_feature (1)..(57): n is any nucleotide
nnnnnnnnnnnnnnnnnnnnnnnnnnnnnnnnnnnnnnnnnnnnnnnnnnnnnnnnntgttagagattggctgagtagataccaagtgctgcaggagcatttctgctatatttgcacaagcaactgaaaaagcaacacaatttgaaatcaagtctataaagtatctcgaccgagttcaaccatttctagctgaaaacagaatccagatacttcaagctgcatcattaattactctgccaaacagatgtttcctttgattgtgtttcactasgtgaggtgacaaaagtgattgtctgaaaygtagtgcttcacgacagcacaacagggtggtgaaaatacctgccatttacaggaattatgcaaagtgctgctgagataatggggggagagggacagcctgattttttatttctcctatacgcttcacaattaaatgtaaaacacattgtcttcagcaagagagaaattggtaaataccataccaatgctcacaaagctgtgtgagcagatgtacagaattactatcaaaaagctatcacatgctcctctggctgctgcagtgggaatacagctcaaagaagggaaaaaacaaaggcagg

SEQ ID NO: 89120 - DNA, 469 bp, Chicken  19866894395117_3
ctgctgagataatggggggagagggacagcctgattttttatttctcctatacgcttcacaattaaatgtaaaacacattgtcttcagcaagagagaaattggtaaataccataccaatgctcacaaagctgtgtgagcagatgtacagaattactatcaaaaagctatcacatgctcctctggctgctgcagtgggaatacagctcaaagaagggaaaaaacaaaggcaggaacctcttagtctttctcagtctaatgtatagagtcagtgtaactgggagcgtgagagatgtaagagraaagactacagcctaaaagcacggcgtgaaacagctaaatattgaagcatagcctaaagagaggcaataagaaaggcattatcttaaccgagcaggcagtaactggctcagcccagatgtgctactgatcagacaacagtcagaatgtcactgccaaaattcagtgtaa

SEQ ID NO: 89121 - DNA, 600 bp, Chicken  19866894395118_1
aaaatctcaacacttccaaatagattgttcttaaatcaaagattgttctgcaaaagaatattttttcccctgccatagctaaagcctgatgtgttttctttaaatccaattggaatttaccactgactttactgtgaataattctgcatattctatccatgtgcagaggtgatgcatacctagtttgccttttcaggctttgcactctgtgaaattattatcaatccgctgatggaagataccctgatataagagaaagtgtttggaggctggggcagtcatctgtctatcttctcctcrtatatcagttgtttcctaatctagatcaatcctatctgcacagtctctgtattaaatttttagccacccatttctgcctactgtacacccatcaaagagaccatcagttttgtagctccacctgctttatctgtgttcctaatggaaaattcagttttgttctttcaaactgagaactacctatcttttcttctttgcaagctgcagcagcaattccattaagtacttttgtccttcaccttccctaagtaagacactgcagagcaaagaaggagaaggagcagagcagctgggaaactg

SEQ ID NO: 89122 - DNA, 600 bp, Chicken  19866894395120_1
ttgtaggtacaaatgtttatatgcatctaaccatggttcagcccaaaggaaaagccatgatgtgttctaatagcttatcgtcaaaccaaaattatggatatcatgttttgcaagcactaaatgatgctaaatagaaaccaaagagtaagaagcagagtattacctaataatccttgctcactcatggttctccattggttctccactgacatatttactccactccacaagaagtaacagttctcagggaaatatttaccacacaggaaatcttaccagatagagagcaggagtaatggyccaccttgtgycctcataagccaatgtgtaaggtccctgtcaccaaacatgagcagagtgggacattytggctattctgtttcacataaggaatatggagagcatgaaataaaattacagcaacatgcagtctgccctccaacacacatgagcagctattctagccagaaaaggaataacagaaaacacaagggtgatataaacaaaggaataatactgatcagtcaatgaattttggtacaaagtgtgtacaacacttcctcaccgctgcatatgtttttagtactctaaagtaaaggc

SEQ ID NO: 89123 - DNA, 600 bp, Chicken  19866894395120_2
aatgtttatatgcatctaaccatggttcagcccaaaggaaaagccatgatgtgttctaatagcttatcgtcaaaccaaaattatggatatcatgttttgcaagcactaaatgatgctaaatagaaaccaaagagtaagaagcagagtattacctaataatccttgctcactcatggttctccattggttctccactgacatatttactccactccacaagaagtaacagttctcagggaaatatttaccacacaggaaatcttaccagatagagagcaggagtaatggyccaccttgtgycctcataagccaatgtgtaaggtccctgtcaccaaacatgagcagagtgggacattytggctattctgtttcacataaggaatatggagagcatgaaataaaattacagcaacatgcagtctgccctccaacacacatgagcagctattctagccagaaaaggaataacagaaaacacaagggtgatataaacaaaggaataatactgatcagtcaatgaattttggtacaaagtgtgtacaacacttcctcaccgctgcatatgtttttagtactctaaagtaaaggccaaaagggtag

SEQ ID NO: 89124 - DNA, 600 bp, Chicken  19866894395120_3
aatagcttatcgtcaaaccaaaattatggatatcatgttttgcaagcactaaatgatgctaaatagaaaccaaagagtaagaagcagagtattacctaataatccttgctcactcatggttctccattggttctccactgacatatttactccactccacaagaagtaacagttctcagggaaatatttaccacacaggaaatcttaccagatagagagcaggagtaatggyccaccttgtgycctcataagccaatgtgtaaggtccctgtcaccaaacatgagcagagtgggacattytggctattctgtttcacataaggaatatggagagcatgaaataaaattacagcaacatgcagtctgccctccaacacacatgagcagctattctagccagaaaaggaataacagaaaacacaagggtgatataaacaaaggaataatactgatcagtcaatgaattttggtacaaagtgtgtacaacacttcctcaccgctgcatatgtttttagtactctaaagtaaaggccaaaagggtagtaataaaaacaccctcgggtactaagaaattggctcataaagtaactacaataacaa

SEQ ID NO: 89125 - DNA, 582 bp, Chicken  19866894395120_4
aggtttggaggtaggtatttggagcacctgtctgtaaactccagtagcattatgacttctgcggaggataaatgcacaaatctctctatttctgcaagaagagattctctgctagaacagaaattaaacatatttacaagatggggagttatgacaaaatcctgaccaggcatttctcaaggtagtgtcatgctctgaaagctgatccccaagtccatgccatgttgttgggagcaaagttgttattacagcacggagaattctgttgtttgttttaatttttcagttcattgccttatyttttcccattggaaaattaaaagtgcttttttgatgttcttttaatttatgatggggctaacggagttgtagggaacgtagtttcactacaggtctgcaggtgaactcatcactgatccatgcttgtctgggctactaaggcacctcagaagcttgatcacacagatgtgctactctttactcacctccttggccagactcactctcacatggctatggcctcctttttgtcagacctgttgtagagcagcttggaagacagttaaccagagcacacaaata

SEQ ID NO: 89126 - DNA, 600 bp, Chicken  19866894395125_1
catgtatgtgctggcaggattccttctgttaggtgccactctctgcatgtgggtatcacagctcctgtcctgattcagagacctgtccccactgctgctggtggcagaaaggttacagcccataatagaaaaataatggtttgaattggaagggactcttaaaagccatctagtccaacgcccctgcaatgaacagagacatctacagctacatcagggtgctcagagccccgtccagcctgaccttgtatgtctccaaggatgatggggcatccatcacttctctgggcaacctgtgcyagtgccttacctcccctgttgtaaaaaaygtattccttatatccagcctaaatctcccctcttttagttggaagaacaggatgaatgcatcaaggttgagcagaccacagaccttcaccagcaaacaagacaaactttcctctacgtacagctaagtgtaaaactaagccattggcccataaaagcctgggctcagtttagtttctggtctacaacagtgcttgctggcaggaagagagcatgaagaggaccaactggcctacatacatgtaatacaaatagaagcagttcatctcaata

SEQ ID NO: 89127 - DNA, 600 bp, Chicken  19866894395125_2
taggtgccactctctgcatgtgggtatcacagctcctgtcctgattcagagacctgtccccactgctgctggtggcagaaaggttacagcccataatagaaaaataatggtttgaattggaagggactcttaaaagccatctagtccaacgcccctgcaatgaacagagacatctacagctacatcagggtgctcagagccccgtccagcctgaccttgtatgtctccaaggatgatggggcatccatcacttctctgggcaacctgtgcyagtgccttacctcccctgttgtaaaaaaygtattccttatatccagcctaaatctcccctcttttagttggaagaacaggatgaatgcatcaaggttgagcagaccacagaccttcaccagcaaacaagacaaactttcctctacgtacagctaagtgtaaaactaagccattggcccataaaagcctgggctcagtttagtttctggtctacaacagtgcttgctggcaggaagagagcatgaagaggaccaactggcctacatacatgtaatacaaatagaagcagttcatctcaataaaagagaagacaaggctgcttacccttcc

SEQ ID NO: 89128 - DNA, 581 bp, Chicken  19866894395125_3
accacagaccttcaccagcaaacaagacaaactttcctctacgtacagctaagtgtaaaactaagccattggcccataaaagcctgggctcagtttagtttctggtctacaacagtgcttgctggcaggaagagagcatgaagaggaccaactggcctacatacatgtaatacaaatagaagcagttcatctcaataaaagagaagacaaggctgcttacccttccaaactcttcccatcctgccacggccaagccagctctacccaaacaccttgtgcagttactactctctctattcytttgataaggaaaatcccttcacttctattttcaaatggagagcaaattaaaccaaaccacagactttcaggaattaaacatctgcacgcaaaacaagcctcagaatgcattagttgcatatgcatttgtttcaagtccagaaacattttactggagggtgctgagtaacaaacttaatcatagctctgaggtattcaaggggaaaaagatggaaccccttagtctttaaaatcacattcaggatttgatgactgcactgttctgataaggccagcgctcc

SEQ ID NO: 89129 - DNA, 599 bp, Chicken  19866894395127_1
  misc_feature (1)..(11): n is any nucleotide
nnnnnnnnnnncctcagtgccacatccccacagttccggaacacctccatggatggtgactcccccacctccctgggcagcagtgccgctgcatcacctctctttccgagaaggaatgtttcctaacacccagcctgaacctcaccagcacaacttgaggccagcacctctcatagaaagcaactaactataaaggtgccaggatgtagtccaggtcctcctccctgcctgctgcccgtggcagtgcttgcaggagccctgcagtcatctgggagtcctgccttgctctgctcttggcamatgctgcccraatccccagcactatccctcatgccctccttcacctgccctttctcaagcataggaagtttcctacctgccgttctgtggcagcaaggctttagtgaatattgagtgatgaagaccagctcatgaaaggcactaaagcagggcatgttgttgctttgttctggcagagatgggatcccaccgtacagactccggaaacagcatcgcagagagatgcaagaaagtgccaaagcaaatggacgtgtgccactacctcacattcctgtaagtagctctgtctccttctgcag

SEQ ID NO: 89130 - DNA, 599 bp, Chicken  19866894395127_2
  misc_feature (1)..(1): n is any nucleotide
ncctcagtgccacatccccacagttccggaacacctccatggatggtgactcccccacctccctgggcagcagtgccgctgcatcacctctctttccgagaaggaatgtttcctaacacccagcctgaacctcaccagcacaacttgaggccagcacctctcatagaaagcaactaactataaaggtgccaggatgtagtccaggtcctcctccctgcctgctgcccgtggcagtgcttgcaggagccctgcagtcatctgggagtcctgccttgctctgctcttggcamatgctgcccraatccccagcactatccctcatgccctccttcacctgccctttctcaagcataggaagtttcctacctgccgttctgtggcagcaaggctttagtgaatattgagtgatgaagaccagctcatgaaaggcactaaagcagggcatgttgttgctttgttctggcagagatgggatcccaccgtacagactccggaaacagcatcgcagagagatgcaagaaagtgccaaagcaaatggacgtgtgccactacctcacattcctgtaagtagctctgtctccttctgcagaggtaaatat

SEQ ID NO: 89131 - DNA, 600 bp, Chicken  19866894395134_1
cagtcactcatagccccttttgtttgttaggcaactggctgggctctgtggctttgccaggacaagtgtttattggggatcatgtccagtggcccagagcatcccaatatgagtcgcacgtgatgaagtgcccttgtccaacagatatgttagcactatgctcatgaaaattcaggtttttgtgatggtagaattgtgatacctaaacatggcaagagtcatcttagcaaaagttgctaaataaatgtacttgttcattagtagaatttactaagttggatacaccatatcaatttctgrctctgtccttamtttcttccagctgtgggatctgactgctgggaaggtaatgtttgagtttacaggacattctggcccagtcaacgtcgttgaattccatccyagtgaataccttttggcttctggcagctctgacaggtaaagacaggggaaagagaaaaaagggaattgttgataacagttccctttcccgatgcccttcctcttagggacatgacaagcaggaatgtcacacgactcaaaccattgcaagagcatgtcacctagccaacagcatgtcatacctatgatgtacagaat

SEQ ID NO: 89132 - DNA, 600 bp, Chicken  19866894395134_2
gccccttttgtttgttaggcaactggctgggctctgtggctttgccaggacaagtgtttattggggatcatgtccagtggcccagagcatcccaatatgagtcgcacgtgatgaagtgcccttgtccaacagatatgttagcactatgctcatgaaaattcaggtttttgtgatggtagaattgtgatacctaaacatggcaagagtcatcttagcaaaagttgctaaataaatgtacttgttcattagtagaatttactaagttggatacaccatatcaatttctgrctctgtccttamtttcttccagctgtgggatctgactgctgggaaggtaatgtttgagtttacaggacattctggcccagtcaacgtcgttgaattccatccyagtgaataccttttggcttctggcagctctgacaggtaaagacaggggaaagagaaaaaagggaattgttgataacagttccctttcccgatgcccttcctcttagggacatgacaagcaggaatgtcacacgactcaaaccattgcaagagcatgtcacctagccaacagcatgtcatacctatgatgtacagaatatagagttctta

SEQ ID NO: 89133 - DNA, 600 bp, Chicken  19866894395134_3
ccaatatgagtcgcacgtgatgaagtgcccttgtccaacagatatgttagcactatgctcatgaaaattcaggtttttgtgatggtagaattgtgatacctaaacatggcaagagtcatcttagcaaaagttgctaaataaatgtacttgttcattagtagaatttactaagttggatacaccatatcaatttctgrctctgtccttamtttcttccagctgtgggatctgactgctgggaaggtaatgtttgagtttacaggacattctggcccagtcaacgtcgttgaattccatccyagtgaataccttttggcttctggcagctctgacaggtaaagacaggggaaagagaaaaaagggaattgttgataacagttccctttcccgatgcccttcctcttagggacatgacaagcaggaatgtcacacgactcaaaccattgcaagagcatgtcacctagccaacagcatgtcatacctatgatgtacagaatatagagttcttaccttctcatgcaaaactgctgatgctctctgccgtgctagaaaacaatgcagtgggctcaagcggctcactaatcctatgtgtataacgag

SEQ ID NO: 89134 - DNA, 599 bp, Chicken  19866894395139_1
  misc_feature (1)..(17): n is any nucleotide
nnnnnnnnnnnnnnnnnccacatgcttgctcagcattccaggaacgctaatagagttctgaaatcttacctttttctaacaaaatctgccttaattcttcctgaattgaaaacctgaagtaaaagcctacctcagagaagctgtgagggacagggagaaacacacatacaaaccatgccaattcatgtatttttccccacaaattacgctgtttctatctatgttagcaagcggtggagagcatcagcgatgtgtgctcacatggctttggaatacttggtgagtttctcctggcccttsgactgactgtctgtgagtatttgagggtaaagtctgcaggcacatctttcaattcagtttcatccgaaaggatttagttttcaggctcccagactgctccgagacacaaaacaaagcataactaagtgggaaggactgaaagatttactacaaagcttatgccagatccaaactaaaactcaaacgtgggtgtactcrtattaaaaagaagcacaagatcaccagatttccccatcactatacaaattataaacacagtcatactttcctcattaaataaagcaatacttaccctttta

SEQ ID NO: 89135 - DNA, 600 bp, Chicken  19866894395139_2
acaaattacgctgtttctatctatgttagcaagcggtggagagcatcagcgatgtgtgctcacatggctttggaatacttggtgagtttctcctggcccttsgactgactgtctgtgagtatttgagggtaaagtctgcaggcacatctttcaattcagtttcatccgaaaggatttagttttcaggctcccagactgctccgagacacaaaacaaagcataactaagtgggaaggactgaaagatttactacaaagcttatgccagatccaaactaaaactcaaacgtgggtgtactcrtattaaaaagaagcacaagatcaccagatttccccatcactatacaaattataaacacagtcatactttcctcattaaataaagcaatacttacccttttaaatctttgaaatttgttaattgcttttagaaacacacatacatacacacagaaaagaaagatacagtgtgttatgtaacaaactgcttttcctcgctgagatgtcttccgaggagttaaacatagaagacaaaaaactgcatcaaagttacatttggaatacagtgggtaaatgaaggaacagatggaaaattgaattc

SEQ ID NO: 89136 - DNA, 600 bp, Chicken  19866894395139_3
tcggctcactaacactgtatgtaatattaaacttcacatcctttccattaaaagcatcaaacaagagctgtcctgtgtagcctggcctaatgaatcctgagcccctgaagtggaacatacttggttctcttctagccttgaataatgaaggggtgtgttgtacagctgttagccagccagtactggaagcagaaaagtgaatatttccctacaacttcagctcctatctttcacagccctttgtcacatagttgggtaggcctactttcagctggaattccactctacagcatgacgttmtctcctaattgaacaattaacttacctgttttgcatatatacatcctttttatagctttcctagagaaaaacttaaataggtcttttacaactagacacaaaatgtagaactcagcacatggattaattcacagagaaaatcgcggtttgaacaaccgtgaagaattataggctatttagcctacagaaaacaaacatagatagaacaacccaaaaagccttagaagacattgcagtcaagaaatgtaaaggtaatttaagaattctgctggtgccatggcactaatattcttcatgcac

SEQ ID NO: 89137 - DNA, 599 bp, Chicken  19866894395147_1
  misc_feature (1)..(209): n is any nucleotide
nnnnnnnnnnnnnnnnnnnnnnnnnnnnnnnnnnnnnnnnnnnnnnnnnnnnnnnnnnnnnnnnnnnnnnnnnnnnnnnnnnnnnnnnnnnnnnnnnnnnnnnnnnnnnnnnnnnnnnnnnnnnnnnnnnnnnnnnnnnnnnnnnnnnnnnnnnnnnnnnnnnnnnnnnnnnnnnnnnnnnnnnnnnnnnnnnnnnnnnnnnnnnnnnnttctttccccagtcagctcagcccatggaatgcattccttccgcactcacaaatgacactgtacagcagtacggacacccggtgcccacaygmgtcctcattaagacatcctcatacagagaggaatacctacatggagagaaagragtgagggcgcagatggacgcctgtctggtgccagagaaggcagagggcaatgggacgggacagaaagccagaccgagcactcagtgttctgtgctgcaaatagaaccccactgttcacaaactgcccgccaggtcccagggcaaccctatgaggtgatgagctgtagctcagggtaaggcctcgagctgctgcctgagtcaggacgtggcctggagggtgcagaaagctctgccaacgggaca

SEQ ID NO: 89138 - DNA, 599 bp, Chicken  19866894395147_2
  misc_feature (1)..(207): n is any nucleotide
nnnnnnnnnnnnnnnnnnnnnnnnnnnnnnnnnnnnnnnnnnnnnnnnnnnnnnnnnnnnnnnnnnnnnnnnnnnnnnnnnnnnnnnnnnnnnnnnnnnnnnnnnnnnnnnnnnnnnnnnnnnnnnnnnnnnnnnnnnnnnnnnnnnnnnnnnnnnnnnnnnnnnnnnnnnnnnnnnnnnnnnnnnnnnnnnnnnnnnnnnnnnnnnttctttccccagtcagctcagcccatggaatgcattccttccgcactcacaaatgacactgtacagcagtacggacacccggtgcccacaygmgtcctcattaagacatcctcatacagagaggaatacctacatggagagaaagragtgagggcgcagatggacgcctgtctggtgccagagaaggcagagggcaatgggacgggacagaaagccagaccgagcactcagtgttctgtgctgcaaatagaaccccactgttcacaaactgcccgccaggtcccagggcaaccctatgaggtgatgagctgtagctcagggtaaggcctcgagctgctgcctgagtcaggacgtggcctggagggtgcagaaagctctgccaacgggacagc

SEQ ID NO: 89139 - DNA, 599 bp, Chicken  19866894395147_3
  misc_feature (1)..(154): n is any nucleotide
nnnnnnnnnnnnnnnnnnnnnnnnnnnnnnnnnnnnnnnnnnnnnnnnnnnnnnnnnnnnnnnnnnnnnnnnnnnnnnnnnnnnnnnnnnnnnnnnnnnnnnnnnnnnnnnnnnnnnnnnnnnnnnnnnnnnnnnnnnnnnnnnnnnnnnnnnnttctttccccagtcagctcagcccatggaatgcattccttccgcactcacaaatgacactgtacagcagtacggacacccggtgcccacaygmgtcctcattaagacatcctcatacagagaggaatacctacatggagagaaagragtgagggcgcagatggacgcctgtctggtgccagagaaggcagagggcaatgggacgggacagaaagccagaccgagcactcagtgttctgtgctgcaaatagaaccccactgttcacaaactgcccgccaggtcccagggcaaccctatgaggtgatgagctgtagctcagggtaaggcctcgagctgctgcctgagtcaggacgtggcctggagggtgcagaaagctctgccaacgggacagccacacaacgaacacaaatcggccccaaygagcaaacggggacacacagccctc

SEQ ID NO: 89140 - DNA, 600 bp, Chicken  19866894395147_4
gaggaatacctacatggagagaaagragtgagggcgcagatggacgcctgtctggtgccagagaaggcagagggcaatgggacgggacagaaagccagaccgagcactcagtgttctgtgctgcaaatagaaccccactgttcacaaactgcccgccaggtcccagggcaaccctatgaggtgatgagctgtagctcagggtaaggcctcgagctgctgcctgagtcaggacgtggcctggagggtgcagaaagctctgccaacgggacagccacacaacgaacacaaatcggccccaaygagcaaacggggacacacagccctccatcccatcattccctgctgctacacaaagcaccgctctgatttctgccagcagaagaaatgaaggaggcaaatgggawggaataaaggaaaagtggatggaggagtgctggtgcagcccgacagatgaatgcctctgcaagagaaaggggatatttttcactaagcgtgcccttaacttttaatgaacgctcttagggaagtgatgctgacaaacactgcacaagggctgagcggctgctgggagcagcacagagagctgatagggcagcactt

SEQ ID NO: 89141 - DNA, 563 bp, Chicken  19866894395147_5
cactcagtgttctgtgctgcaaatagaaccccactgttcacaaactgcccgccaggtcccagggcaaccctatgaggtgatgagctgtagctcagggtaaggcctcgagctgctgcctgagtcaggacgtggcctggagggtgcagaaagctctgccaacgggacagccacacaacgaacacaaatcggccccaaygagcaaacggggacacacagccctccatcccatcattccctgctgctacacaaagcaccgctctgatttctgccagcagaagaaatgaaggaggcaaatgggawggaataaaggaaaagtggatggaggagtgctggtgcagcccgacagatgaatgcctctgcaagagaaaggggatatttttcactaagcgtgcccttaacttttaatgaacgctcttagggaagtgatgctgacaaacactgcacaagggctgagcggctgctgggagcagcacagagagctgatagggcagcacttggatacaaagagagaatgtcatttcactcagtgtcacagtgaagtcggttctttctccccaaataag

SEQ ID NO: 89142 - DNA, 600 bp, Chicken  19866894395152_1
gccttcctcatctcatagccttgactgaacttgccccagtgcaggactgttactcctggcctttttaatttatcaggcttactttgagcagtcatgctgtccctctttgcctttgaagccacgcctaaggtggtggaaagcagaaataaaatgatgaaaacctgcactggttcttcacccagagcattaatgagaatgctgactgctgcagggaaagagagtactccaagggtcagtactgggtccagttctgctgaagaccttaattaatgatctgggttaatggggcagagtgctctytcagcaagtttgctgatgacatgaaaccaggcagagtggttgatacaccaggaggttgtgytgccatccagagggacctggacaggctggagaatgggctgacaagagcctcrtgaagttcaacaagaagttcctgaggaggaacaaccccaggcaccaggccaaactgaagcacaggaggttttctctgaacctcaggaagcactttgatgcatgggtgacagagcactggcacaggttgctcagagatgtggtggaagtacccatctcaaggagatgcatgcatagygtggatctatc

SEQ ID NO: 89143 - DNA, 600 bp, Chicken  19866894395152_2
tttttaatttatcaggcttactttgagcagtcatgctgtccctctttgcctttgaagccacgcctaaggtggtggaaagcagaaataaaatgatgaaaacctgcactggttcttcacccagagcattaatgagaatgctgactgctgcagggaaagagagtactccaagggtcagtactgggtccagttctgctgaagaccttaattaatgatctgggttaatggggcagagtgctctytcagcaagtttgctgatgacatgaaaccaggcagagtggttgatacaccaggaggttgtgytgccatccagagggacctggacaggctggagaatgggctgacaagagcctcrtgaagttcaacaagaagttcctgaggaggaacaaccccaggcaccaggccaaactgaagcacaggaggttttctctgaacctcaggaagcactttgatgcatgggtgacagagcactggcacaggttgctcagagatgtggtggaagtacccatctcaaggagatgcatgcatagygtggatctatctctcccatctccccctgctctccgcagggacaagagaggttttcttcatgctgctgcccac

SEQ ID NO: 89144 - DNA, 600 bp, Chicken  19866894395152_3
tgaagccacgcctaaggtggtggaaagcagaaataaaatgatgaaaacctgcactggttcttcacccagagcattaatgagaatgctgactgctgcagggaaagagagtactccaagggtcagtactgggtccagttctgctgaagaccttaattaatgatctgggttaatggggcagagtgctctytcagcaagtttgctgatgacatgaaaccaggcagagtggttgatacaccaggaggttgtgytgccatccagagggacctggacaggctggagaatgggctgacaagagcctcrtgaagttcaacaagaagttcctgaggaggaacaaccccaggcaccaggccaaactgaagcacaggaggttttctctgaacctcaggaagcactttgatgcatgggtgacagagcactggcacaggttgctcagagatgtggtggaagtacccatctcaaggagatgcatgcatagygtggatctatctctcccatctccccctgctctccgcagggacaagagaggttttcttcatgctgctgcccacagagaggtgtgaggagagtatggtaatgctgcagataaatctgtatctaagc

SEQ ID NO: 89145 - DNA, 600 bp, Chicken  19866894395152_4
agagtgctctytcagcaagtttgctgatgacatgaaaccaggcagagtggttgatacaccaggaggttgtgytgccatccagagggacctggacaggctggagaatgggctgacaagagcctcrtgaagttcaacaagaagttcctgaggaggaacaaccccaggcaccaggccaaactgaagcacaggaggttttctctgaacctcaggaagcactttgatgcatgggtgacagagcactggcacaggttgctcagagatgtggtggaagtacccatctcaaggagatgcatgcatagygtggatctatctctcccatctccccctgctctccgcagggacaagagaggttttcttcatgctgctgcccacagagaggtgtgaggagagtatggtaatgctgcagataaatctgtatctaagctgctggtaaacaggaagctgctgagcagcttcatgctctttctcggttttttaggttcttttggtctgccttttgtagctgttcttttttgcttatttcatctcaggaaacacattttctgccacctctttcaggaaatgtgcaagatagaaaaagtgttgtaaacctcatggtta

SEQ ID NO: 89146 - DNA, 600 bp, Chicken  19866894395157_1
catccagggcccttctctctgacaaggtacaaaaggactctcaactggcagaattgggccataagcaggaaagctggagagagctggctttgggcactgccatccacctgctgctagcatcgaatagagaatctgatcaccgcagagacgtgtcccattgctgcagcttcccctgtgctccctacagcatgattatgaaaataattacatcagctcttagttcaaaggggctctctgttcctcacaaagccaattacagcaagcagggtaatcagctccaaggaaaggccttgcacatckacacgcacctgcacagagcacacagacacagcgagccccagagccaagtactcacgtctgcagtgtgctgcctgcatgtgagacagaacaaagtgacaaaattggggttttggaaggcgaacagagccgtaccgttttccctttatatctccagaaacttctggttgaataatcctatcctaaagcaccgtttgtagagcgcttggcattaattctgcaggcacattgccatgagtattcaatcagagctctcaactgcacagcaacggaatgctgacacctactgccacacaacccccg

SEQ ID NO: 89147 - DNA, 600 bp, Chicken  19866894395160_1
tccaaactctcccacctctgcccaactttcacagaaaaacgatgtacattgttaacatgtatgtaaggcatttatcttgtctgctgtttgctggtggaaaaaaaaaagaacactcagaacactcatgcacaggaaaaccccaggaccacagcgctggtgagagctgctgggaagtcctgctccctccatgccagccctgctccctcaaccccaggaatttccagcggggcagaagcaatgtagggctggagctcccctgctcagccctcaccgctgccgcgccaggttaagtgggaaacygaatgcactctgcttttggaagatggttcactgagcacagctgtcaccaaacagcagcacagcagaaactgaacaaatgcattcagaggaaatcagataatagaggtggcaagtgtcctgtgatccatttaactgcgcctgctcccgtgagagcaccgcaggctctgggctgggtaacccagcaggcggtggcggaggctcaggcccagcggcccagcagggctgtgcagggcaggaagggatgctgccagcagctccggagtgcgtgagcatgtcctgcagccagggtggacctcgggc

SEQ ID NO: 89148 - DNA, 599 bp, Chicken  19866894395161_1
  misc_feature (1)..(120): n is any nucleotide
nnnnnnnnnnnnnnnnnnnnnnnnnnnnnnnnnnnnnnnnnnnnnnnnnnnnnnnnnnnnnnnnnnnnnnnnnnnnnnnnnnnnnnnnnnnnnnnnnnnnnnnnnnnnnnnnnnnnnnnnctgtttgaaatctgatgcaaatagtttaagctggataggatgccttatcatatacaatgtgatgtattttgtatgctttttttaatatataacctttttggtttagtgtaaagacatttaattagactgctcattacttttcgaaagcttgaagagcttactaaagattacttcaagttytgagagggcaaggtgtgatttgcacctttagctgcagataaggactcattagggatcgagctgttcgctctttccagatgagatggatttttctcttgtttctttgttttactgatttagtccgcccagacacttgactgctccatctgctgagtatccttccttccctttgtggaggtcatgctgccaagtctctaaaaaagaaccgcagcgactgaaaagaaaagaaataacstcagatcgtctgtctcaaatctgcactcatctcttttaaatgaatataaaactgaayataattt

SEQ ID NO: 89149 - DNA, 600 bp, Chicken  19866894395161_2
atttaattagactgctcattacttttcgaaagcttgaagagcttactaaagattacttcaagttytgagagggcaaggtgtgatttgcacctttagctgcagataaggactcattagggatcgagctgttcgctctttccagatgagatggatttttctcttgtttctttgttttactgatttagtccgcccagacacttgactgctccatctgctgagtatccttccttccctttgtggaggtcatgctgccaagtctctaaaaaagaaccgcagcgactgaaaagaaaagaaataacstcagatcgtctgtctcaaatctgcactcatctcttttaaatgaatataaaactgaayataatttgacctttttcattggtcaagatacagttagagtagcaagaacagtaacattaagaaaagaagcagaatagctaggagaagcagaatcacatttcccagagttttactttttacttaggtggggtcagggtcataggatcatagaatcatagaatggccctgggttgaaaagaaacacaatgatcatcgagtttcaaccccctgctatgtgcagggtcaccaaccaccagaccaggc

SEQ ID NO: 89150 - DNA, 600 bp, Chicken  19866894395161_3
tcaagttytgagagggcaaggtgtgatttgcacctttagctgcagataaggactcattagggatcgagctgttcgctctttccagatgagatggatttttctcttgtttctttgttttactgatttagtccgcccagacacttgactgctccatctgctgagtatccttccttccctttgtggaggtcatgctgccaagtctctaaaaaagaaccgcagcgactgaaaagaaaagaaataacstcagatcgtctgtctcaaatctgcactcatctcttttaaatgaatataaaactgaayataatttgacctttttcattggtcaagatacagttagagtagcaagaacagtaacattaagaaaagaagcagaatagctaggagaagcagaatcacatttcccagagttttactttttacttaggtggggtcagggtcataggatcatagaatcatagaatggccctgggttgaaaagaaacacaatgatcatcgagtttcaaccccctgctatgtgcagggtcaccaaccaccagaccaggctgcccagagccacatccagcctggcccttgaatgcctccagggatgggggcatccac

SEQ ID NO: 89151 - DNA, 599 bp, Chicken  19866894395166_1
  misc_feature (1)..(49): n is any nucleotide
nnnnnnnnnnnnnnnnnnnnnnnnnnnnnnnnnnnnnnnnnnnnnnnnncatgatttttgaagtagaggagactgcatatggaaaagaaatcccatcccaaatggatttaggcttgctcaaatggagatagtggcgatacgggaaggggatacacttgtggagaggtgactgctgaagactggagatatggacagaaacatgtgggtgtgcaggacactgtccctctaaccaagcccctctctgctccacggtgcaggtactgctgtgagcacccaggacatctgcagttccacagctgktggtgagtgtgagaatgggtccagaaaatgaagacatggtgggggtggagatggggagagagaaaggctttattgcctctgaattcccaatatccaccccaggagggcagattctccatgacttggaatgcagtgtgttttgcagctaatgatgctggtggaatccctgtgccatctctccaggtactctccaggctccagccctgtaccttaacacttccagagctcakgaaggggaaactgtcctggctcartgtgtccttcagaagctggttcctgctgcccgaattgtcttctgc

SEQ ID NO: 89152 - DNA, 553 bp, Chicken  19866894395166_2
caagcccctctctgctccacggtgcaggtactgctgtgagcacccaggacatctgcagttccacagctgktggtgagtgtgagaatgggtccagaaaatgaagacatggtgggggtggagatggggagagagaaaggctttattgcctctgaattcccaatatccaccccaggagggcagattctccatgacttggaatgcagtgtgttttgcagctaatgatgctggtggaatccctgtgccatctctccaggtactctccaggctccagccctgtaccttaacacttccagagctcakgaaggggaaactgtcctggctcartgtgtccttcagaagctggttcctgctgcccgaattgtcttctgcaaggatgggatggaggttcacaacatgaaagcccatcaggatacggtcatctactccatgctgatgaacatctctgcaagaagcagtgggacatacacgtgtaggtaccagcagaggaacaagagcaattggctaaggagctctcccctcagcattcccttggacctgcaggtcacaggtggga

SEQ ID NO: 89153 - DNA, 529 bp, Chicken  19866894395166_3
caggtactgctgtgagcacccaggacatctgcagttccacagctgktggtgagtgtgagaatgggtccagaaaatgaagacatggtgggggtggagatggggagagagaaaggctttattgcctctgaattcccaatatccaccccaggagggcagattctccatgacttggaatgcagtgtgttttgcagctaatgatgctggtggaatccctgtgccatctctccaggtactctccaggctccagccctgtaccttaacacttccagagctcakgaaggggaaactgtcctggctcartgtgtccttcagaagctggttcctgctgcccgaattgtcttctgcaaggatgggatggaggttcacaacatgaaagcccatcaggatacggtcatctactccatgctgatgaacatctctgcaagaagcagtgggacatacacgtgtaggtaccagcagaggaacaagagcaattggctaaggagctctcccctcagcattcccttggacctgcaggtcacaggtggga

SEQ ID NO: 89154 - DNA, 599 bp, Chicken  19866894395168_1
  misc_feature (1)..(6): n is any nucleotide
nnnnnnatgaaccctctacacccccagccccgcactgccccactgcaggaggcggtatgcagaggggtccaggggacagtcctgggggcactgggcagatatgacagccccgtaactgcgatccctcggtggctgcaggacagctggtgtcaccgctggcacagggctgcctcccaatattgccctgtcaagagagaaattgctgctgtccccaaactgcctttgcagccggagctgcgtgggcgcaggaaattggaattcacgagagtgggacaattccattacagtctcctccggctyttcccttcttctctaataagggaattaactcctttgcaggtctggctatatctggaggacagcagcaagccgtgagagatgagcccgtgacgcagctggatttacaaactgtatcaggaatattattaggttaaaaagtagtttgcactgaaggaactttttgctttttctatttaaacagagcattttacttggcttttattgtactgaatggatttatatttaaaaaaaagagaaataaaaagcaaaacggaaaataaattatttccactgtgaagattccagttgtgacagaatgc

SEQ ID NO: 89155 - DNA, 600 bp, Chicken  19866894395187_1
gacgccacagcagccggccaggccctgggcaatgtaggctcctctgtctcgagaggagattcctccttcaaggggacaaagaggacagcagaagcagcggctggtttgactttgctggaggcatcgaccgtgtgaagccggctggtctcctgggctgtggttcaattcttcccactgcctgccgggaggacgaagaaagagccgagaccagcaagtttccagcccttgaagtgccacttgaagggggtggggaggagagacaggcacggccaagctggacagcaatccctgtcccctccratcccagragaaacagcctcayagcagcacatgctccctccggcagcactccttggagctgaggacgtggtgggatcagagagtcgggacagggatcaggaaggacaaggatccactcatgccacaggacttcagcacttggctgatgagcaaggccaggggctgagagggagggcaacacctcacctgagcacaccaggaacgcagaggaccaaagcacacgtgtgccaagggacggaggtgccctggggaggctgcacgtttgtgccaaggactcacacagacctctttgcttcagcc

SEQ ID NO: 89156 - DNA, 600 bp, Chicken  19866894395187_2
agcagccggccaggccctgggcaatgtaggctcctctgtctcgagaggagattcctccttcaaggggacaaagaggacagcagaagcagcggctggtttgactttgctggaggcatcgaccgtgtgaagccggctggtctcctgggctgtggttcaattcttcccactgcctgccgggaggacgaagaaagagccgagaccagcaagtttccagcccttgaagtgccacttgaagggggtggggaggagagacaggcacggccaagctggacagcaatccctgtcccctccratcccagragaaacagcctcayagcagcacatgctccctccggcagcactccttggagctgaggacgtggtgggatcagagagtcgggacagggatcaggaaggacaaggatccactcatgccacaggacttcagcacttggctgatgagcaaggccaggggctgagagggagggcaacacctcacctgagcacaccaggaacgcagaggaccaaagcacacgtgtgccaagggacggaggtgccctggggaggctgcacgtttgtgccaaggactcacacagacctctttgcttcagccctacgccg

SEQ ID NO: 89157 - DNA, 600 bp, Chicken  19866894395187_3
ccctgggcaatgtaggctcctctgtctcgagaggagattcctccttcaaggggacaaagaggacagcagaagcagcggctggtttgactttgctggaggcatcgaccgtgtgaagccggctggtctcctgggctgtggttcaattcttcccactgcctgccgggaggacgaagaaagagccgagaccagcaagtttccagcccttgaagtgccacttgaagggggtggggaggagagacaggcacggccaagctggacagcaatccctgtcccctccratcccagragaaacagcctcayagcagcacatgctccctccggcagcactccttggagctgaggacgtggtgggatcagagagtcgggacagggatcaggaaggacaaggatccactcatgccacaggacttcagcacttggctgatgagcaaggccaggggctgagagggagggcaacacctcacctgagcacaccaggaacgcagaggaccaaagcacacgtgtgccaagggacggaggtgccctggggaggctgcacgtttgtgccaaggactcacacagacctctttgcttcagccctacgccgcccaaaatgctgca

SEQ ID NO: 89158 - DNA, 600 bp, Chicken  19866894395189_1
tcacatcggttattttatgctatagagagattttcttctgtcaggtatctgctggagtccctccagatggcgaacagaatggcctcatgggaagagtagatgaaggtgtggatgaatttttcacaaagaaagtcacaaaaatggattcaaagtaagttcacttcatgtggtttgtcactgcttttaattttttattttttttattttttatttttgaaaaaaaatctatactggtagcttggaaattatcgattctactcaaaagttgtttttgaattctgttctcagtacccaggcaargacagaaaatgccttgtttgtctaagataatacggtgaattaaattaccctcccttaaacatgactactttgaaatgaattgcccatttggtgtggactattgactagtgggtatgtttataacttagctgactcaatgttacctgtcattggagcccatgagaactgaagcaaagcagtgtatttgttgtggctcatccctccagtgccaatagtacacacaggtgtgtctatgtagataggactgatcaggcacaagcaggattgtgaaagatgacactagatatatgctgttttaga

SEQ ID NO: 89159 - DNA, 599 bp, Chicken  19866894395195_1
  misc_feature (1)..(143): n is any nucleotide
nnnnnnnnnnnnnnnnnnnnnnnnnnnnnnnnnnnnnnnnnnnnnnnnnnnnnnnnnnnnnnnnnnnnnnnnnnnnnnnnnnnnnnnnnnnnnnnnnnnnnnnnnnnnnnnnnnnnnnnnnnnnnnnnnnnnnnnnnnnnnnntccaggtgctaccagcttcctgcagtctcctcctggatatgtttgacatggcagctgctgcaaggaccaatgctactcctttaggaaaatggaaaaagggatgaagaatgttgatataccgttagatacttccagaatcgcatgcaggaaactgctktcctgacaagccttgctgcctgagctgtgaagagccctgggattgagctcaaggcttctcttttcctttccagagagaatcaccacaatttgtttagacaacatggcctaatattggatgcaggcgagtgcgtgaagggtaatgctcacagtttcctccaggcaacagcctgtgcagcacacaaagcccgcattccttttaccatgatcacctcctcagcaggaggggaagcactaggccttatcttgacttggctgctgaccaaataccaatggcaaagccttccaagaagcagtacc

SEQ ID NO: 89160 - DNA, 600 bp, Chicken  19866894395200_1
ccttctttcagctttttaaatttctggtttatttcttgactcaggaataagctatactaattcaggtacaagtgaaactgctaacagtctgctgcactccttatactcaaccaaatacattgactccagctttttactgttacaatttggatttcataacagcaataaggcatttcagatgtaatacacttcaggtgttattactgaacatcctgtgtggttactgttgctcagcctctggctctgctggtctgcatagattaagcaaaactatgcagtattcttaataagtatttcttyacactgattgcagcaaatagtgttgggcagtgtggatggtccacaaaagcaggttccctatcctaccccaagaagaagctggctgcatatttctggcatcatatcttgtcatgcagcttcctcccatcccactatgggatcaattcaaaactacatcaactgaaaagctgttagtctcaaaggactttatttttttttctcctgtgcttagagacagttctctctattttaaaagagatgaatataagtgttttaaaaagtaaaccaggatgatttatcacatgaatacagtctgtgtgt

SEQ ID NO: 89161 - DNA, 600 bp, Chicken  19866894395201_1
tggtgcatacatctgcagtaagttacaaggttagctgacatccaaatcagtagtttgagttttctgctcacgttacgaagaggagtagaaaggttcttggcatttgtgccattaaattcagctacaggatgtttttattcatgttttcttgctgagggtctatgctcaatttaatgtcacagagcagttgcaatatgggagcagactggtgtgcccaggagccacaacggaggcttggagcatgtgggggctggatgtggcagaggggtttcagaaacagcagctggggagcagttaggwagcgttgccctccctgccatttccactgagcacttctctgaagtggctgctctctgttgtctgtgtcatttatgtgttttaatccattttctcaattagatttctgaggggctgtttttaataaacatgtagaaataactcgtgaccttcttgagatcatactacgttcttgtggcatgtatttgtattgccactgaaggcttctggaaactgaaagcttattctaaagtttgtgcttaatgtagctgaatttggtgcatcccaaaagattgttttattttaccactttttaaaggatat

SEQ ID NO: 89162 - DNA, 599 bp, Chicken  19866894395202_1
  misc_feature (1)..(34): n is any nucleotide
nnnnnnnnnnnnnnnnnnnnnnnnnnnnnnnnnntttggagaagaagggatctactagtgtccaaatacccatttatcctgatggcaggggaaaatctgctttagtatggaagcttgaagtgagaaagtgtttgtggtgtgaacccaaagcagtctctactgtaagggagaaggaagtaagaagtagtctagtttcctcgtggtttgatgctaatcttgaacagttcttccacatctgtcttcaaaaaggatcgtttgtatgggtaattaattaagaagtggagttagatgcagacgtaygtgttctgtacagagagtgggaaaccacatagaaaaatcagtgtgcaaagaccactcctttggcatacacaagcacagctaatttgctgagcattttaccccatttagaaacagaacatttgtggcatttgcttagaatggctgcttggcattgctgtcagactaaatccatatacttcctttgtattagatcactgttttatttcaagagttacatgcatacaggatgacagcaagctgattttccaaattgctctgctttgtcactgttagcttctggcattaggccatgcagatac

SEQ ID NO: 89163 - DNA, 600 bp, Chicken  19866894395202_2
aaagaccactcctttggcatacacaagcacagctaatttgctgagcattttaccccatttagaaacagaacatttgtggcatttgcttagaatggctgcttggcattgctgtcagactaaatccatatacttcctttgtattagatcactgttttatttcaagagttacatgcatacaggatgacagcaagctgattttccaaattgctctgctttgtcactgttagcttctggcattaggccatgcagatactccgtttctgagatatgttctgccagtttcagagctgtccctccaamtgtatcacctttctgaaggtcagttctgctcctatagctagtggtacattacaaggtgttttagtttttgtgccttttttttttttttctcataaataataattctgtaactctgtcaagaaataaaatcatgccttctcccaacacgttgctttactgagaaactgttcaaaactaacctataatggacacggttcttgtcactgatagccagtttcctgcattctgtgcatatttcctgccacaggtctcccattaaataaaggggatttggaacaaaatgcctctctgaatcctttt

SEQ ID NO: 89164 - DNA, 599 bp, Chicken  19866894395203_1
  misc_feature (1)..(124): n is any nucleotide
nnnnnnnnnnnnnnnnnnnnnnnnnnnnnnnnnnnnnnnnnnnnnnnnnnnnnnnnnnnnnnnnnnnnnnnnnnnnnnnnnnnnnnnnnnnnnnnnnnnnnnnnnnnnnnnnnnnnnnnnnnnncgtattctgcaattaactgaaatgacgttaatcaccccagtagttgtgggctgagataaactctatcatgcatggttgggttcttcactggactgtataaatcatgcagggaaactctgggtatcactgcagacatctcagatacctttttgcttaattcagtaagcacagttccrttctttcaggccacgaatcmccctagctggctcaagagtctgtgctccttgttgtgtgtgagctgtctcattgcctagttggtttacatcagtctaagttttactttttatctggttactgaagagatgggctatttggaatygagaactaggaatttaattaatttaattgaattctgaccactggcacaacatctatcattctgtttgtttcaaaatatttggcttaaaccgagtaataaacattcttaaacagagtactcataatgcttccttttcctttgatggactattattac

SEQ ID NO: 89165 - DNA, 599 bp, Chicken  19866894395203_2
  misc_feature (1)..(104): n is any nucleotide
nnnnnnnnnnnnnnnnnnnnnnnnnnnnnnnnnnnnnnnnnnnnnnnnnnnnnnnnnnnnnnnnnnnnnnnnnnnnnnnnnnnnnnnnnnnnnnnnnnnnnnnncgtattctgcaattaactgaaatgacgttaatcaccccagtagttgtgggctgagataaactctatcatgcatggttgggttcttcactggactgtataaatcatgcagggaaactctgggtatcactgcagacatctcagatacctttttgcttaattcagtaagcacagttccrttctttcaggccacgaatcmccctagctggctcaagagtctgtgctccttgttgtgtgtgagctgtctcattgcctagttggtttacatcagtctaagttttactttttatctggttactgaagagatgggctatttggaatygagaactaggaatttaattaatttaattgaattctgaccactggcacaacatctatcattctgtttgtttcaaaatatttggcttaaaccgagtaataaacattcttaaacagagtactcataatgcttccttttcctttgatggactattattactttgcagtgataataacctg

SEQ ID NO: 89166 - DNA, 600 bp, Chicken  19866894395203_3
aaatgacgttaatcaccccagtagttgtgggctgagataaactctatcatgcatggttgggttcttcactggactgtataaatcatgcagggaaactctgggtatcactgcagacatctcagatacctttttgcttaattcagtaagcacagttccrttctttcaggccacgaatcmccctagctggctcaagagtctgtgctccttgttgtgtgtgagctgtctcattgcctagttggtttacatcagtctaagttttactttttatctggttactgaagagatgggctatttggaatygagaactaggaatttaattaatttaattgaattctgaccactggcacaacatctatcattctgtttgtttcaaaatatttggcttaaaccgagtaataaacattcttaaacagagtactcataatgcttccttttcctttgatggactattattactttgcagtgataataacctggagtatttccagcctactgtcatgtttcagttcaactaatgtttcaagcaggtagaaagtgtaataaataaatcgtggtcctaacagctggcaataggataacacaaacatttctggtctcaga

SEQ ID NO: 89167 - DNA, 600 bp, Chicken  19866894395206_1
gagttatcaatatttagtcctatacacatttctgcagctcaatattgtgctctaaacacttcagaatgatgagatgtaatgatcttcagtgtttcccattggctagcatgttgcctgtgtgtaaattcttttcttagtacctaatgtaggtttatgaacctgctttctgggtctaaggcatggtatactaaattgaaacatccttttatagacattgccctaatttcttgtgaactgaaatcttgaatgctggaggttagagatagcatctgaagtactgtgttcagttctgggcccccyaggacaggaaatatgagtacttatgggaaggagtccagtagagggccaccaagatgatgaagggcctggagcacctcttctaaggggagaggctgggagagcccggcctgctcagcyggaggagtctcagrgggatctcatcaatgccctttgttttgttgkttttttttacactaagggtggtgaggcgctggcacaggttgcccagagaggtggtggatgccccatccctggagacactcaaggccaggccggacagggctctgagcaacctgactgggctgtaggtgtctctgttca

SEQ ID NO: 89168 - DNA, 600 bp, Chicken  19866894395206_2
tgtgtaaattcttttcttagtacctaatgtaggtttatgaacctgctttctgggtctaaggcatggtatactaaattgaaacatccttttatagacattgccctaatttcttgtgaactgaaatcttgaatgctggaggttagagatagcatctgaagtactgtgttcagttctgggcccccyaggacaggaaatatgagtacttatgggaaggagtccagtagagggccaccaagatgatgaagggcctggagcacctcttctaaggggagaggctgggagagcccggcctgctcagcyggaggagtctcagrgggatctcatcaatgccctttgttttgttgkttttttttacactaagggtggtgaggcgctggcacaggttgcccagagaggtggtggatgccccatccctggagacactcaaggccaggccggacagggctctgagcaacctgactgggctgtaggtgtctctgttcattgcaggagggttcaactaggtgatccttaagggtcctttccaactcaattctacaaaacaataagatttctccagattttgtacagacactttcacaccataaaaaagcctttttt

SEQ ID NO: 89169 - DNA, 600 bp, Chicken  19866894395206_3
tcttagtacctaatgtaggtttatgaacctgctttctgggtctaaggcatggtatactaaattgaaacatccttttatagacattgccctaatttcttgtgaactgaaatcttgaatgctggaggttagagatagcatctgaagtactgtgttcagttctgggcccccyaggacaggaaatatgagtacttatgggaaggagtccagtagagggccaccaagatgatgaagggcctggagcacctcttctaaggggagaggctgggagagcccggcctgctcagcyggaggagtctcagrgggatctcatcaatgccctttgttttgttgkttttttttacactaagggtggtgaggcgctggcacaggttgcccagagaggtggtggatgccccatccctggagacactcaaggccaggccggacagggctctgagcaacctgactgggctgtaggtgtctctgttcattgcaggagggttcaactaggtgatccttaagggtcctttccaactcaattctacaaaacaataagatttctccagattttgtacagacactttcacaccataaaaaagccttttttaaaaccctcactgt

SEQ ID NO: 89170 - DNA, 600 bp, Chicken  19866894395206_4
ctttctgggtctaaggcatggtatactaaattgaaacatccttttatagacattgccctaatttcttgtgaactgaaatcttgaatgctggaggttagagatagcatctgaagtactgtgttcagttctgggcccccyaggacaggaaatatgagtacttatgggaaggagtccagtagagggccaccaagatgatgaagggcctggagcacctcttctaaggggagaggctgggagagcccggcctgctcagcyggaggagtctcagrgggatctcatcaatgccctttgttttgttgkttttttttacactaagggtggtgaggcgctggcacaggttgcccagagaggtggtggatgccccatccctggagacactcaaggccaggccggacagggctctgagcaacctgactgggctgtaggtgtctctgttcattgcaggagggttcaactaggtgatccttaagggtcctttccaactcaattctacaaaacaataagatttctccagattttgtacagacactttcacaccataaaaaagccttttttaaaaccctcactgtatgtgtacatatatacacctgtcaagctaaa

SEQ ID NO: 89171 - DNA, 579 bp, Chicken  19866894395206_5
ggagggttcaactaggtgatccttaagggtcctttccaactcaattctacaaaacaataagatttctccagattttgtacagacactttcacaccataaaaaagccttttttaaaaccctcactgtatgtgtacatatatacacctgtcaagctaaatgctttaaatttcagctctttctgagtcatgtatctataaaatgttttgccttttaaaacattaccttaacattctaaattagtcagcttttccagaactttaaattcagctttaagtacagcctcaaatttccatttctagyataaaagaagtatttttaccaattgtcaagctattgctgaaaaagttataatggaaacattgccatctttctgcataattatgagcagacattttattggatatatatgtgtatgtatatatatatatatatatatatatatacatgcaagcaatcagatgtataacttatatgttggatttttttttttactgtattgtcagttattaaccactaaaaaattagtacaatttaataaaatgagactatagaacccaccctttctcttttatatatgtc

SEQ ID NO: 89172 - DNA, 600 bp, Chicken  19866894395212_1
acagtccatataaaacccaccacgttcaaattccatttgtacatactcaatattcacattcctccttttcccataatgtgctacaaaacacattacatgttggataaaaagtccttctcccacattacatgaaattctgacacataaagtttgcttcacctgcctacactgggccgaagttatacaccaaaataaaaactttttgttgaacggtaaagaaaatttcacttgattaggtattacatgtcaatgttgtttaaaaagattataaattgtctagcctgaaattttaaaaaaagygtatttcaaatggaaatgtatacctgcagaatttgaaaattaaaactctgatatttcactgaaaatagtaaaagtgatgatatgtttcaaacagcaacacttaactgtcagcttttgacagaagaattgtaacaaagtcctgactttaagagattgccaaagaaaattttctgtggctaaggctttgcaaaagcatgctgtgcaaaagacttatctccacaaagatacagattgacagacgaagcaagaagagatgcttatatctataaaggaaagcagatctatctgtggcaacaataa

SEQ ID NO: 89173 - DNA, 600 bp, Chicken  19866894395213_1
aatgtaattccaggcttgtggcttacccttgaaatgctttcttccatctagcagcactactgagctctcagtctgaagttgagccagctgtctgtcttccaggtacttatcttctgaagtgctgaaacatcttatgggttttgctgccttctgtgttatgggaaccctagtaaaagcaaatgacatggggggagcttgcctttctggcaattccaggcatagcaatgtgacaagttcatggaagaaaactccacccaagcctattaaacactaggatgctgatgaaaccttggcttatgragttcctagattgtgcagtaacaggaactgatagaatatactagggaaatagctgtctgcttcctctggtctcttgatcttttcccaaayattcactactttgaaacagtttactgaactaaatgggtcttcggtgtggtcttgcagaactggactcctcaacgtcttactgtgtgtctcatatatttgaaagctttgtgtggtctccacagaaagttggcaaaagacccagatcacaaacttgacaaaatgtatgcattgtatgacacttaatatgagatttttttttactaatctcta

SEQ ID NO: 89174 - DNA, 600 bp, Chicken  19866894395213_2
tctgtcttccaggtacttatcttctgaagtgctgaaacatcttatgggttttgctgccttctgtgttatgggaaccctagtaaaagcaaatgacatggggggagcttgcctttctggcaattccaggcatagcaatgtgacaagttcatggaagaaaactccacccaagcctattaaacactaggatgctgatgaaaccttggcttatgragttcctagattgtgcagtaacaggaactgatagaatatactagggaaatagctgtctgcttcctctggtctcttgatcttttcccaaayattcactactttgaaacagtttactgaactaaatgggtcttcggtgtggtcttgcagaactggactcctcaacgtcttactgtgtgtctcatatatttgaaagctttgtgtggtctccacagaaagttggcaaaagacccagatcacaaacttgacaaaatgtatgcattgtatgacacttaatatgagatttttttttactaatctctagtggacaaaaggaggaatctggcctgggtggaggcagtcagccagcatggctgtctaaggagagcagaagagaagccttaataagttaac

SEQ ID NO: 89175 - DNA, 599 bp, Chicken  19866894395217_1
  misc_feature (1)..(69): n is any nucleotide
nnnnnnnnnnnnnnnnnnnnnnnnnnnnnnnnnnnnnnnnnnnnnnnnnnnnnnnnnnnnnnnnnnnnnttttaaataatacgttttggaaatgtgaacagataacctaaaattatttcttgataccaaaagtatttcagtttcatttccctttcaaaggctgggaacaagtgtgtgtttttacaggttttctagtttcccaacaaaatatatttcactttctagtcagggaacatgaagttaaattaatacttagattctcatgactgtgaataacgtttctaagtagaagaggggaayatttatttggaattttttagactgaaaatggtggaggtttacagatttgtaaaattcagaagttggactggtgagtagaatttacttggactttcgaagatgtatgataagtagtcatatttcaaagctgactgatatcttctagacagaacagttgcacatgattgttatacaccaacatattcattaaataccaccaatatattcagtggttttgacatgcaaaatgatgctggtgtctttccacatttaatttgtatccaagaaattgagagattactctaaatacttaaaaaccc

SEQ ID NO: 89176 - DNA, 600 bp, Chicken  19866894395219_1
atgcaagtaaagaacctgtatctcttggaaatgtgtatattttggtaatcgtaactctgttttatgcctctgtatgctaactgtacttattaaagaattaatatttccatgctggagactgcgctcctccgttccctgtgggtatccacaccccgggcagtctgaccaagtgcctgacttagtggttagcaaacctgcccacaggaaaggagtggagatctctgcagccccatccaaaccaaatcattctatgattttcttatgtaaatctatggcagggggttagacctgagtggtccratcctgtccaacccaaccattctgtgattcatattacagaagaaggttgcaggggactttaatggccacccagtgcctgcacgtcagggtctgcatcacagggacatgggctgccacccagggccaccaaggccccatccaacctggccttgagtgcctccagggatgggtcaccacggcttctttgggcagcctgagccagatagggggtgatgttcttccaggagggaagtgctggaatgatggtggtgcactgaaaacatrcaccccacccccagaataatactaaggagggatgta

SEQ ID NO: 89177 - DNA, 600 bp, Chicken  19866894395219_2
taaatctatggcagggggttagacctgagtggtccratcctgtccaacccaaccattctgtgattcatattacagaagaaggttgcaggggactttaatggccacccagtgcctgcacgtcagggtctgcatcacagggacatgggctgccacccagggccaccaaggccccatccaacctggccttgagtgcctccagggatgggtcaccacggcttctttgggcagcctgagccagatagggggtgatgttcttccaggagggaagtgctggaatgatggtggtgcactgaaaacatrcaccccacccccagaataatactaaggagggatgtaagagrcraggaagatgcatgaagaatgctgtttggggagactgtgccaggtttgctccttttgctgtctaaagccaaacgtacagagtgccagcacgtttaccagcagggagagagaggaaaggacatggggagttgcttaaagtgcctcttgagctccagagctgtggggtctggcagcctcatgagactgcagaggctgcaaaacagctcctgccccagcacaaacatcagtcacagagcgaatctgttgattttaacactc

SEQ ID NO: 89178 - DNA, 600 bp, Chicken  19866894395219_3
gtccaacccaaccattctgtgattcatattacagaagaaggttgcaggggactttaatggccacccagtgcctgcacgtcagggtctgcatcacagggacatgggctgccacccagggccaccaaggccccatccaacctggccttgagtgcctccagggatgggtcaccacggcttctttgggcagcctgagccagatagggggtgatgttcttccaggagggaagtgctggaatgatggtggtgcactgaaaacatrcaccccacccccagaataatactaaggagggatgtaagagrcraggaagatgcatgaagaatgctgtttggggagactgtgccaggtttgctccttttgctgtctaaagccaaacgtacagagtgccagcacgtttaccagcagggagagagaggaaaggacatggggagttgcttaaagtgcctcttgagctccagagctgtggggtctggcagcctcatgagactgcagaggctgcaaaacagctcctgccccagcacaaacatcagtcacagagcgaatctgttgattttaacactctttattgaatcacagtcagctgcaatcaaagcagctatggc

SEQ ID NO: 89179 - DNA, 600 bp, Chicken  19866894395219_4
ccaacccaaccattctgtgattcatattacagaagaaggttgcaggggactttaatggccacccagtgcctgcacgtcagggtctgcatcacagggacatgggctgccacccagggccaccaaggccccatccaacctggccttgagtgcctccagggatgggtcaccacggcttctttgggcagcctgagccagatagggggtgatgttcttccaggagggaagtgctggaatgatggtggtgcactgaaaacatrcaccccacccccagaataatactaaggagggatgtaagagrcraggaagatgcatgaagaatgctgtttggggagactgtgccaggtttgctccttttgctgtctaaagccaaacgtacagagtgccagcacgtttaccagcagggagagagaggaaaggacatggggagttgcttaaagtgcctcttgagctccagagctgtggggtctggcagcctcatgagactgcagaggctgcaaaacagctcctgccccagcacaaacatcagtcacagagcgaatctgttgattttaacactctttattgaatcacagtcagctgcaatcaaagcagctatggcct

SEQ ID NO: 89180 - DNA, 599 bp, Chicken  19866894395223_1
  misc_feature (1)..(79): n is any nucleotide
nnnnnnnnnnnnnnnnnnnnnnnnnnnnnnnnnnnnnnnnnnnnnnnnnnnnnnnnnnnnnnnnnnnnnnnnnnnnnnntgcatttagattttaatgtctaagttacaatagtcttagaaatcacatatattccaaatatcacatcactatgtacgtattgcaattgctacacgtgtcccaggttcaaggagctcccacttatatgtctaccatgtcctacgtgcatctttaggctctcagagctatgtgggtaataagaaatattagtcatagtaacttaaaatttaggccttcacaayttggcctacagagcatcttagaaatgcgatacatttacatgtgatagatggatgtgatatattaaacgcaccatctcttactgtacttaaatgctgaaagctagcaatatcaagatagatttatgatttcccccatcctctaactggtggtgatcaaacagtactgctcaatttagatcatttaacttacgtttttgttcagttggccgttaatgtrtgttttagtgtattttttttttagttctagcaaattgtatagaagcagacaaatcacaaagttgcctgactgcttattgcat

SEQ ID NO: 89181 - DNA, 600 bp, Chicken  19866894395223_2
ctacgtgcatctttaggctctcagagctatgtgggtaataagaaatattagtcatagtaacttaaaatttaggccttcacaayttggcctacagagcatcttagaaatgcgatacatttacatgtgatagatggatgtgatatattaaacgcaccatctcttactgtacttaaatgctgaaagctagcaatatcaagatagatttatgatttcccccatcctctaactggtggtgatcaaacagtactgctcaatttagatcatttaacttacgtttttgttcagttggccgttaatgtrtgttttagtgtattttttttttagttctagcaaattgtatagaagcagacaaatcacaaagttgcctgactgcttattgcatctttttcagaacacgttggtatatctctattctggagaatatttcacagttcagtgatggaaaatagtttgcacttcatttgtgcatgtactaattttagattaaacaggaccacataaatcctgctgaaaaatggtgcaattaagccagacctatttgtaaaaaggacaatacgtggctgtaattataatgactaaacatttggtaacacattgact

SEQ ID NO: 89182 - DNA, 599 bp, Chicken  19866894395227_1
  misc_feature (1)..(191): n is any nucleotide
nnnnnnnnnnnnnnnnnnnnnnnnnnnnnnnnnnnnnnnnnnnnnnnnnnnnnnnnnnnnnnnnnnnnnnnnnnnnnnnnnnnnnnnnnnnnnnnnnnnnnnnnnnnnnnnnnnnnnnnnnnnnnnnnnnnnnnnnnnnnnnnnnnnnnnnnnnnnnnnnnnnnnnnnnnnnnnnnnnnnnnnnnnnnnnntgtggctgttccatggagctctttgtccataccaatgcctccccttccccaaaagattttgttcaggtccccgcagctgagggaaggttggaacccgggctccaaatcygatacctctggctatgacaaatactgtaggggttatttttctgttgcattcttacacgagaaaaatagttacgagaaataaatatcactttatgctgggctttactgcttactgggctttgagcctggaaggatttaaaagtcatcatgctgtcagggaaagctgcagcgagtgagaggaggcggagggctgctgctgccagctgttgtgatttgggaaatgctcgtcctgaccaatggaagggagatggggaggcagccagcaccgagcagtgacacccagtgtgacagggcagcgga

SEQ ID NO: 89183 - DNA, 600 bp, Chicken  19866894395231_1
aattgcctcattatctgttcatctaatttcacagagaaatgacaatccctagctgctgaggttatggcccatcaaaaattatactgtctctaattttatatctgatctctggtagattttaatttgcttatctcagttctcatatatcgacgaaattgctgaattctattaaaatctccaccagctgcccaagatttaaggctgagatactgaattgagacttgctgaattattaagacattattgccaatgtgagccagtaaaataataattaaaatatacaagattaatatgccttayagttttctgtatatcatttgaattcagtctgaatgaggctccatctacacaaaccataaaatgtcctatcacctcagttcacctgacaaaagagtaacgttgtagatcgtttttctctgtgcacagttacattgaccttaagtgccagaactttgagaaatagagataatatgaaaacggctatgcaaatttcatttggtggatagcgtaatatttttgaagtcgtgatttcccatacaatgcttcaaattgaaccctgtgaaatgttattctgctgtatttactgaagatcattttccc

SEQ ID NO: 89184 - DNA, 600 bp, Chicken  19866894395242_1
tatactatttcaactttgtgtgaaactacccattatttcttcatgtaagtaacataccttactattccaaatgaagctgtgtgggtgatcagtaaagagtataatcctctgctttactacagactttgtaacataggaaataacataaagaagatgtaaaaagtgaaagaatatttccttagcatttttcatcctttcttgttaagaacagtgtactagaaagaagcatttgactgctgggtctgatccctactaacagtggagatcacactgtgtaatccttttaaggaactggccaakctccacatgtggaayaacagtgtttcctgccatgcgttttgctctacactggacacacctgatgcattgcaagatctagttgagaaagtgagaaaatactatttagtaagtcttataaatgcttggtttctgtttaccagtagtatcagtttagatcaaacattttagatggaggtttgctccgtggtgcttttcatacttcatttcagggctgaagttcagtcacaggaaatcattagtaaacatggagctgcaagaataatagagatgcttacaaggcacaaaacaaacactcaatat

SEQ ID NO: 89185 - DNA, 600 bp, Chicken  19866894395242_2
ttgtgtgaaactacccattatttcttcatgtaagtaacataccttactattccaaatgaagctgtgtgggtgatcagtaaagagtataatcctctgctttactacagactttgtaacataggaaataacataaagaagatgtaaaaagtgaaagaatatttccttagcatttttcatcctttcttgttaagaacagtgtactagaaagaagcatttgactgctgggtctgatccctactaacagtggagatcacactgtgtaatccttttaaggaactggccaakctccacatgtggaayaacagtgtttcctgccatgcgttttgctctacactggacacacctgatgcattgcaagatctagttgagaaagtgagaaaatactatttagtaagtcttataaatgcttggtttctgtttaccagtagtatcagtttagatcaaacattttagatggaggtttgctccgtggtgcttttcatacttcatttcagggctgaagttcagtcacaggaaatcattagtaaacatggagctgcaagaataatagagatgcttacaaggcacaaaacaaacactcaatataattagaactctgta

SEQ ID NO: 89186 - DNA, 600 bp, Chicken  19866894395248_1
ttctgtatttagtgcagttcttgcctttgagaatgcatttttttctatcacatttccttttttttaattcattttagttattatcacatgagaggagttgaatgtttcatactcagtatatgactgtgaaaatgtctgccttataacctaagcttatgccccagaatttgccaattgtgtcacaaatgttctctcagagcaaaaaaggtagcaattaaatttgaaaagtaatcctgtctatacagtccacttaatccccatcataaatagagccagaggcgctccccgggcctgtaattrcctaatgggtgtgaaacggtgagcctaaaatcaatataaaaatgttctaatcttcgaaggtaatagtcccaaacactgtaatttagcattgtgaatggtattgtcctgggacattactttctcccagggggcattggaygtaatagcactgaatggagatgggagcgttgactacaacagcttttcattgagcacacatttacaggatccatcgggattgtttgctttctctttgttccaagtggtggaggtgactttcccctggagctccatgcccctctgcaaataaacatttgttat

SEQ ID NO: 89187 - DNA, 600 bp, Chicken  19866894395248_2
cttataacctaagcttatgccccagaatttgccaattgtgtcacaaatgttctctcagagcaaaaaaggtagcaattaaatttgaaaagtaatcctgtctatacagtccacttaatccccatcataaatagagccagaggcgctccccgggcctgtaattrcctaatgggtgtgaaacggtgagcctaaaatcaatataaaaatgttctaatcttcgaaggtaatagtcccaaacactgtaatttagcattgtgaatggtattgtcctgggacattactttctcccagggggcattggaygtaatagcactgaatggagatgggagcgttgactacaacagcttttcattgagcacacatttacaggatccatcgggattgtttgctttctctttgttccaagtggtggaggtgactttcccctggagctccatgcccctctgcaaataaacatttgttatatggagtcttaggcacctgaaaggcaatctattttttctgcacagtgtggcaccttaattttgcagttgttaatactgctttaagtcatattttctgcagataatcctttttaacatactctattatgagtcacttttc

SEQ ID NO: 89188 - DNA, 599 bp, Chicken  19866894395249_1
  misc_feature (1)..(122): n is any nucleotide
nnnnnnnnnnnnnnnnnnnnnnnnnnnnnnnnnnnnnnnnnnnnnnnnnnnnnnnnnnnnnnnnnnnnnnnnnnnnnnnnnnnnnnnnnnnnnnnnnnnnnnnnnnnnnnnnnnnnnnnnnncagtttgtatgtcagggccgtgatttagcagagggttgttagttagggtaggatggttgggttgtgttggactcgatgatctgtaaggtctttttcaacctgagcaattctataattctatgaatagtggctctgatgggggcagaagtagattaagtctcttatagtccattccccyactgctgaaaggccaaaatcagaatatagccccatagatgaaggcttcccaaatgtgggatgagcggacagatgtggtgagtgcatctccctgcagcgccggcacgcaccacgagaggggacctcgctaccgctctatggccgtggctcctggcagacctctgggagcgtgtgttctgggtcagccaccagatgctggccacaagyaggaggaaatctgtggtttgtgtgatgtgaaaggtcrgggacgattattatgwttgtaccttctggmtgtcagacccaacagtgtaaggccag

SEQ ID NO: 89189 - DNA, 600 bp, Chicken  19866894395249_2
aaggtctttttcaacctgagcaattctataattctatgaatagtggctctgatgggggcagaagtagattaagtctcttatagtccattccccyactgctgaaaggccaaaatcagaatatagccccatagatgaaggcttcccaaatgtgggatgagcggacagatgtggtgagtgcatctccctgcagcgccggcacgcaccacgagaggggacctcgctaccgctctatggccgtggctcctggcagacctctgggagcgtgtgttctgggtcagccaccagatgctggccacaagyaggaggaaatctgtggtttgtgtgatgtgaaaggtcrgggacgattattatgwttgtaccttctggmtgtcagacccaacagtgtaaggccagtcccatcaaagtcatcggcatagtccccactgcctgcaatggggyatggccacatcctgcacagcttagggggagcagatccccattccactgggtcccactgggtctgctttgctgttggagcattgctgtgtgctgctgctgggacgtgggggcacccacttggctgccctacactgctgtaggatggggtgcacccagaccagc

SEQ ID NO: 89190 - DNA, 600 bp, Chicken  19866894395249_3
gaatagtggctctgatgggggcagaagtagattaagtctcttatagtccattccccyactgctgaaaggccaaaatcagaatatagccccatagatgaaggcttcccaaatgtgggatgagcggacagatgtggtgagtgcatctccctgcagcgccggcacgcaccacgagaggggacctcgctaccgctctatggccgtggctcctggcagacctctgggagcgtgtgttctgggtcagccaccagatgctggccacaagyaggaggaaatctgtggtttgtgtgatgtgaaaggtcrgggacgattattatgwttgtaccttctggmtgtcagacccaacagtgtaaggccagtcccatcaaagtcatcggcatagtccccactgcctgcaatggggyatggccacatcctgcacagcttagggggagcagatccccattccactgggtcccactgggtctgctttgctgttggagcattgctgtgtgctgctgctgggacgtgggggcacccacttggctgccctacactgctgtaggatggggtgcacccagaccagctttcccaacttcttccttttgattccttcaaagcctc

SEQ ID NO: 89191 - DNA, 600 bp, Chicken  19866894395249_4
gggggcagaagtagattaagtctcttatagtccattccccyactgctgaaaggccaaaatcagaatatagccccatagatgaaggcttcccaaatgtgggatgagcggacagatgtggtgagtgcatctccctgcagcgccggcacgcaccacgagaggggacctcgctaccgctctatggccgtggctcctggcagacctctgggagcgtgtgttctgggtcagccaccagatgctggccacaagyaggaggaaatctgtggtttgtgtgatgtgaaaggtcrgggacgattattatgwttgtaccttctggmtgtcagacccaacagtgtaaggccagtcccatcaaagtcatcggcatagtccccactgcctgcaatggggyatggccacatcctgcacagcttagggggagcagatccccattccactgggtcccactgggtctgctttgctgttggagcattgctgtgtgctgctgctgggacgtgggggcacccacttggctgccctacactgctgtaggatggggtgcacccagaccagctttcccaacttcttccttttgattccttcaaagcctccactgatgcagattac

SEQ ID NO: 89192 - DNA, 600 bp, Chicken  19866894395249_5
attaagtctcttatagtccattccccyactgctgaaaggccaaaatcagaatatagccccatagatgaaggcttcccaaatgtgggatgagcggacagatgtggtgagtgcatctccctgcagcgccggcacgcaccacgagaggggacctcgctaccgctctatggccgtggctcctggcagacctctgggagcgtgtgttctgggtcagccaccagatgctggccacaagyaggaggaaatctgtggtttgtgtgatgtgaaaggtcrgggacgattattatgwttgtaccttctggmtgtcagacccaacagtgtaaggccagtcccatcaaagtcatcggcatagtccccactgcctgcaatggggyatggccacatcctgcacagcttagggggagcagatccccattccactgggtcccactgggtctgctttgctgttggagcattgctgtgtgctgctgctgggacgtgggggcacccacttggctgccctacactgctgtaggatggggtgcacccagaccagctttcccaacttcttccttttgattccttcaaagcctccactgatgcagattacacaacctccttaga

SEQ ID NO: 89193 - DNA, 600 bp, Chicken  19866894395249_6
cttcccaaatgtgggatgagcggacagatgtggtgagtgcatctccctgcagcgccggcacgcaccacgagaggggacctcgctaccgctctatggccgtggctcctggcagacctctgggagcgtgtgttctgggtcagccaccagatgctggccacaagyaggaggaaatctgtggtttgtgtgatgtgaaaggtcrgggacgattattatgwttgtaccttctggmtgtcagacccaacagtgtaaggccagtcccatcaaagtcatcggcatagtccccactgcctgcaatggggyatggccacatcctgcacagcttagggggagcagatccccattccactgggtcccactgggtctgctttgctgttggagcattgctgtgtgctgctgctgggacgtgggggcacccacttggctgccctacactgctgtaggatggggtgcacccagaccagctttcccaacttcttccttttgattccttcaaagcctccactgatgcagattacacaacctccttagaaagcctgctttgtgtttcctcattcatataattacgccggatttcttttttcccctaacgcttcattgttg

SEQ ID NO: 89194 - DNA, 599 bp, Chicken  19866894395251_1
  misc_feature (1)..(142): n is any nucleotide
nnnnnnnnnnnnnnnnnnnnnnnnnnnnnnnnnnnnnnnnnnnnnnnnnnnnnnnnnnnnnnnnnnnnnnnnnnnnnnnnnnnnnnnnnnnnnnnnnnnnnnnnnnnnnnnnnnnnnnnnnnnnnnnnnnnnnnnnnnnnnncgcgacgtggggccacctgggggcccccgacgcccgcggggctccatggtgagtgcggcgcttggaggggcgatgggccggagccccaccgctgctgggatttggggcggaaggtgctaggatgggatggggctcaaagcggttgggatgaggtttgrggattgctgggggtacggttggaacggggctcggagcagctgggatagggatcggtgcgattggagggggcttagggatggggttgtgctggattagggagggggctcggactggttgggatgggtcggggtggggccgggtccggtcctgccgcaagggtctgctcgggatggagctcggggctggactggccgggagggcgtggagctgctggggagggctggtccggccggggctgggctgcgggttggacctggcggggctggacgtggggctggtcctgcgcggggccccttcg

SEQ ID NO: 89195 - DNA, 600 bp, Chicken  19866894395251_2
ctgggatagggatcggtgcgattggagggggcttagggatggggttgtgctggattagggagggggctcggactggttgggatgggtcggggtggggccgggtccggtcctgccgcaagggtctgctcgggatggagctcggggctggactggccgggagggcgtggagctgctggggagggctggtccggccggggctgggctgcgggttggacctggcggggctggacgtggggctggtcctgcgcggggccccttcggagaggatgggccggggacccccggggctggaagggagckctgtgccttttgtgcagccgagggtagcgcgagtgccgcccggtgcggctgtatcgctgatggtgatttcccttatctctgtgtatttgctggaggattagagctggggaagagattagttctgtcctgcagccatgctccctgcgtttccctcctgcaggaagggagcaagcctgagagcagcccgatgtgcgggcagtgccggccgtcctggcacgggagggaggaaggataaccccagagcggcggccagccgtgttttccccgtgcagaagggagggaagcagcactccgtgctgc

SEQ ID NO: 89196 - DNA, 599 bp, Chicken  19866894395254_1
  misc_feature (1)..(183): n is any nucleotide
nnnnnnnnnnnnnnnnnnnnnnnnnnnnnnnnnnnnnnnnnnnnnnnnnnnnnnnnnnnnnnnnnnnnnnnnnnnnnnnnnnnnnnnnnnnnnnnnnnnnnnnnnnnnnnnnnnnnnnnnnnnnnnnnnnnnnnnnnnnnnnnnnnnnnnnnnnnnnnnnnnnnnnnnnnnnnnnnnnnnnnnctggtttgggtctgaactctgtgcagtcatgcagtatggaggctgagtctcattattaaatgcagctgaggggacaggactttgcagcaagggcttgcaaggtgtggaaatcagtgygtgctgtggcagcatcacagaatggatgaaactgttctgcttcaactctgtctgaacatataggtgtgtttgttatctgagatggcaactccagggtctgtgccgcctcttggctgggaatcacacaaacttacttagaaacaggtatgttgcaggagaggagaggaactctttctctgacttctgtacagcttcactgggagtgcctctgtttttagagggggaaaagaacacacaaatgaagcacaagacacctacagaagctctgtgctcttgctgattagcttcaatgggatact

SEQ ID NO: 89197 - DNA, 600 bp, Chicken  19866894395283_1
agtgtagcgtatcaaaaggagaagtgtcttcaagccagggtccaaatcccatacaaacagctcaaggtccctatccacactgagctcctggaacaaggcacagaagctgctgacgtaatcagcagtcatactgtacagctgtgcttgcaccagggttgcaaacccagtcttacagtaaatgcaacatctacacacttgcagcacttttactcagagaccatctagctgtgatcacaagacaagaatggtttcgccttgacatcactggtaattctaaaattgaaaagggtttcttgtttytctccctaccttagagaattcttcccaatatttttaaggaactgtcatttcctgtaaaataatgtttataatggcaggctgtcaatctttctagttttgttgggcattttttttcacaggttattatttattgtagctactcttcgctctctttttttctgactttcagcaggactgccctatgcctttccaaagtgcacagattttatagctgaagtgactttgagccactctatctaaacggatactgaaactggcatcagacttttggtgtccattttaaagagactgaaatgtgaa

SEQ ID NO: 89198 - DNA, 600 bp, Chicken  19866894395286_1
tgcaattaccaggtgacattgtttttactttaaaatacctctgccaagtttatcatcccactctgtgaattgtaattcttctggataaacatgtttcagatctgtgatggtatccctggagatggttgccatagcgcttcacaggattttatttttgctcgtttctcaaaagtaggactttggatcgctgtgggaggcccaggactgcattagtctcagatttcattgactttgctattctgcccccactagggaataaacctcccagacacatcgctgtcatctttaccatatcctatmcccgctgctcaaaatacacatctcaagccatcctccccatttccttattacatatttgttgaagttcccattgggtttccacttattttccatctcaagcatagattattctctactaaaaatttcagactacattttcttaccccatatacaatacactgagtttttaaagtttcggttatgtattcaaagcacttgaaaattaagaatagcaaaaccactgtgattccaaatgcctcaggttctacgtttccacatgagctaaaatatccgcttctgtacagttcagtctttccctca

SEQ ID NO: 89199 - DNA, 527 bp, Chicken  19866894395295_1
cccagaagatgggacttgctgttcaaagcacgggagtaaggaaaagcttgtcctaagatggacagggagtctaggcagttctttgtggaaagagcaactcataccaaattttctgctttgaattccaacctgaatttatcaggatagtttggattgcaaattgcaagcgaagaacagaaaaattgcacttactttattcacttctgtttttaacttttatttctttttcttctttcttttttttctcttgtttccccactccgtagcaaagtttctttatgacttaggtcagtatggggraaaaactgaatttttgaaaactattaatgattggagaactccttcatgaaaactgttgttagcagttatgaaatcttatttttatgctgtcttggatctttggacttactcatgggcagattagttataactacttcaatttagaaaaatatattcctgaaaatattttctgttctactagcatctgtcattcaacagtttcagtagaacaaagttaacataaatac

SEQ ID NO: 89200 - DNA, 600 bp, Chicken  19866894395300_1
gaagagcttctgttcatctgtgccactgtagaacacacatccacaaagcctcagagaggtttgtgggtttacagctcagggaagcactatgtatatgttcctacaccaaagcaaaggaaaactcattttctttcttctgatagtaacgagacatggtacaatgcatgctgcttcaatggaatacaattcaacaagccacatctgatttatttgattctgtttctcccctcccactgtaaggcttgaagaagaaaaaggaagcagagaatcaagccagatgctatccattttacttttttwaaaaaaaaaacaaaaactttttaagctgttatagttatacgtttactgaatgcagtaatagttttcacttgttaggagtgcatgacacagcttcagtactgaagactgaaagagagttatttcagatattgacaaaaaagagattaagcatagaagcagactcagtgtcagatgctttctgtgtgttgtaaaacatagattcagtggatgctgctatcactatcctacatgccatagagtattagaaaataatttagcattactgagggtgcatcttccttaggggttgctgggccaaaa

SEQ ID NO: 89201 - DNA, 600 bp, Chicken  19866894395314_1
caaccttaagcaaacatgttagtctgtctgtgtctgtcctgctttttgcacttggagagttgaggctctgtacacacatttgctgtggtgcatcagtgtggggtgtagagcatcctgtagttctcttctattggaacagtgcctgccccagttctcggggttcagagtacattgctggcctcggtgcacatgtttcctactacccaatctggaggaaaattgctctgacaacgaatttctcccatggtcattttttcctaccagacctagacatcccaaaatagtactgtcttcaagccyctgcacttgcattacccgtgtagagtcaatggggaccaggggaaatccaccttctttgcctccctctcccttggtggaaggaggatgtgtrtgggctgggaaataggacagggtaactgtgttgtctgttgtgccatggtggctccttttggacttttctgctggacttgcagcaccagaggggaaatgggggtctgttgtggagcaagaagaggcactgctggctaatgcatcatcttgtcagccatcgggcctgttgcaaaaaagggtaaaagatatttctgagacgtgtgattcttt

SEQ ID NO: 89202 - DNA, 600 bp, Chicken  19866894395314_2
atcagtgtggggtgtagagcatcctgtagttctcttctattggaacagtgcctgccccagttctcggggttcagagtacattgctggcctcggtgcacatgtttcctactacccaatctggaggaaaattgctctgacaacgaatttctcccatggtcattttttcctaccagacctagacatcccaaaatagtactgtcttcaagccyctgcacttgcattacccgtgtagagtcaatggggaccaggggaaatccaccttctttgcctccctctcccttggtggaaggaggatgtgtrtgggctgggaaataggacagggtaactgtgttgtctgttgtgccatggtggctccttttggacttttctgctggacttgcagcaccagaggggaaatgggggtctgttgtggagcaagaagaggcactgctggctaatgcatcatcttgtcagccatcgggcctgttgcaaaaaagggtaaaagatatttctgagacgtgtgattctttgtcagtggaacaactgagtatgttattcttgtggtataaattaaagctgcactttgtggctttaacttgtagcaaagccaggcagagacgt

SEQ ID NO: 89203 - DNA, 599 bp, Chicken  19866894395318_1
  misc_feature (1)..(117): n is any nucleotide
nnnnnnnnnnnnnnnnnnnnnnnnnnnnnnnnnnnnnnnnnnnnnnnnnnnnnnnnnnnnnnnnnnnnnnnnnnnnnnnnnnnnnnnnnnnnnnnnnnnnnnnnnnnnnnnnnnnnnttttttttagtcccacgtgagcgctgtggaaataaaacctgttctcaagaaaatcttccatcaacatcttcctttccttcatcagcagctgcaggcagcacagatttaacagcttgcaaaaaaaaaccccacttttttctttgcattacttaatgtgtattgcagataacgatgctctgggayctccttgctctgcttgtgttgcagagacagcaggcgtctggcacagagaccttgggagagccacaggtggccaagagctgattcatttgcctagaatctcttgagttaggaacccctgacagctgaaaatctgctttgacagaagaactccaagacctgagctggaactgtgtttctcagcattgcttagcaattcctattagggtgaaattgcacatttgatccaacttagtcttccaaatcatgtaggttttgtgattttaagaacccatctatgtaaattataaattctggtttat

SEQ ID NO: 89204 - DNA, 599 bp, Chicken  19866894395328_1
  misc_feature (1)..(22): n is any nucleotide
nnnnnnnnnnnnnnnnnnnnnnattaaaacatggagagaatgaccacacaaaccaaagtggatggcagtaaagagggcatgctgcagtttgtttccgctgacatgtatcttaagaaggcacagcagtaagttattttccatttggaattgtaagtatgaccgtttgctaccgtttttccctccaggaactgtttatgacagagatcaagcatgtatgcataccttctctagtgaaaaggagaaaataaaaaataaaactcttaccagttacaaccacaatgttggaattggaatccatgytcsaaaaggtgaaatctcgtcracttcaagttccaaacagcagtactggcattcgtgcatctgtggcagcttcctcatatggggcatctattttttgattcaaaccattctgaagcgtgcagatttctattggatgaagaaaatgttttcataaagctgaggtgggttgggattcacattagaggaatgatttctgttccacgtatctttcaaaacaaatcgttacacctccatattaaaggcagaagggtacctcaaatggggcatgcaacaacagtattttgggaagaacagaaaag

SEQ ID NO: 89205 - DNA, 599 bp, Chicken  19866894395328_2
  misc_feature (1)..(19): n is any nucleotide
nnnnnnnnnnnnnnnnnnnattaaaacatggagagaatgaccacacaaaccaaagtggatggcagtaaagagggcatgctgcagtttgtttccgctgacatgtatcttaagaaggcacagcagtaagttattttccatttggaattgtaagtatgaccgtttgctaccgtttttccctccaggaactgtttatgacagagatcaagcatgtatgcataccttctctagtgaaaaggagaaaataaaaaataaaactcttaccagttacaaccacaatgttggaattggaatccatgytcsaaaaggtgaaatctcgtcracttcaagttccaaacagcagtactggcattcgtgcatctgtggcagcttcctcatatggggcatctattttttgattcaaaccattctgaagcgtgcagatttctattggatgaagaaaatgttttcataaagctgaggtgggttgggattcacattagaggaatgatttctgttccacgtatctttcaaaacaaatcgttacacctccatattaaaggcagaagggtacctcaaatggggcatgcaacaacagtattttgggaagaacagaaaaggct

SEQ ID NO: 89206 - DNA, 600 bp, Chicken  19866894395328_3
attaaaacatggagagaatgaccacacaaaccaaagtggatggcagtaaagagggcatgctgcagtttgtttccgctgacatgtatcttaagaaggcacagcagtaagttattttccatttggaattgtaagtatgaccgtttgctaccgtttttccctccaggaactgtttatgacagagatcaagcatgtatgcataccttctctagtgaaaaggagaaaataaaaaataaaactcttaccagttacaaccacaatgttggaattggaatccatgytcsaaaaggtgaaatctcgtcracttcaagttccaaacagcagtactggcattcgtgcatctgtggcagcttcctcatatggggcatctattttttgattcaaaccattctgaagcgtgcagatttctattggatgaagaaaatgttttcataaagctgaggtgggttgggattcacattagaggaatgatttctgttccacgtatctttcaaaacaaatcgttacacctccatattaaaggcagaagggtacctcaaatggggcatgcaacaacagtattttgggaagaacagaaaaggctccaggaaactttttgcaaaa

SEQ ID NO: 89207 - DNA, 600 bp, Chicken  19866894395334_1
ggggtgctgctggctgatggagccctctggctgcagctcccggtcccggcgccgccgcaggcattgcgatgggtttgggctgcgctctgtgctacgggagaatgaggcgctgctgggctccgtgcatcgctgacagctgctgggtgcgccggtcggcggctgtccgagcagtccgacgcgctgggtgagacgttcgtcccctttaggtgcttgtaggtgataggaatgccgtgagctgtgtctgtccgtccgtctgtccttgctccccgggcgcaggagttcttgcccgtcggtgttacmcgttaatgacaggcgactgttgccttactgcttaacttcatgtagtaatcttcaataaagcgaccttggctctcaggctctgcgctgttatttacaccgccgctgatggggaaatagtaataattaaagcataaaaagctgagcacccccgcgctcccaatgggttcgtccccgttcccgttcgctcacgctggttccgccgagctggctcagctctatggttggcagaggctagagcgccccaccgctcctcccgcgcctgcaggtcgctagaggaagtgacgtcacttccgactccgc

SEQ ID NO: 89208 - DNA, 600 bp, Chicken  19866894395346_1
tttatggggaggaaaaggttggctgtgttcgtctgggtttttcagttaaagacagatttctgtattgttgtttgtattcattctcataattgagcagttttcagtctttctccatgtaaagccaacaacacattttctagcagtaatggtccaaaaccagacctggtaggtcttatgtacgcagttgtctcccaccgttcttgcagaccagacaaacctcacacactcagctgtgcgccactgggacctgcgttcagcactgccacccgacatgcaggacacagcctgctgctgcacttsgcttgttgctcagccttgcttggctctcctggccgtggagcacaggaaaagtcttagcagtgcargggaaccaaagggagtgcctggcagggcacacagggcaagagaagctatgctcttgcagagcattgcagcctgtcccctcgttcagcagaacaggccagaaacagccactgtgatctcataccccacagagaaagtacctgaaagacatgaggaagcatttcccagtggagggaaagtttagttctgcttggctaggcaygtttgctctcctactgcccccagcatagctgttgt

SEQ ID NO: 89209 - DNA, 600 bp, Chicken  19866894395346_2
tgttgtttgtattcattctcataattgagcagttttcagtctttctccatgtaaagccaacaacacattttctagcagtaatggtccaaaaccagacctggtaggtcttatgtacgcagttgtctcccaccgttcttgcagaccagacaaacctcacacactcagctgtgcgccactgggacctgcgttcagcactgccacccgacatgcaggacacagcctgctgctgcacttsgcttgttgctcagccttgcttggctctcctggccgtggagcacaggaaaagtcttagcagtgcargggaaccaaagggagtgcctggcagggcacacagggcaagagaagctatgctcttgcagagcattgcagcctgtcccctcgttcagcagaacaggccagaaacagccactgtgatctcataccccacagagaaagtacctgaaagacatgaggaagcatttcccagtggagggaaagtttagttctgcttggctaggcaygtttgctctcctactgcccccagcatagctgttgtaactcactgattagtctgacttaaagaaggtttgtgcttctgggacagaaatacccartcctccy

SEQ ID NO: 89210 - DNA, 600 bp, Chicken  19866894395346_3
cccgacatgcaggacacagcctgctgctgcacttsgcttgttgctcagccttgcttggctctcctggccgtggagcacaggaaaagtcttagcagtgcargggaaccaaagggagtgcctggcagggcacacagggcaagagaagctatgctcttgcagagcattgcagcctgtcccctcgttcagcagaacaggccagaaacagccactgtgatctcataccccacagagaaagtacctgaaagacatgaggaagcatttcccagtggagggaaagtttagttctgcttggctaggcaygtttgctctcctactgcccccagcatagctgttgtaactcactgattagtctgacttaaagaaggtttgtgcttctgggacagaaatacccartcctccyttaagtactgccatttttttttccagtgcagacaacaccaaggaatcagaatgtcacattctccttccaacattattatttatattcttcgtgactccaggcaaatttcctctctgtgcctcaacttcctcatttatggaacaatgacagtaatgattgcaaataacatttactccagcatacaggtaggcattctatat

SEQ ID NO: 89211 - DNA, 600 bp, Chicken  19866894395346_4
agtgcargggaaccaaagggagtgcctggcagggcacacagggcaagagaagctatgctcttgcagagcattgcagcctgtcccctcgttcagcagaacaggccagaaacagccactgtgatctcataccccacagagaaagtacctgaaagacatgaggaagcatttcccagtggagggaaagtttagttctgcttggctaggcaygtttgctctcctactgcccccagcatagctgttgtaactcactgattagtctgacttaaagaaggtttgtgcttctgggacagaaatacccartcctccyttaagtactgccatttttttttccagtgcagacaacaccaaggaatcagaatgtcacattctccttccaacattattatttatattcttcgtgactccaggcaaatttcctctctgtgcctcaacttcctcatttatggaacaatgacagtaatgattgcaaataacatttactccagcatacaggtaggcattctatattggctccttattgttgccatcatggtgagcctggaagcccagtttcacatggagatttcaaagcttgttgctatttagtcatggagctaactg

SEQ ID NO: 89212 - DNA, 600 bp, Chicken  19866894395346_5
gggaaccaaagggagtgcctggcagggcacacagggcaagagaagctatgctcttgcagagcattgcagcctgtcccctcgttcagcagaacaggccagaaacagccactgtgatctcataccccacagagaaagtacctgaaagacatgaggaagcatttcccagtggagggaaagtttagttctgcttggctaggcaygtttgctctcctactgcccccagcatagctgttgtaactcactgattagtctgacttaaagaaggtttgtgcttctgggacagaaatacccartcctccyttaagtactgccatttttttttccagtgcagacaacaccaaggaatcagaatgtcacattctccttccaacattattatttatattcttcgtgactccaggcaaatttcctctctgtgcctcaacttcctcatttatggaacaatgacagtaatgattgcaaataacatttactccagcatacaggtaggcattctatattggctccttattgttgccatcatggtgagcctggaagcccagtttcacatggagatttcaaagcttgttgctatttagtcatggagctaactgtgataga

SEQ ID NO: 89213 - DNA, 600 bp, Chicken  19866894395358_1
ctgaatgtgcctaggagagacattatgaaagctttgctaatggggaaatgattgagaatccacacatccaatgtggcttagtagcaaagcagctttcacggcgtgttgaacgggtaaaattaatggggggtgctcttgactcgtggcctttgaatttgtaagggtctctgttctgcttttctctacaatctagcagggcttttttactgtaaaagacgacattgtcttacagctctgtgtctccagaagctgaactgttaagaaaagtgccaaatacattgagatgaatggtaaaattaraagtgttgatggcacartagagatctttggagattctcgtattatataagtgtggaggcccagagctgatgtgccacaggaactccacaaatctatgaactgtcagaaaacaatttcatgaccattatgctgggtaggagcgatagaatttgccttcatatatacacttcatttccctctgccttcccatcaaccaatttattctgctgacttcctagattaacttggaggtctcattgtgtttcttggaataacacaagaggctttggatacattcataacttgcccagacaaggctct

SEQ ID NO: 89214 - DNA, 600 bp, Chicken  19866894395358_2
agacattatgaaagctttgctaatggggaaatgattgagaatccacacatccaatgtggcttagtagcaaagcagctttcacggcgtgttgaacgggtaaaattaatggggggtgctcttgactcgtggcctttgaatttgtaagggtctctgttctgcttttctctacaatctagcagggcttttttactgtaaaagacgacattgtcttacagctctgtgtctccagaagctgaactgttaagaaaagtgccaaatacattgagatgaatggtaaaattaraagtgttgatggcacartagagatctttggagattctcgtattatataagtgtggaggcccagagctgatgtgccacaggaactccacaaatctatgaactgtcagaaaacaatttcatgaccattatgctgggtaggagcgatagaatttgccttcatatatacacttcatttccctctgccttcccatcaaccaatttattctgctgacttcctagattaacttggaggtctcattgtgtttcttggaataacacaagaggctttggatacattcataacttgcccagacaaggctctgaacagcctgaccaaag

SEQ ID NO: 89215 - DNA, 600 bp, Chicken  19866894395360_1
ctgtagatctgtctttagcactgtttttatgatttactcagctcaagtttgaactcaaaattaaagtctgatactcataccatacttactttagttctcaactatagactccatcatctgtccttacaagcaacctaaaaactttaggttcaaggaatgtatagagagatgtgacattcaagccttacctctgcagtcattagagacagaggtgagctatctgcacctgaagtggattcatctatgtttttttcaaatgtcacatgggtattatatatgacattatataacttatttacrttgttctcatagattttttatgcccgrctgtaacactataagaataagtccaatgtattttgaggtgtcttcaaaaagtagtgttgatgatacattgaccctatcttactgaaatcaaagtatagacatctcactagtgggcttgcattctagcaaaaactgatattgtcagtgacaggaaaagacactggtaatattatgctgtttcattggataaccttaaactagtagcctaatgaagcctaaagaacttgtttcatggctgcataaatgccactttttaccatagatcatcaaaag

SEQ ID NO: 89216 - DNA, 600 bp, Chicken  19866894395360_2
tatgatttactcagctcaagtttgaactcaaaattaaagtctgatactcataccatacttactttagttctcaactatagactccatcatctgtccttacaagcaacctaaaaactttaggttcaaggaatgtatagagagatgtgacattcaagccttacctctgcagtcattagagacagaggtgagctatctgcacctgaagtggattcatctatgtttttttcaaatgtcacatgggtattatatatgacattatataacttatttacrttgttctcatagattttttatgcccgrctgtaacactataagaataagtccaatgtattttgaggtgtcttcaaaaagtagtgttgatgatacattgaccctatcttactgaaatcaaagtatagacatctcactagtgggcttgcattctagcaaaaactgatattgtcagtgacaggaaaagacactggtaatattatgctgtttcattggataaccttaaactagtagcctaatgaagcctaaagaacttgtttcatggctgcataaatgccactttttaccatagatcatcaaaagcaatcacataaaaccctctaaacccac

SEQ ID NO: 89217 - DNA, 600 bp, Chicken  19866894395360_3
ggaaaagacactggtaatattatgctgtttcattggataaccttaaactagtagcctaatgaagcctaaagaacttgtttcatggctgcataaatgccactttttaccatagatcatcaaaagcaatcacataaaaccctctaaacccactgttatttagaaaagagtaaggatgtatctgttatgttctttccactgacaacatgggtagggtgcaaatcagtatctatgttagaagagcaactgagcctttcatgcatataaataatgcaagataaggagtatttgaggtctacaggrgggataaaattctcttgagatgtttggttcagaatccccaaccctcaactcaagcaaagctattaaaagaggcacaaaattctaggggcatttaggaatgcaagggaatagctacagacaagcacacatccacatatgtgcatgcatgcatcctatcttttttgttttctgaggagaaacgattactgaaataatgggacttgcaagcacataagacatagtatctcaggacagttcaagcaaaaactaaaacaaatgtaagagaacatccggtctaaatactctgcaaaatactgaatg

SEQ ID NO: 89218 - DNA, 600 bp, Chicken  19866894395360_4
gctatatatagttcagtgcttcaccattttctaaatatagacaaggtgaggggttgaaactagacggtattagaggtccttatcaacccagggtgttctatgattctgtggttgtagtgaaactacactaacaaaacaaacaaaacaaaacaaacgcacacacacacacacacaaaagaaaaccttgcatgcaccaaatttaatgaaaaaatagaggtagaggaaaccattctaacatgactcttttctgtgattattttgaagattagaaagagtaaaaaagttattgagtcttgaagraaaaaaaaaggtaatttatagtgaagaaaactattcttttgatcattcctacctgatttgatctgatctaatcacaaatgtgttaaaattaaaaggtcaaaaccctaaataatcagatttcatttacaaaattgcaaaattttagaaaaataagttatactggattatgtccgatgttgctcttccacgtgttcataacaaattattgtaatagatatcactgccaatttcacactggtagaaaacagtgttatatcactactaagatcatgaccgcgcatactgaaatgacctgacagg

SEQ ID NO: 89219 - DNA, 600 bp, Chicken  19866894395361_1
aatacactctccctagtcggattctttcttaacccaaagatgatgttttaaatcacagattatactacatatcaaaaattcagtggccagatttggggcatgtagggcctttttcctcacgtcaaattggttggaacccatttagcttttcatcttcctacggggcacagagcacagtatgtaacactgctgtaaaggaagcacgtgctagtatatcttggccttttcacttagcacatacctggcttttgtcaagaatcatgacactgatggatctgtccagcactctccaggacacamtgtgaatttctgacatctgatctttcatagaaagggtacatctttgttgtgtgatggggattctccttatcaaagctcaaatccacactgcagggtctcagtgacctctctacctcttccttcatattaataaaccttcctgagcaagttgcagccccttctttttccaccattctgagtgccccttacaatcagtgagagctcacataaatgcctctcctttaaaacaacacaaaacaggcaaatgctgctgtaaacaacagcaacttgtggtacttctgctataacattgagggctgt

SEQ ID NO: 89220 - DNA, 600 bp, Chicken  19866894395361_2
tctgatctttcatagaaagggtacatctttgttgtgtgatggggattctccttatcaaagctcaaatccacactgcagggtctcagtgacctctctacctcttccttcatattaataaaccttcctgagcaagttgcagccccttctttttccaccattctgagtgccccttacaatcagtgagagctcacataaatgcctctcctttaaaacaacacaaaacaggcaaatgctgctgtaaacaacagcaacttgtggtacttctgctataacattgagggctgttcctccaatatgtayagtacttttctgccagaggcagccagacaaatagtgatgggaaccattaaaaaatgcttagataaatcttttccagtatgggctgggcttggtctgctctatttatgtcaatggaacacagccattgagccctgggggagttagtgccagccctaaatcatttctttgattaattgttcttgggaaggaagaattcattaagcattcagctcagcaattagaaataaatatatttttagaatgaacaacttgccagaaacaagttgtttcagaaacatattctgattgatgcagcccatt

SEQ ID NO: 89221 - DNA, 600 bp, Chicken  19866894395361_3
gaacacagccattgagccctgggggagttagtgccagccctaaatcatttctttgattaattgttcttgggaaggaagaattcattaagcattcagctcagcaattagaaataaatatatttttagaatgaacaacttgccagaaacaagttgtttcagaaacatattctgattgatgcagcccattttccatcaacacataacaaggaggcttcattctccctcctaaggcagaggaacattgcagaagaaggtagagcagtcctgtcatttaggaactagtgccatctacgcaactcmagttcatattctgtgagcaactctctagaaaataatgtagtttccatgtatattagctctccatatgtaaaatgggaattcttcctattctgcaaaaatattacagtgttatttctacaaacagctggaacggtgtagatatgctagtgatgaaaaaccagcaaacaaacagtaaaaaaagcccacctgaatttgcagttaagtaacacggctcagacattcaacaaaatgaatgtgaagttacartctttttgggcataccacagaatccaggtgtaactgaaacatgcaagttgtttt

SEQ ID NO: 89222 - DNA, 600 bp, Chicken  19866894395361_4
gaagaaggtagagcagtcctgtcatttaggaactagtgccatctacgcaactcmagttcatattctgtgagcaactctctagaaaataatgtagtttccatgtatattagctctccatatgtaaaatgggaattcttcctattctgcaaaaatattacagtgttatttctacaaacagctggaacggtgtagatatgctagtgatgaaaaaccagcaaacaaacagtaaaaaaagcccacctgaatttgcagttaagtaacacggctcagacattcaacaaaatgaatgtgaagttacartctttttgggcataccacagaatccaggtgtaactgaaacatgcaagttgttttgctgacacactaatcaattaccagaagaagagtgggacaggtcagtgataaccgagaactcagtcctgcctatttaaggtgcaaatcccactgacagatgaagtgtaaatgtgtatgttaaatctgcctggttcagttttacatcaatcactacaaactctgaatctgcccataaatgagttgatagctcacagcaacatgcaaaagaagagcaaaaagaacacctttcctttcgctcggttgctg

SEQ ID NO: 89223 - DNA, 600 bp, Chicken  19866894395361_5
tagctcacagcaacatgcaaaagaagagcaaaaagaacacctttcctttcgctcggttgctgcccatgcagaaccagatggacaagggctgcaggtctctctccagcagtgctgtttatgagcaacacactgatactgcagggcaggagctcatcacagacttctattagcagtgcttggtgaggacagggcttattcaaactgaaatgaagaggagcagatgcaactccaggatgagcaatggcactctgtatgtgacagatctcctccccagtctagaaatatgtggttcaggtcctyaggctagaagaagaaaccccaaaagcacctaagcatgctgtactgaaagtcacaaccacaaaagactaccacagacttcaaactgtgggtcttaagagaaaatacgtcttatcctttgctttcagtgcctagaggcaaatctgttccctgccctgttttgggtatctctgatggcaggagcgtctcaataaattctggcattttcaagaagcaatccaaaaacatactctctaaggccttcttctctgaaacatgaaatacatttgtcaaattttactactacacctacagaaccaaact

SEQ ID NO: 89224 - DNA, 600 bp, Chicken  19866894395364_1
caagagatatttgtgaattcttattctcatataccaacacgtttcaatgagggaaattgaaacaccaatgtattaaagagggaatgaggaagcgtatctgcatgggaggacagaaaaaatatgatactttgtcagaatgaagtaaattcagattcagtcagagaaaaacaactgcttcctcttcaggtgggtaattttgcatcttctggcttttgagtagttccagaatccactttctaaaactttctcctttttattttcaaaaagagagcagctaaactataataattattctgaacrtcagaaaagttgaattatctgggccttctctcattttttattcttgaagcaaatgctgttttgtaagacaactcagttgattcctcacaaactgttttcagaaatgaaattgcagtctgttatgagtatagctgccctcaatcttccagccctcctccactattcatttattctgtgtcttttcagcagcacacaggacactgctgctaacaagagcgtaggcctgaatgccaggaacatggactcgcgacattcatttgcaaaaagacaaacatgggagggtgttctcatccagaaatt

SEQ ID NO: 89225 - DNA, 600 bp, Chicken  19866894395371_1
aaactctctcctcatcctaattctgtgctcagacctggatgtgtgccaggacccacagtacacctctttccttgtcactgcttttggagagaaggaaagtggacttgggaaacgggagctgttagcagctccccacgtgtggagtaccagagagcatgagcttatggcaggaaggtctcccgtttagtgcctacatgctcatcgtctacatgaacactggatcctgcatcagataaagagagctcatccctggccaaagacatgatgtgccttgggtgaactcccttgttttatgcaaakaaawgtaaaagcatatctcaccttatttctgtatcactgtgtggatttagattctgtcacaagctaaacagtcctcttctgctggccaagacagttttctctttgccatcagtgctatgttttctatgataagctgataaaaaaaaaaaagtccctcaaacaattgtgtctgcaagcagcatcacacacataaattcartggcggggaacttgttcatatttttattaaacacaccagggactcctccatttacacagaaggaccatccattgaaaggtgcagaaaataaaatatcacct

SEQ ID NO: 89226 - DNA, 600 bp, Chicken  19866894395371_2
tctctcctcatcctaattctgtgctcagacctggatgtgtgccaggacccacagtacacctctttccttgtcactgcttttggagagaaggaaagtggacttgggaaacgggagctgttagcagctccccacgtgtggagtaccagagagcatgagcttatggcaggaaggtctcccgtttagtgcctacatgctcatcgtctacatgaacactggatcctgcatcagataaagagagctcatccctggccaaagacatgatgtgccttgggtgaactcccttgttttatgcaaakaaawgtaaaagcatatctcaccttatttctgtatcactgtgtggatttagattctgtcacaagctaaacagtcctcttctgctggccaagacagttttctctttgccatcagtgctatgttttctatgataagctgataaaaaaaaaaaagtccctcaaacaattgtgtctgcaagcagcatcacacacataaattcartggcggggaacttgttcatatttttattaaacacaccagggactcctccatttacacagaaggaccatccattgaaaggtgcagaaaataaaatatcacctctca

SEQ ID NO: 89227 - DNA, 600 bp, Chicken  19866894395371_3
catcgtctacatgaacactggatcctgcatcagataaagagagctcatccctggccaaagacatgatgtgccttgggtgaactcccttgttttatgcaaakaaawgtaaaagcatatctcaccttatttctgtatcactgtgtggatttagattctgtcacaagctaaacagtcctcttctgctggccaagacagttttctctttgccatcagtgctatgttttctatgataagctgataaaaaaaaaaaagtccctcaaacaattgtgtctgcaagcagcatcacacacataaattcartggcggggaacttgttcatatttttattaaacacaccagggactcctccatttacacagaaggaccatccattgaaaggtgcagaaaataaaatatcacctctcaattttctctcctaatatgctatatgacctaccatgtagacagagaacaaaacattcaactggccctacaccagctgagaaacttacctcttttgccacaactgggcatttttctcactaaccatttataggatamaaaracgcggtgcttcaaaaaacattttcattcatcatmatttccaaggaaaacaagctg

SEQ ID NO: 89228 - DNA, 600 bp, Chicken  19866894395371_4
aaaaaaaaaaagtccctcaaacaattgtgtctgcaagcagcatcacacacataaattcartggcggggaacttgttcatatttttattaaacacaccagggactcctccatttacacagaaggaccatccattgaaaggtgcagaaaataaaatatcacctctcaattttctctcctaatatgctatatgacctaccatgtagacagagaacaaaacattcaactggccctacaccagctgagaaacttacctcttttgccacaactgggcatttttctcactaaccatttataggatamaaaracgcggtgcttcaaaaaacattttcattcatcatmatttccaaggaaaacaagctggaaagatttctatgacgtgggcctgtactgatgcattgtatcattaaatgtttgttttgtactgatggacggctgtgtgaaaacaaatgtaaggagaggcggcatgacgcaagttctggtttctcattcaaatctgctttgcttttgtgtgtactccacagcctcctgtggcaacagaagccacagttctctgcaagaaacttagaacaaaagcaagggtcttgaataaaatattccaca

SEQ ID NO: 89229 - DNA, 600 bp, Chicken  19866894395371_5
aaaaaaagtccctcaaacaattgtgtctgcaagcagcatcacacacataaattcartggcggggaacttgttcatatttttattaaacacaccagggactcctccatttacacagaaggaccatccattgaaaggtgcagaaaataaaatatcacctctcaattttctctcctaatatgctatatgacctaccatgtagacagagaacaaaacattcaactggccctacaccagctgagaaacttacctcttttgccacaactgggcatttttctcactaaccatttataggatamaaaracgcggtgcttcaaaaaacattttcattcatcatmatttccaaggaaaacaagctggaaagatttctatgacgtgggcctgtactgatgcattgtatcattaaatgtttgttttgtactgatggacggctgtgtgaaaacaaatgtaaggagaggcggcatgacgcaagttctggtttctcattcaaatctgctttgcttttgtgtgtactccacagcctcctgtggcaacagaagccacagttctctgcaagaaacttagaacaaaagcaagggtcttgaataaaatattccacaagac

SEQ ID NO: 89230 - DNA, 600 bp, Chicken  19866894395371_6
gcatcacacacataaattcartggcggggaacttgttcatatttttattaaacacaccagggactcctccatttacacagaaggaccatccattgaaaggtgcagaaaataaaatatcacctctcaattttctctcctaatatgctatatgacctaccatgtagacagagaacaaaacattcaactggccctacaccagctgagaaacttacctcttttgccacaactgggcatttttctcactaaccatttataggatamaaaracgcggtgcttcaaaaaacattttcattcatcatmatttccaaggaaaacaagctggaaagatttctatgacgtgggcctgtactgatgcattgtatcattaaatgtttgttttgtactgatggacggctgtgtgaaaacaaatgtaaggagaggcggcatgacgcaagttctggtttctcattcaaatctgctttgcttttgtgtgtactccacagcctcctgtggcaacagaagccacagttctctgcaagaaacttagaacaaaagcaagggtcttgaataaaatattccacaagacttgatttgctgttgcttgctcatggagacaagtct

SEQ ID NO: 89231 - DNA, 599 bp, Chicken  19866894395373_1
  misc_feature (1)..(78): n is any nucleotide
nnnnnnnnnnnnnnnnnnnnnnnnnnnnnnnnnnnnnnnnnnnnnnnnnnnnnnnnnnnnnnnnnnnnnnnnnnnnnnatgtgctgacttgaatacgtacctctcactttctgatttaattagcatacggcagcttaccgttccctttgcaatatattaagggatacttgcttttctgcatcgttgggttttccccctttattcccactggttattaagtggtgatgataaataactcttgcacctacagtcgtgactttttgctttaaaaagctcaagagagaatgaattagaaaaaakaaagtctcttctgcatgagatccaaaccttggttcctaatccaaacttcycataatttaaaaagcagaagaacatmcaccacaggtatcttggctggctgcatcacaagtgcagtttaatggtgtcttgctcagagccaacttcaagacggtgccaaccatttcctttattttaataagtcaccagcacacacagcatacctaacacccagtttcccttatgacaaccacctgctttccaagaaaaacaatctaaagccttttggttattgaggagtctccaaaaactgaaaatggtct

SEQ ID NO: 89232 - DNA, 599 bp, Chicken  19866894395373_2
  misc_feature (1)..(28): n is any nucleotide
nnnnnnnnnnnnnnnnnnnnnnnnnnnnatgtgctgacttgaatacgtacctctcactttctgatttaattagcatacggcagcttaccgttccctttgcaatatattaagggatacttgcttttctgcatcgttgggttttccccctttattcccactggttattaagtggtgatgataaataactcttgcacctacagtcgtgactttttgctttaaaaagctcaagagagaatgaattagaaaaaakaaagtctcttctgcatgagatccaaaccttggttcctaatccaaacttcycataatttaaaaagcagaagaacatmcaccacaggtatcttggctggctgcatcacaagtgcagtttaatggtgtcttgctcagagccaacttcaagacggtgccaaccatttcctttattttaataagtcaccagcacacacagcatacctaacacccagtttcccttatgacaaccacctgctttccaagaaaaacaatctaaagccttttggttattgaggagtctccaaaaactgaaaatggtctccgtttctgcttctcaccagctgactgctctgcctgctcaaagccatcct

SEQ ID NO: 89233 - DNA, 599 bp, Chicken  19866894395373_3
  misc_feature (1)..(2): n is any nucleotide
nnatgtgctgacttgaatacgtacctctcactttctgatttaattagcatacggcagcttaccgttccctttgcaatatattaagggatacttgcttttctgcatcgttgggttttccccctttattcccactggttattaagtggtgatgataaataactcttgcacctacagtcgtgactttttgctttaaaaagctcaagagagaatgaattagaaaaaakaaagtctcttctgcatgagatccaaaccttggttcctaatccaaacttcycataatttaaaaagcagaagaacatmcaccacaggtatcttggctggctgcatcacaagtgcagtttaatggtgtcttgctcagagccaacttcaagacggtgccaaccatttcctttattttaataagtcaccagcacacacagcatacctaacacccagtttcccttatgacaaccacctgctttccaagaaaaacaatctaaagccttttggttattgaggagtctccaaaaactgaaaatggtctccgtttctgcttctcaccagctgactgctctgcctgctcaaagccatcctacactcgacagcagcagctggccaca

SEQ ID NO: 89234 - DNA, 599 bp, Chicken  19866894395374_1
  misc_feature (1)..(51): n is any nucleotide
nnnnnnnnnnnnnnnnnnnnnnnnnnnnnnnnnnnnnnnnnnnnnnnnnnntttttgagtactgtgttcatgtgaccaacttaattagaaaaaaaaagttccactttaaataacaagtttatatgttagccctcactcggtgcaaaaataacacttgtttaaattgttcacatgcttgaactaaggactgacaatgagatgttgacataaaatgacagctgaaatttgtttaagatagtcttaatagaatagtcacatttttgcacaactactttgcagccttattagcaaacaaataayatttatgtaaaaaacagaaagggcagttatttcatttggagtaagttttttacatttctagaaatgaagtatatacccgtttttatgtcttaacacaggatgacagtgatgtggagtggaagtttgctcgttctaaactttggttatcgtattttgatgatggaaaaacattacctccaccatttagtcttgtaccaagtcccaaatcgtttttctatttcatcatgaggatcattaacttttctaagtgcaggaggagacggctgcagaaggacattgaaatgggaatgggcaattcc

SEQ ID NO: 89235 - DNA, 530 bp, Chicken  19866894395374_2
agaaggacattgaaatgggaatgggcaattccaaatcgagggtaggtgctgaaatctttttgttgttttcaacaatagtttccattctagcagattacttttctttaaattttagggtaaagtctgtacttctgatgatagtacagtaataaagcaagtacttgtatttatagatctgtaattcagattggttttatgcagtacttttaggcagataatagcaataaattttattaagacaacaaggtccaatgactggaaaaacacaggtaaaacaaaaataactgactgttcaaagaygcagataattcccacaagcaatgacctaaatgctgaatgctttcagcctcaactagaaaggcttttagttgaggattaaaaataaaaagaaaaccacaacaacaactgagggtatggagagagcttttcctttcactaggcaggtaaaggaaaaacgtggtcagtatgataccttactttctactgtcaaaactatgttctcaacagaagacaacagaagagagggagga

SEQ ID NO: 89236 - DNA, 600 bp, Chicken  19866894395375_1
cctggatgaggaacaatggacacagggcacgcttgatcctttccttcatatcacagtgatgtacctgatattcccaagaatcaagttacatttaagtcaatggctgaatatgaaatgtatggaaatgaatgcgggtcctgatccagccctatgttagtctatgagactgatttcattggacctgattcagaccattacacaacaaagcttcatctggttgaccattatcgctgtccataaaaggagtatttacttacattctccaaatttctggattatttagagtgaagtaatgctaayatgattatgaattggaaatagcctagcgtggttgcccagccttggcatgtaataatctctactggctagggagtaccaagtaaccacattggtcttatttagaagtttattttgcttcaaagtatatgcaacttgacggagatctgctgtagtctttgcagattggattgtgacttttctgactttgtaaaatattcttcaagaggttctgaattaaaccagtgcaggaattttaggaaattgcaaactgctatcttttagaatcctttcttttcttctaactacactaagcaaccagtc

SEQ ID NO: 89237 - DNA, 600 bp, Chicken  19866894395378_1
tacaaattttgcaagtactattcacaaaccatggagttacctaggagtgtctgtgttgctttagcttatgcaatatgtgggtcacgatgtactgcatccccttttttattctgcatcccactagctggattctaacaagcctatcaattaagatggcacacagagaaaagcgtgtcactgcaaacagcaaagtgtacccccaacccttctactacagtgccaagaccatagctgcttagttggttgcatatatgttaaaataatccttattactcgattatttctgattagtgatgctaygttggcttttcaaagttcctgggggggacactgggaactttgcagcaaaccgtgttggagtgtttacagcggcacccaggccgattgacccggtcgtaacagccctggcacaacttaaggcaacccttggctggcaggtaacaccacaagcaaggcaggaagagggacaccacacccatggctgaccacctagtgcagcagtgcgactgactgcaagagcaggggttgtcagcgcagttgtcctcatcatcgttggagcagtgatagaagaggcccttcacacagcacacacaagtcccg

SEQ ID NO: 89238 - DNA, 600 bp, Chicken  19866894395378_2
agcaaagacactgtttgtcacagatccaacacgatgggagggtccttggatacgtgcactccttgcacttgcacttcccacagtcctcacacctgtagctgtgtgctcccaagtcttctttgctcagcggcttcagctcgcttgacttgagctcagacttgggctgcatgcggactatcccgtcagcaactggccctgaagatgatcctagaagtctttgttcagaggaattactgctcgtacttgtccttgtactgctccgtgagcccgtgctgactgtgctgatggagcgggacagargtgcccgaggagaagcgtgtgtttgcgtgtgctgaacccggccaaaatggcgatgctcaggcaggccatggggcctctcacttttgggctggctcgctgaacgaggagctgacttgacccctggccgcggagccaccgtcggtccctctgtgtactcattcgtgttgcggatagctctgatctggtccagggacaggatgtggacttgctgcgtcaggacatcccgcaggtcaggctccccatgcggcctcccactgtcacgccgagcctgtagcaaggcctgtgacccgctgccgtgct

SEQ ID NO: 89239 - DNA, 600 bp, Chicken  19866894395379_1
catcctaagttaactttatggagcagagaccgggctgtgcaaatcgagcagtatccatggcaaccacatttgagctgaggatttgcactgagatggatgcatttgagagagagaaactcaaagcaccaagtgaggtaagggacacagaagacattggctagaacatattctctatagcatgcatcaactgtgacatgcacgccaccagagatgcccaaggtaaacgtgaatggcataaagctattgccagaaaacctgtacctgtgtaaacagcttgggaacatatgtgacaggcccagsagcacaggtcagcaggcattccctgccttttttgggagacattttgctaccacaccttggatttctgcttcttccttcaccacatttcacagcaccttagctgagcactgaccacattctgacaccttaaggaagctttcctggcacacatgacagaaatcacatcgctttgctgatgactatactgccagtcccttttgcacgcatcccagtagtacacacacttccacaaccacagagctaaaggtcccagaggctttaagcctttcatcctctaaatcacccctaaactgcttatct

SEQ ID NO: 89240 - DNA, 599 bp, Chicken  19866894395387_1
  misc_feature (1)..(34): n is any nucleotide
nnnnnnnnnnnnnnnnnnnnnnnnnnnnnnnnnnattatttagatgtaactttgatttttcacacgcaaaatgtacatggtgtgccagatggaataactgagacacaggtacttaaaatcattttcaagcatttttgggaaaagaatctgattaaggtattagataacagttaaacgcagactaaaagaactttttgtgcactcttcaagatatttgatagagatgtttaaaccagtgagattatttgtattcctcatttgcagttagcagtgaagaacagggaattctctatcctgttrtattatcacttagcataccttttctgagcagtgaaataaaattctgaaataataattattattctggctagtgagtgttcagaagacataacacaaaccggcatgaaaggatttgagtgtgattgggataatgaaagagattattcttttgcatcattgtttcaaagcttgttgagggacacaggtgaacaagtccaaacaagtcctgatcaagggttgagaaatcctttgtctgaaggacacagatagacaagtcctgggcagagattgtgaaatcctttgtctaaggaacagatgga

SEQ ID NO: 89241 - DNA, 462 bp, Chicken  19866894395387_2
aaataataattattattctggctagtgagtgttcagaagacataacacaaaccggcatgaaaggatttgagtgtgattgggataatgaaagagattattcttttgcatcattgtttcaaagcttgttgagggacacaggtgaacaagtccaaacaagtcctgatcaagggttgagaaatcctttgtctgaaggacacagatagacaagtcctgggcagagattgtgaaatcctttgtctaaggaacagatggacaaggccagggacaactagggagagataagccagagcttaatggccrggaagcagtcttttgtgtgcccttatctcgagggaggcagccatttcagggggtgctgcacatgactgttacccatgcatccagggaatgccatgctggcagaagaagaaggataaaaaagggacgaacagcaatgaagttagtctttctgactacagactc

SEQ ID NO: 89242 - DNA, 599 bp, Chicken  19866894395393_1
  misc_feature (1)..(15): n is any nucleotide
nnnnnnnnnnnnnnnaatcaataaaaataaaagcagattatttgtaatggcttctggaagagaaggaaacgtgagcatgcttgtcttaccaattctttttatgtcagttgtactcatgttctgttacatttttctttctcccacatcacagctgctttgtagccctctgcatttgtgtctttgacttgggtagctttttagctcaaagtcgtaatggagcataatccctgcataacagcttccatgagctctactggaagcagacctctctgtgagtcgttcttactgcaaatggtgcasacaaaccttasacctgaagagaaacttaacgtgtgagcgctggatggaaacttagggttaagcagtgaggtttaattcctgaagacaggactgctaggacaaagttggaaaatatgaattcacatctgctcctgccatttcagcctatgcagatggtagatggatactggctctttagaaatgttgtgcttgaacttcacagactcggtttgcagcattcagtattctttaaaattgttactattatcattttgtaggttgctcagcttcctctcttcattagtgatggaaaatggcat

SEQ ID NO: 89243 - DNA, 599 bp, Chicken  19866894395393_2
  misc_feature (1)..(4): n is any nucleotide
nnnnaatcaataaaaataaaagcagattatttgtaatggcttctggaagagaaggaaacgtgagcatgcttgtcttaccaattctttttatgtcagttgtactcatgttctgttacatttttctttctcccacatcacagctgctttgtagccctctgcatttgtgtctttgacttgggtagctttttagctcaaagtcgtaatggagcataatccctgcataacagcttccatgagctctactggaagcagacctctctgtgagtcgttcttactgcaaatggtgcasacaaaccttasacctgaagagaaacttaacgtgtgagcgctggatggaaacttagggttaagcagtgaggtttaattcctgaagacaggactgctaggacaaagttggaaaatatgaattcacatctgctcctgccatttcagcctatgcagatggtagatggatactggctctttagaaatgttgtgcttgaacttcacagactcggtttgcagcattcagtattctttaaaattgttactattatcattttgtaggttgctcagcttcctctcttcattagtgatggaaaatggcatcatatttgtat

SEQ ID NO: 89244 - DNA, 600 bp, Chicken  19866894395398_1
taccctgtgcatggagacttgaggggtgctggaagtgggcagagggtatctgaggaaggtgggcagaaggatgcttgagtggggtccagatatttgggcagggggatgctcaggatgggcacagggatgctttggataagctacagacgcttgagcaggagaatgctgtagtcagaaaggaagggtgggcaggggtacctttgggttgggtagatggacagttgtgggctggggggtgcttggagtgggcaggatggtttgggtcggcagggggatgctcgggaacgctatgggttaacrgggatgcttgggcaggagagcgagcagggggtgcttggtgtgggcagagggacgcttgaggctgtaagggagatgcytggggaagaggaagctgtgggttgrcagggacgcttgggcggaagggtgggcagggagatgctggaggtgggcaggaggtcgctgaggtcgagcagggggccgctcgctgtgggcacgtgtgctgctgaatgctccccgccccaggcgagccgctgacacgggagcagtgccaggtggcagtggggaaggctgtcctgcgtgtccccgccgggccgtgatgcc

SEQ ID NO: 89245 - DNA, 600 bp, Chicken  19866894395398_2
agtggggtccagatatttgggcagggggatgctcaggatgggcacagggatgctttggataagctacagacgcttgagcaggagaatgctgtagtcagaaaggaagggtgggcaggggtacctttgggttgggtagatggacagttgtgggctggggggtgcttggagtgggcaggatggtttgggtcggcagggggatgctcgggaacgctatgggttaacrgggatgcttgggcaggagagcgagcagggggtgcttggtgtgggcagagggacgcttgaggctgtaagggagatgcytggggaagaggaagctgtgggttgrcagggacgcttgggcggaagggtgggcagggagatgctggaggtgggcaggaggtcgctgaggtcgagcagggggccgctcgctgtgggcacgtgtgctgctgaatgctccccgccccaggcgagccgctgacacgggagcagtgccaggtggcagtggggaaggctgtcctgcgtgtccccgccgggccgtgatgcctgcctgcaggcaggctgctgcttcgacgacacagaccgtgcgacgccctgctattacggcaacacaggtagggttca

SEQ ID NO: 89246 - DNA, 600 bp, Chicken  19866894395398_3
gggatgctcaggatgggcacagggatgctttggataagctacagacgcttgagcaggagaatgctgtagtcagaaaggaagggtgggcaggggtacctttgggttgggtagatggacagttgtgggctggggggtgcttggagtgggcaggatggtttgggtcggcagggggatgctcgggaacgctatgggttaacrgggatgcttgggcaggagagcgagcagggggtgcttggtgtgggcagagggacgcttgaggctgtaagggagatgcytggggaagaggaagctgtgggttgrcagggacgcttgggcggaagggtgggcagggagatgctggaggtgggcaggaggtcgctgaggtcgagcagggggccgctcgctgtgggcacgtgtgctgctgaatgctccccgccccaggcgagccgctgacacgggagcagtgccaggtggcagtggggaaggctgtcctgcgtgtccccgccgggccgtgatgcctgcctgcaggcaggctgctgcttcgacgacacagaccgtgcgacgccctgctattacggcaacacaggtagggttcagcagcgggcaacccgttgctccctc

SEQ ID NO: 89247 - DNA, 600 bp, Chicken  19866894395399_1
agtaataatctcatttttaataaagtttcttattttgatttacagttgacagaagctgttattctatcataccataaagcctctgcctacctgcataggatgtcagatatttctcaaaagatacacaaatcttacagaacatttggagtactgcattttcttattaatcacaggagagaacacattggctccattgttaaagataatagtagagaatctcccatgaaacaaaacttacattcaagaattagaagtaataagctctatagttgtgtatcacactatagctcccagaatacwgctttcttctctttagaaaaatattgtaaaatagaaaaatattgtaaaatagttatttcctcttttcttctgactacaaaactcttaacttgagtctccataaagaaaaaaacagactgtcaagcagacagaaaaaataaaggtgtcaaaggcaaggaaagcaaataatattttaggtcacataaaaggaacttttaatcttggcactgaagcatcttcagttgtttacattggaacattaaaaaaacaaaaacacactaatttcaagtattcttatattttcagtttcatttcgatttc

SEQ ID NO: 89248 - DNA, 599 bp, Chicken  19866894395414_1
  misc_feature (1)..(47): n is any nucleotide
nnnnnnnnnnnnnnnnnnnnnnnnnnnnnnnnnnnnnnnnnnnnnnnttctcttagattattgtgttatttagatatactttgtaggacagatactcatacagatacataaataaataaatatgtgcatatttatctcacagttggaagtacttctatgtgatacacacaaatcacaattgaaatacgttttccatgatggtgatttcccaatacaagcaggtgacataaactggtaaatctttttaacagagaataaaataaagcagacttttgctatcagcttgacccaagcttttascagtgatatttattggaacaagaagcacactatcctctttgaatcttttgatgatatggaccagtatggattatgagaaatwtgtttagttttcttgactcagaaaaaaacaagtacagtacaagtacaggagtacacaaagggataccaayttaaatttggtactaaaattctgtaatgcagtggctctgccctgtcttattttgcttctgcttgcagtggtacagtaacatccaagagactacaaaaagtgatcaaaaagagaagataagttttcaaaccctatagcaagatttgat

SEQ ID NO: 89249 - DNA, 600 bp, Chicken  19866894395414_2
gtaggacagatactcatacagatacataaataaataaatatgtgcatatttatctcacagttggaagtacttctatgtgatacacacaaatcacaattgaaatacgttttccatgatggtgatttcccaatacaagcaggtgacataaactggtaaatctttttaacagagaataaaataaagcagacttttgctatcagcttgacccaagcttttascagtgatatttattggaacaagaagcacactatcctctttgaatcttttgatgatatggaccagtatggattatgagaaatwtgtttagttttcttgactcagaaaaaaacaagtacagtacaagtacaggagtacacaaagggataccaayttaaatttggtactaaaattctgtaatgcagtggctctgccctgtcttattttgcttctgcttgcagtggtacagtaacatccaagagactacaaaaagtgatcaaaaagagaagataagttttcaaaccctatagcaagatttgatggagcctatctgtaggagctttgttgcaccacctgacctagaaatattttcccacccattgctaacccagtggccttgaagtt

SEQ ID NO: 89250 - DNA, 600 bp, Chicken  19866894395414_3
ttctatgtgatacacacaaatcacaattgaaatacgttttccatgatggtgatttcccaatacaagcaggtgacataaactggtaaatctttttaacagagaataaaataaagcagacttttgctatcagcttgacccaagcttttascagtgatatttattggaacaagaagcacactatcctctttgaatcttttgatgatatggaccagtatggattatgagaaatwtgtttagttttcttgactcagaaaaaaacaagtacagtacaagtacaggagtacacaaagggataccaayttaaatttggtactaaaattctgtaatgcagtggctctgccctgtcttattttgcttctgcttgcagtggtacagtaacatccaagagactacaaaaagtgatcaaaaagagaagataagttttcaaaccctatagcaagatttgatggagcctatctgtaggagctttgttgcaccacctgacctagaaatattttcccacccattgctaacccagtggccttgaagttgtgaatatgtctatggagcacaatttggtgctgtgcgaaaatatccaggtccaccactcacacgtggtga

SEQ ID NO: 89251 - DNA, 600 bp, Chicken  19866894395416_1
aatgagcagcgttgtcccaacccatccctgtctcacagagagatgcacgtggcccctaatgtatgaatcggggttttctatggggtgcgtggctatggggcagtagctcaggtttactctcttcacagaaatcccccattcctggttggcagaaaacatggagacgtgactcagtttgcagagaaatgtgagcataagctcagctgcaccacgtccagctcattggggtctgctcaggacacgttttcctttccccacctcttgcccccagcatcccagatgtgcacacattcctgagartgcccatggagaaacccagagcagagcacagagatgggggagaaatacgtccatgccttcagcagttcttggcatgccgtagttgggttggcttgctttctttttttcaacactatgaaaatctgtatgcatgcaccttcgcaggaatactttcagtgcatatgcatgggcaggcatgcatcagtgctgagaggtgggtacgtgaatctttgtgcatgaagccgtaagcacagggggcaattcgggcactgaacagaccccactcagctctttaaactcttcccaactcacccaaatcat

SEQ ID NO: 89252 - DNA, 600 bp, Chicken  19866894395423_1
tgcattactgggcttggagggggtagggaagaggaggggggagttattaagtaaactgctggatgttgaagtagctgtttggcaacaatgcaagaacataaggcatttgcaattaagctcattaaagcttcatcattttgcttatcaatcttctctgaaaagggtggggtgaagtaccgtatattaaaatatggctgcttttacagataaggaatgatcactacccgcttgactttctgatctatgctatagtacccagcctgtgatggcagacatgattagctgatttaactccctctygtacacgggcaagtgattaattggagtttgttgttgtttccctgcactccattgctaaaatatgcagtcctggcaactgctaccttcttgcatttatctggtwggtatccagatgtggtatcctacttatccatcatttttctcccatttgttctcgtaaccatggcttttggtaacagtgtttattaaagtacccacatcttgggataagaggaaggtggtctagtttatcagatccattgcttccttgattgatgggggaagtcttttgcctggagctgatactaccctatgctaatc

SEQ ID NO: 89253 - DNA, 600 bp, Chicken  19866894395423_2
catttgcaattaagctcattaaagcttcatcattttgcttatcaatcttctctgaaaagggtggggtgaagtaccgtatattaaaatatggctgcttttacagataaggaatgatcactacccgcttgactttctgatctatgctatagtacccagcctgtgatggcagacatgattagctgatttaactccctctygtacacgggcaagtgattaattggagtttgttgttgtttccctgcactccattgctaaaatatgcagtcctggcaactgctaccttcttgcatttatctggtwggtatccagatgtggtatcctacttatccatcatttttctcccatttgttctcgtaaccatggcttttggtaacagtgtttattaaagtacccacatcttgggataagaggaaggtggtctagtttatcagatccattgcttccttgattgatgggggaagtcttttgcctggagctgatactaccctatgctaatcaagagctttggatttccagagaaatatcagcaacctgaagttgtgaacacaaccaatctgagctgcttacagttcctgatctgtagcaacctcagcatacctg

SEQ ID NO: 89254 - DNA, 556 bp, Chicken  19866894395445_1
tgggatttcctggattgcatctcaaattcaacaactaaatgctatatatggcagaaatgcagcatatgaaagtttctctctacatacaattatccattttatgcctttcatcgtcaggtttccatttgctggcactttccatgtgcattactattttaatacaaacaaacaacagagatgcacggggttaggaaaagatgaccttacaaaagcatcatatgacaattaggcacatactgaatcatgggatagagatgagaaatgtatcacttgaacaattttatgagactaacaaaatgmtatttttcctcctgactaatgatgaagaattctagctggaaacaaataagtgtgtcattcagaacacacacacaggcacacaaagtcaaacaaaacaaaccaggcaaaacatccaagagtccacaatgccataacacaagactctggagaaacattaagccctccccatgaaagagaatgaggcctgtacactgatctattgaactgtaggcaaggattagatcttaacatcacacaaaaaggacctacttcacac

SEQ ID NO: 89255 - DNA, 600 bp, Chicken  19866894395446_1
ggtgaaagtagactgatggtcttgatgagaagactcgcagatcaaaaagtaaacttctgcctctgaatggtaagaagctgctgcggtttgtgccatcagacactatgcttatgagaacaaatccttgcaagtaaaattgcctaggagtgcggtatcttcttcctctcctctttctcttgtccctttgcttgttaacataaaaatgccctatatcaagcccccatcatcctccttgtcttttgccaggtgaatttcattaagacaccatccgagagcatggactttttctagcttttgtgyccttccttcccaaaacagtgtcttttcaaattgcctccttcacagagagcaacttaaggcagaccagtcttaaatagctccrttcacgaggtgtttgcatcacacctgtgggagcaagcaggaggagaccacacaatagcttgtgtgtggtcaggggccttgcatgggcggctgaggaaaggtgtgattygggcgataggaaacaagcctccaatcttctatgagcacatctcagagaatgtgcatgtgcgtgtgtgtgttttgtcagccgtgaagaaggatggagggcaagtctcaccg

SEQ ID NO: 89256 - DNA, 600 bp, Chicken  19866894395446_2
gcggtttgtgccatcagacactatgcttatgagaacaaatccttgcaagtaaaattgcctaggagtgcggtatcttcttcctctcctctttctcttgtccctttgcttgttaacataaaaatgccctatatcaagcccccatcatcctccttgtcttttgccaggtgaatttcattaagacaccatccgagagcatggactttttctagcttttgtgyccttccttcccaaaacagtgtcttttcaaattgcctccttcacagagagcaacttaaggcagaccagtcttaaatagctccrttcacgaggtgtttgcatcacacctgtgggagcaagcaggaggagaccacacaatagcttgtgtgtggtcaggggccttgcatgggcggctgaggaaaggtgtgattygggcgataggaaacaagcctccaatcttctatgagcacatctcagagaatgtgcatgtgcgtgtgtgtgttttgtcagccgtgaagaaggatggagggcaagtctcaccgctgcaggtagcaaccaagatggtgagatacttcccatctcgctcttccctgaatccatcactgtaaatagcttggcttgctt

SEQ ID NO: 89257 - DNA, 600 bp, Chicken  19866894395446_3
gttaacataaaaatgccctatatcaagcccccatcatcctccttgtcttttgccaggtgaatttcattaagacaccatccgagagcatggactttttctagcttttgtgyccttccttcccaaaacagtgtcttttcaaattgcctccttcacagagagcaacttaaggcagaccagtcttaaatagctccrttcacgaggtgtttgcatcacacctgtgggagcaagcaggaggagaccacacaatagcttgtgtgtggtcaggggccttgcatgggcggctgaggaaaggtgtgattygggcgataggaaacaagcctccaatcttctatgagcacatctcagagaatgtgcatgtgcgtgtgtgtgttttgtcagccgtgaagaaggatggagggcaagtctcaccgctgcaggtagcaaccaagatggtgagatacttcccatctcgctcttccctgaatccatcactgtaaatagcttggcttgcttcctcctccctcactctycttttttatactttctaagactctgcaacttgcatgaaaacacacaaccttaattggcactgtcaattccagctgacagatctcccmtgaa

SEQ ID NO: 89258 - DNA, 600 bp, Chicken  19866894395446_4
tcacacctgtgggagcaagcaggaggagaccacacaatagcttgtgtgtggtcaggggccttgcatgggcggctgaggaaaggtgtgattygggcgataggaaacaagcctccaatcttctatgagcacatctcagagaatgtgcatgtgcgtgtgtgtgttttgtcagccgtgaagaaggatggagggcaagtctcaccgctgcaggtagcaaccaagatggtgagatacttcccatctcgctcttccctgaatccatcactgtaaatagcttggcttgcttcctcctccctcactctycttttttatactttctaagactctgcaacttgcatgaaaacacacaaccttaattggcactgtcaattccagctgacagatctcccmtgaaacacacagcaataaaaaatgtaatcccttagccctcccccacaatgaagttcaattatagcaagacaaggaagactcccatggatgtctgtaggcagactgcagttttctggatttattttaaaaatttagtaatcttgccaatactttgatgaggaccactttgtgctaacaaaatgaagtagaatgccagaaaacgttaagtcctgc

SEQ ID NO: 89259 - DNA, 600 bp, Chicken  19866894395446_5
attygggcgataggaaacaagcctccaatcttctatgagcacatctcagagaatgtgcatgtgcgtgtgtgtgttttgtcagccgtgaagaaggatggagggcaagtctcaccgctgcaggtagcaaccaagatggtgagatacttcccatctcgctcttccctgaatccatcactgtaaatagcttggcttgcttcctcctccctcactctycttttttatactttctaagactctgcaacttgcatgaaaacacacaaccttaattggcactgtcaattccagctgacagatctcccmtgaaacacacagcaataaaaaatgtaatcccttagccctcccccacaatgaagttcaattatagcaagacaaggaagactcccatggatgtctgtaggcagactgcagttttctggatttattttaaaaatttagtaatcttgccaatactttgatgaggaccactttgtgctaacaaaatgaagtagaatgccagaaaacgttaagtcctgctgaactactgagtaggttttgaggctgccctaggtgcttcgccatcaagtctgacctgctgtgatttatcagcaaacatttaactcc

SEQ ID NO: 89260 - DNA, 560 bp, Chicken  19866894395447_1
ttggaagcctttacagaattaaataacaatctctcctcttttgtctgttgtctttttattctttgtttttaaccccagaagctttgctgtttttaacaaatttacaattttctctcgttttctgtagttcagcagagttgtgacaaatttgtactgcaatgcataggttgaacctggcttggacttatctgagctagttttctgctagctcctaaacttctgttactgctatagtgtagtagtatttatgcttcaaatgattctgggtgtctttgctctcatacagcacagtaaggaaaygctcctgtagtcagatgttggcatcagcaggaaaaattattcagtttttgcaacttgaatatctacacacatctacatctccatttgcttgttggctctatattggtcagcctgctctgtgaagtttccaaagatcatccagcagaaagtagaggcaaatctagtcctcattcgggtaaacttatttgatatacctgaaatcagggttcaaaataagtctttgctaacaataaaggaatattcagatcagatgtaagttt

SEQ ID NO: 89261 - DNA, 600 bp, Chicken  19866894395462_1
tacttgtcttgactaagtatgttgagaaatcctggtagaactgagcccatcagtgtaggtgtgattgcttaaattaggtaggatcctgaagtggctgcctcccgagggccaggctgcagtgctacaaaaaagaaagtacaagacagaagaatctttgaacagcccagctaccagcaatggcattgcttcacttttaggagttttctgtcctgcaatatccatgaggctgtttctgtgcaacaacacccagagagtgtagagaacaaggagacctcccagggctctctggactcatgaagratcagaagcagcagcaccagaaggatcagcagaggctccaggacttgtgcaaatagtatctataggagcatctacatccatgatgctcttcctctccctgtttttgatcacaagttgaaaagtcttggaaatacagctgaaaactcccagaaataaaggttcagaaacctcagaaacaaaggaagttgaacataaaccaaggagctgcaggtggrcatgcactcacactttatgtctctgcctgtacttcaaataaaggagatggaagattacacagaagtagtccctacccttagttag

SEQ ID NO: 89262 - DNA, 600 bp, Chicken  19866894395462_2
tatccatgaggctgtttctgtgcaacaacacccagagagtgtagagaacaaggagacctcccagggctctctggactcatgaagratcagaagcagcagcaccagaaggatcagcagaggctccaggacttgtgcaaatagtatctataggagcatctacatccatgatgctcttcctctccctgtttttgatcacaagttgaaaagtcttggaaatacagctgaaaactcccagaaataaaggttcagaaacctcagaaacaaaggaagttgaacataaaccaaggagctgcaggtggrcatgcactcacactttatgtctctgcctgtacttcaaataaaggagatggaagattacacagaagtagtccctacccttagttagtctatcaagacgaacaaaagttgtgttttgtggtgtgaggaattaggattgtatccctggggttcagagaggagttaattcttctgaggacaagtcagaaagtgataaatcaagcatcaatgccctagaccaaaggaaagtgccacatcacaaaagcctgaaagaaaagctaatggcggtctaaaactaattctgaaaatattaggaaaatacta

SEQ ID NO: 89263 - DNA, 600 bp, Chicken  19866894395466_1
caacataaacgcgcaatgaaagcattacttgtgtgactgcatgtctgcctcattgggcagacggaactagatcctatgaagtctgaatactgggtgagcaaatatttattgagagttactcagctgtgatacagaaggggattcatggcatggtgcatctggactcggctcattttttatgagataattgcgccacggactacctcaaacacggcgtgactgaaggatttgccttttaaatttaaaaacatggaacggataggaattaaatccgtcatgcctccatgtagcacacaaagraagaagaatataaataaacaggcaaccagaatggtgcartaagaatgggattaatccaagtgtgattaattcaatgtcagattaaaattgatagtgccagctgtatcgggtccattctgctgcattattctcgcctgtcattttttttgtccacctacctcccatctccttggtggataaacctgcaggagagttaattgtcacatacatgggtttaatcacattgtccacagcatttgggggccttgcctccagcgatccatgactaattgttgtggtaatttttcaatcattaacagc

SEQ ID NO: 89264 - DNA, 600 bp, Chicken  19866894395466_2
catgtctgcctcattgggcagacggaactagatcctatgaagtctgaatactgggtgagcaaatatttattgagagttactcagctgtgatacagaaggggattcatggcatggtgcatctggactcggctcattttttatgagataattgcgccacggactacctcaaacacggcgtgactgaaggatttgccttttaaatttaaaaacatggaacggataggaattaaatccgtcatgcctccatgtagcacacaaagraagaagaatataaataaacaggcaaccagaatggtgcartaagaatgggattaatccaagtgtgattaattcaatgtcagattaaaattgatagtgccagctgtatcgggtccattctgctgcattattctcgcctgtcattttttttgtccacctacctcccatctccttggtggataaacctgcaggagagttaattgtcacatacatgggtttaatcacattgtccacagcatttgggggccttgcctccagcgatccatgactaattgttgtggtaatttttcaatcattaacagcatcacatatgctgcaaacaaatcccacggcacccactaa

SEQ ID NO: 89265 - DNA, 600 bp, Chicken  19866894395475_1
atccagtgaacattgtacagtgctggaaggtaggagttccaagttgaagttctgacaagatctttttgtgacatgacagtgtgaaaacttgtccagggaaatcattccttaaagctttccttcattgttttcagagtgattgtacaagtaaagcatcagataccaagagctttgttttctagttcccgtttatatattaaaatctattaattctacagattacttataaacttttttttttttttaatataaaggcacttctgttttatgtatagtagtagaagtatcaatggaaacatyggtgttgatcggaaataagcacttgagtttagttcttaatttctctttaaacaatagtatgtatagctttgctaaccacgattttaacagcagctgaagtgttggaagttgctgaggttctggtgagagccagaggtgatattatccatgaagaaataataacccataaccgcttccatttggattggtagtgatagtcataacggggggtgatggtggaggtctaaccattggctaccttctaaatttggaggggggtgatctggaacaggacaaatcctgtttaaaaattgggtaatt

SEQ ID NO: 89266 - DNA, 600 bp, Chicken  19866894395475_2
aaccacgattttaacagcagctgaagtgttggaagttgctgaggttctggtgagagccagaggtgatattatccatgaagaaataataacccataaccgcttccatttggattggtagtgatagtcataacggggggtgatggtggaggtctaaccattggctaccttctaaatttggaggggggtgatctggaacaggacaaatcctgtttaaaaattgggtaattagtagtcttgtcacttgaaagattaacattttgaatagccctcattacaaatgcaaactgcctttacaatgtstttctcacaataagtgcataattggatactgttttgttgtttgaaatgcttctttgagcctacttcaaaaagagtgcatttttttcatcagaatgaatgaatttagtttttgcttagtggcagtgtgttaaaattggttttgtcccttgtatagcttcaccttgtcggaggattgaaaaggtagaagggcctcatctcattttttttttttcttatacagtgcagcaaaaccaaaccgaacacatgatcttcacatagatcttacaataaatattaattagttcatgaatatttcatgat

SEQ ID NO: 89267 - DNA, 600 bp, Chicken  19866894395477_1
ataagatgaggaggaatggccccaagttgtgcctggggaaagagacagaaagagcagtgaggcagtggcacaggctgcccagggaggtggtggagtcactgtccctggaagtgtttatgaaatatttagatgttgcactgaggcacatggtttagtgacaaaatattggtggtaagcggacagatggactgaatgatcttggaggtcttttccaaccctggtgattctctgattccatgattttaactgctaaggcaaataaacatagactactacccttaaaggtaaatgacttacatraaaaccagttcacaaagagatttctcagatacttcccaaggcyatgtttgtcaaattcatgtaatttatgtaaaagaattctatccaaatggtacaatttgaaaataaaattcacatataatgaaattatgtaggacaggtatttaaatatacaatatattaagcttgggatatcttagaatattaaaaaaatccattagccttgcctgtctaatggaaaaccatttatgtacacaggtgctggtgttccatagctaattaaggactacctatttagcatgaagacacgaaagaggtttt

SEQ ID NO: 89268 - DNA, 600 bp, Chicken  19866894395477_2
gacagaaagagcagtgaggcagtggcacaggctgcccagggaggtggtggagtcactgtccctggaagtgtttatgaaatatttagatgttgcactgaggcacatggtttagtgacaaaatattggtggtaagcggacagatggactgaatgatcttggaggtcttttccaaccctggtgattctctgattccatgattttaactgctaaggcaaataaacatagactactacccttaaaggtaaatgacttacatraaaaccagttcacaaagagatttctcagatacttcccaaggcyatgtttgtcaaattcatgtaatttatgtaaaagaattctatccaaatggtacaatttgaaaataaaattcacatataatgaaattatgtaggacaggtatttaaatatacaatatattaagcttgggatatcttagaatattaaaaaaatccattagccttgcctgtctaatggaaaaccatttatgtacacaggtgctggtgttccatagctaattaaggactacctatttagcatgaagacacgaaagaggttttaaacagcgctgtgttgcacagtcagtcactggaagacaaacta

SEQ ID NO: 89269 - DNA, 599 bp, Chicken  19866894395484_1
  misc_feature (1)..(88): n is any nucleotide
nnnnnnnnnnnnnnnnnnnnnnnnnnnnnnnnnnnnnnnnnnnnnnnnnnnnnnnnnnnnnnnnnnnnnnnnnnnnnnnnnnnnnnnntttatttattgattctcaaaggacagatgtgcacagagacccaggcatagaggaaactaatttctccactggtgtaaatcagcatagcatcattagcatgaacgccatttaaaggagatttacacaagctgagaatccagcctcctaattttggaaagaaaatatgaaagactacgcagggtttcatattttttctgttctgtctcctgtgygattcatttattttccaatttaaaagcacatccggtatatttcctcgtgtaatttaaacacrcttcttgacagcgctgctcactccaaaggtcccttctggagctcgagatgggtgcactgtgtgctcaccgcttggmgaggccgctggtagctgggaggggatggtgagagtgatggaaaccctggggctgctgcaagggcacctgggctgggagcactgtgggcattcacagcccctgggtgagggtttcccagtgccaaaggctgaactcccgctgtgctccctgctcttggtcat

SEQ ID NO: 89270 - DNA, 599 bp, Chicken  19866894395484_2
  misc_feature (1)..(26): n is any nucleotide
nnnnnnnnnnnnnnnnnnnnnnnnnntttatttattgattctcaaaggacagatgtgcacagagacccaggcatagaggaaactaatttctccactggtgtaaatcagcatagcatcattagcatgaacgccatttaaaggagatttacacaagctgagaatccagcctcctaattttggaaagaaaatatgaaagactacgcagggtttcatattttttctgttctgtctcctgtgygattcatttattttccaatttaaaagcacatccggtatatttcctcgtgtaatttaaacacrcttcttgacagcgctgctcactccaaaggtcccttctggagctcgagatgggtgcactgtgtgctcaccgcttggmgaggccgctggtagctgggaggggatggtgagagtgatggaaaccctggggctgctgcaagggcacctgggctgggagcactgtgggcattcacagcccctgggtgagggtttcccagtgccaaaggctgaactcccgctgtgctccctgctcttggtcataccccctccagcagcaggtttagaacacgtgcaagctgttgggagcgcaccctctgagtgcc

SEQ ID NO: 89271 - DNA, 600 bp, Chicken  19866894395484_3
aggaaactaatttctccactggtgtaaatcagcatagcatcattagcatgaacgccatttaaaggagatttacacaagctgagaatccagcctcctaattttggaaagaaaatatgaaagactacgcagggtttcatattttttctgttctgtctcctgtgygattcatttattttccaatttaaaagcacatccggtatatttcctcgtgtaatttaaacacrcttcttgacagcgctgctcactccaaaggtcccttctggagctcgagatgggtgcactgtgtgctcaccgcttggmgaggccgctggtagctgggaggggatggtgagagtgatggaaaccctggggctgctgcaagggcacctgggctgggagcactgtgggcattcacagcccctgggtgagggtttcccagtgccaaaggctgaactcccgctgtgctccctgctcttggtcataccccctccagcagcaggtttagaacacgtgcaagctgttgggagcgcaccctctgagtgcccccaggtgcctggatctccccacaaggcgttgcgatatgggatggacacctcaatccttggctgctcctcgttgcag

SEQ ID NO: 89272 - DNA, 600 bp, Chicken  19866894395487_1
cttttggccagagtgctgccaggattcagccaacaaatcagtcttcagttcctgagccacccaggccacgtagatatctgtgggatagcagaggatgggagaagtcagcccttcgttttccttcatttaagaaggaaccaaaaaggatcacctaaactgggctaacttcgctccgatgcctgaagtgaaccagaagagattttgcccccagctcccccttattttgacttttatttcctaaattcattcttgttttcccttcttttcctggaaaacttgttagaaataatcaataggaartaaaggaaaagggaaaaaaaaaaaaaaaaagcaaaactcagttcttcataacaaaataaaagcagatgattcaaacctcatttttgttctttgttgctacagttgaataacaggatagaaaatttctgacaaccccattaacgtgcattgtaagacgtttgaaagatcagatagctttttactttgtggggctgacagaatgacagaagaccattccccactctgctacatttatttctgaagctgaaattctttccttcccctcaaagaaaatattgtcaaaggatatacggagtgccc

SEQ ID NO: 89273 - DNA, 600 bp, Chicken  19866894395487_2
gctgccaggattcagccaacaaatcagtcttcagttcctgagccacccaggccacgtagatatctgtgggatagcagaggatgggagaagtcagcccttcgttttccttcatttaagaaggaaccaaaaaggatcacctaaactgggctaacttcgctccgatgcctgaagtgaaccagaagagattttgcccccagctcccccttattttgacttttatttcctaaattcattcttgttttcccttcttttcctggaaaacttgttagaaataatcaataggaartaaaggaaaagggraaaaaaaaaaaaaaaagcaaaactcagttcttcataacaaaataaaagcagatgattcaaacctcatttttgttctttgttgctacagttgaataacaggatagaaaatttctgacaaccccattaacgtgcattgtaagacgtttgaaagatcagatagctttttactttgtggggctgacagaatgacagaagaccattccccactctgctacatttatttctgaagctgaaattctttccttcccctcaaagaaaatattgtcaaaggatatacggagtgcccactgcatgtttgaa

SEQ ID NO: 89274 - DNA, 600 bp, Chicken  19866894395487_3; identical to SEQ ID NO: 89273

SEQ ID NO: 89275 - DNA, 600 bp, Chicken  19866894395494_1
agcatatatatatatctatatatttgagtttcggtggatttccattttccagccagctctctctgcagtgccgttcttgcagcagcgtatgacttttttttcccctcaggaaattttctaataccaatttaattttgactctcacaactgcatctattctgcagggaatgcgcgctgcgctcccgccaaggaagtgttccctcttagcaccaagttcattttccagcttaaaaacatcattcagtcattcctaatgaaaggtataatcaactttcaggcttcatggcttagctgagcccstaatggggatggggaacccattccagcagtggcttagcctgcctttccctcattgcagggtgtgctcacagcttgcagwgagttgcactgggtgagatggcacccagagaatgcagcctgtgcagggctgtgcatgtgtgggtgcagcattcatgtgagtgcaatgcatgagttgattcctcgatttgtggcctttgcagcctgcggggtttgcattattccagccccaagctgaggcttttgggcattgctgcacacaatgctttggggccgctgggcacgcagctttgctttgctttg

SEQ ID NO: 89276 - DNA, 596 bp, Chicken  19866894395494_2
cagcagcgtatgacttttttttcccctcaggaaattttctaataccaatttaattttgactctcacaactgcatctattctgcagggaatgcgcgctgcgctcccgccaaggaagtgttccctcttagcaccaagttcattttccagcttaaaaacatcattcagtcattcctaatgaaaggtataatcaactttcaggcttcatggcttagctgagcccstaatggggatggggaacccattccagcagtggcttagcctgcctttccctcattgcagggtgtgctcacagcttgcagwgagttgcactgggtgagatggcacccagagaatgcagcctgtgcagggctgtgcatgtgtgggtgcagcattcatgtgagtgcaatgcatgagttgattcctcgatttgtggcctttgcagcctgcggggtttgcattattccagccccaagctgaggcttttgggcattgctgcacacaatgctttggggccgctgggcacgcagctttgctttgctttgctgcacgacatctgcaggcaatgggtcagctgagcttttgttttcttccctcggaataacgagaaagaagaaaaa

SEQ ID NO: 89277 - DNA, 600 bp, Chicken  19866894395497_1
ttaactaaagagggcgatgtgtgttccaattcattactctcctcataatccataacaccgtacagataagatatcccatgatacaatgtcagcttactaataagcataaaaagggggtttgttttgtttgttatagtttgtttttaatgttgtttgttttcaacaacataatcaaaacatgctgttttgatctcaaaggctggtagataacttgccaaactggcttccctgttctccaaagtccaaaacaaggttctacaattgattctctaccctgatctgcttgcagttggtagatasgctcaggtacatcaatcccacgcatgcaggaattacacctttrtaagatgcactagtgaggatctgtgacttgacagcttcttaaatcacctctctgctrgcatgggccataggagcataccttgtctctttcagagaaagtcagcaggcccacgtaaagcctctcaccaagagcatacagttcacaggccattttaaaggctgctcctttttgtttcccagccgttagttaacaccttccagctgagccccagtaactggctgtgtaagcacttctagtcagttctagggcagcaccaa

SEQ ID NO: 89278 - DNA, 600 bp, Chicken  19866894395497_2
cataatccataacaccgtacagataagatatcccatgatacaatgtcagcttactaataagcataaaaagggggtttgttttgtttgttatagtttgtttttaatgttgtttgttttcaacaacataatcaaaacatgctgttttgatctcaaaggctggtagataacttgccaaactggcttccctgttctccaaagtccaaaacaaggttctacaattgattctctaccctgatctgcttgcagttggtagatasgctcaggtacatcaatcccacgcatgcaggaattacacctttrtaagatgcactagtgaggatctgtgacttgacagcttcttaaatcacctctctgctrgcatgggccataggagcataccttgtctctttcagagaaagtcagcaggcccacgtaaagcctctcaccaagagcatacagttcacaggccattttaaaggctgctcctttttgtttcccagccgttagttaacaccttccagctgagccccagtaactggctgtgtaagcacttctagtcagttctagggcagcaccaaacaagtcggttcaaaccactgccagatggctcagctaacttgt

SEQ ID NO: 89279 - DNA, 600 bp, Chicken  19866894395497_3
taagcataaaaagggggtttgttttgtttgttatagtttgtttttaatgttgtttgttttcaacaacataatcaaaacatgctgttttgatctcaaaggctggtagataacttgccaaactggcttccctgttctccaaagtccaaaacaaggttctacaattgattctctaccctgatctgcttgcagttggtagatasgctcaggtacatcaatcccacgcatgcaggaattacacctttrtaagatgcactagtgaggatctgtgacttgacagcttcttaaatcacctctctgctrgcatgggccataggagcataccttgtctctttcagagaaagtcagcaggcccacgtaaagcctctcaccaagagcatacagttcacaggccattttaaaggctgctcctttttgtttcccagccgttagttaacaccttccagctgagccccagtaactggctgtgtaagcacttctagtcagttctagggcagcaccaaacaagtcggttcaaaccactgccagatggctcagctaacttgtttgattttgtcctggaagagtcaaaagtgctcacaggtcatgaagagttgagaggga

SEQ ID NO: 89280 - DNA, 599 bp, Chicken  19866894395500_1
  misc_feature (1)..(52): n is any nucleotide
nnnnnnnnnnnnnnnnnnnnnnnnnnnnnnnnnnnnnnnnnnnnnnnnnnnncacccttgccataggctggctgctcagggcacagtgcaaggaaacactgctgtgctggtaaagggaaaacagttttcctacttcatgttcagttgcagtggagagagacttcccctagtccatgcagtggttttctcactgctgacctgtggttaagcagagctgcaacagggggccaggaaacgtcctcccttgctgcttgcttttagccagtgtgactgctgttataatgcactgatggtctcctstgtgtgtgtgtgtgcgcrtatatatttgtttcctttaaagtgctgtaaaatggaccaaccaacagtacttgagaagtttgcaacagacagaataggcagctttcagatgtaagcttcaattagcttctcactgctactaattatgtagatgatgcagagctgtgcaggcttctgcacacactggtcccctgtgcccctgggtcccttcacccagcgaaggctttgtggccaaaactccaagcrtggcagggytgaggggcagctgctctgggctgaccttgagacaaatgccacttgag

SEQ ID NO: 89281 - DNA, 599 bp, Chicken  19866894395500_2
  misc_feature (1)..(34): n is any nucleotide
nnnnnnnnnnnnnnnnnnnnnnnnnnnnnnnnnncacccttgccataggctggctgctcagggcacagtgcaaggaaacactgctgtgctggtaaagggaaaacagttttcctacttcatgttcagttgcagtggagagagacttcccctagtccatgcagtggttttctcactgctgacctgtggttaagcagagctgcaacagggggccaggaaacgtcctcccttgctgcttgcttttagccagtgtgactgctgttataatgcactgatggtctcctstgtgtgtgtgtgtgcgcrtatatatttgtttcctttaaagtgctgtaaaatggaccaaccaacagtacttgagaagtttgcaacagacagaataggcagctttcagatgtaagcttcaattagcttctcactgctactaattatgtagatgatgcagagctgtgcaggcttctgcacacactggtcccctgtgcccctgggtcccttcacccagcgaaggctttgtggccaaaactccaagcrtggcagggytgaggggcagctgctctgggctgaccttgagacaaatgccacttgaggcagacctcagctcagga

SEQ ID NO: 89282 - DNA, 600 bp, Chicken  19866894395500_3
cttgctgcttgcttttagccagtgtgactgctgttataatgcactgatggtctcctstgtgtgtgtgtgtgcgcrtatatatttgtttcctttaaagtgctgtaaaatggaccaaccaacagtacttgagaagtttgcaacagacagaataggcagctttcagatgtaagcttcaattagcttctcactgctactaattatgtagatgatgcagagctgtgcaggcttctgcacacactggtcccctgtgcccctgggtcccttcacccagcgaaggctttgtggccaaaactccaagcrtggcagggytgaggggcagctgctctgggctgaccttgagacaaatgccacttgaggcagacctcagctcaggaaaattgamttgtgcaaaagtgtaagaaaaaagctgcaaaacaagccatgtcgaaccaaggtgtgaaatggtggcagtttgagtggtaggcgataggactagacctgcttgtgcaaacctatcrgcttcctgctgtctgtggcattactgtgtgcctttattcacccacagccaaaccactgagcgctttgtttcctcccaggtatcccctgtggtgagaggaagag

SEQ ID NO: 89283 - DNA, 600 bp, Chicken  19866894395500_4
tgcttttagccagtgtgactgctgttataatgcactgatggtctcctstgtgtgtgtgtgtgcgcrtatatatttgtttcctttaaagtgctgtaaaatggaccaaccaacagtacttgagaagtttgcaacagacagaataggcagctttcagatgtaagcttcaattagcttctcactgctactaattatgtagatgatgcagagctgtgcaggcttctgcacacactggtcccctgtgcccctgggtcccttcacccagcgaaggctttgtggccaaaactccaagcrtggcagggytgaggggcagctgctctgggctgaccttgagacaaatgccacttgaggcagacctcagctcaggaaaattgamttgtgcaaaagtgtaagaaaaaagctgcaaaacaagccatgtcgaaccaaggtgtgaaatggtggcagtttgagtggtaggcgataggactagacctgcttgtgcaaacctatcrgcttcctgctgtctgtggcattactgtgtgcctttattcacccacagccaaaccactgagcgctttgtttcctcccaggtatcccctgtggtgagaggaagaggtgagtgag

SEQ ID NO: 89284 - DNA, 600 bp, Chicken  19866894395500_5
ttgtttcctttaaagtgctgtaaaatggaccaaccaacagtacttgagaagtttgcaacagacagaataggcagctttcagatgtaagcttcaattagcttctcactgctactaattatgtagatgatgcagagctgtgcaggcttctgcacacactggtcccctgtgcccctgggtcccttcacccagcgaaggctttgtggccaaaactccaagcrtggcagggytgaggggcagctgctctgggctgaccttgagacaaatgccacttgaggcagacctcagctcaggaaaattgamttgtgcaaaagtgtaagaaaaaagctgcaaaacaagccatgtcgaaccaaggtgtgaaatggtggcagtttgagtggtaggcgataggactagacctgcttgtgcaaacctatcrgcttcctgctgtctgtggcattactgtgtgcctttattcacccacagccaaaccactgagcgctttgtttcctcccaggtatcccctgtggtgagaggaagaggtgagtgaggtcaggcaaaatgaaatggaaatcatgaaagcttaatagaccacggggaggttcttttgaagggatgccagag

SEQ ID NO: 89285 - DNA, 600 bp, Chicken  19866894395500_6
ttatgtagatgatgcagagctgtgcaggcttctgcacacactggtcccctgtgcccctgggtcccttcacccagcgaaggctttgtggccaaaactccaagcrtggcagggytgaggggcagctgctctgggctgaccttgagacaaatgccacttgaggcagacctcagctcaggaaaattgamttgtgcaaaagtgtaagaaaaaagctgcaaaacaagccatgtcgaaccaaggtgtgaaatggtggcagtttgagtggtaggcgataggactagacctgcttgtgcaaacctatcrgcttcctgctgtctgtggcattactgtgtgcctttattcacccacagccaaaccactgagcgctttgtttcctcccaggtatcccctgtggtgagaggaagaggtgagtgaggtcaggcaaaatgaaatggaaatcatgaaagcttaatagaccacggggaggttcttttgaagggatgccagagatggaatatcagctctggggaagaagaccacagagctggcagtgaatgagaggagatgtggtacatgcgcatcagtttcatgctccttgctgtgatctgctctcctggttaactc

SEQ ID NO: 89286 - DNA, 600 bp, Chicken  19866894395505_1
aaataatttaaagtcttgtccacatctcctttcaaaatagcctgactcaacatagggttcatctgacccagcttggctcttcccaacctgtgaagataacagatttctgcttttcttgatggtccttctccacaccaccaactacagaacttgtttagatagaaagcatcacctctcacagtgattgtatccttggaatataaactttatatagataaactatattaagggtcagattctgctgcctgaaacttttggtgctatctcaagatggatggaatctttccagatttaagagcsttctactttggatgagacgtcaaacattagatgacagagcctgatggtgagagggaaccataagaacaagtgactgctggaaaatgctttacaaagcaaaggactgaatgtttctacagtttttctgttgaagaaattgaagcttttagtgctgctctctgcaaactctcatgagtttgcatgagtgtgawtttgtttcttatattctatcataatctatcactaagaaaaaaatgtgttttccacttaaaacactagcttttaggaaatatgtatgtgtgagcttttctaacttttttt

SEQ ID NO: 89287 - DNA, 600 bp, Chicken  19866894395505_2
cttggaatataaactttatatagataaactatattaagggtcagattctgctgcctgaaacttttggtgctatctcaagatggatggaatctttccagatttaagagcsttctactttggatgagacgtcaaacattagatgacagagcctgatggtgagagggaaccataagaacaagtgactgctggaaaatgctttacaaagcaaaggactgaatgtttctacagtttttctgttgaagaaattgaagcttttagtgctgctctctgcaaactctcatgagtttgcatgagtgtgawtttgtttcttatattctatcataatctatcactaagaaaaaaatgtgttttccacttaaaacactagcttttaggaaatatgtatgtgtgagcttttctaactttttttttttccccagtaatcatctttcttactgcatttggactaggtgtctattcaagcttctggattttcctcacactgaaagcacgcacattacaaatttatttcttgagccatttgagccatatatcttggaaaacacttttatccaggtgccagagtgtggctgaaggaacagcacatagaaatgagtgtag

SEQ ID NO: 89288 - DNA, 600 bp, Chicken  19866894395521_1
cctctgagtccagaagagacagtcctgcaggctaccatctgctcctcttaactttcagggccaacactgcactggaaatcccttccagcaagggacctggctagaccaaggagccactgctacagtgtgtccagtgggatggcattttggctgtttccaaacagacactgagggactttggaaggtgataagaggaacaatactgcccagctttgcgtcttcctggatgtctgtgtctaagctgtttccctagacaggtctgatgaagatgaggaagcactttctgtgtgtactttgccwgggctgctacaggactcttgctcagggagtcatatcacagcaatgtctgtgtccagcctctagtggagggctgttcagctgccatctgacaaggtgaccaaaaggtgtcacactctgacagtgctgtaaagtctgtctgagtgtgaagtactcagaaactagagatggtgtgtccaaaataaagaagttgcctcatggacccttgatgccaggccagcagtgctgatgggcctggggctggcaatggatgtatatgcactcaccaggcatccaaggccaggcattgtctaactgtggatc

SEQ ID NO: 89289 - DNA, 599 bp, Chicken  19866894395539_1
  misc_feature (1)..(116): n is any nucleotide
nnnnnnnnnnnnnnnnnnnnnnnnnnnnnnnnnnnnnnnnnnnnnnnnnnnnnnnnnnnnnnnnnnnnnnnnnnnnnnnnnnnnnnnnnnnnnnnnnnnnnnnnnnnnnnnnnnnngctgaaactaaggcacattgcatattattgatgaacaaataaaccattaaatgtttactgtgacatgtaatagaagcattaatagatcaatagggccaatcaaggataattttcttattaattagattagcagtgttggagtgagtccagagaaaggccatggggatatttagagggctagagmacctgccatattaagacaggatgagagaggttgctcattacagagaacagaaggctccagggagatattatattatctaaaagtggcttataagaatgtgggactctttaccaagtagtgataagacaaatggtaatggctttgtttaaaacaggtttagattatatattaggaagaagttcttttctatgattcttagaatcacagtatcaaggtatgaaaacacctctaagatcatctagtagtccaaccaccaacacatcacaccatgcccaccaaatcatgtcattcagtgcccc

SEQ ID NO: 89290 - DNA, 600 bp, Chicken  19866894395539_2
tagtccaaccaccaacacatcacaccatgcccaccaaatcatgtcattcagtgccccatctgtgattttatttaacacttccagggacagtgtctctactactcccctgaacagactgttccaatacatcactgctcattctgagaaaaaagttttcctactatccagcctgaaccttcactggtgcaacttaaagtcattacctctcatcctttcactagctccttgggagaaaaggcctacccccacctcattacaaccttctttcaggtacttctaggtcatgacaagatatccccygagcctcctcttttccagactaaacaatcccaattccctcaactgctccttgtaagacttatgtttcagatccttccctagtttaactgccctttctttggacatgtgttgatgtgaggtcctgggcaagataagagagccccaggctgggcagcgatagtctgagctggtggtcatgacagtcttccagcacttgtaattcactaagcatcttcaatgacagatgaaagagaacatattatgtgtgtattctcaatggccttaacgtaggaaacagaacttttcaaaatatttattatt

SEQ ID NO: 89291 - DNA, 600 bp, Chicken  19866894395550_1
aacgcccaccatcgacagctctaggagacagaggattgtaagagcacagcagtcaaactagagggaaagaaacacatttacaacattaataaatctctgtattttatgggactgggattaattttctctggcatacaagtggcagttctgttctcctttccatgccaatagaaaaatgcaagcattaattagatgttcactacttccaagagtcacagggagacagggcaagcttaaatttttatgaccagtagatgctgaaggctgctgggaatgtctgctaggtttgtagaaaccgcwtgtgctgaggcgcagtgtttcactggggaggagttgcattggatgacctgtgttttgtgagcctttttgaagagcactggagctcttgcatgtgttgcatatgcagaactgaggagttcacaaactacttgtcatgtgtttgcatatgagtagcaggaaaaagagaaaggaagtacaaagccaccttacttctctagatttgtgatctgcccattaaaccctttgccttcagagctcccactttcatttgttgtaagcctttctcaatgaaaaatctctcatagcagctccttggctcaa

SEQ ID NO: 89292 - DNA, 600 bp, Chicken  19866894395560_1
aaggacatcagtcatttacccatctggtggaaagtctagttgctggcagaaaatagacaagattgttatggcaagatccaccatatggcaccattatgcagagctttgcaagtgctttctctgagcatgcaagcaagattttagcctttgaagaaacgccgtattgtcagcctagatacacaggagccttttgaaagaagctgtggcagatggctcagctttgttccctgtgttcgaaggcagctcgtcaggaggtggacgtccccccccaggggcacaagggacgggcagccccagcaytgcctcccagggccggtcactctgaggatgcatgcatgccaccacatgccatggcatgctgaacatcctgatggaggaccaggggttgctggaggtgtagaaatagcctaaatccaacgggtgctgccgcaggtaccacactctgcaagccctgcccaaccctggtgggacgcagtggtggcaatgaaagaagagcagcacaaaaccatcaagtctcatyccagcaaagagagctgcaaaacaataaattttgctggaatactctgcttttgtcagtgactccataccagcacctgctcc

SEQ ID NO: 89293 - DNA, 600 bp, Chicken  19866894395560_2
ttgttccctgtgttcgaaggcagctcgtcaggaggtggacgtccccccccaggggcacaagggacgggcagccccagcaytgcctcccagggccggtcactctgaggatgcatgcatgccaccacatgccatggcatgctgaacatcctgatggaggaccaggggttgctggaggtgtagaaatagcctaaatccaacgggtgctgccgcaggtaccacactctgcaagccctgcccaaccctggtgggacgcagtggtggcaatgaaagaagagcagcacaaaaccatcaagtctcatyccagcaaagagagctgcaaaacaataaattttgctggaatactctgcttttgtcagtgactccataccagcacctgctcctccctgggtggctgagcctggccggagccccagcaggacataggacaaaaggaagcctttcaaatgaggccggcgcccgcttgagcgacatcccaacaatacccccacgaaagcccattcaactctggtgagggggaaaggaagggaaagggggaaaagttgctccgggaggaaacagtaatcattcactgaccacagcaacagcatttccatgtgctcg

SEQ ID NO: 89294 - DNA, 497 bp, Chicken  19866894395588_1
aggataacaagcagcttggggacttccctcccacctactcacaaagaagaggagctatgactgctccgtgacctccagcagcccccgccttccccagcccaccactcccatgtccggcacaagccactcactccttggtgactcagcgctggcgtgtgctggataggaaccgtgatggcagcctggaaaagcctcctacagctttagagagacgagaagtgcatttaggggtgctaaggcccaatttggggacatccaaggcagccactgctggttacccagcagcctccatgtccaacragtgccaccactcagcccctccgactccgttgcgccctaagatctgtgtttccacgtgaatactaataaactgcagatgttattgctcatgtcctttcaggtacaagaaccagcagggccattcactcctccttcccgagccagcaccttaaaaaatactttagctccaggtacagagaggtctatttactaaaaaa

SEQ ID NO: 89295 - DNA, 600 bp, Chicken  19866894395589_1
aataagaagaaagcaaatggaatattaaaaatcaggtttacaccaaggtttgtgctattcatttcagccagaagttctgcttacaaatcaatgttctcaagaaatttgataggctgcaaagccagaagtcatttcctacagaaagaagttttagtaaagcaattaggatgcattcatagctagagaaaaatttcattgtgccttgccaatgattattgccagaaaaattcaatgagtttgcatctagtattgcaaaactcagatcaagatgttgaataaggcaaacctgccatgcctcaygattttagggctttgcacattgctgagcaatgtgagggtactgataaactggaactcccaaaagagaagtcttggggttcctgactgcctggcaaatacagacaccatctcaaactgaagtgccttgctttgtcatgtgttactttttacttggtcatttaatcctttctgttcttaaacaccracatgctgaaagcatgcttgtgctatggggagagatacagagtcacgctgatagctgttctaatgaagggcctttcagttttagcatttttctaagtgccaasaggcccacagaaa

SEQ ID NO: 89296 - DNA, 600 bp, Chicken  19866894395589_2
gaaaaatttcattgtgccttgccaatgattattgccagaaaaattcaatgagtttgcatctagtattgcaaaactcagatcaagatgttgaataaggcaaacctgccatgcctcaygattttagggctttgcacattgctgagcaatgtgagggtactgataaactggaactcccaaaagagaagtcttggggttcctgactgcctggcaaatacagacaccatctcaaactgaagtgccttgctttgtcatgtgttactttttacttggtcatttaatcctttctgttcttaaacaccracatgctgaaagcatgcttgtgctatggggagagatacagagtcacgctgatagctgttctaatgaagggcctttcagttttagcatttttctaagtgccaasaggcccacagaaatgggagaagcaaacctacaataaactggccttgtctactttattgaagtaaatacataatttaatacaaaaactttattttgaatagaaaatgtgcttgttcttttatggtttgtaaaatcatttcaaagttaccattgtctaatagttaacaaaataattattctgaagtgaggaagcagaat

SEQ ID NO: 89297 - DNA, 600 bp, Chicken  19866894395589_3
tgccatgcctcaygattttagggctttgcacattgctgagcaatgtgagggtactgataaactggaactcccaaaagagaagtcttggggttcctgactgcctggcaaatacagacaccatctcaaactgaagtgccttgctttgtcatgtgttactttttacttggtcatttaatcctttctgttcttaaacaccracatgctgaaagcatgcttgtgctatggggagagatacagagtcacgctgatagctgttctaatgaagggcctttcagttttagcatttttctaagtgccaasaggcccacagaaatgggagaagcaaacctacaataaactggccttgtctactttattgaagtaaatacataatttaatacaaaaactttattttgaatagaaaatgtgcttgttcttttatggtttgtaaaatcatttcaaagttaccattgtctaatagttaacaaaataattattctgaagtgaggaagcagaatatttcagccacacatagcagagaaataaggaactgtgaaaaccaccacgcattacacacagcagtcagaccagaaactcagaaaacaaatgaccgtgtttaaa

SEQ ID NO: 89298 - DNA, 599 bp, Chicken  19866894395591_1
  misc_feature (1)..(185): n is any nucleotide
nnnnnnnnnnnnnnnnnnnnnnnnnnnnnnnnnnnnnnnnnnnnnnnnnnnnnnnnnnnnnnnnnnnnnnnnnnnnnnnnnnnnnnnnnnnnnnnnnnnnnnnnnnnnnnnnnnnnnnnnnnnnnnnnnnnnnnnnnnnnnnnnnnnnnnnnnnnnnnnnnnnnnnnnnnnnnnnnnnnnnnnnnttactgtctttttttttttaactgtaagctttgtaatgtattttcttagctccgtttctgttttctgtttcaatatatggtggttggatgaaaatagagaggaatgatatcctgraagtaccttgaagtgtagctggaaaatgagagcagtaactcctctgccttggtcaaggagccacgaagtggctgatggttgctgttggttgctgaagaacattgccacttcctctgtgggcaaagtacttcacaattaccacctgaagactgtttgctgtttagggtggcatttctgcagttggtcacagctggtaactagatcccaaatgctgggtttatgctgtgatcttgtcttgtggtgctgttgttgctccgggtaacagcactggacattgctttgtcactgcaagttataaa

SEQ ID NO: 89299 - DNA, 600 bp, Chicken  19866894395592_1
gtaataacgaaattgcagggcatgatgtgtattacaggatcaaagagaagagactaagttgtgaaatacggagataaatataggcagaagaagattaaaacagagaattagtgatcagaagcttctgggaagagagattgtggagggctctttatagaaattgtagaaagcaaaaaggagagaaaacaataaaagagagacatttatttatgcatgaaaagaatgggagacctgataaacacttgacgttagctgttctttgagaagtgctttgcattccctttttgagttcagcacacyaagattatagcagttaaaaccctgtgaaatgaagtctgaattaatgagttcggaataaatatgacttttaatgattgtggggtgttttcttagcttgttgcaggtcactggaagagcttttcttgaaggagcaggcaggcagagattccatctcagggaccccagaagaagaggaaagtatctctgaggtggtagcaatcatagcaggagtacaattactgtacaaagctgtagcctcttagtttatctcccggagggtattttacatatatcagcacaacaaagaggcctcttccaaat

SEQ ID NO: 89300 - DNA, 599 bp, Chicken  19866894395601_1
  misc_feature (1)..(120): n is any nucleotide
nnnnnnnnnnnnnnnnnnnnnnnnnnnnnnnnnnnnnnnnnnnnnnnnnnnnnnnnnnnnnnnnnnnnnnnnnnnnnnnnnnnnnnnnnnnnnnnnnnnnnnnnnnnnnnnnnnnnnnnncccctccctgcccccgcccccccccccagtgagcccatgcagcactcaaaggatatttctctcagtcaggctctgcaggatggccacggtgtttgtctggaactgcaccaacgcctcacactcacatgggctgcggatctccgtctctcctctgccctcctctgtgttggagggatttgrggatgctcagggcacgctcagcaggccctgctcacaccytccccaacacaagtcccttatccttgcagtcyttttgcattaaccccatctccagcttcccttcmaaatccctccctgaaccccacttcactatttacgacagtgggatgggatcaggggaggattacaccggccatcttggccctgtggaagcacccagctcaggttggtgcctctgactgcccctcccagcaccatcccgatggatgtgccgtgagctgatgggctctgtgggcggaggcaggctgctggctgggaca

SEQ ID NO: 89301 - DNA, 599 bp, Chicken  19866894395601_2
  misc_feature (1)..(81): n is any nucleotide
nnnnnnnnnnnnnnnnnnnnnnnnnnnnnnnnnnnnnnnnnnnnnnnnnnnnnnnnnnnnnnnnnnnnnnnnnnnnnnnnncccctccctgcccccgcccccccccccagtgagcccatgcagcactcaaaggatatttctctcagtcaggctctgcaggatggccacggtgtttgtctggaactgcaccaacgcctcacactcacatgggctgcggatctccgtctctcctctgccctcctctgtgttggagggatttgrggatgctcagggcacgctcagcaggccctgctcacaccytccccaacacaagtcccttatccttgcagtcyttttgcattaaccccatctccagcttcccttcmaaatccctccctgaaccccacttcactatttacgacagtgggatgggatcaggggaggattacaccggccatcttggccctgtggaagcacccagctcaggttggtgcctctgactgcccctcccagcaccatcccgatggatgtgccgtgagctgatgggctctgtgggcggaggcaggctgctggctgggacacccacctgggcagatgtttagcttgaagttctccacgag

SEQ ID NO: 89302 - DNA, 599 bp, Chicken  19866894395601_3
  misc_feature (1)..(49): n is any nucleotide
nnnnnnnnnnnnnnnnnnnnnnnnnnnnnnnnnnnnnnnnnnnnnnnnncccctccctgcccccgcccccccccccagtgagcccatgcagcactcaaaggatatttctctcagtcaggctctgcaggatggccacggtgtttgtctggaactgcaccaacgcctcacactcacatgggctgcggatctccgtctctcctctgccctcctctgtgttggagggatttgrggatgctcagggcacgctcagcaggccctgctcacaccytccccaacacaagtcccttatccttgcagtcyttttgcattaaccccatctccagcttcccttcmaaatccctccctgaaccccacttcactatttacgacagtgggatgggatcaggggaggattacaccggccatcttggccctgtggaagcacccagctcaggttggtgcctctgactgcccctcccagcaccatcccgatggatgtgccgtgagctgatgggctctgtgggcggaggcaggctgctggctgggacacccacctgggcagatgtttagcttgaagttctccacgaggtgggtcatggtggtgaagtctgctgagtagg

SEQ ID NO: 89303 - DNA, 599 bp, Chicken  19866894395601_4
  misc_feature (1)..(16): n is any nucleotide
nnnnnnnnnnnnnnnncccctccctgcccccgcccccccccccagtgagcccatgcagcactcaaaggatatttctctcagtcaggctctgcaggatggccacggtgtttgtctggaactgcaccaacgcctcacactcacatgggctgcggatctccgtctctcctctgccctcctctgtgttggagggatttgrggatgctcagggcacgctcagcaggccctgctcacaccytccccaacacaagtcccttatccttgcagtcyttttgcattaaccccatctccagcttcccttcmaaatccctccctgaaccccacttcactatttacgacagtgggatgggatcaggggaggattacaccggccatcttggccctgtggaagcacccagctcaggttggtgcctctgactgcccctcccagcaccatcccgatggatgtgccgtgagctgatgggctctgtgggcggaggcaggctgctggctgggacacccacctgggcagatgtttagcttgaagttctccacgaggtgggtcatggtggtgaagtctgctgagtaggagaagtgctgctccaccggctcagaggcgatgg

SEQ ID NO: 89304 - DNA, 599 bp, Chicken  19866894395602_1
  misc_feature (1)..(46): n is any nucleotide
nnnnnnnnnnnnnnnnnnnnnnnnnnnnnnnnnnnnnnnnnnnnnncttttgatctcctctccagtcccagcacatgaaggtaagactgatgatttttccttggtgccagaataaagactgatgtaaacttcctgaaggaggttcctgcagatggtctgtcccttggccaccaaagccacatgctgcagtttctcagaacattggctggaggcaaactaacccagcacatgagcagtcgctaagtacttggacttgtttcttctattatcaactctctgacccttcaaagtagcttctcygacagactgataagagtcacctatcaataatttttcaaatgacacgttaaggagaaacaaacaagaaaaaacgaaacaggaaagaaggcctagaaatgtctccaaatyttctggctttaaatatagtcaaagagacagactaagaagtgtgacaattgaatgcaacggtgctgacaatgtaaaaaacagacagaaaagctactttccttgttccagttgatttactggtgagttgaatggctccaagtacttaccacctacctgttaagagagagaccttggaagactagctctgcagc

SEQ ID NO: 89305 - DNA, 600 bp, Chicken  19866894395602_2
agaataaagactgatgtaaacttcctgaaggaggttcctgcagatggtctgtcccttggccaccaaagccacatgctgcagtttctcagaacattggctggaggcaaactaacccagcacatgagcagtcgctaagtacttggacttgtttcttctattatcaactctctgacccttcaaagtagcttctcygacagactgataagagtcacctatcaataatttttcaaatgacacgttaaggagaaacaaacaagaaaaaacgaaacaggaaagaaggcctagaaatgtctccaaatyttctggctttaaatatagtcaaagagacagactaagaagtgtgacaattgaatgcaacggtgctgacaatgtaaaaaacagacagaaaagctactttccttgttccagttgatttactggtgagttgaatggctccaagtacttaccacctacctgttaagagagagaccttggaagactagctctgcagcagagccccaaactggcctgtcacaaatttattattatccacaaaactcaaagatgtggcaaaggtgctctagatacaaacagcactcttattttatggattccccaaag

SEQ ID NO: 89306 - DNA, 600 bp, Chicken  19866894395606_1
aagttgagttcaagctgggcttttgcctttctaattttctccctgcatatcctaataacttacatgcactctccccaagttgcctgtcccttcttccacaaaaggtagattctcttctggagcttcaggaaaacctccctgttcatccatgctggtcttcttccccaccggctcatcttgtggcacagggagacagcctgttcctgcatccttaagacttctttcttgaggagcatcctgccttcctggacctctttacccttcaggactgaatcccaagggaccctccctaccagagtmctaaacagttcaaagtctgccctctggaagtccaaggttttgatggccccctcttgaaaagaggccagttttgcttgcccctttagcagcctgatgatgattgcagaccttctgccctgcagggctatatttagatatctttctttcttagtaacactatcaggggacaagcaaattaggaagtttagaggtgattactctcagaagcctgatcagatwaaaaaatgtgccctccggctctgcatgcctgaagtccagtgttagtaacagcaaatatggaccaataggcatartacaaat

SEQ ID NO: 89307 - DNA, 600 bp, Chicken  19866894395606_2
tctttcttgaggagcatcctgccttcctggacctctttacccttcaggactgaatcccaagggaccctccctaccagagtmctaaacagttcaaagtctgccctctggaagtccaaggttttgatggccccctcttgaaaagaggccagttttgcttgcccctttagcagcctgatgatgattgcagaccttctgccctgcagggctatatttagatatctttctttcttagtaacactatcaggggacaagcaaattaggaagtttagaggtgattactctcagaagcctgatcagatwaaaaaatgtgccctccggctctgcatgcctgaagtccagtgttagtaacagcaaatatggaccaataggcatartacaaataatwaaaaaaaagcaccaatgaggtctggctttgttttgttaatctagggaaactgtactcagacatcgtcttcgtactggtgtaaaatgggtgtaaactgagagcagaacgaagccttgtgagtcttgatcttcatgcaagaaaggttgttcaagaggagctccttcctgaaatcagaggaaagtcattgtattgcttggcacctgcccaaagtgatt

SEQ ID NO: 89308 - DNA, 600 bp, Chicken  19866894395606_3
cagagtmctaaacagttcaaagtctgccctctggaagtccaaggttttgatggccccctcttgaaaagaggccagttttgcttgcccctttagcagcctgatgatgattgcagaccttctgccctgcagggctatatttagatatctttctttcttagtaacactatcaggggacaagcaaattaggaagtttagaggtgattactctcagaagcctgatcagatwaaaaaatgtgccctccggctctgcatgcctgaagtccagtgttagtaacagcaaatatggaccaataggcatartacaaataatwaaaaaaaagcaccaatgaggtctggctttgttttgttaatctagggaaactgtactcagacatcgtcttcgtactggtgtaaaatgggtgtaaactgagagcagaacgaagccttgtgagtcttgatcttcatgcaagaaaggttgttcaagaggagctccttcctgaaatcagaggaaagtcattgtattgcttggcacctgcccaaagtgatttcattttctgttggggattaagatgcattaatagcctgaggacagcattttccttgccaaaaatgtctttcttc

SEQ ID NO: 89309 - DNA, 600 bp, Chicken  19866894395606_4
acagttcaaagtctgccctctggaagtccaaggttttgatggccccctcttgaaaagaggccagttttgcttgcccctttagcagcctgatgatgattgcagaccttctgccctgcagggctatatttagatatctttctttcttagtaacactatcaggggacaagcaaattaggaagtttagaggtgattactctcagaagcctgatcagatwaaaaaatgtgccctccggctctgcatgcctgaagtccagtgttagtaacagcaaatatggaccaataggcatartacaaataatwaaaaaaaagcaccaatgaggtctggctttgttttgttaatctagggaaactgtactcagacatcgtcttcgtactggtgtaaaatgggtgtaaactgagagcagaacgaagccttgtgagtcttgatcttcatgcaagaaaggttgttcaagaggagctccttcctgaaatcagaggaaagtcattgtattgcttggcacctgcccaaagtgatttcattttctgttggggattaagatgcattaatagcctgaggacagcattttccttgccaaaaatgtctttcttccctcccctgat

SEQ ID NO: 89310 - DNA, 600 bp, Chicken  19866894395618_1
ccagctacaatgaactggcgtttctgccttatttacttaaggatgtcagaggatgcagaccaaacttaccggcagcttcattgtagtacacgttgatcctctccagctgcaggtcgctgtcgccgtggtagctgccggtggggtcgatgccgtgctcatcgctgatgacctcccagaactggaagaaatgtttgtgaaagggcagctgttaagtacagctggccggtgccaatcacacgtgcttgcagtccgtgcacacagcgtccccgaccactccctagcacggccgagcagctgccygggaggaagctgcacctccatgagtcagtgcagaagagtttcctttggccgcagcagctgaattaacagaagcagcgctgagcagaggagggcagacgggcagctgcagcgctggaattcgagctaattcatttttagcayrcatccgcggggtgacgatgctcgcatacccctcgatttgatactcttctattgtctagccgcggcttaagaccgcctagagcagctacgccgttctactgacacggcagcgtcaccgcaagacgacagcggccccagcacgcacccgggtctggcccc

SEQ ID NO: 89311 - DNA, 600 bp, Chicken  19866894395618_2
ggtcgatgccgtgctcatcgctgatgacctcccagaactggaagaaatgtttgtgaaagggcagctgttaagtacagctggccggtgccaatcacacgtgcttgcagtccgtgcacacagcgtccccgaccactccctagcacggccgagcagctgccygggaggaagctgcacctccatgagtcagtgcagaagagtttcctttggccgcagcagctgaattaacagaagcagcgctgagcagaggagggcagacgggcagctgcagcgctggaattcgagctaattcatttttagcayrcatccgcggggtgacgatgctcgcatacccctcgatttgatactcttctattgtctagccgcggcttaagaccgcctagagcagctacgccgttctactgacacggcagcgtcaccgcaagacgacagcggccccagcacgcacccgggtctggccccgacaccgcgcccctctccctcaggagccgtacgcgcggctgccaggcggctccgtccgaccgcgggctcgagcccgggcacggcccagccggcacgaagccccagggcagccccgctccgctcgccgataaccccggcggg

SEQ ID NO: 89312 - DNA, 600 bp, Chicken  19866894395618_3
gtcgatgccgtgctcatcgctgatgacctcccagaactggaagaaatgtttgtgaaagggcagctgttaagtacagctggccggtgccaatcacacgtgcttgcagtccgtgcacacagcgtccccgaccactccctagcacggccgagcagctgccygggaggaagctgcacctccatgagtcagtgcagaagagtttcctttggccgcagcagctgaattaacagaagcagcgctgagcagaggagggcagacgggcagctgcagcgctggaattcgagctaattcatttttagcayrcatccgcggggtgacgatgctcgcatacccctcgatttgatactcttctattgtctagccgcggcttaagaccgcctagagcagctacgccgttctactgacacggcagcgtcaccgcaagacgacagcggccccagcacgcacccgggtctggccccgacaccgcgcccctctccctcaggagccgtacgcgcggctgccaggcggctccgtccgaccgcgggctcgagcccgggcacggcccagccggcacgaagccccagggcagccccgctccgctcgccgataaccccggcgggg

SEQ ID NO: 89313 - DNA, 600 bp, Chicken  19866894395621_1
ctctacagtagtttgctcacactttggcatagttatagcctttctcttgtctttagtttgcacatagcccatccctgtactgttaaatgaggcttttctccgttatactcactgtccatcttctgaacttacttttcatgaaatctttatccaaaataatctgaaatatttctaaaagatctaaaaatttccttccagttggattttgtaactcaatcagctttagccaagcagttgaatacagttagcccattgctttgcaaccaagcatatcggacattttcacatacaaatgctatracgcgtatgttgtcctataataatayaatatgattattttcccttaatttcatttaaggtactcgtgagcaaaattgtttgaatttgcagtatcaaaaatggatttacaaatttttgtttaggaaacaaaaagttgtaaggcraaccaaatgtagytactgagacaaatactctggtactaaacctgtctcattaaaagtccaacaagtggatttcagttgtgcaacactttcataggaatattttcccatttatttcagcaggactgttcacttgacaaaaaattgtccaagcatatcc

SEQ ID NO: 89314 - DNA, 600 bp, Chicken  19866894395621_2
gcatagttatagcctttctcttgtctttagtttgcacatagcccatccctgtactgttaaatgaggcttttctccgttatactcactgtccatcttctgaacttacttttcatgaaatctttatccaaaataatctgaaatatttctaaaagatctaaaaatttccttccagttggattttgtaactcaatcagctttagccaagcagttgaatacagttagcccattgctttgcaaccaagcatatcggacattttcacatacaaatgctatracgcgtatgttgtcctataataatayaatatgattattttcccttaatttcatttaaggtactcgtgagcaaaattgtttgaatttgcagtatcaaaaatggatttacaaatttttgtttaggaaacaaaaagttgtaaggcraaccaaatgtagytactgagacaaatactctggtactaaacctgtctcattaaaagtccaacaagtggatttcagttgtgcaacactttcataggaatattttcccatttatttcagcaggactgttcacttgacaaaaaattgtccaagcatatcccaagctggtgcctcgtatgctaaaaa

SEQ ID NO: 89315 - DNA, 588 bp, Chicken  19866894395621_3
tctttatccaaaataatctgaaatatttctaaaagatctaaaaatttccttccagttggattttgtaactcaatcagctttagccaagcagttgaatacagttagcccattgctttgcaaccaagcatatcggacattttcacatacaaatgctatracgcgtatgttgtcctataataatayaatatgattattttcccttaatttcatttaaggtactcgtgagcaaaattgtttgaatttgcagtatcaaaaatggatttacaaatttttgtttaggaaacaaaaagttgtaaggcraaccaaatgtagytactgagacaaatactctggtactaaacctgtctcattaaaagtccaacaagtggatttcagttgtgcaacactttcataggaatattttcccatttatttcagcaggactgttcacttgacaaaaaattgtccaagcatatcccaagctggtgcctcgtatgctaaaaatattttctggcaacattttccagagttttgtgtttgttttttaatctggaattcaagagcagtgattaagtttctgcagggaaagtcagtaatgcaggtccccag

SEQ ID NO: 89316 - DNA, 575 bp, Chicken  19866894395621_4
taatctgaaatatttctaaaagatctaaaaatttccttccagttggattttgtaactcaatcagctttagccaagcagttgaatacagttagcccattgctttgcaaccaagcatatcggacattttcacatacaaatgctatracgcgtatgttgtcctataataatayaatatgattattttcccttaatttcatttaaggtactcgtgagcaaaattgtttgaatttgcagtatcaaaaatggatttacaaatttttgtttaggaaacaaaaagttgtaaggcraaccaaatgtagytactgagacaaatactctggtactaaacctgtctcattaaaagtccaacaagtggatttcagttgtgcaacactttcataggaatattttcccatttatttcagcaggactgttcacttgacaaaaaattgtccaagcatatcccaagctggtgcctcgtatgctaaaaatattttctggcaacattttccagagttttgtgtttgttttttaatctggaattcaagagcagtgattaagtttctgcagggaaagtcagtaatgcaggtccccag

SEQ ID NO: 89317 - DNA, 600 bp, Chicken  19866894395624_1
atatgtacttttttttttacatttatgtgaatgcaatgcgttgggcttttctctttcgagaaagtgagcatttgtagtacgcgttcttaataaatagaaatgagaacagacagggttaacaccttctaaaatgaatgatgggtaacccctcttcattaaacagaagattcagcatgttgtcaaggatgtttggctgaagaactaagaatacccactagatatttctgtaatgtataaatgaacagtgtataggtacagagaaatacacaaattcaaagaacaaaccttcaaaagtggccygaggaactgcatctctcctctacatacaagtatgctgtctcttctcttcatgagcagacaaaaacaacacaggaatacatgaaacagtagaaacagaagttgaataatcacaaaaaatagaaggttaaaaattgatttaaaattagaattgaagctcagataccacaacacctgagcagagcttggatttatattgacattatccattattagtaattctaagaagaaaacaaaaaaagccttccaaaatgtcttcatagcaacagtttcaacaaagcaagcctctcctgagtacttgct

SEQ ID NO: 89318 - DNA, 599 bp, Chicken  19866894395626_1
  misc_feature (1)..(146): n is any nucleotide
nnnnnnnnnnnnnnnnnnnnnnnnnnnnnnnnnnnnnnnnnnnnnnnnnnnnnnnnnnnnnnnnnnnnnnnnnnnnnnnnnnnnnnnnnnnnnnnnnnnnnnnnnnnnnnnnnnnnnnnnnnnnnnnnnnnnnnnnnnnnnnnnnntcagatttgatgtgtaccaacatatttgctttgctatctgccaagtaaaggcataaagaggaaagcagagttctgcagttctccagctgtaaagtctggtctgaattatttactggaactgcgggtgaccctttccaggcacattggggtattygaactggctctgagactggcctaaaaaagctcttgtactcagatttttggagcacaagagaaccaagaggccgggccaaatttatagagggaccaaagtgctgaaagaagctattcaggacttttgtacgtgcactgaaattctaaaagctgtagtaaatctggctctcagtgactgcctggacaaagctgctgacctttgcattctggctggaygcattttaccctctctccttgtttctgtgaaggctgctgtggctgcttctgacctcaacagcttgctggagagtgaaggccagt

SEQ ID NO: 89319 - DNA, 600 bp, Chicken  19866894395626_2
gttctgcagttctccagctgtaaagtctggtctgaattatttactggaactgcgggtgaccctttccaggcacattggggtattygaactggctctgagactggcctaaaaaagctcttgtactcagatttttggagcacaagagaaccaagaggccgggccaaatttatagagggaccaaagtgctgaaagaagctattcaggacttttgtacgtgcactgaaattctaaaagctgtagtaaatctggctctcagtgactgcctggacaaagctgctgacctttgcattctggctggaygcattttaccctctctccttgtttctgtgaaggctgctgtggctgcttctgacctcaacagcttgctggagagtgaaggccagtacactcttctggctccaaccaacgaagcctttgagaagatcccacgagagatgctgaacaggatcctgggggacccagaagccctgaggggtgagtgctttgtctatcaagcccactgagagaccaaagattattctgcagttcttcagaattccttttcagatagatctgagcaactccttggcacagtctaacaatagctgcagtcaacacatt

SEQ ID NO: 89320 - DNA, 600 bp, Chicken  19866894395626_3
acctcaacagcttgctggagagtgaaggccagtacactcttctggctccaaccaacgaagcctttgagaagatcccacgagagatgctgaacaggatcctgggggacccagaagccctgaggggtgagtgctttgtctatcaagcccactgagagaccaaagattattctgcagttcttcagaattccttttcagatagatctgagcaactccttggcacagtctaacaatagctgcagtcaacacatttgacatcctccatctttttagcctggacagtccagggttctttggatgtarttgtgtagatgtkgcagagaaggtgttaacagagatagaggagggactgacgcatcattccaagtattttcttagcagtcctctttgtggcaatgatttctatcagtctatagctacgagagtactagcatctaatcagtataacttcctttggcaaatgaattgagtaatcacacaaaacctttctgaagttaacaagagcatatagaaatcatccacatagaacacttcatttcacagactgctgaattaaagccaacacagtctgaaatagctgtgcatcctgtgtcatggagccct

SEQ ID NO: 89321 - DNA, 600 bp, Chicken  19866894395626_4
gctggagagtgaaggccagtacactcttctggctccaaccaacgaagcctttgagaagatcccacgagagatgctgaacaggatcctgggggacccagaagccctgaggggtgagtgctttgtctatcaagcccactgagagaccaaagattattctgcagttcttcagaattccttttcagatagatctgagcaactccttggcacagtctaacaatagctgcagtcaacacatttgacatcctccatctttttagcctggacagtccagggttctttggatgtarttgtgtagatgtkgcagagaaggtgttaacagagatagaggagggactgacgcatcattccaagtattttcttagcagtcctctttgtggcaatgatttctatcagtctatagctacgagagtactagcatctaatcagtataacttcctttggcaaatgaattgagtaatcacacaaaacctttctgaagttaacaagagcatatagaaatcatccacatagaacacttcatttcacagactgctgaattaaagccaacacagtctgaaatagctgtgcatcctgtgtcatggagccctgtgctccctctct

SEQ ID NO: 89322 - DNA, 600 bp, Chicken  19866894395626_5
agtctatagctacgagagtactagcatctaatcagtataacttcctttggcaaatgaattgagtaatcacacaaaacctttctgaagttaacaagagcatatagaaatcatccacatagaacacttcatttcacagactgctgaattaaagccaacacagtctgaaatagctgtgcatcctgtgtcatggagccctgtgctccctctctcagaggcccgcacctttagaatgctgtcccaaaaacctgcagtaattgcagggttgatatttccagctcgctaagacacttgcttctctcrcagacctgctgaaccatcacatcctgaagtcagccatgtgtgctgaggccatcatcgctgggctgacgatggagacgctggaaggaaccaccctggatgtgggctgcagtggggaagagctgacgctcaatgggagggccatcattgccaacaaggacatcctggctaccaacggtgttgtccactttgtcaatgagctgctgatcccagactcaggtactggagacactatggcatctctccttctgctcctttccttttgtctgctttttttgtcgaagaagacttagagaacatgag

SEQ ID NO: 89323 - DNA, 600 bp, Chicken  19866894395626_6
agtggatcgtgtttaatgagatgttactatgcattgtttttcttttcagctaagaccctgtttgagttggcccaggaatctgaagtttctgagtctatgaaccttttcagacaagctgggctaagttcacatctaactggcagtgagcgggtgaccctccttgccccagtgaatgaggtgttcaaaggtaaaatgtggggtaaatccctctctcctattggtctgggccacagatctgctttgagctgtctctctttggctgagtttcagcgtgcaagcacgcaaaccttctctcaaatscctcagctgtagatggtgacatgtagcttcaaaattaaaacctgttgtgggtagtaatctgcatgtggatgtttttagtgtctctgtggtcattctaagtgagtcattagttctgtccttattttcttggctgcagataaacgccccactgttgacagcaatatgaaaaatttgcttctgaaccacattgttaaagatcagctctcctctaaatatctttaccacggtcagaaactacagacgctgggtgacaaggaactgagagtatttgtgtaccgcaatgtgagtttctgcagcttg

SEQ ID NO: 89324 - DNA, 600 bp, Chicken  19866894395626_7
cgtgggcttatacttctgctgggaggacgtgtttgtagtgtgtgctatgaccttcctacgacttcagtttggctgcgctggttggtgtgagcaagacagctctaaggtgtatctagagaaactgaggtctctgccttgcacatcagagatggtagcagtgagaatgtagcttttaatagcacgggcttggggtgtctaaagaaagttctgcaaatggcgaacgtggcccacggtcagcctcaagttgcactgtatgaaatgtaattcttaaaagaacggagctgttgttcgatccatgcrtagatgggtaaagcaggaagtctgacmagtactctggtctagcatagatggaggccaatatcctgaaaagcacaggcatgcagactggctgtagagaaaggcgtgggagtgtttaataaccctcttctgaataagcagcaggatctcttattttcttcatgtcggaaaatggctgtggttggaaacaatgccaggtatttcagtgtaacatcttctcgtcattaaagcccaaccaaacactgatgtcataattcaggaagcatctgcccatggtggctggttatccttttaagtgcatgg

SEQ ID NO: 89325 - DNA, 600 bp, Chicken  19866894395626_8
cgtgtttgtagtgtgtgctatgaccttcctacgacttcagtttggctgcgctggttggtgtgagcaagacagctctaaggtgtatctagagaaactgaggtctctgccttgcacatcagagatggtagcagtgagaatgtagcttttaatagcacgggcttggggtgtctaaagaaagttctgcaaatggcgaacgtggcccacggtcagcctcaagttgcactgtatgaaatgtaattcttaaaagaacggagctgttgttcgatccatgcrtagatgggtaaagcaggaagtctgacmagtactctggtctagcatagatggaggccaatatcctgaaaagcacaggcatgcagactggctgtagagaaaggcgtgggagtgtttaataaccctcttctgaataagcagcaggatctcttattttcttcatgtcggaaaatggctgtggttggaaacaatgccaggtatttcagtgtaacatcttctcgtcattaaagcccaaccaaacactgatgtcataattcaggaagcatctgcccatggtggctggttatccttttaagtgcatggatgaggaattggtaatatcagactcca

SEQ ID NO: 89326 - DNA, 599 bp, Chicken  19866894395638_1
  misc_feature (1)..(11): n is any nucleotide
nnnnnnnnnnncactcattttcagcagccatgctacagtcacataattcactacagttaggaaattactaagctggtgatgtttagtgtcttatcactatgataacacaagttcccctaactgatcaaaactatgaaactaaacaaacagtgaagagttccttttaccaatactacggcaaaacttgcagccaaaagaaaagaatttcagtcaaaaatgagcgtgctgatcaaaaatctcacttcaaagaatggaaagggaaaatatgagagtaaacagatacatatgtaaatattttcytgaagcagagccaggttcttctcaaataagagaaccttaatgaaaggctgctcagtaaccaaccgtgagagtagtttgagccaccagcttgactctgtagtttgatgcttacaattttaatttatgtccaacagatttgtgtatgaaaaagtcaatacaaaggtctgcatttaaagcttgtaygaaggtataattttgtaaagtggaaaaacaacatgaaaatgtgtctttgcccagatatgcatttacactgtaaactaacattccttgctaattgattggtcagcatggataatgaa

SEQ ID NO: 89327 - DNA, 600 bp, Chicken  19866894395638_2
cttgcagccaaaagaaaagaatttcagtcaaaaatgagcgtgctgatcaaaaatctcacttcaaagaatggaaagggaaaatatgagagtaaacagatacatatgtaaatattttcytgaagcagagccaggttcttctcaaataagagaaccttaatgaaaggctgctcagtaaccaaccgtgagagtagtttgagccaccagcttgactctgtagtttgatgcttacaattttaatttatgtccaacagatttgtgtatgaaaaagtcaatacaaaggtctgcatttaaagcttgtaygaaggtataattttgtaaagtggaaaaacaacatgaaaatgtgtctttgcccagatatgcatttacactgtaaactaacattccttgctaattgattggtcagcatggataatgaagtatgttattttttgtttccaataagaaggacacgccaagaaaacttatgaatagagacttatctgccacagccattactacaactgccattttgctttctaataaatcctgtctgaagaacactgaatagaatttaaaaattcaaaggaagacactgtactctatgctgctctcttaatcact

SEQ ID NO: 89328 - DNA, 599 bp, Chicken  19866894395643_1
  misc_feature (1)..(45): n is any nucleotide
nnnnnnnnnnnnnnnnnnnnnnnnnnnnnnnnnnnnnnnnnnnnnttggacacattgcatgctagaaagatccaatcatactgcgatgacagctcgactttttgcagtatcactgcattgctttatatcttgagttgaatcccctgaactatgcaggctcttttccaccataccagtaacaaggcagacattcccattgtctgcttgcttggacttcctcagacaggagcagtgggaacaccttctagttgcaccaggggaggttcaggttgcatatcaggaaaaaattctccaaaagaraagtggcatagctgcccagggaggtggtggaatcactgtccctgaaggtgttcaagaaacatagagatgtggcactgaggggcatggttggtaggctatattgatggtaggcaaacagctggactagatagcttttccaaccttaatgattctatctttcaaatggccatcaaactgaagtttatcaagaaatataaatggagggtgactagttccttttgtcttttgtgaactcagacttgtttcaatatagtatcagaaataaagagtggatataaaattgcacatgttcaacaatg

SEQ ID NO: 89329 - DNA, 600 bp, Chicken  19866894395655_1
atttccaaatgatcattttcccctttaataaaagggttgaaatgaaattttcaacgaaatgaaaacacagatgtggccaacatctggtccaacctcttaaaagcttatttaaaagcaatagtgccatgtgacacggctcttagcggggatttcttctgttaaggaaaacgaccgccccgctgcagggcacggacaagaaataagttctgtgtccaaaaataagcagaaccaaaaaatgccatgtttaaatgggactgctgtcaggcagaggggacagcgagacagaaggagcagtggaayggcccggtccttcctcactgcatttctcattgcaggcagaggaagaggagctcccagagctttcattcagggtcccggtcagccacatccatgtaacttactgttgccagccagccagccgtctccctgcatatttaaaaagtaaaaaaaaaccaacaaaaaagccctttctttgcagcctcttaacatctttgccagcggactctaatagacacgagagctacaaacagacattcgggattaggtttgtaaacctgcaggattatttactgttcttgtcattaccaaatgcatgctaag

SEQ ID NO: 89330 - DNA, 524 bp, Chicken  19866894395657_1
ttttggatagaagtcacacagtaactccagtaccctctgccaacattaggaggcaatgtaattcactagctatactcaggaaggaattcaggacacagaaacactcacccatcattttatgaactgttcaccaattaagtaagtcattcatattacacctcagttttgcctcaaagaacacctgctcagaactatgcaagcgcaatccagattgaataaggaaagtttaccatcaggagtactttcttatctctaggagtacagtagctcaaacaggatctttccttctaaaggcagttygggtttaatatagtggtacagatggactagatatttctcagtccactaatgaaggaactagtaagctgattatgctattatgaaagtagaatttatacattattgcacttccttgcacagctgggaaaaaaaaagaaaaaaaatcaagggaaagttcaacttctatccaggatcttttttcagttaaattcctaaccacttattctggagtatttcatgcagat

SEQ ID NO: 89331 - DNA, 600 bp, Chicken  19866894395666_1
ttcagcaggtagagctcggagatatggtgccccatgaagcagatggttggcctctccactagctggtagcatctacaatttgcagctttgcttcagtgatttgtgttaggcaggtgttcctccagagccggaagaatgctttgagtcacttagttggttaagttaacaaacaggtgtctgctggtgctgtgaatagtcagtagaaaaaggcaagcatctctagaaagcaattcagaacaccagaagttagcttctgttgctcacgctttcatggtgcatccatgtatgaattgacttctraagtttccatacccagtacaatagagataatgctttcaaataaactctgtgtttttttattagcgatttattaagaatgaatgtaagtgactttaagatgacagattggtagataggcacagctgctctgtgttagtgtgcaagtggagtcatgtggctccactgctctttgatatcttaatcagcatccaaaatacatttggagaaattcatgctaattgggccagaaggcacacaactatagcgtgcttgaggctgctgagaaaagcaataaagtctaaccctgttccatttcactgt

SEQ ID NO: 89332 - DNA, 600 bp, Chicken  19866894395669_1
gacttagatgtttgatgttgatagtttaattcattcatgcctgtgtgggctcttgcatgctgtggtatatttaatgtattccccagtgtaatagatgcatctgtgaagtactatcaaattattttaataaccataaagttctctatttcttattacacttccaagtgaatattttacatagctcattgaatcttgaaccaagtatttttcatgtattttgtagataatgctagaagaaatagatgagaacgcactggcaggctgatgaaataccctcttaacaataaacttttcaattcwgtttgctgcagcatatgctctgttgggtaagaagatgctttgcctttttcataggtgacttttatgaagactgagcataaatacgtggttaaggagtgattattagaaaaattcctaaaagctgtcaaatgtcaagctttagaacgcttttttttccaaagaaaaattggttatatttgctttttaaaaacaaagaaaactcaccgttgtctgttgatcactgttttcagcagtgcatgatttcagcacctaaccacccctccaggcaatagtacctgcttttgatcagatgcttcagaa

SEQ ID NO: 89333 - DNA, 600 bp, Chicken  19866894395669_2
aaagaaaaattggttatatttgctttttaaaaacaaagaaaactcaccgttgtctgttgatcactgttttcagcagtgcatgatttcagcacctaaccacccctccaggcaatagtacctgcttttgatcagatgcttcagaagctatgagtaacaagtacatccagataaatcatctattttcctgaagctatttagaaaaaaaattggcttaatacttgatactgaaggttagaaatacaggaaagacttttcccatgtttgtcctaagtgtgatttccccaagtggaaaagattatraacagttttaccttcataggaaaaagccccacacacttcaaagaaatgaagttatataatgcagcatctaattgcatcctttgtcaattcctgttatctttgaacccttaagaatgtctccttgcatctctttttatagtactctgcttyttactgcactcataactttattgtttccttttaaaatcgctgtctatgcagatgttgtagaatgcagaatttacctcctctaaacaccattttactctcatcccatcataattgtatgtgatctagaaaagagtcgatctgtttgtttgt

SEQ ID NO: 89334 - DNA, 600 bp, Chicken  19866894395669_3
gtaacaagtacatccagataaatcatctattttcctgaagctatttagaaaaaaaattggcttaatacttgatactgaaggttagaaatacaggaaagacttttcccatgtttgtcctaagtgtgatttccccaagtggaaaagattatraacagttttaccttcataggaaaaagccccacacacttcaaagaaatgaagttatataatgcagcatctaattgcatcctttgtcaattcctgttatctttgaacccttaagaatgtctccttgcatctctttttatagtactctgcttyttactgcactcataactttattgtttccttttaaaatcgctgtctatgcagatgttgtagaatgcagaatttacctcctctaaacaccattttactctcatcccatcataattgtatgtgatctagaaaagagtcgatctgtttgtttgtatcctttcctcactcttcctttcccttagcagatacatgatgtgtacttcacaatccaaatgttagtgccctcttgtttatacttctctttcttctcacctgttccaatcattcttttggggagttcatcttcctccttaagaaaacagt

SEQ ID NO: 89335 - DNA, 600 bp, Chicken  19866894395682_1
aattgattttcttaatagccagaattttcccactttcctattattgcacactgccccagattcaactgactggctaaaaagagccctatctccccactgtgcctacttgtcagtgtgtgataagtgatgatactagaaagacaatgtagctttcagacagaggatctcagatgtttaatctacaattaaatttccagattcttctcatcctattaagtacaaaaatggagctgcttaaaagcaggtatctggaatttaatgtagaacatactatatgtgttaatttcaaatatatatatktatatatacataaagaatcattctctttggaaatagaaagctcagtaagaagctgggttagaagtgatctgtctaatacatycaaataactgaaaatgattaaaactgctcagaaatgaagtttcattacagtgcaaacacttatagttttagtctctggattcatccggagatacatagaaagtagaatatgcggttgtacaattaactatatttgttccaatcagtgatattatgaatgcctgtcatagtcctccccagttcgtgtaattctgaaacttttaacaaaatcagtctaat

SEQ ID NO: 89336 - DNA, 600 bp, Chicken  19866894395682_2
gccctatctccccactgtgcctacttgtcagtgtgtgataagtgatgatactagaaagacaatgtagctttcagacagaggatctcagatgtttaatctacaattaaatttccagattcttctcatcctattaagtacaaaaatggagctgcttaaaagcaggtatctggaatttaatgtagaacatactatatgtgttaatttcaaatatatatatktatatatacataaagaatcattctctttggaaatagaaagctcagtaagaagctgggttagaagtgatctgtctaatacatycaaataactgaaaatgattaaaactgctcagaaatgaagtttcattacagtgcaaacacttatagttttagtctctggattcatccggagatacatagaaagtagaatatgcggttgtacaattaactatatttgttccaatcagtgatattatgaatgcctgtcatagtcctccccagttcgtgtaattctgaaacttttaacaaaatcagtctaatcgtttctcttgatgtagctctcctggagctcagtgagcctactgcagcatcagtgtgaaacactgtgaagtccaggagggaa

SEQ ID NO: 89337 - DNA, 600 bp, Chicken  19866894395683_1
taaagccatgtacttatgtgcttataccatgaagtagtgactggcaatggcacgtccaatcaggacaggaggttgtgagcccccctctcaccctgagccagggagctggctgcttaattcctcagttctgtgccctgccttcccaccctacccatttccagtgtagttgccctacatacaggcgtcacttgcagctctcctttcttcagcatctttctgatctttctcagcgctttgttgcgtttcctcaggactctgagtgggctgaatccaacctgcagaaacagcactttgaatagwtttttttcaggtggagccaaaaattccagtaccttctcaagtaattgtgatggtgaggctagaaagcacccataatctctttgataacgatgacacaaggaagaaataaatgaacaaatacccttagccraatgaattatgatgccttaawgtctcaggcacagagtttgtttaggaaaggtattgttttmtattcctgaactaccttgaaacttcactacctttaaacatttcagcaatgcctttttgagctgttttcctccaaaaccccgctgccttttgtgcagctgctcaccaaga

SEQ ID NO: 89338 - DNA, 600 bp, Chicken  19866894395683_2
tgccctgccttcccaccctacccatttccagtgtagttgccctacatacaggcgtcacttgcagctctcctttcttcagcatctttctgatctttctcagcgctttgttgcgtttcctcaggactctgagtgggctgaatccaacctgcagaaacagcactttgaatagwtttttttcaggtggagccaaaaattccagtaccttctcaagtaattgtgatggtgaggctagaaagcacccataatctctttgataacgatgacacaaggaagaaataaatgaacaaatacccttagccraatgaattatgatgccttaawgtctcaggcacagagtttgtttaggaaaggtattgttttmtattcctgaactaccttgaaacttcactacctttaaacatttcagcaatgcctttttgagctgttttcctccaaaaccccgctgccttttgtgcagctgctcaccaagatctccccagcctttctctgctgctaccgatggtgccaaaggtgttgttcagcactatcaggctgctctccttctcagagttgggtatgtatgcatgggacaacagtcataaaatgacatttgagtaattc

SEQ ID NO: 89339 - DNA, 600 bp, Chicken  19866894395683_3
ccatttccagtgtagttgccctacatacaggcgtcacttgcagctctcctttcttcagcatctttctgatctttctcagcgctttgttgcgtttcctcaggactctgagtgggctgaatccaacctgcagaaacagcactttgaatagwtttttttcaggtggagccaaaaattccagtaccttctcaagtaattgtgatggtgaggctagaaagcacccataatctctttgataacgatgacacaaggaagaaataaatgaacaaatacccttagccraatgaattatgatgccttaawgtctcaggcacagagtttgtttaggaaaggtattgttttmtattcctgaactaccttgaaacttcactacctttaaacatttcagcaatgcctttttgagctgttttcctccaaaaccccgctgccttttgtgcagctgctcaccaagatctccccagcctttctctgctgctaccgatggtgccaaaggtgttgttcagcactatcaggctgctctccttctcagagttgggtatgtatgcatgggacaacagtcataaaatgacatttgagtaattcatgaaaaatttatctttgtag

SEQ ID NO: 89340 - DNA, 600 bp, Chicken  19866894395683_4
cagctctcctttcttcagcatctttctgatctttctcagcgctttgttgcgtttcctcaggactctgagtgggctgaatccaacctgcagaaacagcactttgaatagwtttttttcaggtggagccaaaaattccagtaccttctcaagtaattgtgatggtgaggctagaaagcacccataatctctttgataacgatgacacaaggaagaaataaatgaacaaatacccttagccraatgaattatgatgccttaawgtctcaggcacagagtttgtttaggaaaggtattgttttmtattcctgaactaccttgaaacttcactacctttaaacatttcagcaatgcctttttgagctgttttcctccaaaaccccgctgccttttgtgcagctgctcaccaagatctccccagcctttctctgctgctaccgatggtgccaaaggtgttgttcagcactatcaggctgctctccttctcagagttgggtatgtatgcatgggacaacagtcataaaatgacatttgagtaattcatgaaaaatttatctttgtagtagggctgaactgcatacctactaattattcagaaattgt

SEQ ID NO: 89341 - DNA, 600 bp, Chicken  19866894395691_1
aatagtgaaggatgatagggtttcacaaggaagcgataacaaaacagctcatttttaccaaacaaaaggactgttcctctaaatacacattctcaacccccaatactcaaagacctgctattaaatctctgcttataagtcctcagttcagaaatctcattaccagccaaaacaagggctgaagtactggaagtactgatggaaacgatgctgggggtcagcagcacacttgtcgcagaaatgtcaccacatctggcagctgggcacagaaatgccacatcatgccccatatgttgggayacacagtgactaaggggctgccaccacttatgtgatgcaaggtgaggtccatcctttcagcatcaagccagaaccatgggccctggggcagctcattagcaggcagcgtccagggagctgtgataagttttagaagggctggaactcctctgttctgccaatctatgaatgaaatccagtttcttgtaacagcagagaatacacttcttttaggaggcaaagttggtccttggaattttcttgctaaagggacacagtctcctgtctggttgatcttgtagatctgcagtctgctcccta

SEQ ID NO: 89342 - DNA, 600 bp, Chicken  19866894395697_1
aagaagcagcactgaggtttctccgttcctctgagtcacaagaatagcttcaatacactgagcactgggccaagatctgctctgtttaaattccagtttatccttgagttcctcatgcttgagcccaggaaaatctctttttctgggcaatagctctgcagtcatctaggactcctggtcatgatggagtattgctgtccacaaaacgttaaggttcagtgatgttttcaaccattctcaaaacaattatgatgaagtacaacaacaaaaactgtttttctgtttcacagtcttattacyagagtggttttatactctaaaatctcaacatttaacaatccaaatatgaagaaaatgaatgaaaatttcactacagacatcctattgctaaaattaatgtttgaaatacctcaatagctcagtgtcatgaagaaaccattcagaaaatcggtgaaatgaaattaaaamgatctttaaagaaaggggatcacgtttcaaaattatccctaatcatggtgccatgggaacatttttaatatgctttgcaagttttgcacccaatatttgatattccattcaggcagtctgttcccagaaagc

SEQ ID NO: 89343 - DNA, 600 bp, Chicken  19866894395697_2
ggactcctggtcatgatggagtattgctgtccacaaaacgttaaggttcagtgatgttttcaaccattctcaaaacaattatgatgaagtacaacaacaaaaactgtttttctgtttcacagtcttattacyagagtggttttatactctaaaatctcaacatttaacaatccaaatatgaagaaaatgaatgaaaatttcactacagacatcctattgctaaaattaatgtttgaaatacctcaatagctcagtgtcatgaagaaaccattcagaaaatcggtgaaatgaaattaaaamgatctttaaagaaaggggatcacgtttcaaaattatccctaatcatggtgccatgggaacatttttaatatgctttgcaagttttgcacccaatatttgatattccattcaggcagtctgttcccagaaagcaccacgtagatagtgtggtgaccttttgcagcacaaaggcaatgaattcaaatcctgttgtctgcagctggcgttgccagagagggcggaatagataggaataacttgggtatatggcaattttctttgcatgtgcagagctctctgttttccaamagcagcaggctc

SEQ ID NO: 89344 - DNA, 407 bp, Chicken  19866894395697_3
tgaaattaaaamgatctttaaagaaaggggatcacgtttcaaaattatccctaatcatggtgccatgggaacatttttaatatgctttgcaagttttgcacccaatatttgatattccattcaggcagtctgttcccagaaagcaccacgtagatagtgtggtgaccttttgcagcacaaaggcaatgaattcaaatcctgttgtctgcagctggcgttgccagagagggcggaatagataggaataacttgggtatatggcaattttctttgcatgtgcagagctctctgttttccaamagcagcaggctcctgccttcgaggatttataattctcaaaacttttggaatttgtaattccagtgggtgacctggaggagacagggcagaaaggagtaggatggagt

SEQ ID NO: 89345 - DNA, 600 bp, Chicken  19866894395704_1
agaaaagctgcagaaataaaatatctttaagagagttctgttcctcctctgttaaatatacttgaaacaggcaaaactgttcaagactttgtggagtggaagaagagtggaattcatataaagtcagggaagggttcaactggcaacatgtagttgttggtaaagacatctgcatcagagacaattgctgcaggctctcaattgtgaaggaagttataaatacagtcactaagtctagaccacaattcctctcctccaaaagcaaccctctagaataggccagataaactgcctcttagraggtctctttcttctagtgacactgtacaggggttgtagagtgactatatccagaagtgtgacagctttactgcaaagtctgaagttttgtgttaaaaacatggctaatagacacasacctgtgtatttgcattctgaaagatttaattccagtttatgggtttcttaaagaagaggtggtataaaggagcgtgccaagaggaaacactgtgcgtttttttctctctcatatgcacatacttccctctctcaaaatggcagtaaaaatggtgtttggcaggtttatttctcatattttta

SEQ ID NO: 89346 - DNA, 600 bp, Chicken  19866894395704_2
ataaagtcagggaagggttcaactggcaacatgtagttgttggtaaagacatctgcatcagagacaattgctgcaggctctcaattgtgaaggaagttataaatacagtcactaagtctagaccacaattcctctcctccaaaagcaaccctctagaataggccagataaactgcctcttagraggtctctttcttctagtgacactgtacaggggttgtagagtgactatatccagaagtgtgacagctttactgcaaagtctgaagttttgtgttaaaaacatggctaatagacacasacctgtgtatttgcattctgaaagatttaattccagtttatgggtttcttaaagaagaggtggtataaaggagcgtgccaagaggaaacactgtgcgtttttttctctctcatatgcacatacttccctctctcaaaatggcagtaaaaatggtgtttggcaggtttatttctcatatttttatttcagctgtaggagggcaaactgaagttaatactcagccagttatcctaagatacagacaggcagtctctgagtttatgcttattctctttaatagacaggattttctagtcagac

SEQ ID NO: 89347 - DNA, 600 bp, Chicken  19866894395710_1
gacctgccggcatcactccatcactgcatccaaaacctaacaggctgctgctgccctgggccgggagactcccacggagacgcaggtccgtatctggcaggtgtgccctcaccccaggcagggtcagcaggcagggcccacagatgcggtgtgggaagatgagtgaccgtggtttgaagccccgtccgatgtgaccacagtgctgatagatgcttgcgtgagacacagaagaaaagggaaatccactgcgcgcccctggggcatcagctcagccacctctccgggcagccggagcagcasctcggatggagcctcccaacagcctgcccccatcccagggtgggacagcggggtgacctcggggagggttgaggacccacggcacggacagcgagcgggcagtgccacactgcagcrggggacacggccacggggcgatgccggcagcaggagacagcaaagyratgccacagggagcrcagcagcccgcaacgatcacgtgtgaccatcccatgcatccaggcaaaaraaaaaaaaacaaccrgtcacggctccaagaaaaggaaaagaaatgcttttgtaatggtttggggaggccct

SEQ ID NO: 89348 - DNA, 600 bp, Chicken  19866894395710_2
gcagggtcagcaggcagggcccacagatgcggtgtgggaagatgagtgaccgtggtttgaagccccgtccgatgtgaccacagtgctgatagatgcttgcgtgagacacagaagaaaagggaaatccactgcgcgcccctggggcatcagctcagccacctctccgggcagccggagcagcasctcggatggagcctcccaacagcctgcccccatcccagggtgggacagcggggtgacctcggggagggttgaggacccacggcacggacagcgagcgggcagtgccacactgcagcrggggacacggccacggggcgatgccggcagcaggagacagcaaagyratgccacagggagcrcagcagcccgcaacgatcacgtgtgaccatcccatgcatccaggcaaaaraaaaaaaaacaaccrgtcacggctccaagaaaaggaaaagaaatgcttttgtaatggtttggggaggccctcagcctcctctgctcctcaaggctgcaggcagtcggctcagcacgtcccacgtgtgggagctcctcgctgcactgcgacctttgtctgggtaatctttagaaaaacaatgtgggttg

SEQ ID NO: 89349 - DNA, 600 bp, Chicken  19866894395710_3
tgaccgtggtttgaagccccgtccgatgtgaccacagtgctgatagatgcttgcgtgagacacagaagaaaagggaaatccactgcgcgcccctggggcatcagctcagccacctctccgggcagccggagcagcasctcggatggagcctcccaacagcctgcccccatcccagggtgggacagcggggtgacctcggggagggttgaggacccacggcacggacagcgagcgggcagtgccacactgcagcrggggacacggccacggggcgatgccggcagcaggagacagcaaagyratgccacagggagcrcagcagcccgcaacgatcacgtgtgaccatcccatgcatccaggcaaaaraaaaaaaaacaaccrgtcacggctccaagaaaaggaaaagaaatgcttttgtaatggtttggggaggccctcagcctcctctgctcctcaaggctgcaggcagtcggctcagcacgtcccacgtgtgggagctcctcgctgcactgcgacctttgtctgggtaatctttagaaaaacaatgtgggttggtttgcctgcagaacgccaggcacgccagcgggcaccgccattagc

SEQ ID NO: 89350 - DNA, 600 bp, Chicken  19866894395710_4
gaccgtggtttgaagccccgtccgatgtgaccacagtgctgatagatgcttgcgtgagacacagaagaaaagggaaatccactgcgcgcccctggggcatcagctcagccacctctccgggcagccggagcagcasctcggatggagcctcccaacagcctgcccccatcccagggtgggacagcggggtgacctcggggagggttgaggacccacggcacggacagcgagcgggcagtgccacactgcagcrggggacacggccacggggcgatgccggcagcaggagacagcaaagyratgccacagggagcrcagcagcccgcaacgatcacgtgtgaccatcccatgcatccaggcaaaaraaaaaaaaacaaccrgtcacggctccaagaaaaggaaaagaaatgcttttgtaatggtttggggaggccctcagcctcctctgctcctcaaggctgcaggcagtcggctcagcacgtcccacgtgtgggagctcctcgctgcactgcgacctttgtctgggtaatctttagaaaaacaatgtgggttggtttgcctgcagaacgccaggcacgccagcgggcaccgccattagca

SEQ ID NO: 89351 - DNA, 600 bp, Chicken  19866894395710_5
ccccgtccgatgtgaccacagtgctgatagatgcttgcgtgagacacagaagaaaagggaaatccactgcgcgcccctggggcatcagctcagccacctctccgggcagccggagcagcasctcggatggagcctcccaacagcctgcccccatcccagggtgggacagcggggtgacctcggggagggttgaggacccacggcacggacagcgagcgggcagtgccacactgcagcrggggacacggccacggggcgatgccggcagcaggagacagcaaagyratgccacagggagcrcagcagcccgcaacgatcacgtgtgaccatcccatgcatccaggcaaaaraaaaaaaaacaaccrgtcacggctccaagaaaaggaaaagaaatgcttttgtaatggtttggggaggccctcagcctcctctgctcctcaaggctgcaggcagtcggctcagcacgtcccacgtgtgggagctcctcgctgcactgcgacctttgtctgggtaatctttagaaaaacaatgtgggttggtttgcctgcagaacgccaggcacgccagcgggcaccgccattagcaacaagagaagggatt

SEQ ID NO: 89352 - DNA, 600 bp, Chicken  19866894395710_6
agaaaagggaaatccactgcgcgcccctggggcatcagctcagccacctctccgggcagccggagcagcasctcggatggagcctcccaacagcctgcccccatcccagggtgggacagcggggtgacctcggggagggttgaggacccacggcacggacagcgagcgggcagtgccacactgcagcrggggacacggccacggggcgatgccggcagcaggagacagcaaagyratgccacagggagcrcagcagcccgcaacgatcacgtgtgaccatcccatgcatccaggcaaaaraaaaaaaaacaaccrgtcacggctccaagaaaaggaaaagaaatgcttttgtaatggtttggggaggccctcagcctcctctgctcctcaaggctgcaggcagtcggctcagcacgtcccacgtgtgggagctcctcgctgcactgcgacctttgtctgggtaatctttagaaaaacaatgtgggttggtttgcctgcagaacgccaggcacgccagcgggcaccgccattagcaacaagagaagggattattgactgagatgtcagaaccacaagtttttgtaaatagaaggtacacgc

SEQ ID NO: 89353 - DNA, 600 bp, Chicken  19866894395710_7
actgcgcgcccctggggcatcagctcagccacctctccgggcagccggagcagcasctcggatggagcctcccaacagcctgcccccatcccagggtgggacagcggggtgacctcggggagggttgaggacccacggcacggacagcgagcgggcagtgccacactgcagcrggggacacggccacggggcgatgccggcagcaggagacagcaaagyratgccacagggagcrcagcagcccgcaacgatcacgtgtgaccatcccatgcatccaggcaaaaraaaaaaaaacaaccrgtcacggctccaagaaaaggaaaagaaatgcttttgtaatggtttggggaggccctcagcctcctctgctcctcaaggctgcaggcagtcggctcagcacgtcccacgtgtgggagctcctcgctgcactgcgacctttgtctgggtaatctttagaaaaacaatgtgggttggtttgcctgcagaacgccaggcacgccagcgggcaccgccattagcaacaagagaagggattattgactgagatgtcagaaccacaagtttttgtaaatagaaggtacacgctgcagggggaaggag

SEQ ID NO: 89354 - DNA, 600 bp, Chicken  19866894395717_1
cattactgagtcttaggaaaggaagagtagtttggaagtggctgtatctgttttgccactgtttttagggtagttgtacgattattttggccccaaagtatttgtattgagacaaaatgattatttaaatttatcacttcagaaaagtaaaaaaaatctgaacataaatctattttgaaattctcttcctactaaaactaaatacgcttgaaaactgtttatttcttagactgatactattcaaaacatgcttattcatgtaaaaacagaggttttctccaaagaaactcctattttatrtgttctcctgagtttattctgttgtaactcaccacgtgtagtattcatatagtttgtgtctggctaaagtctctattcaggtatgtcttccaatttctcttcacaacctgtagagctatttcttgtgctttggtgggaagattttgattttcaaatctccaaaatccacttgattcattttgttggtttgctttatatgtatacattatttattggatgtgcttcaaaatgctcagtatccctgtggtgtggcttttttttctgattatgggatcagataaaatataagattaataagat

SEQ ID NO: 89355 - DNA, 600 bp, Chicken  19866894395721_1
aatgatcctcacagcgcagagatgcacgctagatttcttcccagttatgcaacatgctggtcatatgccaaagcagaaaaatcactgttcacaggaccatgcaggaaaacaccagaaatgtgagagctaacctgggagccacaggggactgactaggggagatcactggggtttctgtcgagcactcagcagatgcccaggtaggacagcagggatgctacttgagtccagtccttctttcttgctctccacagagtttttcttcccctgccctgaaacaagttgaaatgactttgcacrtaaggtgtgaaatgccatttrttctgctttcccttgtattttgtccaacctattcaggctattgtgaggcactgctgtgcttttgkttttttttgtttgtttgtttggttggtttttttgtttgttttttggttttgtttgttttagtttttgtttgtttgtttgttttttaacttgggttattaattggcttaagactttctgaatattgatgcttttgagctataaatacattttcctgcccctgtactcagcactggtgaggccctacctcgagtactgtgttcagttttgggcatc

SEQ ID NO: 89356 - DNA, 600 bp, Chicken  19866894395721_2
atgcacgctagatttcttcccagttatgcaacatgctggtcatatgccaaagcagaaaaatcactgttcacaggaccatgcaggaaaacaccagaaatgtgagagctaacctgggagccacaggggactgactaggggagatcactggggtttctgtcgagcactcagcagatgcccaggtaggacagcagggatgctacttgagtccagtccttctttcttgctctccacagagtttttcttcccctgccctgaaacaagttgaaatgactttgcacrtaaggtgtgaaatgccatttrttctgctttcccttgtattttgtccaacctattcaggctattgtgaggcactgctgtgcttttgkttttttttgtttgtttgtttggttggtttttttgtttgttttttggttttgtttgttttagtttttgtttgtttgtttgttttttaacttgggttattaattggcttaagactttctgaatattgatgcttttgagctataaatacattttcctgcccctgtactcagcactggtgaggccctacctcgagtactgtgttcagttttgggcatctcaatacagaaaggacattga

SEQ ID NO: 89357 - DNA, 600 bp, Chicken  19866894395721_3
gttcacaggaccatgcaggaaaacaccagaaatgtgagagctaacctgggagccacaggggactgactaggggagatcactggggtttctgtcgagcactcagcagatgcccaggtaggacagcagggatgctacttgagtccagtccttctttcttgctctccacagagtttttcttcccctgccctgaaacaagttgaaatgactttgcacrtaaggtgtgaaatgccatttrttctgctttcccttgtattttgtccaacctattcaggctattgtgaggcactgctgtgcttttgkttttttttgtttgtttgtttggttggtttttttgtttgttttttggttttgtttgttttagtttttgtttgtttgtttgttttttaacttgggttattaattggcttaagactttctgaatattgatgcttttgagctataaatacattttcctgcccctgtactcagcactggtgaggccctacctcgagtactgtgttcagttttgggcatctcaatacagaaaggacattgaggtgctggagcaggtccaaagaacagcaacagtgcttgtgaagggctgggagaatatgccctaca

SEQ ID NO: 89358 - DNA, 600 bp, Chicken  19866894395721_4
ttcacaggaccatgcaggaaaacaccagaaatgtgagagctaacctgggagccacaggggactgactaggggagatcactggggtttctgtcgagcactcagcagatgcccaggtaggacagcagggatgctacttgagtccagtccttctttcttgctctccacagagtttttcttcccctgccctgaaacaagttgaaatgactttgcacrtaaggtgtgaaatgccatttrttctgctttcccttgtattttgtccaacctattcaggctattgtgaggcactgctgtgcttttgkktttttttgtttgtttgtttggttggtttttttgtttgttttttggttttgtttgttttagtttttgtttgtttgtttgttttttaacttgggttattaattggcttaagactttctgaatattgatgcttttgagctataaatacattttcctgcccctgtactcagcactggtgaggccctacctcgagtactgtgttcagttttgggcatctcaatacagaaaggacattgaggtgctggagcaggtccaaagaacagcaacagtgcttgtgaagggctgggagaatatgccctacaa

SEQ ID NO: 89359 - DNA, 600 bp, Chicken  19866894395725_1
tacactgctggacggaggtcagcttgtctgtcaagacctcagtgatcctaacaaaagctgtgggaaagaaggccatgaggacttcatccttacatgtccacagccactaaatcacctggtctgtgtaggaacaggtctgcattttgcttgcttattcttttactactcatgtagcggcagaagacaccgctcacacaatacagcaaaggaacatttcaggagaatgagagtagcttttttctacagcagtattaagcaaacatcagcactatctgggtgctcttgtctgccctctggggkaaaaaaaaaaaaggcaattckaagtctatttcaatatcaattatatatttctatagamttaaatttgtgtaagtgacagatttgtgaaaaatgcacctaagctgcctctagactttaaagtctcttagtattcaaatgatttgttttagcttctttgctcagtcatatacttggggacataaaaattcaggtatggagcttcaacatggtcactgtataaagacttggggcagtaattacctttttcagtgtcttgagattagtccgagcattagaaaaataacgtaatatgaacttcca

SEQ ID NO: 89360 - DNA, 600 bp, Chicken  19866894395725_2
gcttgtctgtcaagacctcagtgatcctaacaaaagctgtgggaaagaaggccatgaggacttcatccttacatgtccacagccactaaatcacctggtctgtgtaggaacaggtctgcattttgcttgcttattcttttactactcatgtagcggcagaagacaccgctcacacaatacagcaaaggaacatttcaggagaatgagagtagcttttttctacagcagtattaagcaaacatcagcactatctgggtgctcttgtctgccctctggggaaaaaaaaaaaaaggcaattckaagtctatttcaatatcaattatatatttctatagamttaaatttgtgtaagtgacagatttgtgaaaaatgcacctaagctgcctctagactttaaagtctcttagtattcaaatgatttgttttagcttctttgctcagtcatatacttggggacataaaaattcaggtatggagcttcaacatggtcactgtataaagacttggggcagtaattacctttttcagtgtcttgagattagtccgagcattagaaaaataacgtaatatgaacttccaggctaagaaacatttttggta

SEQ ID NO: 89361 - DNA, 600 bp, Chicken  19866894395725_3
tgtgggaaagaaggccatgaggacttcatccttacatgtccacagccactaaatcacctggtctgtgtaggaacaggtctgcattttgcttgcttattcttttactactcatgtagcggcagaagacaccgctcacacaatacagcaaaggaacatttcaggagaatgagagtagcttttttctacagcagtattaagcaaacatcagcactatctgggtgctcttgtctgccctctggggaaaaaaaaaaaaaggcaattckaagtctatttcaatatcaattatatatttctatagamttaaatttgtgtaagtgacagatttgtgaaaaatgcacctaagctgcctctagactttaaagtctcttagtattcaaatgatttgttttagcttctttgctcagtcatatacttggggacataaaaattcaggtatggagcttcaacatggtcactgtataaagacttggggcagtaattacctttttcagtgtcttgagattagtccgagcattagaaaaataacgtaatatgaacttccaggctaagaaacatttttggtattgaagcttactgcaaagcacaggaaaatgaagactg

SEQ ID NO: 89362 - DNA, 600 bp, Chicken  19866894395726_1
cactgctaggaaaatgttgcccacacagtccatcttcattggctcaaacaaacagaaggtgctaaatccaaattatatggcaggtgtggtaagacaatccagccaagactggcaacatgtcccacagtcttcaaactgggaaggagcctggtgttatgatgttgcaagagaaaggttgtcatcttttccatcctgactcaggcagtaaaagtcttccactcagtcagtgctgagatgtaatggtcagagttaatggtttctctgaaatccaaaaatccagaaggaacattctcttcctaycccagaaaacagtgcacatctctttacctactccttatactctttatcacttactctttatccctgatggctgatttttctttaatggagaattaatgtcactactccatggactgctgttctgactctggcttgtagtagtgacaccacatctcatcaccagtaacagcgtgatccagaaaactgtcaccttcagccttgtattggttcaataggacctgacaaactttcatacagggctctttctattcctgtgtgagcatgcatgggacccacctgatgcaaacttcrtgatattcc

SEQ ID NO: 89363 - DNA, 600 bp, Chicken  19866894395726_2
tcttcctaycccagaaaacagtgcacatctctttacctactccttatactctttatcacttactctttatccctgatggctgatttttctttaatggagaattaatgtcactactccatggactgctgttctgactctggcttgtagtagtgacaccacatctcatcaccagtaacagcgtgatccagaaaactgtcaccttcagccttgtattggttcaataggacctgacaaactttcatacagggctctttctattcctgtgtgagcatgcatgggacccacctgatgcaaacttcrtgatattccaaccttaccattaccatttccaatgctttgaagccaatattcagctccatacacagtttactgatcataatttgacagtttgcatggatgacatgatcgagagtctcttctttctatggtgtgacagctgtgcatggctgacaacgtggcttgtctttcacatcactgtcaccactactgaaatgcaccacccaccacctcactgtgctcatatccgctatttggtctccacaaacattcagcatgcgtcaatatatgaaacaccaaagagaaagggagatctaaaaacac

SEQ ID NO: 89364 - DNA, 600 bp, Chicken  19866894395726_3
ttctttctatggtgtgacagctgtgcatggctgacaacgtggcttgtctttcacatcactgtcaccactactgaaatgcaccacccaccacctcactgtgctcatatccgctatttggtctccacaaacattcagcatgcgtcaatatatgaaacaccaaagagaaagggagatctaaaaacactgtgacgggactcagtcttttgaaagtagagtcccaaacccgtctttgtgtttctctctgagtttcagaaaacactttgcctaataagtgctggtgaacatcagttttgcggcacrgcacttgaacactgctgctaagtcagtgctgaaggatattggtcaacaaattgtttgcytgggggaaagtccagaccccagcctatgaagtagttctgtcattgcctgccaccagaacaggatattattctttctgccatcaggaatattgtggaatttttactgatttatggttaaatgaacagcagaaggaaattccctgaactttgaattgtgttctggtcctgcaagccccaatgcgtatcgtgtgaaccaagagaaaataagatttgtgagaatctctgagcagcaataggagct

SEQ ID NO: 89365 - DNA, 600 bp, Chicken  19866894395726_4
tgtcaccactactgaaatgcaccacccaccacctcactgtgctcatatccgctatttggtctccacaaacattcagcatgcgtcaatatatgaaacaccaaagagaaagggagatctaaaaacactgtgacgggactcagtcttttgaaagtagagtcccaaacccgtctttgtgtttctctctgagtttcagaaaacactttgcctaataagtgctggtgaacatcagttttgcggcacrgcacttgaacactgctgctaagtcagtgctgaaggatattggtcaacaaattgtttgcytgggggaaagtccagaccccagcctatgaagtagttctgtcattgcctgccaccagaacaggatattattctttctgccatcaggaatattgtggaatttttactgatttatggttaaatgaacagcagaaggaaattccctgaactttgaattgtgttctggtcctgcaagccccaatgcgtatcgtgtgaaccaagagaaaataagatttgtgagaatctctgagcagcaataggagctgctttttttaagacacatatcaccaagcaattgggaaggggtacacatcaactggcatt

SEQ ID NO: 89366 - DNA, 600 bp, Chicken  19866894395740_1
gtggaattcaacttctttccttgctgagcagcacttcaaaatgtcctggtgtcattgactgcagcgatgttggctgtggtcctcgatttacaacaggacaccatttctttttggtgttgcacatctgctcaaacagtgcagaaatgcagaccagaaagacaatgctacaatgtgtaaaggtagtcttgtctgaaaagtttggttcccagagatacaaaatagaatattgaacatgtttcttaaaaaataaataaataaaagctgaaatttatttgcatcaaatattttgctgcaacaatkggaaatgaaatttaactgcagacaaagaatcctttacagtccaagattgctcctattaaaaaagaattgcagattttgctcttcaagaagtctgcttccattctgttctcagttaattcaatcccaggaagctatcaaatagaatttgtttctgtacctatggaatcttaaaaagtttctagtatgctgagcatcagggaagttgagcagcagttagcatcagggttactattagaaagaagctcaggaaatttcctgaagtgttactgaacatcaaaaggaacaaacagctatgtggtc

SEQ ID NO: 89367 - DNA, 600 bp, Chicken  19866894395745_1
attatcaatggaacaaatggaattagattaatgtggcacaaggcaaacattgcagcttttcagactggaagaacaaatagtgctttaaaatgcttgttatttagagataacccttggaggacttctggcagcatcatttttaagcaaaattgagagaatgaaaataaaaggctgttcctacccatagagagccatgagaataaagtgaatttttcattgaattgtttatcataacataagaactgtgttcctcagaaaaaatggtcagctcagaacccatcattttatatgtgaaattakaatgtttttttttcccatgtgtgtcactttaaaattccccatagtagatttcatatgctgttttcattactcagtcagtcttctatagacctttagcagtacttcactgtctgcccttatcttttccatcttgagtaaattctcatcagaagcaatctttgtcgccttcctgctccccattttccacatccttaatatatgaagcagcacagacaatggagacagtatcctgcagaactttaccagtgatttccttttatcccagcagttgacttactattcttggcttctgtcttctat

SEQ ID NO: 89368 - DNA, 599 bp, Chicken  19866894395748_1
  misc_feature (1)..(196): n is any nucleotide
nnnnnnnnnnnnnnnnnnnnnnnnnnnnnnnnnnnnnnnnnnnnnnnnnnnnnnnnnnnnnnnnnnnnnnnnnnnnnnnnnnnnnnnnnnnnnnnnnnnnnnnnnnnnnnnnnnnnnnnnnnnnnnnnnnnnnnnnnnnnnnnnnnnnnnnnnnnnnnnnnnnnnnnnnnnnnnnnnnnnnnnnnnnnnnnnnnnntgagatatgctccagaaggtcttcagattcatatgctcacacctggctgtatattactgtcctgctccactgacttcagtggagggggaagagactcaagctaygtaggttgctctgaaagtaatgcctcctagttattttcatggaaagtgcaactgatacaaagaacacaataacrcttttgataaaacaaattaccatccgttgcatggcaatataacataatgggatgttggtgggacagttcaacttctactgccataccaccaacatctgcctctgacatcatgggttgacataataaaacagaaggcattactttcagagcagcccttagcatctggctgctctcctgaggtctgtaatatttgtatctaacagcacacagactgttggagttcca

SEQ ID NO: 89369 - DNA, 599 bp, Chicken  19866894395748_2
  misc_feature (1)..(122): n is any nucleotide
nnnnnnnnnnnnnnnnnnnnnnnnnnnnnnnnnnnnnnnnnnnnnnnnnnnnnnnnnnnnnnnnnnnnnnnnnnnnnnnnnnnnnnnnnnnnnnnnnnnnnnnnnnnnnnnnnnnnnnnnnntgagatatgctccagaaggtcttcagattcatatgctcacacctggctgtatattactgtcctgctccactgacttcagtggagggggaagagactcaagctaygtaggttgctctgaaagtaatgcctcctagttattttcatggaaagtgcaactgatacaaagaacacaataacrcttttgataaaacaaattaccatccgttgcatggcaatataacataatgggatgttggtgggacagttcaacttctactgccataccaccaacatctgcctctgacatcatgggttgacataataaaacagaaggcattactttcagagcagcccttagcatctggctgctctcctgaggtctgtaatatttgtatctaacagcacacagactgttggagttccagtgaccagcaactgcttgagaacatctgcgtttttcacttcaggtgcttcacattactgcagaagtcagcagga

SEQ ID NO: 89370 - DNA, 600 bp, Chicken  19866894395752_1
tcccccatggaccaaaagtctcaccctgagacacaagaagctgtgacatccctgcctggagtctccttagtttgaatatagcctgcatagaaaagctcaaggctttactttaaataataatttacataatattttgaaattaaccagctgaacagtttgcttgaacaaatttatttaaataacacaaccgctcattagctctttcccactttacctgacgcataccttgctagcaaaaaaagagctgctgaaatcctactgggagagcagtaacagcacccaggcatagcactgtcagarggatgctgatttacatcctgtgatcagcagatctgctctgacggattatgtattttgtatctttattaactgcacatcattttcacattctgttccagtcagcttgtgacagataactgttttttagaatcagatcttgaggaaaagaaatgtcagtgtggaaaaataaatacattactcaagcttcttgaaagtattgaactcaatgacacatcaacttaaattggtgaaatcatggtgggtagctttaaatagaaatgtttttgaagtagaaatatcacaaagcattggatattttat

SEQ ID NO: 89371 - DNA, 600 bp, Chicken  19866894395761_1
cgactgcatgtgatctcccccagttccttctaaatattgtgaagcttgagtgactttagcctcagggtgggttatatggaacatttactgggggtgacttactgaaatgtccacctcttgagagaagataaacctccagcatggaatatggtagataattagttccatgacagttccctaagtaatatgacctgtcagcaaacaatggagggactttgtattcttactgtaagaaaaagcaagatggaatatggagtgggatagaagtctcctggccaaaccccgggatcatcctgcagsgatgatactatagaaactattgaaatcttgtcttcccttgtcagccttgagccagcagttttccacttttctgccaaaaataaaggtatatttgactagagwtactcaagctctacctgaaagtaagaagatacaataaaagtgccttaagagagaaggatttctggggaagataccatcacagataagtgaggaggacaccagtgacttctggaaccagttgatggactgagctagatctgcacatttagtgtaccaagcactttcccctgggaaacctataagtatctgtatagttat

SEQ ID NO: 89372 - DNA, 600 bp, Chicken  19866894395761_2
tgaaatgtccacctcttgagagaagataaacctccagcatggaatatggtagataattagttccatgacagttccctaagtaatatgacctgtcagcaaacaatggagggactttgtattcttactgtaagaaaaagcaagatggaatatggagtgggatagaagtctcctggccaaaccccgggatcatcctgcagsgatgatactatagaaactattgaaatcttgtcttcccttgtcagccttgagccagcagttttccacttttctgccaaaaataaaggtatatttgactagagwtactcaagctctacctgaaagtaagaagatacaataaaagtgccttaagagagaaggatttctggggaagataccatcacagataagtgaggaggacaccagtgacttctggaaccagttgatggactgagctagatctgcacatttagtgtaccaagcactttcccctgggaaacctataagtatctgtatagttattccatgatttaatatgyttgtggttcaccatattactcrtgttcttggtaaacttcaaatgctttccagacagtgtatttatcatgagcaatgcaagagaat

SEQ ID NO: 89373 - DNA, 600 bp, Chicken  19866894395761_3
tattgaaatcttgtcttcccttgtcagccttgagccagcagttttccacttttctgccaaaaataaaggtatatttgactagagwtactcaagctctacctgaaagtaagaagatacaataaaagtgccttaagagagaaggatttctggggaagataccatcacagataagtgaggaggacaccagtgacttctggaaccagttgatggactgagctagatctgcacatttagtgtaccaagcactttcccctgggaaacctataagtatctgtatagttattccatgatttaatatgyttgtggttcaccatattactcrtgttcttggtaaacttcaaatgctttccagacagtgtatttatcatgagcaatgcaagagaatctgtaatctgttgctctaataaactgtactattcattaatctatctgtgaaggttctcactgggtgtggacaaattccttcagggtggttgtgagagcccattagaatgtaactagattaatcaggcagtgcactatctctgaatctgtaatcatgatagttcatctattgaacatgactagacttaaaaatgctggattgggcatcactcagaa

SEQ ID NO: 89374 - DNA, 600 bp, Chicken  19866894395761_4
gtcagccttgagccagcagttttccacttttctgccaaaaataaaggtatatttgactagagwtactcaagctctacctgaaagtaagaagatacaataaaagtgccttaagagagaaggatttctggggaagataccatcacagataagtgaggaggacaccagtgacttctggaaccagttgatggactgagctagatctgcacatttagtgtaccaagcactttcccctgggaaacctataagtatctgtatagttattccatgatttaatatgyttgtggttcaccatattactcrtgttcttggtaaacttcaaatgctttccagacagtgtatttatcatgagcaatgcaagagaatctgtaatctgttgctctaataaactgtactattcattaatctatctgtgaaggttctcactgggtgtggacaaattccttcagggtggttgtgagagcccattagaatgtaactagattaatcaggcagtgcactatctctgaatctgtaatcatgatagttcatctattgaacatgactagacttaaaaatgctggattgggcatcactcagaatctaagctcagttgcctccagt

SEQ ID NO: 89375 - DNA, 596 bp, Chicken  19866894395769_1
  misc_feature (1)..(32): n is any nucleotide
nnnnnnnnnnnnnnnnnnnnnnnnnnnnnnnnctggagagtgctgctgttaggagcaccagcttgagccccctgggtcagggagggaggtaggggcttggccctgctgccaattggtgtgggtaaggctcagctgagggctgtgctgtgccaaactgagctgtgccaaggcatgtcatgccatgagccatggggagccgtgctgtgcagtgttgggccatactgagccaagctaggccattctgagctgtgccgagatacactgtgccatgctgagccatgccaagccatgctgtgttgygttgtcctgcactgagccaaaccaagctgcgctgagctgtgccatgccgattcatgctgagctgtgccaaactgagccatgctgtgctatgccaagccatgtcaagctgagccgtgccaatctgcactgagttgtgctgtgctgtgccacactgagccaagctgagccgagccgtgctgggctgtgccaagctgagccattgccagctgtgccgagccgtgctgagccacgccaagaggcgagagcagccgtgacaagcctgcaaccataaaccctgtgtgcaggaaatcatccgt

SEQ ID NO: 89376 - DNA, 600 bp, Chicken  19866894395772_1
ccagtgttagaattcccaagtgttttgcattaatctttaagggcagagacacatcaggagatttgagattataactgagtggaatgcaggatttctaggtaatggggagaaatgttttattttaaaattgggattaaaagtgcagtaattttattactttcttataaacaattgacagttaattaacagccagggctttttcttcttaataaagacatgtcctcctgcctcattagcttaaagttgctgataaactataaattcatactgcactctcacatgaacagctcaatttttatkcagaagcccttaatttttataacttttctgtaatatcaacaaatttaatgggtaaaattcatggtcaccacacatgggactatgaatttgcatttctgaacaaaaacgataagcaataatatccttaaaggtagctgatgcaagtcactagagtataacattaattcagttgtaagttaagcaaatatatatttttaattatgttgcargtttgaccaaggatatataaaayaggaatgtttaggtcaagtgaaatatttgtacaagttagaaacatcacatgaaaaacgtaaatagaac

SEQ ID NO: 89377 - DNA, 600 bp, Chicken  19866894395772_2
taaagacatgtcctcctgcctcattagcttaaagttgctgataaactataaattcatactgcactctcacatgaacagctcaatttttatkcagaagcccttaatttttataacttttctgtaatatcaacaaatttaatgggtaaaattcatggtcaccacacatgggactatgaatttgcatttctgaacaaaaacgataagcaataatatccttaaaggtagctgatgcaagtcactagagtataacattaattcagttgtaagttaagcaaatatatatttttaattatgttgcargtttgaccaaggatatataaaayaggaatgtttaggtcaagtgaaatatttgtacaagttagaaacatcacatgaaaaacgtaaatagaactactgaagaagagcttctgtgttccccaaattggccacattttcatcagttgtatacaactctaataaaattactaacctgcacattagctttcccagaaagatcacttgatttcatcttagagcaatgcagctgcaatactactaccatcttgaatacatctagcagtaatattttcctttttttctttctccaaattttgtccaaca

SEQ ID NO: 89378 - DNA, 600 bp, Chicken  19866894395772_3
ttagcttaaagttgctgataaactataaattcatactgcactctcacatgaacagctcaatttttatkcagaagcccttaatttttataacttttctgtaatatcaacaaatttaatgggtaaaattcatggtcaccacacatgggactatgaatttgcatttctgaacaaaaacgataagcaataatatccttaaaggtagctgatgcaagtcactagagtataacattaattcagttgtaagttaagcaaatatatatttttaattatgttgcargtttgaccaaggatatataaaayaggaatgtttaggtcaagtgaaatatttgtacaagttagaaacatcacatgaaaaacgtaaatagaactactgaagaagagcttctgtgttccccaaattggccacattttcatcagttgtatacaactctaataaaattactaacctgcacattagctttcccagaaagatcacttgatttcatcttagagcaatgcagctgcaatactactaccatcttgaatacatctagcagtaatattttcctttttttctttctccaaattttgtccaacaaaatcacagggtggttttagaaa

SEQ ID NO: 89379 - DNA, 600 bp, Chicken  19866894395779_1
ttagaacagctctgaagcacggctactttgtctccatcaagttctcggcacagcagctgaagagtcggaaaaagtatccatgggaggctttagagggatccagttaccatagtcaaggaggtaatagcaacagcacgaagtttaaaggtaatgctgtgttctgtgcttggaacagagtaacgccaggcacagggacagagtaggagacgagcagctcagcagaaaatgactgcaggtagtgacagtgggctcagcataagccagcagcacatcctgacagccaagggcaaaccacacttwggggggcattaaacaaagcatagcccaacagtgaacagaggcaattctcttgctatacttgcattggtgcagtcctgggccccacaatagaaaaagaaaagatactaaggcctttgaaagcatccacagaaaggcaaagtttgtaatacggatgaaagcttcatcttgctaggaggctgagcacataagtttgagtggccctcctctgtttcctctccctctgctccccgatcaccaataacagaacagcaatagcacaaaacaggcaggggaggctcagactggacattaataaaacac

SEQ ID NO: 89380 - DNA, 600 bp, Chicken  19866894395781_1
agatttagcactaaactatagtaatgaaatgctccttaccctagtgatctccttacgatactgtggcatctttttcattaagtgggccagaccggacaacgttaactgcaaagaaacaactaagctgagttttccatccccatattagacacagttatttcccttcctgttgctgttttgcatttttcaaacgttgcagtagttacaggtttatctgtttatattcaggtttctctccaatacagtttatattaattgcatagaactaattggctgaacacacattaacaggaaaaacarctctcaacctactttcccttctgctgctttcttcttggatgaaacttctttcaacagctgagatatttccctgtgcaaaaattgaaaataatcagatacaacaggaccacagttcttatgtattttcgtacagtcttataggaaccgagccatgagaagttttgactgaaaggaaaagcttcaaagagaagcttttctcatgtagagaaaactgaaattagacaaacttttttttttttttttactattgccactaatgacagtatgcaaataacttgttagcacttcttgctaaatccc

SEQ ID NO: 89381 - DNA, 600 bp, Chicken  19866894395788_1
cttgtgtaaaaggaaagcatgtgtgaagctatcttactaggaatgcccccagatgtagtgtaatagaagacttgtccctgtggaataacctgcactgttatgttcccgtgcccactgggtccctttcaaaaaaaatacaggtagtggaagctaatccttctgttcttttctctgagattttcagtatttgctattcatttattcttattcccccaccctctcagcattctgtggaacctctgggtactcacataaatgagctctggtttctggggctgctgtgtactcaagttttgttgygggtgccaaagtagagaggacccttctcagcactagaggaggatagagagaaatactttattttcctcaatattagtggtgcaaaagcatttctggctctgatatttgcaatgaggctatcaagctctggagcttattttttccccttttttatatgattatttaactttaggcactcattaatgaaatatccatattggtactttcgtatttagcattgtgccttacataaccaggcaatccagcatgaaatgaggatacaagtcttaagaatgctttctttcctattttaattaactt

SEQ ID NO: 89382 - DNA, 599 bp, Chicken  19866894395793_1
  misc_feature (1)..(83): n is any nucleotide
nnnnnnnnnnnnnnnnnnnnnnnnnnnnnnnnnnnnnnnnnnnnnnnnnnnnnnnnnnnnnnnnnnnnnnnnnnnnnnnnnnnctggaaggtccctggtatatctttaattatggcattgctcaatacacgtaatataatgcatacaacatttcgtcatgcaaacctacaatttaacaggacaacagtttctagccagaaatgctgatctgactttttctctcagcaaatgcttaaaccaccacttaagcattacaaaatagaaaagaatctcttctctgatgggagaaattatagaaayaaatgcttatgctgtaaatagctttaaatgycatttaacatgggtgtaaatgagggtaccattagagctatactcatttacatcaggccactaactagccccaaaccctgtgtaactctagcattaattactgctgcttttttagtgaatggtcttttgttacttattcagcaggtgggctgctttactgtgtggactgcccttcattcatctgatcacaaaggtacagaatatcctatagattcccagcaaagaaaatctgaaggttacctacttgctgtttcttaccatacctaaaa

SEQ ID NO: 89383 - DNA, 599 bp, Chicken  19866894395793_2
  misc_feature (1)..(52): n is any nucleotide
nnnnnnnnnnnnnnnnnnnnnnnnnnnnnnnnnnnnnnnnnnnnnnnnnnnnctggaaggtccctggtatatctttaattatggcattgctcaatacacgtaatataatgcatacaacatttcgtcatgcaaacctacaatttaacaggacaacagtttctagccagaaatgctgatctgactttttctctcagcaaatgcttaaaccaccacttaagcattacaaaatagaaaagaatctcttctctgatgggagaaattatagaaayaaatgcttatgctgtaaatagctttaaatgycatttaacatgggtgtaaatgagggtaccattagagctatactcatttacatcaggccactaactagccccaaaccctgtgtaactctagcattaattactgctgcttttttagtgaatggtcttttgttacttattcagcaggtgggctgctttactgtgtggactgcccttcattcatctgatcacaaaggtacagaatatcctatagattcccagcaaagaaaatctgaaggttacctacttgctgtttcttaccatacctaaaaatataygtttcctttggaaaaagaagggagg

SEQ ID NO: 89384 - DNA, 574 bp, Chicken  19866894395793_3
cttatgctgtaaatagctttaaatgycatttaacatgggtgtaaatgagggtaccattagagctatactcatttacatcaggccactaactagccccaaaccctgtgtaactctagcattaattactgctgcttttttagtgaatggtcttttgttacttattcagcaggtgggctgctttactgtgtggactgcccttcattcatctgatcacaaaggtacagaatatcctatagattcccagcaaagaaaatctgaaggttacctacttgctgtttcttaccatacctaaaaatataygtttcctttggaaaaagaagggagggtgacaatagctaaagaaygcagagccttctactaatcttgcagtcagattttttgggacttcagctgccatcacccagtgaagtcacttcacacgagactaaaaacagcacttgtggtatcctggataaagttcagtacatagatcagcttggctgtgcatgttacatccatcggtctggtcactagtttgatagctaatgtattttgtgtcctctcaggtaatatttttctaacactaacacattca

SEQ ID NO: 89385 - DNA, 530 bp, Chicken  19866894395793_4
atgagggtaccattagagctatactcatttacatcaggccactaactagccccaaaccctgtgtaactctagcattaattactgctgcttttttagtgaatggtcttttgttacttattcagcaggtgggctgctttactgtgtggactgcccttcattcatctgatcacaaaggtacagaatatcctatagattcccagcaaagaaaatctgaaggttacctacttgctgtttcttaccatacctaaaaatataygtttcctttggaaaaagaagggagggtgacaatagctaaagaaygcagagccttctactaatcttgcagtcagattttttgggacttcagctgccatcacccagtgaagtcacttcacacgagactaaaaacagcacttgtggtatcctggataaagttcagtacatagatcagcttggctgtgcatgttacatccatcggtctggtcactagtttgatagctaatgtattttgtgtcctctcaggtaatatttttctaacactaacacattca

SEQ ID NO: 89386 - DNA, 600 bp, Chicken  19866894395802_1
tacttgtggatgagccactaaatttatctgggaaataagtttgaatagcaaattaattcaacaaaatcatgatctgcttgtcaagttagaaatggggaaaaaggagtacatgtcagcatattctttggaacatttttgcctgtgactgatacataattaagtagctccaagaattttaactctgatattagaccattcatcaattctttgtctttcaattgctctcttcatctgtttagttttcatcttttcctaagttccctttgttctttcaattcttttgtgttactaagcaatccrgaacaaaatgccatactctcaatgtgattttactgaaacagcagagaaagaagctgttgactgcttgatctataatacagaacttctgcatacgtatcctttcctttcctgcattcttgtttttcattccagctgccacaactgccacaaaccaatgatagcaaatagagacagtctactatgggaaaatacatttccaagcaattaagggctcattttcagctgttttgtgaaatttattgcagtttgccaccttcacaatgtagtttaggaactgttgttaaagttctctcattactc

SEQ ID NO: 89387 - DNA, 600 bp, Chicken  19866894395804_1
tccttctacccatggaaatacatcagtctgatgctatgcagaagtggatgttccagtcatcaggagaaggatgaacggttgccttacaatactcagtgtgatgatctggaaagcaggaagagagagagagagagacagggttatggtacagcactttacaaagcaaaaagctgtaaacagactgatgactgtacaaattcagttaattatgaagctaatgaaaaattaaaagggagttctaatgaaaaatttgatcaaatgttattcagattatcttttcaagtaattaagtggtctggraaaaaaaaatgttccctaaggtacattttagcttgtgatcttttacattctgagagaaaaaatgcaataaagttaggagtgagtaaaagtcagttttctttttgacaagccgccgtctataratatgctaagatatgatttcattaaatcagcatcacttttcttttaattttcaatgacattccctttggttattggtcatttcaataaataattagctttaaatgcatatcaaaacagtatttagtatccaatattttgtgtaacatatgtgcagaaaatacagcatcatccatcctt

SEQ ID NO: 89388 - DNA, 600 bp, Chicken  19866894395804_2
agagagagagagacagggttatggtacagcactttacaaagcaaaaagctgtaaacagactgatgactgtacaaattcagttaattatgaagctaatgaaaaattaaaagggagttctaatgaaaaatttgatcaaatgttattcagattatcttttcaagtaattaagtggtctggaaaaaaaaaatgttccctaaggtacattttagcttgtgatcttttacattctgagagaaaaaatgcaataaagttaggagtgagtaaaagtcagttttctttttgacaagccgccgtctataratatgctaagatatgatttcattaaatcagcatcacttttcttttaattttcaatgacattccctttggttattggtcatttcaataaataattagctttaaatgcatatcaaaacagtatttagtatccaatattttgtgtaacatatgtgcagaaaatacagcatcatccatcctttaagtccaatatactaacwtactaactgcattagttttttaacagaaacttcaaaatgagattgagtcctctaatttggaaaacaaacaaaaataataataaacaatatgagcctggttggt

SEQ ID NO: 89389 - DNA, 600 bp, Chicken  19866894395804_3
ggtacattttagcttgtgatcttttacattctgagagaaaaaatgcaataaagttaggagtgagtaaaagtcagttttctttttgacaagccgccgtctataratatgctaagatatgatttcattaaatcagcatcacttttcttttaattttcaatgacattccctttggttattggtcatttcaataaataattagctttaaatgcatatcaaaacagtatttagtatccaatattttgtgtaacatatgtgcagaaaatacagcatcatccatcctttaagtccaatatactaacwtactaactgcattagttttttaacagaaacttcaaaatgagattgagtcctctaatttggaaaacaaacaaaaataataataaacaatatgagcctggttggtggtttttggttttgttttttttttttttccctttaccattacatatttgggacattgaatagaacctgtataaagacgcttgtccttgtgatgttctggaaagatgtcacaaaattttcagagcaatctcataacacagaggagctagaacaaaacaaaatccagtatttaatgctcatatgaacaaatccatgtat

SEQ ID NO: 89390 - DNA, 600 bp, Chicken  19866894395808_1
ttctaaggaatcaaacccactaatattcagactcctgtacatcatttcagtcatgtaaaatcattcttcaaatatgctgttccacaaagggaaacataaaatgctttgaaatgagaaatcaacttgcttgttttatagcaatcagatttagatttcaacacactaacttccagtttatgacagatattaattgctgctgttttttttcccccatttcctacacttttagtgcagtataagaatctcatgcaagagaacaagaaaaaaactgaacataattaaagaaaatctatgtgctaratgaacctttacctgctgaggaaccttattgtgaattgcaggcagaagaacctggttcgacttgtcctcctgtaaatatttactgtgttcagtcccagagttgtctgtcttacacgtatagaccaaatgttgagaagtctgactttgctgaaatggccgtgaagaaatgcgggtgtgggattttgaaggaggttgtgctggagggacaggcttgatatgcagagatgatttatcatggagttccttttgcctcgtcagctcctgaaggcctaaagcatgtccaacctggaagtatggata

SEQ ID NO: 89391 - DNA, 461 bp, Chicken  19866894395808_2
ctgtaaatatttactgtgttcagtcccagagttgtctgtcttacacgtatagaccaaatgttgagaagtctgactttgctgaaatggccgtgaagaaatgcgggtgtgggattttgaaggaggttgtgctggagggacaggcttgatatgcagagatgatttatcatggagttccttttgcctcgtcagctcctgaaggcctaaagcatgtccaacctggaagtatggatatcgaagtgcctaaaacataatgaagatgttaggagccaatttaggaatccacagtttctaacttactcytactctatgggacagcacaaattttatcttcctttttcaggagtagaaaacagctcctgcctgaamaccaggaaatactctactctgagagtgactgagcactggtacagagactctatggaggagtctccatccttggagacattcaaaagctgtatgga

SEQ ID NO: 89392 - DNA, 395 bp, Chicken  19866894395808_3
agtctgactttgctgaaatggccgtgaagaaatgcgggtgtgggattttgaaggaggttgtgctggagggacaggcttgatatgcagagatgatttatcatggagttccttttgcctcgtcagctcctgaaggcctaaagcatgtccaacctggaagtatggatatcgaagtgcctaaaacataatgaagatgttaggagccaatttaggaatccacagtttctaacttactcytactctatgggacagcacaaattttatcttcctttttcaggagtagaaaacagctcctgcctgaamaccaggaaatactctactctgagagtgactgagcactggtacagagactctatggaggagtctccatccttggagacattcaaaagctgtatgga

SEQ ID NO: 89393 - DNA, 600 bp, Chicken  19866894395811_1
cctctggttgaaatctaaagagatcaagtattcaaaaaagaaaaaagcactgacctcagtacacacatggtcacaagaggtccctcccattgttaacaatctgtgatccttggcctctgtcacagacacacctacctggagtgctgactagcagagatggggacagctgaagaccctcagctaattgtccccttcagccccatgttcattgtttggaattacagtattcaaacctgacaaggagttgttgaaccctcctgtttctgatcgaggcacatttttcaatagccattacagaasagacatamacaaataaggtccsatccacagaaaacttaagtgtgaagagaaccactgtgagtaaatggacagctggagacctcctgacttcacaaagttgaagaggatggcctgttccccccasagagtttgtaaagtttactctctgtattcttgtacaggaaacccacacatgtttaattacaggagacatgaatacatgaatactgtgctgaggaatcaggaacacaatgacttaatgggaacacatgatacatgaacaggtctgagtaggctatctttaatccaccaggaattaat

SEQ ID NO: 89394 - DNA, 600 bp, Chicken  19866894395811_2
tgaaatctaaagagatcaagtattcaaaaaagaaaaaagcactgacctcagtacacacatggtcacaagaggtccctcccattgttaacaatctgtgatccttggcctctgtcacagacacacctacctggagtgctgactagcagagatggggacagctgaagaccctcagctaattgtccccttcagccccatgttcattgtttggaattacagtattcaaacctgacaaggagttgttgaaccctcctgtttctgatcgaggcacatttttcaatagccattacagaasagacatamacaaataaggtccsatccacagaaaacttaagtgtgaagagaaccactgtgagtaaatggacagctggagacctcctgacttcacaaagttgaagaggatggcctgttccccccasagagtttgtaaagtttactctctgtattcttgtacaggaaacccacacatgtttaattacaggagacatgaatacatgaatactgtgctgaggaatcaggaacacaatgacttaatgggaacacatgatacatgaacaggtctgagtaggctatctttaatccaccaggaattaattgttccaa

SEQ ID NO: 89395 - DNA, 600 bp, Chicken  19866894395811_3
atcaagtattcaaaaaagaaaaaagcactgacctcagtacacacatggtcacaagaggtccctcccattgttaacaatctgtgatccttggcctctgtcacagacacacctacctggagtgctgactagcagagatggggacagctgaagaccctcagctaattgtccccttcagccccatgttcattgtttggaattacagtattcaaacctgacaaggagttgttgaaccctcctgtttctgatcgaggcacatttttcaatagccattacagaasagacatamacaaataaggtccsatccacagaaaacttaagtgtgaagagaaccactgtgagtaaatggacagctggagacctcctgacttcacaaagttgaagaggatggcctgttccccccasagagtttgtaaagtttactctctgtattcttgtacaggaaacccacacatgtttaattacaggagacatgaatacatgaatactgtgctgaggaatcaggaacacaatgacttaatgggaacacatgatacatgaacaggtctgagtaggctatctttaatccaccaggaattaattgttccaagaactcccgatgaa

SEQ ID NO: 89396 - DNA, 600 bp, Chicken  19866894395811_4
gacacacctacctggagtgctgactagcagagatggggacagctgaagaccctcagctaattgtccccttcagccccatgttcattgtttggaattacagtattcaaacctgacaaggagttgttgaaccctcctgtttctgatcgaggcacatttttcaatagccattacagaasagacatamacaaataaggtccsatccacagaaaacttaagtgtgaagagaaccactgtgagtaaatggacagctggagacctcctgacttcacaaagttgaagaggatggcctgttccccccasagagtttgtaaagtttactctctgtattcttgtacaggaaacccacacatgtttaattacaggagacatgaatacatgaatactgtgctgaggaatcaggaacacaatgacttaatgggaacacatgatacatgaacaggtctgagtaggctatctttaatccaccaggaattaattgttccaagaactcccgatgaactcaacaggtttcattatctcataattaatatctgtatttgtcagtttaatactttggcaattatactaagatgtagattgtaaacacaaaatagagatgct

SEQ ID NO: 89397 - DNA, 600 bp, Chicken  19866894395814_1
tactccctagtgaagtactgtttaaggtatttgagctttataggtagtgatgaagtctccacagacagagcaagcttatgaagaggtagaataataggaaagggatagatgaaatttctcaagtctcatctcactcccatctgaggaatcagtgctgttaaaagcaatggaaagtgatgccaaaccacccaggagatccaccaaggcctgcatattgataagcacggtgctgaagatggcacacacccagaagtgttatgaagtaatctgcccaaataatctaaccccactgatgtaagktttacttttyccctgaagcaataatttctgacttcttttccttagacattagaattcccagtagcatcatgatggatgtacatgcttatctaaatgtcataccaggaatggagggatttttggttctcttgcttttttttgttttactgaatactctcagtttcttcaaatctacagtttcttttctatatttgatttttttattttttttaatatcacttagggaaatcaaactgaagctctcagtactatcagtactggaatggaatggaacaatttaattctctttccagacttttt

SEQ ID NO: 89398 - DNA, 600 bp, Chicken  19866894395814_2
tgaagtactgtttaaggtatttgagctttataggtagtgatgaagtctccacagacagagcaagcttatgaagaggtagaataataggaaagggatagatgaaatttctcaagtctcatctcactcccatctgaggaatcagtgctgttaaaagcaatggaaagtgatgccaaaccacccaggagatccaccaaggcctgcatattgataagcacggtgctgaagatggcacacacccagaagtgttatgaagtaatctgcccaaataatctaaccccactgatgtaagktttacttttyccctgaagcaataatttctgacttcttttccttagacattagaattcccagtagcatcatgatggatgtacatgcttatctaaatgtcataccaggaatggagggatttttggttctcttgcttttttttgttttactgaatactctcagtttcttcaaatctacagtttcttttctatatttgatttttttattttttttaatatcacttagggaaatcaaactgaagctctcagtactatcagtactggaatggaatggaacaatttaattctctttccagactttttttttaatcct

SEQ ID NO: 89399 - DNA, 600 bp, Chicken  19866894395817_1
aagacactgaagacttgcttataaataatattaggaagaaaagaaactggtaaaagttagagatagcagtcacaaggggttttaactagagcagagatgaacttaaaatacaaacagttcattgccttagttttgcgagtttttaggcagatactcacattcattcaagacgcctcagcctggagtttcaggatatgtatttctagccctgcacacactataggcaccatgtattctagcaccatcaaatggttagttacaagtacaaaataaactgtctactctgtgcagttttctccmaatctatagaactgcatgttttcatgtggcacaaatttagtacagtaagaactgcacgctgcagaacagttggaagaacgtttgtcaaaagaaaagacatcttcctatagcacagaagcttagatacatagatgcgggacaaacatgaagaatttctctggagagcctctatgccagtaaaatataacacaatgatggggacagcgaataggacataaatctgagaaaattctgctttgcgctgtaggtttcagaaattgctgtatgaataggcagtatccagtaccaactaagatttgt

SEQ ID NO: 89400 - DNA, 600 bp, Chicken  19866894395828_1
aattttttctctgaaacagtggtcaggcactggaatgggctgcccagggaggtggttgagtcatcattcctggaggcgttcaagaaatgtttaggttttgtatgtaatatgggaagtagtttactggggttatattgatagtaagtaaatggttggactggatgtccttggaggtcttttccaaccttggtgattctatgattcttcactcacttgactctggaagttagagccttcagcatagttacagttatgatgtggaggtgagagttgaaggtttttccaggttcaaggaaatcygaaaggatcactcctagcccaaaaagctgcacatcactttgccagttgagtcttgcatcttgaacttttaatttgatgaggaattaacatgttgccacttcacggattgccattttgattgcagcttgtaatagcaacaccacatctcatcaccagtaataatgcaatccaagaagctgtcaccttcaacctcatattggttcaatagatcctgaaaaacctccatgcagtgttctttcagttcctgtgagggactcacctgacacaaattttacagtattccagtgttgctaccatcat

SEQ ID NO: 89401 - DNA, 600 bp, Chicken  19866894395831_1
agggtgtatcggggaggaggcggtttcctccacaggacacagcaggggtacttggcagtatggggtactcaagcataggtgccccatgtggagagagccccggtttgctttgtgagagccatatctttcacagaaagaacagcatttcctgtcactgaggttgagcgcaagagcagatgactttgccaggagagagggcttatggtgaaatggtttctcctcctaaagctccggagatggcgtatgcagacacacacatgggagatttctctcaacccaaaggaaccggggagcccccasggcgtagatgtgctgcaggctccttatccagtccaagctcgcactgggaagcagtgcaaggtgctggaaaccctggtgacacgaggttacctgcatgtcctcgctgtgtggctgcgactgggcttcttggctaagctgcccagagactggaaatccaacctctggtactttccccctttctttagtcattgctttggtcaagttgaagccttcagagactggatccagccacccaccctaggcaagcagggcacagaggggagctgccttgtcagaggtggcagcgtggagatacggaga

SEQ ID NO: 89402 - DNA, 600 bp, Chicken  19866894395839_1
aagaaagaaagaaagaaagaaagaaagaaagaaaagagcaagaaccttattatcttgcataaaagacatcaggtattttatgcaaaagctcttcaggtcccatgatctattcttttcaaaatatctttgagcccaatgcaataggtaccctcaaggctgactgcagccactaggacgttcccatctggcctgccatcttgtctgtagcagacagagaccagatgttcaaggaattaaattcacagggacagatgaacttcttcccatgccttcccagtctggtatggagagaaacagatyactactgtgcccatcgcagctggggtgaggacaggagggttaatagaactccttctgcccctgtcttggtttgttcattagaatccaaattaaaatcttaaatgtctccttgcttttttattgagcacgtagacacataagcaagataatttggggtagggcataaaaaacactaactccttgagtgccctcttgcctcaggctaaagctcctcatcacatagtacatcggaggcaatgtatacaaacccacattaagtacaggatgagtgcatgtagccactgcatgtaaatggggagc

SEQ ID NO: 89403 - DNA, 542 bp, Chicken  19866894395839_2
tgttcattagaatccaaattaaaatcttaaatgtctccttgcttttttattgagcacgtagacacataagcaagataatttggggtagggcataaaaaacactaactccttgagtgccctcttgcctcaggctaaagctcctcatcacatagtacatcggaggcaatgtatacaaacccacattaagtacaggatgagtgcatgtagccactgcatgtaaatggggagcttacaggacccaaatgcaaatgtggtcttcccctacaatttattcttttgttgataccttggtgagtaaayccaggaaatgcagggcatggtgagctgtatctgactcctgacccacaggccctatgggtatggcaaactgtagccttttctccttgctgaaggccattggaggaggaggagcttagagtagataccagtagaaaagatccttcaggctgcccagggagatggtagagtcaccacccctggaggtgttcaagaaacatgtagatgtggcactgagggatgtgggctagtggtggtggtgtgtt

SEQ ID NO: 89404 - DNA, 600 bp, Chicken  19866894395845_1
aaaaaaggaagatatatttgtgtttcatgtggctactgccactaagcagcgtagattgtatttctgttgctattcctggcatacatagatcacatagagtcactgcagtgacaagggactgaatctcattgtagactttttaatgtatctggctacaagaggggcatggtgacggctctgcaacgctgactttgtgctcctctggggaggactgctgctcactcaataatgaacaagcgtcctcctctttcccttttgttcgcaagaagctagctacagtccaggcgttcctgtgacctytttcttctagaacgaaaggttaattttgaacacttaagtttctatgagaagtcctgatatctatttatttttacttaaggagagcaaactctcatctgtaagagctctgaaggatctgttcagaaaaatacacttttgttaaacacttcggagtacacagagctgaaacaattagaaaggtcatagaaaggtttagaaagaaattaaaagtatccctactcgatagtgtaggcagtaaagaaatgtagcaagaagatccaagggctttggatcttgctacacaagggcattatgtacaag

SEQ ID NO: 89405 - DNA, 599 bp, Chicken  19866894395847_1
  misc_feature (1)..(39): n is any nucleotide
nnnnnnnnnnnnnnnnnnnnnnnnnnnnnnnnnnnnnnnttcctgcaagaaagcagaactccagtgttattctggagtggtttaccataggatggttcttctttttagtaaggagaagttcagaagcaaggccaagtcacaggtttcggatcaggatcctggcttctttaaaataccctgaagttgggaggtgcttgccctggaacaacagctggcatatgttcagctttctaaaatagccctgcccaaaatccaggctctggaccccaccctccaaggctcatgcctctttcttaacaraagtgggaataaaaggtcactctcatttggtctgaaactttcacttcacaacgcgttctgtttttcagttttgctctcttaactcttcctggctgctgcaaaacccctcttctgacctctcgtgccctctcaaccagcagctttccaggcattgtccttcaggggttaagcaaaggagccctaagagaagttgccactaattaacttcgacagttgaaatccttgcaattgctattgaacttggaaccttgtgtgctattgttcttagctcctctgttggagctttgcgtgatggtggt

SEQ ID NO: 89406 - DNA, 599 bp, Chicken  19866894395848_1
  misc_feature (1)..(206): n is any nucleotide
nnnnnnnnnnnnnnnnnnnnnnnnnnnnnnnnnnnnnnnnnnnnnnnnnnnnnnnnnnnnnnnnnnnnnnnnnnnnnnnnnnnnnnnnnnnnnnnnnnnnnnnnnnnnnnnnnnnnnnnnnnnnnnnnnnnnnnnnnnnnnnnnnnnnnnnnnnnnnnnnnnnnnnnnnnnnnnnnnnnnnnnnnnnnnnnnnnnnnnnnnnnnnnaaaagtccaatggcttggaactttgaaacataactttcacacaggttttcagttcaatttctcatcagtaattctcagaagatggctttgtttycttgccaagagctatctcttaatgaaagacattttcttcaaaataacaaaggtttcaagggacctatgtttatttgtaaacaaaacatcttagtatgcacacacattattacggatggctgtcactcgtgtttcattccagtggaattgctggtgaaactatgactaataaaattggttgtgaaccaaaattcaataacagcaaagttaattacatgtttgcaagagtataaacttgcagtttgatcaatatgtaaattctgaccttcaatggtcttttcagccttcttttaagctttt

SEQ ID NO: 89407 - DNA, 513 bp, Chicken  19866894395848_2
gtaaacaaaacatcttagtatgcacacacattattacggatggctgtcactcgtgtttcattccagtggaattgctggtgaaactatgactaataaaattggttgtgaaccaaaattcaataacagcaaagttaattacatgtttgcaagagtataaacttgcagtttgatcaatatgtaaattctgaccttcaatggtcttttcagccttcttttaagcttttagtcttgtaaagattaacttaactgcctagaacttcattttatgaagttaccagaatatgagaataaggattttcraatggtaagattatatttttcagaatgtttaaacatacagatattatagatgctgtaagcattaattcatctgagtagcagtatttaactaatacataattactctaatgagaacagctaattaacatttttgatttttttttaattaactattctgacatagcacgcttgttcaaggctcccatctgaactggagttttgtataaggaataa

SEQ ID NO: 89408 - DNA, 600 bp, Chicken  19866894395852_1
gttgccctagctttgtgtttttgcaagatttcttattaaccaaattaaataagctcatttccaaatttaagaaattatagatttgcttactgagaaatactcaatagcttcaagtgtttggttatccattcaggattcttctttgtgctggtgtagaacagcctcacattaattcttcaaacatggcttcagcagagtgtttgtcagccacctaatgtccataggcttttgtatttaggtgacaattatgttcctccttccttcatgctgtgtacagcctgagaattattacaaacaacrtgggcttggcattttctgtgagcagtgggtaattttagactattttactacctgcttgagtttgtatgtgaaactaaattacacatattgctttgttatgtctgggattggcttatgtctatatagagataaggtacataaacactgaaaatagcaaaatgatttcacataatgcattacttcttctcagattttaagaaaaaattgtgttatttcagaaaataattaatttcctttacaaaaatagaaatgaatgcaggagtgtctgattattatgattgttactggatttagctggaa

SEQ ID NO: 89409 - DNA, 600 bp, Chicken  19866894395855_1
gtatccaaaggggagctacagtaaagaagagtacagactccttagtggggtctgtgatgatagaacaaggggaaatagcttcaagctcaaagaaggtagatttatgttatatataagggaaaatccatccctggagactttcaaggtgggactggataaagccctgggcaacctgatgtagctgtggtgtctctgttcattgtggaggagttgggctgcatagccttcagaggtcccttccaactctaaggattctatgattctgtgatttaaaggacagacaaacttgctttgtgaatragagaataatatacaggatgcctctgccattcattcacagaggtaaattcaaatagcacttgggaataggagaaaaaaaatgaagcagagggaggcatacaaatgattgtacttttagctggatttgcatgtttttcatgcaaactaatatagtaagtaaatggtttggggatgctgataatatcactacacgtacctgaaattgttgtctgagatgtaaaggcaaaatgctctgcgggttaggtatcaaggaaagctaagagaagtttgaggggtctattggtagccaaaggggaggag

SEQ ID NO: 89410 - DNA, 600 bp, Chicken  19866894395857_1
cttgctcatcactcttcacccatcctcgtggcttgacttggaacaggctcctgaacatttctgttctgcattaagcattgatcttcatggataaacggaaatactttgattttgcatcagactgtttggctacaagaaagaaaaaaataaaccagcaaactttctgttatccctgagagctctgcctgaaacagagaggcctccattccctctcagcagcagtgatgagaggcagtgctgcttccctggtgtgtgccccgtgagcacccaggagctgcgaggtgtctgtctggaggttaytgacattagggataagcttggttcttgccatccaactggcaatttgtactactgaagagtgaagctgatggatctgtcagggcacggttttttgtagggcactcagtgccttcctgctcccagagatgctggaatcacctgagctgttggctcctctactgtgttcaaggtgtatttcttgttcatttgtggcaccacataaaagctgagggagaagtttaatgaatggaagtagcgcttgccaagattatctttccttggtgcctstttcagatcggtcctttgaacactactgtttag

SEQ ID NO: 89411 - DNA, 600 bp, Chicken  19866894395857_2
ccaggagctgcgaggtgtctgtctggaggttaytgacattagggataagcttggttcttgccatccaactggcaatttgtactactgaagagtgaagctgatggatctgtcagggcacggttttttgtagggcactcagtgccttcctgctcccagagatgctggaatcacctgagctgttggctcctctactgtgttcaaggtgtatttcttgttcatttgtggcaccacataaaagctgagggagaagtttaatgaatggaagtagcgcttgccaagattatctttccttggtgcctstttcagatcggtcctttgaacactactgtttagtctgccaccaaactgctaccttcagcagtgagtcagctgcacacgaagctttgcttcgtcagcttagttaacgatacagcttaaacttttaatgagttctagttgaaaaagagcagtaagaaacaggatttcagcctcctgcctgcgataggcactgttgagagatatgctttcagaacataaagcagtgaaatgctgctctgagggggaacagcctatgaggtacctgtgtgatcccagactaaaatctgtgattggagatgtttt

SEQ ID NO: 89412 - DNA, 600 bp, Chicken  19866894395857_3
ttcgtcagcttagttaacgatacagcttaaacttttaatgagttctagttgaaaaagagcagtaagaaacaggatttcagcctcctgcctgcgataggcactgttgagagatatgctttcagaacataaagcagtgaaatgctgctctgagggggaacagcctatgaggtacctgtgtgatcccagactaaaatctgtgattggagatgttttccagcaaggctgtgaggctcgagtgggaacagaaagagatgagcaccctttgctattgcatccaggtccttctgggtgagggcagcmgtgcaagtggctggtttagaaggagcacctctgttccaccatatgtgggccatgaaatgctgacaaattccattccttaagttgaaaaaattcagagctcagactgtgaaacttcagcattgcttcctgctgcatatgtattgtgtaactgaaaacctctcttttccaccaggcctggatgtgacaacaggctgtcttggagacgagcaagggctgtgttctgagagaggatgctggctgcctcttccagtggtctgtgtgcgtgcagggagcgaggcaaggggctgcaggtagaaaagg

SEQ ID NO: 89413 - DNA, 599 bp, Chicken  19866894395862_1
  misc_feature (1)..(157): n is any nucleotide
nnnnnnnnnnnnnnnnnnnnnnnnnnnnnnnnnnnnnnnnnnnnnnnnnnnnnnnnnnnnnnnnnnnnnnnnnnnnnnnnnnnnnnnnnnnnnnnnnnnnnnnnnnnnnnnnnnnnnnnnnnnnnnnnnnnnnnnnnnnnnnnnnnnnnnnnnnnnntgtttgtgtttaaataaaactttccacagcacacaaacatcaacatatctcctccagtcccttggcgctcattgtttatggcatacagcacagaatatgccctcccaccctctcaattataaatagtcctttactgatggtgrttttccattatcagttttacaacagaatgtcattctgactttgaaatttcaagataacactgcagaaaaaaattgcatggtttactgttttgaactgaaacttgagaacaaggactgctggtttctgttcctctctcagtcagcactttgctgtgtgactatggacaggttcctcaattttctttgctctacattttttctgtctgctattttccatatcctacactcaacctaactttgagtgggtgaaagcagttttctagaattctctctcatagcttacaatagaattgaaacta

SEQ ID NO: 89414 - DNA, 600 bp, Chicken  19866894395862_2
cctacactcaacctaactttgagtgggtgaaagcagttttctagaattctctctcatagcttacaatagaattgaaactaatttactcatagaaggcagggatagaaaagataattgctgctcagatgaattgttttgtagagaaaagactagagattacacaggaaagaaaacccaaccaacaatgtgaaaatccccatgcaccattcaatatacccacgatgaggtgtgggaaaaggagatgtggagatgcatggtaaagaaagaaatccagcaaaaagagagagaaaaatatccaaragagtaaaataaaagtgtccttcctcacagagctaaataaaggaacatgtaactacctatcttttaccttcacgtatttttttttccccactaaaatatggaagagggaaaataaaattggaaagggggataaaagggagtagaaaggaaggaaaccacaagcaggatattaacagccagatcaaaacacgtgttgctaaagtacagaaatgagagccacaaacagtagtctgggagtagaggttgagagagtattcctgatattgcagggaagtttcctttaaaatttatagggaatgt

SEQ ID NO: 89415 - DNA, 600 bp, Chicken  19866894395869_1
ctgaacttactttgttctagccttactttgctctgctgttttcagactttttttcttttttaagaaaatacatctttatcagaaggtcttgctcagaaagttccttctaattttccatttcccttcattacctttgaatataggacatatttttctccaaattgaaatacacccattcctgtggtactgtcctaatgctaattccatatagaagagagggataccaccgaagatggccataattgtgtaaggaatgaggaatgctcctgcaagagacaaagcagatcattataactcttyataggacatctctcccactagtttcagcactccatgaacaattccttttgttccccagggaaaatgcatatcccctccctagccagtrtgccaccctgagttaccatgggattctcacaactaactacacaacagtgtgactaagaagtaacactcaggccaaacttctcatgtttctgtaacaagtatatgtgggattcacaaagactgtactgcctctacagtacgagatgagatacagacacagtgatgaatgtctttggtagaatgcctgagtacatcagggaggcagaagtcttc

SEQ ID NO: 89416 - DNA, 600 bp, Chicken  19866894395869_2
ttgctcagaaagttccttctaattttccatttcccttcattacctttgaatataggacatatttttctccaaattgaaatacacccattcctgtggtactgtcctaatgctaattccatatagaagagagggataccaccgaagatggccataattgtgtaaggaatgaggaatgctcctgcaagagacaaagcagatcattataactcttyataggacatctctcccactagtttcagcactccatgaacaattccttttgttccccagggaaaatgcatatcccctccctagccagtrtgccaccctgagttaccatgggattctcacaactaactacacaacagtgtgactaagaagtaacactcaggccaaacttctcatgtttctgtaacaagtatatgtgggattcacaaagactgtactgcctctacagtacgagatgagatacagacacagtgatgaatgtctttggtagaatgcctgagtacatcagggaggcagaagtcttctctgtccagtctctccttgaggagatttatcttttggctggaacatccgtgagtctcagtcacagcttttcctgaggagtgttttgac

SEQ ID NO: 89417 - DNA, 600 bp, Chicken  19866894395871_1
tggctgacatcttatactggaaacattatgttacacttcagtgggatcctgcaaaactgggaattgcagtctggcactgagttgggactcagtctcagtctccttgttgcagacttctttgttttgtaacaaacacataacaattctaatctgtactaaaagaagctgtagtttcggtgtcaagatgctgcatagagattaaattcagacctttggatagagccaagttgcaaatggtaccactggtataatgagttctcaacatcctgacggcaactgaatggtgttaactgtgtacckgaggatgagctggggccggcagggttgctcggctacctgtaattcatggggcttcaaaactaaatccaatttgtccagcaagagtccagcaaatatttcccagtgatcaggtacagctgcttactttcatgaaggaaatattgaactgtcagttgcattactaaaaagaaaggactcatctttaagaacaagtgaccttgtgtgcgcttctatcaaatagcactgtaaatcagtgctgctgtgttgagggtgatctgagccctggaattctccttttccaaattcagctgggccccagag

SEQ ID NO: 89418 - DNA, 446 bp, Chicken  19866894395885_1
gttttcctctagaaaataatttagaaatggaaatcacttgaaggaaaacttcatgaactgtttcgtgcctggcagacagcttttgtactgaatgtgacaaacatatggatcagaaatctcatcacagtgtgtatgagacaaaatgtggttaccgcacaacagattttagataagctttatcctccataatgcatagttactcacgataagttcattctgtccatgaataatgtcatgaacatggaatatgtaacactgctctgtgggaaccctaataactttccttcctagataaaatcrcatagtttgatgcttactgtggggtttaagtatacatttggccaatttaaatcacatgtaagtgttacaggtgaagaaggactgcacacttgctatacatacatttaggagaacagggactttcattttaagctgctctgtcttct

SEQ ID NO: 89419 - DNA, 600 bp, Chicken  19866894395888_1
tatcatctagcaacaaaaggctgagtaggtcacccagcgtgtgttcccataaatcacatattttatattgatcctaattaatctatttacattagatcaactcagcatttataactctgagtctcatgaatagtaagagtaacagtgctgcaaagacctgagggatggaaggacactgaccaggtgaggtacacacaccatgccagctggatggtgtctcagcctgccagagtagcactgattcctggtgtcctggccagtttgaatggaatagaaaatgtgttcctgcactcaaacagsaattgttggattgcaagcttttgagcaaggtgcagcttttttgactggtttgaccaatctttgagttttcaaggaaacaaaagcaagctatccaagaaaatgtctaacatcttgcactagarttgaactaggaacagtggaaatcttttctgtcaccgttgtcagcagacctagtatctgaagccagaaatttacttagtttcactgctttaacagaaaaccaaggctgtaaaaaccattttggtggtactagaccatctgttctccttctggcctaagaaggaaggcttctgaacaggg

SEQ ID NO: 89420 - DNA, 558 bp, Chicken  19866894395888_2
ctcatgaatagtaagagtaacagtgctgcaaagacctgagggatggaaggacactgaccaggtgaggtacacacaccatgccagctggatggtgtctcagcctgccagagtagcactgattcctggtgtcctggccagtttgaatggaatagaaaatgtgttcctgcactcaaacagsaattgttggattgcaagcttttgagcaaggtgcagcttttttgactggtttgaccaatctttgagttttcaaggaaacaaaagcaagctatccaagaaaatgtctaacatcttgcactagarttgaactaggaacagtggaaatcttttctgtcaccgttgtcagcagacctagtatctgaagccagaaatttacttagtttcactgctttaacagaaaaccaaggctgtaaaaaccattttggtggtactagaccatctgttctccttctggcctaagaaggaaggcttctgaacagggaaattatagtggactaaaggatatttattaagaagatttggttaatattatcatttcagaagatcatgtcttcctatttt

SEQ ID NO: 89421 - DNA, 600 bp, Chicken  19866894395889_1
ctgttatactgtatatattaaaatttctgtctaaaattgttggtgattctgagatatgcattattttttcttctgtatattgatataagaaaagtatataggctatactttgaatccagacattgatacctcttgagtcagtgtagtcttaaccaggctgaatacatcagatccatcttttaaagttaacacagaccctttaatatgagattggaaactgaggaatcttctcctttttctgggtgaaatatttgatcactgagttagacatttatttagattccttaccaagtggcaaaygctacagcactgtggaatgatagaagttagtttagaaactcttaccggggtgaggagataggggtttggaaatacaattttggatttgtcaaggttttacacaagagtgctacatgtcactgcttcttactgggacaagtcttagatgtgtgattctatctcgcgtaaacaccttctgcatgtggtattgtgtattacttttgtgcatgtagcctagggctcagatctccgaaagcatttggatatctttaattgatgaatgttctgtgcaggaattatttttgggatctggtctaagcc

SEQ ID NO: 89422 - DNA, 600 bp, Chicken  19866894395894_1
acatctccacgtgggtcttcagcaatgcaggtactgaacccctgccagggcccactttgccctctgtctgcttccacgtgtcctgcttggtctagcactgacgcatcagttcagggaagcgctcattctctgccagctgtgtgatgggctgcacacagtccagctggtgtgagttgcacctcctgtagtgcctcacaggggccgtggtactgtggtttcccagctgctttggggaccctgccctggcattgctgtgtgaagcattcagctcacttctctgcccttccgtggagagctgamctcctgcccacggatctgccatagggtggacgaagggcagttggaaggaagcaggttgcaaaccagactgcaccaacacgtgctggtgctgtggatcattgtggtttgtccaggttagaggacagccaggggctgagtgcaccgggatggctggccctgtcctggtggtgatgtctgttggtgcacagagccccgtgtaggctgctgctgtgctgcctgcagtacggggaggggacagagaggctctgagcagctgcagggcagtagggaggccaggattctctgctttacaccgcacgg

SEQ ID NO: 89423 - DNA, 600 bp, Chicken  19866894395911_1
gcagtaaagccttgcagtacctgtcactgtctcctgttctacatctgactaacagtttaacccaagtagaatgagcagatgcacacaagaggaatatataccctactcgaatctgctttcatttagatgtttactaattcagtgactgacattcctaagttacacttgaggagaaggccaatgagcatctgtcaggaatacagcctttttattttttcacttctagccacagccccaaattattttactcaaaaactactttctttttcattacatatcagttcagaaatctcaagcacmattttttctttgtgaccaataccttatgtgtgtcctcacgaacttccttagtgaaacgtttaatcattctccgaacataagtctcaaactcagctttccttttctctctgcataagattagaaaataaaaggatattackgtttcctctgtatctgccttcctagattcctgatctgctctctactacctttccaattttaccttctctctcttttcttaagttgttctggggtttcaatctctatctcgacaggattgcttggcagcaccaccgctggaagaacagcactttcttctaa

SEQ ID NO: 89424 - DNA, 582 bp, Chicken  19866894395911_2
agtgactgacattcctaagttacacttgaggagaaggccaatgagcatctgtcaggaatacagcctttttattttttcacttctagccacagccccaaattattttactcaaaaactactttctttttcattacatatcagttcagaaatctcaagcacmattttttctttgtgaccaataccttatgtgtgtcctcacgaacttccttagtgaaacgtttaatcattctccgaacataagtctcaaactcagctttccttttctctctgcataagattagaaaataaaaggatattackgtttcctctgtatctgccttcctagattcctgatctgctctctactacctttccaattttaccttctctctcttttcttaagttgttctggggtttcaatctctatctcgacaggattgcttggcagcaccaccgctggaagaacagcactttcttctaacttatctgtggcaggctcttggagttctgggaagaaaacaaacagaacattactagataatacatgaacaatgaataatacagcaacaaatagtcaaattcaaagcactaccttcaaggcag

SEQ ID NO: 89425 - DNA, 600 bp, Chicken  19866894395920_1
agtgtttagcaaggtaatgcccttcggatgtatcttttagtgattccataccagaagaaattgccctgtatttagttataaattgcaatgtagctgtacattgctgtgacattcatttttttagcaaaagggttaagtgaaaattctgatgcaagaatcaaatattgagcacttgaattgtaaataagattgttccaaggtttcaatttgctgtattagtcagtgacaagtacaacatttttaatgcatgccataagatcagtctgcccaaagaaaacaagcagtagtctgtgtgcatcyctagcaattggttagggttatatgtatgcagctttgtttctgataatggattcaagttcaacataaataaaaacagtgtacattaaggaggataaatatctaattgccataatctgcaacrggaattgaatggccataaacatgctaactatggaaaacaattctttagaacaaaaygtaggtagttgggtgattattaggaaaayatatgtacttmttttgtctattaagccttcaaagatgcaatctatgatttttaatatgctttttttaatatatattggatgttttgagcctttt

SEQ ID NO: 89426 - DNA, 600 bp, Chicken  19866894395920_2
tagcaaaagggttaagtgaaaattctgatgcaagaatcaaatattgagcacttgaattgtaaataagattgttccaaggtttcaatttgctgtattagtcagtgacaagtacaacatttttaatgcatgccataagatcagtctgcccaaagaaaacaagcagtagtctgtgtgcatcyctagcaattggttagggttatatgtatgcagctttgtttctgataatggattcaagttcaacataaataaaaacagtgtacattaaggaggataaatatctaattgccataatctgcaacrggaattgaatggccataaacatgctaactatggaaaacaattctttagaacaaaaygtaggtagttgggtgattattaggaaaayatatgtacttmttttgtctattaagccttcaaagatgcaatctatgatttttaatatgctttttttaatatatattggatgttttgagccttttaaatatgagctgggagtgtattatgtgaactacatagaatttgttgtgttgtacgaacgtagatcctttgtagaatctgagatcagtagagagcagacctgtacagctaaaagttttgata

SEQ ID NO: 89427 - DNA, 600 bp, Chicken  19866894395920_3
ttgtaaataagattgttccaaggtttcaatttgctgtattagtcagtgacaagtacaacatttttaatgcatgccataagatcagtctgcccaaagaaaacaagcagtagtctgtgtgcatcyctagcaattggttagggttatatgtatgcagctttgtttctgataatggattcaagttcaacataaataaaaacagtgtacattaaggaggataaatatctaattgccataatctgcaacrggaattgaatggccataaacatgctaactatggaaaacaattctttagaacaaaaygtaggtagttgggtgattattaggaaaayatatgtacttmttttgtctattaagccttcaaagatgcaatctatgatttttaatatgctttttttaatatatattggatgttttgagccttttaaatatgagctgggagtgtattatgtgaactacatagaatttgttgtgttgtacgaacgtagatcctttgtagaatctgagatcagtagagagcagacctgtacagctaaaagttttgatacaatttgaaatagctttagcatgagagttcagttttagttgagaaatgatagcgat

SEQ ID NO: 89428 - DNA, 600 bp, Chicken  19866894395920_4
tttgctgtattagtcagtgacaagtacaacatttttaatgcatgccataagatcagtctgcccaaagaaaacaagcagtagtctgtgtgcatcyctagcaattggttagggttatatgtatgcagctttgtttctgataatggattcaagttcaacataaataaaaacagtgtacattaaggaggataaatatctaattgccataatctgcaacrggaattgaatggccataaacatgctaactatggaaaacaattctttagaacaaaaygtaggtagttgggtgattattaggaaaayatatgtacttmttttgtctattaagccttcaaagatgcaatctatgatttttaatatgctttttttaatatatattggatgttttgagccttttaaatatgagctgggagtgtattatgtgaactacatagaatttgttgtgttgtacgaacgtagatcctttgtagaatctgagatcagtagagagcagacctgtacagctaaaagttttgatacaatttgaaatagctttagcatgagagttcagttttagttgagaaatgatagcgattttttcttaacattttaaagtgggaaata

SEQ ID NO: 89429 - DNA, 600 bp, Chicken  19866894395920_5
agtcagtgacaagtacaacatttttaatgcatgccataagatcagtctgcccaaagaaaacaagcagtagtctgtgtgcatcyctagcaattggttagggttatatgtatgcagctttgtttctgataatggattcaagttcaacataaataaaaacagtgtacattaaggaggataaatatctaattgccataatctgcaacrggaattgaatggccataaacatgctaactatggaaaacaattctttagaacaaaaygtaggtagttgggtgattattaggaaaayatatgtacttmttttgtctattaagccttcaaagatgcaatctatgatttttaatatgctttttttaatatatattggatgttttgagccttttaaatatgagctgggagtgtattatgtgaactacatagaatttgttgtgttgtacgaacgtagatcctttgtagaatctgagatcagtagagagcagacctgtacagctaaaagttttgatacaatttgaaatagctttagcatgagagttcagttttagttgagaaatgatagcgattttttcttaacattttaaagtgggaaataatatattctaa

SEQ ID NO: 89430 - DNA, 600 bp, Chicken  19866894395922_1
agactgaagactcacagtaaagcaggctgcaagagcttctagagcacctttcaacaccatctcaacatgtattctgtgatatcaacccttcacattcacaagaaaatcaacttcacgttcagttttaaaaacgaatgctgagggccatcaacaactgcaaaaatgatgcgatttacactggcaattgaaacttaggaaaagagacaacaattttttaatgtaggaaacttcaacataaaactttttcgctgtgaggacggtaaaacatgggaataagagtccagaaaagctgaggaatcwccatctttggagagactgagaactcactttgccaaggccctragsacccagtttaaaagggtgtatttgagtagaaggtccggaggtccccaccaacctatattctctttgctttcatcaagactatgctgctaccttttggacatatataagygttctccaaacctcactgcagaaatgtatatacaaagattagcagaagtgctcatgtacagcactgctatttttgtggagctctgggcaaagagcaagtcagcccacacacatcacttcaagaggtcctgcagcaatttaccagat

SEQ ID NO: 89431 - DNA, 600 bp, Chicken  19866894395922_2
agcacctttcaacaccatctcaacatgtattctgtgatatcaacccttcacattcacaagaaaatcaacttcacgttcagttttaaaaacgaatgctgagggccatcaacaactgcaaaaatgatgcgatttacactggcaattgaaacttaggaaaagagacaacaattttttaatgtaggaaacttcaacataaaactttttcgctgtgaggacggtaaaacatgggaataagagtccagaaaagctgaggaatcwccatctttggagagactgagaactcactttgccaaggccctragsacccagtttaaaagggtgtatttgagtagaaggtccggaggtccccaccaacctatattctctttgctttcatcaagactatgctgctaccttttggacatatataagygttctccaaacctcactgcagaaatgtatatacaaagattagcagaagtgctcatgtacagcactgctatttttgtggagctctgggcaaagagcaagtcagcccacacacatcacttcaagaggtcctgcagcaatttaccagattaagagagtaccaattcacacggagaaacaagaccttattcc

SEQ ID NO: 89432 - DNA, 600 bp, Chicken  19866894395922_3
acctttcaacaccatctcaacatgtattctgtgatatcaacccttcacattcacaagaaaatcaacttcacgttcagttttaaaaacgaatgctgagggccatcaacaactgcaaaaatgatgcgatttacactggcaattgaaacttaggaaaagagacaacaattttttaatgtaggaaacttcaacataaaactttttcgctgtgaggacggtaaaacatgggaataagagtccagaaaagctgaggaatcwccatctttggagagactgagaactcactttgccaaggccctragsacccagtttaaaagggtgtatttgagtagaaggtccggaggtccccaccaacctatattctctttgctttcatcaagactatgctgctaccttttggacatatataagygttctccaaacctcactgcagaaatgtatatacaaagattagcagaagtgctcatgtacagcactgctatttttgtggagctctgggcaaagagcaagtcagcccacacacatcacttcaagaggtcctgcagcaatttaccagattaagagagtaccaattcacacggagaaacaagaccttattcccct

SEQ ID NO: 89433 - DNA, 600 bp, Chicken  19866894395922_4
ctgcaaaaatgatgcgatttacactggcaattgaaacttaggaaaagagacaacaattttttaatgtaggaaacttcaacataaaactttttcgctgtgaggacggtaaaacatgggaataagagtccagaaaagctgaggaatcwccatctttggagagactgagaactcactttgccaaggccctragsacccagtttaaaagggtgtatttgagtagaaggtccggaggtccccaccaacctatattctctttgctttcatcaagactatgctgctaccttttggacatatataagygttctccaaacctcactgcagaaatgtatatacaaagattagcagaagtgctcatgtacagcactgctatttttgtggagctctgggcaaagagcaagtcagcccacacacatcacttcaagaggtcctgcagcaatttaccagattaagagagtaccaattcacacggagaaacaagaccttattcccctgcacccacagctgcacactgactcttaagtacaaacctttcttctgcctggctgtttccaaaatgctggatcatgtccacttttgtggacaactaaagtggacatgatc

SEQ ID NO: 89434 - DNA, 600 bp, Chicken  19866894395926_1
aactatccgtgtgtcccatgtgccccatgtgccccttgtgaatttcaggcatgccatacaccatctcacttactgcttaactaagtggaactgtctaagtaaatcaccactgatcaggaatttttgcttttactactctgattaagaagtagcccttactttatgaggatataaatgtctgcaacacatccggaagaagagaatgtttcaggtcacagtctgccttcattaagcttgttccaatacactggagtttccatactgatattttagcctgtaatccctcaaacatactaaatrtttattacattcaatagtaacatgaacttccaattcttttctgtttgatgagaattgctgttatgattcagtttttgggacatttgatgtaatagaaggaaaagtttttaaatcctattagtctccattgatttttttttttcttttttcatagcaatgactggacaaagatatcattgctacagttcatggatgagatgcaatctcaaggctactttagtcacagaagatgtagtccatgattcatgaaaactgtctgacacttgtgagacttatgtggttttttgaaaccctgtaaaa

SEQ ID NO: 89435 - DNA, 599 bp, Chicken  19866894395928_1
  misc_feature (1)..(22): n is any nucleotide
nnnnnnnnnnnnnnnnnnnnnnagacaccggtcagtgatggggacagagcacaaagaccggcaaagaagggcacgatgcaggctgccagattgcttggactctcttggaaatacaacctcgagtctccctgactctcagggggatttatgctgttaagtcgattctggaaatgctaatccagaagtgtgcatttctcacagctccgtctgacatgccttcctccaggcaggccgtgctgtggaaggcagctccaagggtaacttgttaacctgctgctgtgtgttgagatcccacgcgtsttcttggcctttcactgctgggaagttcctttgccgtggggccatcctgctctgtgctgcagacgtattgggagcagtgctctcactgctgtgctctcagtgtccctgccaccagcacaaggatgcttgcacgactgctccgcagccagagcacgctgagggtgggaaagagtaaaactgagaaaaagaaacgtgggactgtgagaractgcaacacaggtcgggtgctggataatggaaattcccaagaacggggctcactggtggctcttgtgcacaaaattaagctttattaatcc

SEQ ID NO: 89436 - DNA, 600 bp, Chicken  19866894395928_2
ctgacatgccttcctccaggcaggccgtgctgtggaaggcagctccaagggtaacttgttaacctgctgctgtgtgttgagatcccacgcgtsttcttggcctttcactgctgggaagttcctttgccgtggggccatcctgctctgtgctgcagacgtattgggagcagtgctctcactgctgtgctctcagtgtccctgccaccagcacaaggatgcttgcacgactgctccgcagccagagcacgctgagggtgggaaagagtaaaactgagaaaaagaaacgtgggactgtgagaractgcaacacaggtcgggtgctggataatggaaattcccaagaacggggctcactggtggctcttgtgcacaaaattaagctttattaatccaataacgcgaactgctcagtgaaacctttccagcagagcagccgatgcactcaataggattaactctgctctcacagcaagcaaagaccatctttgtatccagcgctgaatttctcggcctcgttgcattttcagagcctgaatttcttatttttgagctgctttctttagcagaggcagacggtgttcaaccggaggttacagccca

SEQ ID NO: 89437 - DNA, 600 bp, Chicken  19866894395933_1
tgtttttggttttataatggctttttttctacacatattgtgcttgtagggtatcagctgaaaagcttacacctcttattttgaagtttatccttcagcacactaggtaaactatgaggaactgatgcaattaaataacagagtgaaaaatgaaataaaaccaactcagaatgtgtttgcttatactgcagcacgttatcatagatttcatttttaattcaatcttaataaagaattattcccatggtatttaaaggtttaaaaaaaatccagggattcttttctacttcaatggaaagyggcttcagagaaaatatattttttaatttcatttggatttgtgaacaactgtttgaattaagtgtaaattaatgaagatatacataggagtgatagtggtatagaaatgattgctcagttaggaagttaaatgaggcgatcggttcctgacgcactacatggcaattcctgcaggttttttattttttttcatagcctaggtttattagatacatgctggatcctttgtgttgcttgttacagtcgaactctaacagccagtatctagtcttctcaatactgtatagtcaggagcatgcc

SEQ ID NO: 89438 - DNA, 600 bp, Chicken  19866894395937_1
catacagtgtgttatctaagcagatttaagcctgaataatttaaaatagcccacctaggtcttaaggatataaaggattttgcacacttttagtttgttctccttctccaaggagcacctttgaacacatgggaagaacatcgagggtaacctattcatgtctgaaacaggaagcacagcatttctaccttggagttatttttaggcttaccagcagtaagagtattatttgcaacaaatcaattgttggttggtttggtctgcacaaaataaatgcatttcatgtaattattggaatasataactgcagaagcttctgcgatatcaatgtttctgttattatttgattgttctgagaaattgcttctaatttgagatgtacaacagcataatgaagccttaattctaatgtaagcataagcctaaataaacctagacctaaacgtaaatgtttaggctgtgattgtgactgtattataaatatttctcaaagtgtttagatttagaatttgtagtcactttttgatgactttatgttgattgggaattcatacatttgaaatagaacacaaaaggaaagggcctttggtttaggaaatg

SEQ ID NO: 89439 - DNA, 600 bp, Chicken  19866894395937_2
cctaaataaacctagacctaaacgtaaatgtttaggctgtgattgtgactgtattataaatatttctcaaagtgtttagatttagaatttgtagtcactttttgatgactttatgttgattgggaattcatacatttgaaatagaacacaaaaggaaagggcctttggtttaggaaatgacaagagctcctgctcatctgtaagttactgaggacagaattgtcttacagatgttgtaattaaaaaatgatttttttgctttctgtctgtaattgctgaggcatttgtgggtaatccaamatcataccatccttcttctcaggccatgcgagccactcctgcatgtggggatactgcatttaaggggtaaaccatggactcatttgagagctaccaagtcagacatcatattctaagctgtacatgctctgtctgcaaagagagatgcgagacttgcctgagatttgtcatgattgctgcctgaccaaccttgtgtccttttatgatgacataactgtgtcagtggaaagggaagagccactgatgttgtctatctggacttcagtgaggccactggcacagtcccccacaacatcctac

SEQ ID NO: 89440 - DNA, 378 bp, Chicken  19866894395940_1
acattcgagtctctgtgggatttgcagtacagacaggtgcttactagtcaaactgctacaaagcacatactaagatgtttgttaatctatctattgcccacattctggaaaaagcttcacttgcccatctgaactctcccacggattgcatggctatcaccccgagaagcactagccagcacaagacagattccagccctctttccctcactgatcactgccaatcaagggtacttccttgatttaaacaaaggttacacagtgtggtgctacggaagctacacaaaccttccaccatgyattccatataagaatgtattatggaactatacaacttctgtatctcatgccaaaacccacttctcccacatcaaaatg

SEQ ID NO: 89441 - DNA, 600 bp, Chicken  19866894395947_1
gatgtgttttaggtacatgtttataggtggaactaactttgcctattggaatggtaagaaattatttaaattgatcttatgatagagtggagttgcttatgtgttaaatagagtcataaaatggcctgggttgaaaagggcctcaaagatcatctagtttcaaccccccctgctatgttcagggtcgccagccactagaccaggctgcccagagctacatccagccttaccttgaatgccttcagggatggggtatcaacaacctccttgggcaacctgttacagtgcatcaccaccccragtgaaaaacttcctcctaatatttaacctaaatctccccagtctcagtttaaaaccatttatttccccttgtcctatcacaatgaacttacgtaaacagccgttccccctcctgtttatatgctcccttcaagtactggaagaccacaataaggtcttccagtgccttctcttcgagctaaacaagcccaggtccctcaacctttcctcataggagaggtgctccagccctctgatcatcttagtggccctcctctggacctgctccaagagctccacgtccatcatgagctgggggcc

SEQ ID NO: 89442 - DNA, 600 bp, Chicken  19866894395952_1
tgagttcagagcacagaacataacgaccatcattcagtaccttcagcatttaaaactgaaagtttctggttggaatagacaggaagcacttggccggctattgcaatgtttggtatttgggattttattggttgttacataagtgaaagatctctataatcagttaaaaaacataacagtttgtttagactattttaagacatcagtcccaagggctcttgacagaaaggaaaaaaaatactcatgctcttgagagaagtcaagagttcacatttcgagtcagactcagatgtcatgtayactggcactgcaggaaaaacacgtgttgactgtacttctgaactgaaacttctaaagttttgcatgtcgtactttccagtcagtgcaattcatcttcaataatcaactatcggattagcaacagtggtctcattacttaacttttttccccacacactatttgaaggtcttttgccagaaaatattctgcttgcaacttgttgctaaggtgattctatctgaaggtgatcctttatatatatttaaagtgttcccccttttttttttttttttttttttggagaggaatgctagcaggca

SEQ ID NO: 89443 - DNA, 600 bp, Chicken  19866894395953_1
gctccatggctccaggatgagctgccacagacttgggtctttctctccttatagccacgtcacagcaccacaaggttttagcaacagaggagtgatcaaaggattggagcatgtctcctacaaggagaacctgagagagttgggactgctttataaggaggagaagagactcggtggggatctcatcaatgtccataaatacttgaacaaatttgtactgaacataggatggcaaagacaatggagtcaggctcttttcagtggtactcagtgcccaggcaggatctaatggacacagaytggagcacagggcttccttcagagcaccaggcagcactgtcgtgctgtgtggtgccagagtagagcactaccacaggttgcccagaggctgtaggatttcctccttggggatggtcagaagccttctggctgtgggcctgggccccctgccttgggtgtccctgctggagcaggggtgggccagagggacctaaagggccctgccagcctcagccacactgtgatgaggagaacgacttgggagtttgaggttagcatttagtctgccaggtttctgcctactgacagagatgaacaaag

SEQ ID NO: 89444 - DNA, 600 bp, Chicken  19866894395955_1
gtattttaaagcctatactgcttttgctgccaaattaccggaggtatgtgaaaaatgaatcggtgccttctttcttaaacaactaatgagaattaactgatattgagtgatgattaatcagaggatatgttttatttccctttacctgagacaacaaaggaaatgtggtttataaaagatgataaacgcacccgagtaaaattattaatttccaaataaagttgcaacattactcctatgtgcaggagataatatatagccccgtatatgaaattcccttcaggaaaacttcattgactrcatctgagattaactgcatatgacagccaagaatgtttcagaggatcattcactgcattgactgygctgtacaagtatgcaaaatatttacatctttacttctccaaactatgaagctgttaaaattagtctgtgaaaggaagttctaacaaagcagtctggaggtgctccctctgaacccaccagcctcagctctgcgtgttgtgggcatttgcatatatgygtgtgtgtgcacgcacagattttcagcccttacgctgtaaaaaaactttggaattgtttgaccccgtaaacagaaaa

SEQ ID NO: 89445 - DNA, 600 bp, Chicken  19866894395955_2
ccttctttcttaaacaactaatgagaattaactgatattgagtgatgattaatcagaggatatgttttatttccctttacctgagacaacaaaggaaatgtggtttataaaagatgataaacgcacccgagtaaaattattaatttccaaataaagttgcaacattactcctatgtgcaggagataatatatagccccgtatatgaaattcccttcaggaaaacttcattgactrcatctgagattaactgcatatgacagccaagaatgtttcagaggatcattcactgcattgactgygctgtacaagtatgcaaaatatttacatctttacttctccaaactatgaagctgttaaaattagtctgtgaaaggaagttctaacaaagcagtctggaggtgctccctctgaacccaccagcctcagctctgcgtgttgtgggcatttgcatatatgygtgtgtgtgcacgcacagattttcagcccttacgctgtaaaaaaactttggaattgtttgaccccgtaaacagaaaattcatgtatttcaccctgggacaaacgcattctttttaaaagcagcatatgggcagccttggact

SEQ ID NO: 89446 - DNA, 600 bp, Chicken  19866894395955_3
gcaacattactcctatgtgcaggagataatatatagccccgtatatgaaattcccttcaggaaaacttcattgactrcatctgagattaactgcatatgacagccaagaatgtttcagaggatcattcactgcattgactgygctgtacaagtatgcaaaatatttacatctttacttctccaaactatgaagctgttaaaattagtctgtgaaaggaagttctaacaaagcagtctggaggtgctccctctgaacccaccagcctcagctctgcgtgttgtgggcatttgcatatatgygtgtgtgtgcacgcacagattttcagcccttacgctgtaaaaaaactttggaattgtttgaccccgtaaacagaaaattcatgtatttcaccctgggacaaacgcattctttttaaaagcagcatatgggcagccttggactgatgttagtttattgtcactgcttgataacgtttaatggaaaagatacaagagtgccaaagaattttaattatttttgtgataaagttatatgttcggccttgaaaaagtggagataatgctgggattcattattattcccagtgtgtttaaacagac

SEQ ID NO: 89447 - DNA, 600 bp, Chicken  19866894395955_4
cgtatcttctatagcaactttatggttgagtagtttattcatttctattagaaggttgtacgtttctaaaatatgtagatggtatctagaaaaccaaccaaccagtagggtcattttgcttgttttcctaaatttattatttcacttttgcaggcttgatctgaggtgcattaacatgggagtgaaatcttattgtgtcaaatcctatcttgtatatgacctttcatgtgttttgctgtggttctgagagggaaatgctaagaggtgtctattctgcagggttttgccggtgttgtattygtagtgctgtaattaaagctagacccatctttctgtaatatttttctttttttttttgtggccttttagcttgaaagaaaagcactgctgtggatgtggcatctaattcaaagttatattcttgtaacaggttttaaggaaacacgctaagcagcgatggttaatttcaacaccgtgagatcaaaacatgtctgaaatgataaaaagctctgcagaaacagggatttcgcttctcgggtggaacaccaagctccctgctagcaaacctctccactgcaaacacaaaaatactggcgtggg

SEQ ID NO: 89448 - DNA, 599 bp, Chicken  19866894395958_1
  misc_feature (1)..(64): n is any nucleotide
nnnnnnnnnnnnnnnnnnnnnnnnnnnnnnnnnnnnnnnnnnnnnnnnnnnnnnnnnnnnnnnncatctagtttaaagcaaaatgaaaccagcaacaaagggtgatgcatctaattttggggtttttttttacatatcgaaagtattgcatacaatggatatgtattattaaaagagagaagaaacagtgattggttttattttgagattagtggtgtctcttgaactgggttattttctttatcaggaaacaggatcctgtttctcaggaaggtttgttttatgtatttgtatggtagmattaaactaaactgagcaacactttttcattttgcaggttttcatgtttaycgggtgtgcttattttgcagtcttcaatgcctttcacttgctgcttgccaactttctgccctgctggccttgtgttaggagagggagctttgtgttgtctttgcagtgccttggagctstaggaacacacatgtaacaaagtcaagtcagacttcttggtctgttttttcacaaaggaccccaagttcttaagcactttcttgatgctgtcatctcaagtcctgcctcaggagaggttccttggtgtc

SEQ ID NO: 89449 - DNA, 599 bp, Chicken  19866894395958_2
  misc_feature (1)..(13): n is any nucleotide
nnnnnnnnnnnnncatctagtttaaagcaaaatgaaaccagcaacaaagggtgatgcatctaattttggggtttttttttacatatcgaaagtattgcatacaatggatatgtattattaaaagagagaagaaacagtgattggttttattttgagattagtggtgtctcttgaactgggttattttctttatcaggaaacaggatcctgtttctcaggaaggtttgttttatgtatttgtatggtagmattaaactaaactgagcaacactttttcattttgcaggttttcatgtttaycgggtgtgcttattttgcagtcttcaatgcctttcacttgctgcttgccaactttctgccctgctggccttgtgttaggagagggagctttgtgttgtctttgcagtgccttggagctstaggaacacacatgtaacaaagtcaagtcagacttcttggtctgttttttcacaaaggaccccaagttcttaagcactttcttgatgctgtcatctcaagtcctgcctcaggagaggttccttggtgtctgtgcttgtctggtgtgctgctgactggacaacacatggtcctgacaaaat

SEQ ID NO: 89450 - DNA, 600 bp, Chicken  19866894395958_3
aaaagagagaagaaacagtgattggttttattttgagattagtggtgtctcttgaactgggttattttctttatcaggaaacaggatcctgtttctcaggaaggtttgttttatgtatttgtatggtagmattaaactaaactgagcaacactttttcattttgcaggttttcatgtttaycgggtgtgcttattttgcagtcttcaatgcctttcacttgctgcttgccaactttctgccctgctggccttgtgttaggagagggagctttgtgttgtctttgcagtgccttggagctstaggaacacacatgtaacaaagtcaagtcagacttcttggtctgttttttcacaaaggaccccaagttcttaagcactttcttgatgctgtcatctcaagtcctgcctcaggagaggttccttggtgtctgtgcttgtctggtgtgctgctgactggacaacacatggtcctgacaaaatattgccaaagaggatgttataaagcactacactcagacaaccatgggttcttgtcagtggggagacacctctgagcatcaccaagtctaacctattgctcacagcagggcaggaagggca

SEQ ID NO: 89451 - DNA, 599 bp, Chicken  19866894395960_1
  misc_feature (1)..(4): n is any nucleotide
nnnncaagcccagcctcttattctgtagtttgttttattgtgcccatagtgtgttttttttcttcaactccttgcagtactcttgtttcttaagaagtaagtaaagtaaaatccagggtagaagcctagtaataataaaaaaaaggtggaaagttcatgattgttcttaatacttaatttaactcttcccaccaaacatacacagtcagctgtcttcattgtaggagtgatggactgctggacagaatattagaagcaggcaatacagtgcatttatccagatagctgcacacacagttyatagctggcccatctgcactgatgttgactgttctggtttttcagtgcagtgtatttcagcaccctgtcaccattggacctggcctgtgcattacttcacacatcccacaaggtctggctgtgtgtagcgasccwtgtgtgtgtgagtcttgttgacacaagtgcagggctggctctgacactgcatttgcctgggctacgtggtgtacaggggtagttctgctgaggctgagctccagggaatctatgccagttgtcaaacaccccgctgtgcctgagatggctccatgtggagacct

SEQ ID NO: 89452 - DNA, 600 bp, Chicken  19866894395960_10
aagttagaagtgyrgtttgmatctaaactgttgagacygatacagacaatttgaggaaaaatagtcaaaacctgtcacaaagcttgctttcattctgcagaatgcaaactaaaattcactgtcacaacattactgtgggtgttctttctgtctgtaaaagtgatccatcctgttcattttcaccgagtgctttgggaggtgattttttatgaaggaccacttgacagtttaaagatactgaagtgtgtttataccaataataaccatatgttttgctaccagaagtaacatttcagttgytaaattccactgtagaagtataatgagaatgaaacctaagggcggtttgtgctatcagcatctctcctgccattagttagattggttatgacactgttgctttctgccagctgtcagatgaggctccaccacatcttgaattattcacaaagaaaattggcactcataaaaccaatctgccatgcattgttagtagagattaaaggaggacatggcttttctaggaatgtagccgtagctcttctattcgcatttgcttgttgcacagctgttctctgtagaggagaggtagccagtcca

SEQ ID NO: 89453 - DNA, 600 bp, Chicken  19866894395960_2
taataaaaaaaaggtggaaagttcatgattgttcttaatacttaatttaactcttcccaccaaacatacacagtcagctgtcttcattgtaggagtgatggactgctggacagaatattagaagcaggcaatacagtgcatttatccagatagctgcacacacagttyatagctggcccatctgcactgatgttgactgttctggtttttcagtgcagtgtatttcagcaccctgtcaccattggacctggcctgtgcattacttcacacatcccacaaggtctggctgtgtgtagcgasccwtgtgtgtgtgagtcttgttgacacaagtgcagggctggctctgacactgcatttgcctgggctacgtggtgtacaggggtagttctgctgaggctgagctccagggaatctatgccagttgtcaaacaccccgctgtgcctgagatggctccatgtggagacctttggctcttcatccaagtaaggtagttgtgacctgaccacaggtgtgtgagtagtcaagagcttatagtacactcagaaaacacttcccacacttgacctgagatttttagtctcattttggatgttgagaaa

SEQ ID NO: 89454 - DNA, 600 bp, Chicken  19866894395960_3
aataaaaaaaaggtggaaagttcatgattgttcttaatacttaatttaactcttcccaccaaacatacacagtcagctgtcttcattgtaggagtgatggactgctggacagaatattagaagcaggcaatacagtgcatttatccagatagctgcacacacagttyatagctggcccatctgcactgatgttgactgttctggtttttcagtgcagtgtatttcagcaccctgtcaccattggacctggcctgtgcattacttcacacatcccacaaggtctggctgtgtgtagcgasscwtgtgtgtgtgagtcttgttgacacaagtgcagggctggctctgacactgcatttgcctgggctacgtggtgtacaggggtagttctgctgaggctgagctccagggaatctatgccagttgtcaaacaccccgctgtgcctgagatggctccatgtggagacctttggctcttcatccaagtaaggtagttgtgacctgaccacaggtgtgtgagtagtcaagagcttatagtacactcagaaaacacttcccacacttgacctgagatttttagtctcattttggatgttgagaaat

SEQ ID NO: 89455 - DNA, 600 bp, Chicken  19866894395960_4
taaaaaaaaggtggaaagttcatgattgttcttaatacttaatttaactcttcccaccaaacatacacagtcagctgtcttcattgtaggagtgatggactgctggacagaatattagaagcaggcaatacagtgcatttatccagatagctgcacacacagttyatagctggcccatctgcactgatgttgactgttctggtttttcagtgcagtgtatttcagcaccctgtcaccattggacctggcctgtgcattacttcacacatcccacaaggtctggctgtgtgtagcgasccwtgtgtgtgtgagtcttgttgacacaagtgcagggctggctctgacactgcatttgcctgggctacgtggtgtacaggggtagttctgctgaggctgagctccagggaatctatgccagttgtcaaacaccccgctgtgcctgagatggctccatgtggagacctttggctcttcatccaagtaaggtagttgtgacctgaccacaggtgtgtgagtagtcaagagcttatagtacactcagaaaacacttcccacacttgacctgagatttttagtctcattttggatgttgagaaatac

SEQ ID NO: 89456 - DNA, 600 bp, Chicken  19866894395960_5
aaaaaaaaggtggaaagttcatgattgttcttaatacttaatttaactcttcccaccaaacatacacagtcagctgtcttcattgtaggagtgatggactgctggacagaatattagaagcaggcaatacagtgcatttatccagatagctgcacacacagttyatagctggcccatctgcactgatgttgactgttctggtttttcagtgcagtgtatttcagcaccctgtcaccattggacctggcctgtgcattacttcacacatcccacaaggtctggctgtgtgtagcgasccwwgtgtgtgtgagtcttgttgacacaagtgcagggctggctctgacactgcatttgcctgggctacgtggtgtacaggggtagttctgctgaggctgagctccagggaatctatgccagttgtcaaacaccccgctgtgcctgagatggctccatgtggagacctttggctcttcatccaagtaaggtagttgtgacctgaccacaggtgtgtgagtagtcaagagcttatagtacactcagaaaacacttcccacacttgacctgagatttttagtctcattttggatgttgagaaatact

SEQ ID NO: 89457 - DNA, 600 bp, Chicken  19866894395960_6
ttagtgtctaatgttatccgcataagagagacagaaatccaggtgttactggtccaagaataggcatgtgaactgtgccctgctcccactgagctggctgtggagagaagtgaattattgtcacttggtgcaggcaggctctgcagagcagctctctgtgcatgctgtgctgtagctgtgagctgctgtgaccagactctgtggggaagagaatttctgtgaaagctgctaggaagcttgtggaaaagaaccagtcgtttcctgtagcagaataatctgggatcaagaagttagaagtgyrgtttgmatctaaactgttgagacygatacagacaatttgaggaaaaatagtcaaaacctgtcacaaagcttgctttcattctgcagaatgcaaactaaaattcactgtcacaacattactgtgggtgttctttctgtctgtaaaagtgatccatcctgttcattttcaccgagtgctttgggaggtgattttttatgaaggaccacttgacagtttaaagatactgaagtgtgtttataccaataataaccatatgttttgctaccagaagtaacatttcagttgytaaattccactgt

SEQ ID NO: 89458 - DNA, 600 bp, Chicken  19866894395960_7
tagtgtctaatgttatccgcataagagagacagaaatccaggtgttactggtccaagaataggcatgtgaactgtgccctgctcccactgagctggctgtggagagaagtgaattattgtcacttggtgcaggcaggctctgcagagcagctctctgtgcatgctgtgctgtagctgtgagctgctgtgaccagactctgtggggaagagaatttctgtgaaagctgctaggaagcttgtggaaaagaaccagtcgtttcctgtagcagaataatctgggatcaagaagttagaagtgyrgtttgmatctaaactgttgagacygatacagacaatttgaggaaaaatagtcaaaacctgtcacaaagcttgctttcattctgcagaatgcaaactaaaattcactgtcacaacattactgtgggtgttctttctgtctgtaaaagtgatccatcctgttcattttcaccgagtgctttgggaggtgattttttatgaaggaccacttgacagtttaaagatactgaagtgtgtttataccaataataaccatatgttttgctaccagaagtaacatttcagttgytaaattccactgta

SEQ ID NO: 89459 - DNA, 600 bp, Chicken  19866894395960_8
ctaatgttatccgcataagagagacagaaatccaggtgttactggtccaagaataggcatgtgaactgtgccctgctcccactgagctggctgtggagagaagtgaattattgtcacttggtgcaggcaggctctgcagagcagctctctgtgcatgctgtgctgtagctgtgagctgctgtgaccagactctgtggggaagagaatttctgtgaaagctgctaggaagcttgtggaaaagaaccagtcgtttcctgtagcagaataatctgggatcaagaagttagaagtgyrgtttgmatctaaactgttgagacygatacagacaatttgaggaaaaatagtcaaaacctgtcacaaagcttgctttcattctgcagaatgcaaactaaaattcactgtcacaacattactgtgggtgttctttctgtctgtaaaagtgatccatcctgttcattttcaccgagtgctttgggaggtgattttttatgaaggaccacttgacagtttaaagatactgaagtgtgtttataccaataataaccatatgttttgctaccagaagtaacatttcagttgytaaattccactgtagaagta

SEQ ID NO: 89460 - DNA, 600 bp, Chicken  19866894395960_9
gagagacagaaatccaggtgttactggtccaagaataggcatgtgaactgtgccctgctcccactgagctggctgtggagagaagtgaattattgtcacttggtgcaggcaggctctgcagagcagctctctgtgcatgctgtgctgtagctgtgagctgctgtgaccagactctgtggggaagagaatttctgtgaaagctgctaggaagcttgtggaaaagaaccagtcgtttcctgtagcagaataatctgggatcaagaagttagaagtgyrgtttgmatctaaactgttgagacygatacagacaatttgaggaaaaatagtcaaaacctgtcacaaagcttgctttcattctgcagaatgcaaactaaaattcactgtcacaacattactgtgggtgttctttctgtctgtaaaagtgatccatcctgttcattttcaccgagtgctttgggaggtgattttttatgaaggaccacttgacagtttaaagatactgaagtgtgtttataccaataataaccatatgttttgctaccagaagtaacatttcagttgytaaattccactgtagaagtataatgagaatgaaaccta

SEQ ID NO: 89461 - DNA, 600 bp, Chicken  19866894395962_1
ggagaccttcccctgcgccgaggcgcagtagccgcagcggtagccctccttccagccccggtactccaccacggcgcggcgcatggcgaccctgctccgcccggagcgccgccccgcccggctcagccccgcggtaccgtcagtcctcgagcgcctttaatcaccgcaatgagcgccctgcgttcctcagtcacctcacggtgaactgttattcccacgaagccaaacgaagccgctagtttgggcgtgtttaccaacaaaacccaacaaacagacggatggatggactgaggccacggyaggagcttcagcacagcagtagtaagtagacagtaaggtaactgtgatgtgtgtacaagacagctttaaaataccccaatgtttcaataaaaataaatttaatattacaatatatacagataaaaatgtattcttcagttaggattttaagtatttttctttaaggcacctagagggaaaaaaaaaaagagaagaaagtaacaatgaagatttaaagcttaccacacagatgaggtaatacagtaattcagtcctattgcttagaggatttgggaaggaaccagacaggttaagcccttc

SEQ ID NO: 89462 - DNA, 600 bp, Chicken  19866894395968_1
catatccacgtgtgtgtgtgtgtgtatatgtgagcatttttacaaaggacatttcccagtgaaaacttgccctttgcatttccaaagacttatttgaacagtgttaataaaggaaaatgtggatgccaaccttcttaggagtttgggttgtttgcaatgcctctcagcgatatctttgtgatagaagtgaagacactgttgtaattctgagtgtgaggggataagactttttggaaccaaaaaagaagcttggatgggtgagcctgctgtacacatgaaaattattcaaatgtttatccrtgtagactatatgtagtagttccacgtaagctggacttatgataaccacgttgtttttaatttggtctcttcattttcaggggaggtttttgcaatatgtgggagctgcagtgctttgggaagttggaatccacaagccgcagtggtcctccagactgacgactggtaggctgttttttctttagggatctagagcagtgaattgattctggttctgaggttgtcaactatcaggctacataggaatgtgtttaagagaatgtttaactttggtatgcttttctagttacaaatgatgct

SEQ ID NO: 89463 - DNA, 600 bp, Chicken  19866894395982_1
agcatcgacctgagtgacaagactctctacaagtattttctccgtgtggtcccctctgacacactccaagcccgcgccatgctcgatattgtcaagcgttacaactggacttacgtgtccgccgtgcacactgaaggtgggtccagggggaaggtgggatcccacagtgcccatccgctgcccaggagcagatgggttctgcctgggcttagtggggaccctgtggtgcctgtgcagggggttctgtggaaaatagagggcagcagggctattctgtagggttctaatgtaaaggtgttracctgaacaatgtgttcatagtcaacagattttcttcattttaaatgtcttatatcaaaagtaacggctattttataaaggagtgtcagcttataggtgggctgggtggaccaacataaattacagaatttatttttacttatagaaggcaaactcttgtgatagattactgtggcatttctatagtccaattatggaccccaaaatgggattttcaagtataaaattgcaaagctgatcttattattrttgtaattgtgcagctgttctctttacctgagcatatatctgctatggatt

SEQ ID NO: 89464 - DNA, 600 bp, Chicken  19866894395982_2
aaaatagagggcagcagggctattctgtagggttctaatgtaaaggtgttracctgaacaatgtgttcatagtcaacagattttcttcattttaaatgtcttatatcaaaagtaacggctattttataaaggagtgtcagcttataggtgggctgggtggaccaacataaattacagaatttatttttacttatagaaggcaaactcttgtgatagattactgtggcatttctatagtccaattatggaccccaaaatgggattttcaagtataaaattgcaaagctgatcttattattrttgtaattgtgcagctgttctctttacctgagcatatatctgctatggatttgatttatgattccccccagttaccgagctgactccacaccttttcttctcacagagatggctcagtaaaaagtgcgaagagcatacactgttatgaataaataaagaaatctccagtaagatttgcatatacaacatgcaaagatgattcggattaaactgactacttaagacataaaagcgctgcagttttgaaacaaaatgcatatgtaagagcaggaagcaatgacctgacatttgcagttcatt

SEQ ID NO: 89465 - DNA, 599 bp, Chicken  19866894395984_1
  misc_feature (1)..(34): n is any nucleotide
nnnnnnnnnnnnnnnnnnnnnnnnnnnnnnnnnnatgcatgtttgtagataccatgacaaatgaaatgaattactaaggcccctcaagtcctgtcatgaaagtatcttgctattccttcattatcagtgcaccctgtgctgttgacattgttgtattcaaaggacgcttttagaataaattaaccattacagatgaatggcatactaattgtgactttcatggatggatgtgaaaggttttgtcttcagctttttggaagaagtaaatcgcataaaggaagcatgttctcattccgactraaataatttgaactgaataggctaaagagttagtagtagcataaatcttttcctttacacaaactgtttctgtctgaatatcacatggttgtaaccatttttctttgcaaaatactggttcagcattgctctctgctatataacaccactgtaaatttaatagattcactggacttgtcccatattttcyccattgtaaagtcttgcacaattttccttctttctttgtttctgctgttctagcacagaagttcctctttcactctgaacaagaatgagtatctatcaagtaagagtat

SEQ ID NO: 89466 - DNA, 600 bp, Chicken  19866894395984_2
agatgaatggcatactaattgtgactttcatggatggatgtgaaaggttttgtcttcagctttttggaagaagtaaatcgcataaaggaagcatgttctcattccgactraaataatttgaactgaataggctaaagagttagtagtagcataaatcttttcctttacacaaactgtttctgtctgaatatcacatggttgtaaccatttttctttgcaaaatactggttcagcattgctctctgctatataacaccactgtaaatttaatagattcactggacttgtcccatattttcyccattgtaaagtcttgcacaattttccttctttctttgtttctgctgttctagcacagaagttcctctttcactctgaacaagaatgagtatctatcaagtaagagtatctcagttactttcattatggtccctactaagagcagaatctaatacttctcaccctgtataatgtgtgtgtatatgtataataaagatgttagcaacatttgctgatattctaatactagtacaaaacatgggaagacgaaaacatcctccatgaaagtcgttacttttctcctatttctgttttgataat

SEQ ID NO: 89467 - DNA, 600 bp, Chicken  19866894395990_1
cctctggcacagctccatgccattcccttgggccctatcgctgtcacagagagcagagctcagcgctgcccctgagctccctgtaagagctgcagccaccacgaggcctcctctcatctctcctcagctctgaataaaccaagggattccaccctcttctcatgcattttgccctccacacctttcactaatactgtttaattattaattgctaacacaaataaaactgtttcctttaaacaaaactatgaaacagcatatgttccctatgcatctgacataacattaaaatttgagttsttaagtagtttgaaaaggtttagtagtgtggaaaaattttatcactgagcaatatgcaatacttactggctgtgtcatacagtaatgatgctcacatagaaaaatactattttctctttcagttaatattattatttttcatgatatgaaggtcatataaactcctaagaaaattttctcttagtattttatttcatacttagaaatgatttcataagcaaatgcaagtttcaaagtttatccaacttctattttctctttcatttagaaaaagctctatgcattaccaaagatctcctt

SEQ ID NO: 89468 - DNA, 599 bp, Chicken  19866894395992_1
  misc_feature (1)..(21): n is any nucleotide
nnnnnnnnnnnnnnnnnnnnntgtgctgtgtttgtagtggctgtcaccgatcggcttggatggatggctcacctgagtgccggccctcttggtcaccccatgggtgcgtgcaggaggaaggagcttccttgtgagaaatcattttgcagacagggttgccctgtctatgtgcggggcaaagcattcccttaagcgaatagagtgaggggattttgctgtaactgttgtgggttggggagagcgactgctgtgtattgggaaaccaaaatactgcgattttaccttaattatgtgaagtgygaaggaggaagagagcaattgggtattgagagctgcgtgcacgtggcttgtgggagcagtcacattcatcactgcaggaaggaaagcgtgccccatttattcacaaggtatgcagcacagccaccccccccaatgtgctcyctcagcaggagaggtccctctgatcagcagggctgggggctgccagcacctcagccgcatgctgatggggcccaccamtaaaacatggcattctacagagctcgtcatcccacccccaaaattataacatcccttgcactcccctcaagagatcttgc

SEQ ID NO: 89469 - DNA, 600 bp, Chicken  19866894395992_2
ttttgcagacagggttgccctgtctatgtgcggggcaaagcattcccttaagcgaatagagtgaggggattttgctgtaactgttgtgggttggggagagcgactgctgtgtattgggaaaccaaaatactgcgattttaccttaattatgtgaagtgygaaggaggaagagagcaattgggtattgagagctgcgtgcacgtggcttgtgggagcagtcacattcatcactgcaggaaggaaagcgtgccccatttattcacaaggtatgcagcacagccaccccccccaatgtgctcyctcagcaggagaggtccctctgatcagcagggctgggggctgccagcacctcagccgcatgctgatggggcccaccamtaaaacatggcattctacagagctcgtcatcccacccccaaaattataacatcccttgcactcccctcaagagatcttgcgtgagcaaccatttaaatgaatgttgcattatttacaagttctgtcgttattaaattaatgttacattcattggagtttttgttgtgttttgttttcaaggcagggctgtaatttgagcaacatattcatcaagtcggaaat

SEQ ID NO: 89470 - DNA, 598 bp, Chicken  19866894395992_3
aactgttgtgggttggggagagcgactgctgtgtattgggaaaccaaaatactgcgattttaccttaattatgtgaagtgygaaggaggaagagagcaattgggtattgagagctgcgtgcacgtggcttgtgggagcagtcacattcatcactgcaggaaggaaagcgtgccccatttattcacaaggtatgcagcacagccaccccccccaatgtgctcyctcagcaggagaggtccctctgatcagcagggctgggggctgccagcacctcagccgcatgctgatggggcccaccamtaaaacatggcattctacagagctcgtcatcccacccccaaaattataacatcccttgcactcccctcaagagatcttgcgtgagcaaccatttaaatgaatgttgcattatttacaagttctgtcgttattaaattaatgttacattcattggagtttttgttgtgttttgttttcaaggcagggctgtaatttgagcaacatattcatcaagtcggaaatggtggctccaattattttaacattcattcgcccattcagcttcctctacatctgccggtttcttggtgcggcggcg

SEQ ID NO: 89471 - DNA, 600 bp, Chicken  19866894395993_1
agcttttttgctgaccatacggatttcttcaacatctctcacacacgcacatatatatagcttacgaaagaagtattttttatagcattgcctgtacggacaataaagaacccactaaatatagttaatattaaaagttcccataatacgccttaggtttcagaaatgtagaacctggctgtaaacagtggttttcgatacccaagagaatgtaatttttacttaaaaataaaaacaaaaccaaaaaagaagaaggtgttaaaatgatcattgattttccccaacacaggaaatctttcrgtaaatgttggattcaacaatgtgtttattagctttgaatcactgctgtggtttgtaattccctctgtcttttgagcacagtgatgtgttccgtgatgtgttgtatctatgatacatttacatatatatatatatatatatcagtggcaggcactgagagccttgggcagggatgcaggttctagaacagctcatcttggtaggcatcacctgggcaagcctccagcttcattcacataggaaacagagcagcgacagaggatgaagttcagctgaagttcagtactcttcataggctgg

SEQ ID NO: 89472 - DNA, 600 bp, Chicken  19866894395993_2
gtatctatgatacatttacatatatatatatatatatatcagtggcaggcactgagagccttgggcagggatgcaggttctagaacagctcatcttggtaggcatcacctgggcaagcctccagcttcattcacataggaaacagagcagcgacagaggatgaagttcagctgaagttcagtactcttcataggctggcaaactacctttttgcaaggtctgtgcgtatgaccgttcatcttggggtatctgcctgttcccatttaagaggtcctcagggagattgtctaagagatatgygagaaatttacgttgtattggtttatggatttttatgtcagttaatgctctaggatcttgaactgatgctacatcacttagtgaggaggaatatgatcacaaaaccatggagaaagcttcaaaatctgtctgactaactgataaataaactgactaactgtgataaatgtgagaggtcagtttaaaatgaaactcactggttatttgaaaaaggtgaaagacagttttatcatctacttccagtgagtcaatggctctaaagtagtggagcataccacagaaacctcttggtgtggccag

SEQ ID NO: 89473 - DNA, 600 bp, Chicken  19866894396002_1
ttttgtcatcttttttccttgaatttccattataatgttcttctggttctccttagcatttgttctttttttgttcttcaagaagatcggatgagacaaaaatatgcttttagaaatatacagaaaaggcttgctgattttggccaaaggcacttgcccttgtatattggttcttgaaagttttttctatagagaaacccttttatgtttcagattcatgattgtgcagtgtgtaaatgtgaaagagactgttgaaaagatgattgggaagaattattttttttcgtaaactgaacattygtgaattaaaacatcttaaaagcttctatttatatttgaatctcactcagaataaattttggaaattaaaacttataataaaccattaggaatttaactgtgactgtgaatgattgccatggaaatttattttcctcataattacatttgtttcagtatgagaaacagaaattgcaaaatctcattcatttaacaaaacaaaacagttgctgtgactgttataggattgcagtccagactgggtaaggctctggaatagtgagataatttgtgaaacaaaatgcatatgcaaattagttg

SEQ ID NO: 89474 - DNA, 600 bp, Chicken  19866894396002_2
gaaattaaaacttataataaaccattaggaatttaactgtgactgtgaatgattgccatggaaatttattttcctcataattacatttgtttcagtatgagaaacagaaattgcaaaatctcattcatttaacaaaacaaaacagttgctgtgactgttataggattgcagtccagactgggtaaggctctggaatagtgagataatttgtgaaacaaaatgcatatgcaaattagttgatcaaatcgctacactattttccccagcactttgagtaaaagaaggaaaaagcaagacaarcagtaacaagatatcagaatatacgttattattgttaaaatcatgtaataccgagcacgaggaaaatggaattttcagcacttgtgaggccatggacagcagtaatttcagcgatagtgcagtataactgagattgcatctgatgcacaagagaataggaatggcatttattccatctgacttgcattatctacagtgttgtcatctggacttctcttataggcagcagagagaaaatagctcttacagggacaacaattcagtttgcaggtggcaggttgaatattacaacacttaata

SEQ ID NO: 89475 - DNA, 600 bp, Chicken  19866894396003_1
ggtgctggattgcagcttgctgttcagggcaaagtcttgtcccttataaaaatccctactttatgtttttcctaaagcatgaggtcaccttgttctgtggtaagtgtagttcatttgtcttcactgcagcaaggtatgcataaatcagactgtgttatgatagaagtgcacgctgaaacgaattcctaataaaagagtaaacatggaagcaatccatctgtaccctgcacattcctcagtgaagccttcctagaaacacagcctggaactggtggacagggatagccacttgctagtaaytgctgacaagtgaggagaggtgcaatgaagaagattctgtttcccaaaaagtaagtcagatccctgtcatactttacattggcagccaagctaatccacccccaccaagtttgctttcaaaggatgggatggcaatgcactgtggaaaactgcttccattagctcagatgcgcttcatctggacttgctgattgcagtattgttctgagtttggttatcgaagctggcaaccctctatatttataaatacccttattaatccctcctctgcgtgcccttccttccctcctgagaaaaccc

SEQ ID NO: 89476 - DNA, 600 bp, Chicken  19866894396004_1
tccaagacccaggtggtctgacccatcacacaaaaagcactgcttgctacttggggtaccaaaacgttcctacatggactgtgctcttcccaagagacttatcatgtctgaacaaggccccctttcttccactgccgctgtgacagccccagagattatcagaactcaaataaaatcaagccaaatccatcaatctgccaccatcgtgttagagcaagctgtttctctcctcatttgtgcttggagttagtgtactgggagagctgcccacacagcttggctccgtgcaagagatggtaygaatgcacagtccctttccctgtggctccgaaagctcacacgcagccccaagtctgctgagatcagtttgtatcaagccagtgcatcagggagatttattttccaaaaattgctgaagaatgcacagatcacaagtttgacatcactaaggcataaacagaaaagtggtcttgagggtgaggtttgaagagaaagggagaccactcagaatgcctgaatatcaataaaagacttgagaatattatttgcactgtcagatttctctgttccccatgaattagtcttgactgaaaccgctgt

SEQ ID NO: 89477 - DNA, 600 bp, Chicken  19866894396015_1
ggaagccaatatccctatctcttttaatcccacatatacatatacatgaacagggcatgatacttttactactgacatctatgggaacactgactgcaaataattgagaaaacagagctataaatggattggcgtgacatgtcactgcatgaaaagtagagagtaactttcctacatgtgagcacagaattatgttatataacttcgtatatctctccttatttaacataacagagaagttagatattcagtctttagaaagcacatgaaactggttgaaaatagagtaactttcagatkatatagacaagtaaatccttaggaaatttgcgaatatcttaattattaatgccaaatatctctttttttttaaagcataaatctccatcatgaaatagaattcatcatgcctagatttatatgctcagcagagacttagatctttatggatgcctcccaaaaatctaataggtcataaaaatgtactgatctaataaagtcaacaggtagttgatacaatctttgaatttagagtgcactttttaattatagaactacaacatggaattgtgtagatctgcctcyggacattcatcagaa

SEQ ID NO: 89478 - DNA, 600 bp, Chicken  19866894396015_2
agtaactttcagatkatatagacaagtaaatccttaggaaatttgcgaatatcttaattattaatgccaaatatctctttttttttaaagcataaatctccatcatgaaatagaattcatcatgcctagatttatatgctcagcagagacttagatctttatggatgcctcccaaaaatctaataggtcataaaaatgtactgatctaataaagtcaacaggtagttgatacaatctttgaatttagagtgcactttttaattatagaactacaacatggaattgtgtagatctgcctcyggacattcatcagaaatactgcctttgatttacttacctagccattggtttctagcttgtataacttaattcaaaggcaactgggacaggatgtacctgatagtaaagctctttccactaagatattcaagaaccagaacatgcatttttttccatacgtttttaatagaaacatcactattaatcatgatttaaaacaacaattgttattacctgtatttgataactagatcaatccacagcttacttttcttcatcatctttttatttattttaaaatattaattttatgggtgttac

SEQ ID NO: 89479 - DNA, 600 bp, Chicken  19866894396020_1
ggttggtgtgttgctttagatctccggctcagagggaactcacaagcattttcacatagcctcatttcctctacttgtatcccccgattcttactctgttcttgataaaacacagtaatgtgtgcaattgaggaaatactcttctaaccctcccctgaccctcccttggacccctaacatgaacattctcagatttatgaactttcttcataaactggcagatgtttaaatctttttgtcctctttccatctctctttgaatttcttccaatagttctcttgtcagttctgaaaagatgyccccaggtgaaagctgtgttcatactaagacctacctcttgctaggraaaagctcccacctgttttccatttgagcagtattgctgtttgtgatccacctgctgtgtcatggcgcagcccaggrtccatcatccaatctggaatccactagtcagcccaagatccattgcccytctaggctggactgtgcagtgcaagcaacatctctacagtctgtatttatacaactgatattttctgtagacagcaagcatttcacaatatcattttaaatctcagcttggctgcactctattactt

SEQ ID NO: 89480 - DNA, 600 bp, Chicken  19866894396020_2
attttcacatagcctcatttcctctacttgtatcccccgattcttactctgttcttgataaaacacagtaatgtgtgcaattgaggaaatactcttctaaccctcccctgaccctcccttggacccctaacatgaacattctcagatttatgaactttcttcataaactggcagatgtttaaatctttttgtcctctttccatctctctttgaatttcttccaatagttctcttgtcagttctgaaaagatgyccccaggtgaaagctgtgttcatactaagacctacctcttgctaggraaaagctcccacctgttttccatttgagcagtattgctgtttgtgatccacctgctgtgtcatggcgcagcccaggrtccatcatccaatctggaatccactagtcagcccaagatccattgcccytctaggctggactgtgcagtgcaagcaacatctctacagtctgtatttatacaactgatattttctgtagacagcaagcatttcacaatatcattttaaatctcagcttggctgcactctattacttcaatttatctagcttgtgctgtattttaagtttcctctccaaatcac

SEQ ID NO: 89481 - DNA, 600 bp, Chicken  19866894396020_3
caattgaggaaatactcttctaaccctcccctgaccctcccttggacccctaacatgaacattctcagatttatgaactttcttcataaactggcagatgtttaaatctttttgtcctctttccatctctctttgaatttcttccaatagttctcttgtcagttctgaaaagatgyccccaggtgaaagctgtgttcatactaagacctacctcttgctaggraaaagctcccacctgttttccatttgagcagtattgctgtttgtgatccacctgctgtgtcatggcgcagcccaggrtccatcatccaatctggaatccactagtcagcccaagatccattgcccytctaggctggactgtgcagtgcaagcaacatctctacagtctgtatttatacaactgatattttctgtagacagcaagcatttcacaatatcattttaaatctcagcttggctgcactctattacttcaatttatctagcttgtgctgtattttaagtttcctctccaaatcactcctcaattttctatcttccacaaagcctactgtatacatttccatatggcattttcataacatatgaaagtatcac

SEQ ID NO: 89482 - DNA, 600 bp, Chicken  19866894396020_4
ctaacatgaacattctcagatttatgaactttcttcataaactggcagatgtttaaatctttttgtcctctttccatctctctttgaatttcttccaatagttctcttgtcagttctgaaaagatgyccccaggtgaaagctgtgttcatactaagacctacctcttgctaggraaaagctcccacctgttttccatttgagcagtattgctgtttgtgatccacctgctgtgtcatggcgcagcccaggrtccatcatccaatctggaatccactagtcagcccaagatccattgcccytctaggctggactgtgcagtgcaagcaacatctctacagtctgtatttatacaactgatattttctgtagacagcaagcatttcacaatatcattttaaatctcagcttggctgcactctattacttcaatttatctagcttgtgctgtattttaagtttcctctccaaatcactcctcaattttctatcttccacaaagcctactgtatacatttccatatggcattttcataacatatgaaagtatcacatagaggtgaacttgaggcttttataagatataccccatcatcttcact

SEQ ID NO: 89483 - DNA, 600 bp, Chicken  19866894396022_1
acagaactgaaaatcaaatcccagagagcagaaatgggagctaaatactgaaattagaacaagaaccttctctccaggtaagagacagcatacactgtcacttatcactagataagtctgtttgagtgtctgttccagtatctattaatcacccttgggttcctttcctatgttatcaaacacagattcatgctatgtcatcttgatcaagtctctgtagactatcttagatttttgcacaattttgttcttcttgtgtgtcagaaaggggaagatatagtcgtgattttgttcaagtayatggccattccatcctatgcttttgaaaactatttcctattcaatacatgkaagtcaaatgacaaaattwtgaagctgaaaacagtcaaatcgtaacaaggcttataatcttcatacaccagcttgcaggtcacagaaagcagaccttctcataactatgttctttttctttcaacagtttcaacagttatcaaggtaatactgtacctaaggacagcaatatatacattcatcagcacactaagttttctaccacccacacttyttcttgaagtgattttttgtttgtttgtttgtttg

SEQ ID NO: 89484 - DNA, 600 bp, Chicken  19866894396022_2
aattagaacaagaaccttctctccaggtaagagacagcatacactgtcacttatcactagataagtctgtttgagtgtctgttccagtatctattaatcacccttgggttcctttcctatgttatcaaacacagattcatgctatgtcatcttgatcaagtctctgtagactatcttagatttttgcacaattttgttcttcttgtgtgtcagaaaggggaagatatagtcgtgattttgttcaagtayatggccattccatcctatgcttttgaaaactatttcctattcaatacatgkaagtcaaatgacaaaattwtgaagctgaaaacagtcaaatcgtaacaaggcttataatcttcatacaccagcttgcaggtcacagaaagcagaccttctcataactatgttctttttctttcaacagtttcaacagttatcaaggtaatactgtacctaaggacagcaatatatacattcatcagcacactaagttttctaccacccacacttyttcttgaagtgattttttgtttgtttgtttgtttgtttgttttttggatgatttgtattttccttgcttccccttaaagaacctta

SEQ ID NO: 89485 - DNA, 600 bp, Chicken  19866894396022_3
tctccaggtaagagacagcatacactgtcacttatcactagataagtctgtttgagtgtctgttccagtatctattaatcacccttgggttcctttcctatgttatcaaacacagattcatgctatgtcatcttgatcaagtctctgtagactatcttagatttttgcacaattttgttcttcttgtgtgtcagaaaggggaagatatagtcgtgattttgttcaagtayatggccattccatcctatgcttttgaaaactatttcctattcaatacatgkaagtcaaatgacaaaattwtgaagctgaaaacagtcaaatcgtaacaaggcttataatcttcatacaccagcttgcaggtcacagaaagcagaccttctcataactatgttctttttctttcaacagtttcaacagttatcaaggtaatactgtacctaaggacagcaatatatacattcatcagcacactaagttttctaccacccacacttyttcttgaagtgattttttgtttgtttgtttgtttgtttgttttttggatgatttgtattttccttgcttccccttaaagaaccttaaaaatctgtcttgctaaat

SEQ ID NO: 89486 - DNA, 600 bp, Chicken  19866894396022_4
aaggggaagatatagtcgtgattttgttcaagtayatggccattccatcctatgcttttgaaaactatttcctattcaatacatgkaagtcaaatgacaaaattwtgaagctgaaaacagtcaaatcgtaacaaggcttataatcttcatacaccagcttgcaggtcacagaaagcagaccttctcataactatgttctttttctttcaacagtttcaacagttatcaaggtaatactgtacctaaggacagcaatatatacattcatcagcacactaagttttctaccacccacacttyttcttgaagtgattttttgtttgtttgtttgtttgtttgttttttggatgatttgtattttccttgcttccccttaaagaaccttaaaaatctgtcttgctaaatcacagggagttcccaatgtaaaacaaacaaacaaacaaccaacccacacgcctggtctcagaaaaaatgcctgaaatttkttttctctagtttagacattacatgctgaatttccatttggattttgaactgcaggcaggctaagttctgcaatgtctcctgctatgctgctatccagctttttcagaactcttt

SEQ ID NO: 89487 - DNA, 600 bp, Chicken  19866894396022_5
cataactatgttctttttctttcaacagtttcaacagttatcaaggtaatactgtacctaaggacagcaatatatacattcatcagcacactaagttttctaccacccacacttyttcttgaagtgattttttgtttgtttgtttgtttgtttgttttttggatgatttgtattttccttgcttccccttaaagaaccttaaaaatctgtcttgctaaatcacagggagttcccaatgtaaaacaaacaaacaaacaaccaacccacacgcctggtctcagaaaaaatgcctgaaatttkttttctctagtttagacattacatgctgaatttccatttggattttgaactgcaggcaggctaagttctgcaatgtctcctgctatgctgctatccagctttttcagaactctttatattcttatttcttcgttgcactttgctatacagaatcagagctgtccattatctttctaacattcatggtcattccaaataactctggttttccagatgcatggctatcctaggatagcacatatgtgtactatcaggagaatttctgtttttagagatccatgaataccttttatgtgtggt

SEQ ID NO: 89488 - DNA, 600 bp, Chicken  19866894396031_1
tttgagtaggctattccagaagccctacattctattttttttccatatcactcactctataaccacttatgcatgttctcagtgcagattttgaaacaacttttgtttccattacttttgcctcactcctttctgctgcagcttattgtttttcctaaacgatgtgtttctaatgttcttgtcctttggagtttctattacagatgtcagcaaagttctgtgttacctctgactgcctgactaatattccattctgactttcagtagtgtttctaacctaaacatgatttgaagtctttkctgctgctactgtacattcctttttccagttgcctccaagctgtacagcctgtaccctcattttctctcctttttgtctttgcatcatcactaaacttcctctttcatcaacatttcataaatttagtggaaatattttaagtatgacttgtggaaaatcaaactccataacctcaaagtagttataaagcaggtatattttattgcagtgctgcacacatgtgctgggtgcagagggagtagcccctcctggcctgcacagcaaaaagtgacagtttcaggatctttatagagacaaat

SEQ ID NO: 89489 - DNA, 530 bp, Chicken  19866894396031_2
ttgtctttgcatcatcactaaacttcctctttcatcaacatttcataaatttagtggaaatattttaagtatgacttgtggaaaatcaaactccataacctcaaagtagttataaagcaggtatattttattgcagtgctgcacacatgtgctgggtgcagagggagtagcccctcctggcctgcacagcaaaaagtgacagtttcaggatctttatagagacaaattacatatgcaagaataggaggggatattacaattgattctaagaagttattatcacagtctccaccaccattsctgagttattgtgacttgcaggttgtagtggaattcctaagtcacagcttacctggtgtgtgagagataaggctgcattcctcggctcgcccccccccccccaacatccctcatgtagggtctgttttgcctttgttcactctacacccccttgcctagttcataattaagtgaaatgctgttctgaaacaattctaaagtaaaatgttccacatcaagtatatcctaaa

SEQ ID NO: 89490 - DNA, 599 bp, Chicken  19866894396035_1
  misc_feature (1)..(88): n is any nucleotide
nnnnnnnnnnnnnnnnnnnnnnnnnnnnnnnnnnnnnnnnnnnnnnnnnnnnnnnnnnnnnnnnnnnnnnnnnnnnnnnnnnnnnnnntgcacataattattccttactctgtacatttcccataattatttattgtacaaattaatagttatcctccaaaaacacaaaattccaaagtatgctatgtatggacaaagctgaagattcattagcactaggcttactggcgaattcatcagaacttatttttgtagagtttttttttttgcctttggacatactgtatattcttttttttyccccccgagcagcgttattattattatttatttatttattttaactccaacaactattctccattttctcctattacagtcctttaaggcaatgtaaacctagcaaatgaacatgcttgctgaaggggacaaatgtagtattgagcccaaagaaagattccttactaagctgcagctgcagcacgtgactgcatcccatttgtagttgaatttcaaccagcactgaaaattcagaagtttctgtgagcaaaacttcaatcaaaataacaatacttataacagtctttgtggcaaagagt

SEQ ID NO: 89491 - DNA, 600 bp, Chicken  19866894396036_1
acatccctagaatcgaagactcctctccattgcttttagctgttaaccaatatcaccttgtttaaaacctgcagccttagtgaatacttcccaagttaaatctaatctttgtattgctcagtagcacccacgaggattaattttaaataatattattaaaaactttgttttgagattaatttcctattaccccaaaactcatctgggttgctcatctcataaatccagaacaattaatgctgtcatttagttcagttgttttctcttaagctgcatacctgttattcgagagcgccaaargtgcttcaggtacatgtcacgtattgtctggtggttctcattcagctttctgactggttaactgagcaaatcaccttcctttaattagaatctaccgttcctcatcatttataatcagcgaaagtgaacggggtaagcgagactttgttgatacaagtggaaaatgaaaactaatgaattaacaagccctgcaaactagcctttgcaattacacattttctttggttcgtatctcacacacggtgtgcatttaaccacagggaagtggtgggtgcttaaggtgtagaagagcccttagaa

SEQ ID NO: 89492 - DNA, 600 bp, Chicken  19866894396036_2
ctgactggttaactgagcaaatcaccttcctttaattagaatctaccgttcctcatcatttataatcagcgaaagtgaacggggtaagcgagactttgttgatacaagtggaaaatgaaaactaatgaattaacaagccctgcaaactagcctttgcaattacacattttctttggttcgtatctcacacacggtgtgcatttaaccacagggaagtggtgggtgcttaaggtgtagaagagcccttagaaatatttcagtttacactgctagctcttgcatgtggttatggataccttyggtgtcagtgaggaaaagtagcaatgacatttgggtgttaatacacctcgaaactgggaagtgctgcttcagtgcggcagcgtgcagctgggagccgttctgtgagagctgagcttctgcgctcactgagatctgtacctggaaaacagcagcccacagggagagcaaactctgcagtgagcgcttcgacccgctgtgagcccatagccaaaccagcacagatcagagagctctgctggaaacactcctgcagaacagcagctttctgttggcaaaggtggaatttagattgtagaaatc

SEQ ID NO: 89493 - DNA, 600 bp, Chicken  19866894396044_1
gtgcagctgtggcttctggagtagcagtgtaggcaaaaggaagcccgattgggagatgcttccttttctttccacaggtgcactgctggggcgattctgaatgcaactctggaggagattttgcagcgagtagataggtattgggtgggaatagcccggctcggtctccaggaggccagcagcactctgctcacgtgcctagcagcactcaaataccacgctccataagaaatgtctgcgggctgcacgtgggactctcccttccctttgtaagggaagtctgccatgtcaaaggtggaygggagtttaagagactttcagacaggactctttcactggctgagtgaggaatcagccctgggagtgctgtgattgttcccaagcrccactcactccaacgctgctgcctctgcaccaacagagtgaggagggtcttctcctggctcaggggttcaagcggatgctgggaaaaaaaaaagcagaggaatgcttcccccttgctttagttcagaatcctgataagggctgtgccagtgacatctttatcttcattgtaagtgttaatgcttggtggcatgacagtgtggacttctgtgacaa

SEQ ID NO: 89494 - DNA, 600 bp, Chicken  19866894396044_2
ctggggcgattctgaatgcaactctggaggagattttgcagcgagtagataggtattgggtgggaatagcccggctcggtctccaggaggccagcagcactctgctcacgtgcctagcagcactcaaataccacgctccataagaaatgtctgcgggctgcacgtgggactctcccttccctttgtaagggaagtctgccatgtcaaaggtggaygggagtttaagagactttcagacaggactctttcactggctgagtgaggaatcagccctgggagtgctgtgattgttcccaagcrccactcactccaacgctgctgcctctgcaccaacagagtgaggagggtcttctcctggctcaggggttcaagcggatgctgggaaaaaaaaaagcagaggaatgcttcccccttgctttagttcagaatcctgataagggctgtgccagtgacatctttatcttcattgtaagtgttaatgcttggtggcatgacagtgtggacttctgtgacaatgttataaataacctgatggtgaacttgccaaaacaaaaacggaaaaaaaagaaaagagacactgctcttcccatctataggcat

SEQ ID NO: 89495 - DNA, 599 bp, Chicken  19866894396045_1
  misc_feature (1)..(28): n is any nucleotide
nnnnnnnnnnnnnnnnnnnnnnnnnnnntttggtgacccagcttatgcatctctcactggtatatcagtgtgtgcagtaacacacttcagtcaaagtcgacatgctagttgctagtgcatctaagctgtatagcaccatctctggtaggtaagagcatatttcctgcttatatgagaacatcaaaattcaccaaatatacagaatctcacaagaattctatacacttatctcagaaattcaaaatcatatatccatgatttccaatgacctcccctacaataaggaactttgttttaatkacatacaatgaatgtaatgatttgaatttaattatgaattaaawacaaacaaacaaaaatctgttattctgcttatttcagtgggggtataagacataagggttttgccaatgctaacatgatgtataaatatttacagtacataatgatctaagattactgaaaaatctgaggtatttcctgaagttttacatttttaagtctcttgcggagacttactctatacttaagaaactaatatcatcatcattaaaaaagccaacacatagaaatctccccaaaactccatgtttgttgtg

SEQ ID NO: 89496 - DNA, 600 bp, Chicken  19866894396045_2
atgcatctctcactggtatatcagtgtgtgcagtaacacacttcagtcaaagtcgacatgctagttgctagtgcatctaagctgtatagcaccatctctggtaggtaagagcatatttcctgcttatatgagaacatcaaaattcaccaaatatacagaatctcacaagaattctatacacttatctcagaaattcaaaatcatatatccatgatttccaatgacctcccctacaataaggaactttgttttaatkacatacaatgaatgtaatgatttgaatttaattatgaattaaawacaaacaaacaaaaatctgttattctgcttatttcagtgggggtataagacataagggttttgccaatgctaacatgatgtataaatatttacagtacataatgatctaagattactgaaaaatctgaggtatttcctgaagttttacatttttaagtctcttgcggagacttactctatacttaagaaactaatatcatcatcattaaaaaagccaacacatagaaatctccccaaaactccatgtttgttgtgaccaatgacattcaggaataaactctaggaaacagcatatcgtgc

SEQ ID NO: 89497 - DNA, 600 bp, Chicken  19866894396046_1
aatagtaagaagtctgaagagaattaaagaattcctcaacatctaatcagaactgctccccataggggattttctgagcactattacaaggcattggcatatctttaaagagcagagctttgatcataaaaagcaagagtatggagcaggggggaactggaaaaaccacaaaaaggaaacgcaactgcattcaccctgtggtgcaaaggtgaaatccagccctggacagatgctttgcaaagctccaagtaaatccattcagactgcatgagcaacgcttcttatctgggtcccctatcytaggtaagttcttccagcccacaaaatctctgaccctgttgctccagaatgactctaagctggtagttctcttccctaacaaagatgcaagctggtggcttacaccacattaaacctccacacttccaaactgcagaccatggggcttctcagttccagccactttatcaagatcagccaayaagaacatctatcatactcrtgtactgaggcttctgtctccactttcacagctggcaaagcagatgctcagagaaggaatgcaagttgcccacagctgaagagattttattcgcagta

SEQ ID NO: 89498 - DNA, 600 bp, Chicken  19866894396046_2
aactgcattcaccctgtggtgcaaaggtgaaatccagccctggacagatgctttgcaaagctccaagtaaatccattcagactgcatgagcaacgcttcttatctgggtcccctatcytaggtaagttcttccagcccacaaaatctctgaccctgttgctccagaatgactctaagctggtagttctcttccctaacaaagatgcaagctggtggcttacaccacattaaacctccacacttccaaactgcagaccatggggcttctcagttccagccactttatcaagatcagccaayaagaacatctatcatactcrtgtactgaggcttctgtctccactttcacagctggcaaagcagatgctcagagaaggaatgcaagttgcccacagctgaagagattttattcgcagtagcctgatcctagcagtgctggcatttgcactgctcagttttgagcatgagttctgataagatggactcagagatccttattagtctcttccaactggagatatcctgctattctatgaaaatcaatggcaggacttgagagagagagtccacttgtttcccaatgtcttctgtttcccaaag

SEQ ID NO: 89499 - DNA, 600 bp, Chicken  19866894396046_3
gcaaaggtgaaatccagccctggacagatgctttgcaaagctccaagtaaatccattcagactgcatgagcaacgcttcttatctgggtcccctatcytaggtaagttcttccagcccacaaaatctctgaccctgttgctccagaatgactctaagctggtagttctcttccctaacaaagatgcaagctggtggcttacaccacattaaacctccacacttccaaactgcagaccatggggcttctcagttccagccactttatcaagatcagccaayaagaacatctatcatactcrtgtactgaggcttctgtctccactttcacagctggcaaagcagatgctcagagaaggaatgcaagttgcccacagctgaagagattttattcgcagtagcctgatcctagcagtgctggcatttgcactgctcagttttgagcatgagttctgataagatggactcagagatccttattagtctcttccaactggagatatcctgctattctatgaaaatcaatggcaggacttgagagagagagtccacttgtttcccaatgtcttctgtttcccaaagctcatgcaatagttcaaagc

SEQ ID NO: 89500 - DNA, 600 bp, Chicken  19866894396050_1
tctgcttaaaaggtcatatttaatttactaaatgagcctacctccccaagcgctaaattcttaaatattgtctctctgtggcaagacatcgctgcagtttttttccttcactactgtgcttaaagggtattcctccttacaaagcttgtgtgcagtgatggagaaaaaacatctgccaacagtgacttcctagacatggtatatttacaaaccttgttagttgccatgaacacgtcatgcctggttgatgcccttatgggcaaagtaaaattgtatggagggtattctcttttcttcccygtggaagaaggggtttcattttgtaaaggtagcacataggtgtgaaagccccaggaggtggggaagaacatcctgtaatttacttataaccaaaagcaatcacccgtctttaaaagttctgtcacggctaggtgactgcagtctctctccccagtcccacagcagcacggcacctgccacatgccagttttggtttatgctcccacctaacaaaatgtgatgccagaggaatactattcaatatcttctgtggtacagctgtgcaccagttagtctacaccaataggagtgatgatcaga

SEQ ID NO: 89501 - DNA, 600 bp, Chicken  19866894396058_1
atgtgactacagtagcatttccgagtgctttcattatactgttcaggtggaactttcggatagatagacaatttgcaatggggagagcaagagtgtagttgctgtcataaacaagaaacttggccatcaagcaagtagaatcttctctgacatctctccactcatttaaagaagagttacttcctaaattttcaggagtacagggtttttaaagtgttaatgtgttattttaaacactgatctggttgtttattatcagtttatcacttgcatcatcagtcctttgaggtcacaatttgytgcattggaacaaatyttttctctcaatttcatgataatatttactctgttgttaaacaggtacatttttataaagaaaataagcagctggcagcttgcagaaggcaatgaaatagagggattttgyacaggacacagcaggacaaagtctcagcaagtctgtattccttcttcggttgcttctagaacatgttgttagcatctatagttctctaccttcatatctctatcaaaggttgtagtggaagggaagcttgtgaaggctcctccacagcctctggcgctaaaaggagagatgga

SEQ ID NO: 89502 - DNA, 600 bp, Chicken  19866894396058_2
atttccgagtgctttcattatactgttcaggtggaactttcggatagatagacaatttgcaatggggagagcaagagtgtagttgctgtcataaacaagaaacttggccatcaagcaagtagaatcttctctgacatctctccactcatttaaagaagagttacttcctaaattttcaggagtacagggtttttaaagtgttaatgtgttattttaaacactgatctggttgtttattatcagtttatcacttgcatcatcagtcctttgaggtcacaatttgytgcattggaacaaatyttttctctcaatttcatgataatatttactctgttgttaaacaggtacatttttataaagaaaataagcagctggcagcttgcagaaggcaatgaaatagagggattttgyacaggacacagcaggacaaagtctcagcaagtctgtattccttcttcggttgcttctagaacatgttgttagcatctatagttctctaccttcatatctctatcaaaggttgtagtggaagggaagcttgtgaaggctcctccacagcctctggcgctaaaaggagagatggacttaactaggtgatac

SEQ ID NO: 89503 - DNA, 600 bp, Chicken  19866894396058_3
caagcaagtagaatcttctctgacatctctccactcatttaaagaagagttacttcctaaattttcaggagtacagggtttttaaagtgttaatgtgttattttaaacactgatctggttgtttattatcagtttatcacttgcatcatcagtcctttgaggtcacaatttgytgcattggaacaaatyttttctctcaatttcatgataatatttactctgttgttaaacaggtacatttttataaagaaaataagcagctggcagcttgcagaaggcaatgaaatagagggattttgyacaggacacagcaggacaaagtctcagcaagtctgtattccttcttcggttgcttctagaacatgttgttagcatctatagttctctaccttcatatctctatcaaaggttgtagtggaagggaagcttgtgaaggctcctccacagcctctggcgctaaaaggagagatggacttaactaggtgatactttgcccctttcccatctaggggagcggttgctgctttaatctctcctgaccaattccagcaggttaaacataggtatttaaccagatgcctgttggcaggtttgagtact

SEQ ID NO: 89504 - DNA, 587 bp, Chicken  19866894396060_1
tgaggctttgaaatataaaatactgtcaggggaactgaataaagggggaatttggaaagatatggttgctgcttccattgaaaaatcatctgaaaacattttttaaaacttagcattcagtctagcctggtaagtgactgtaagagaatgtatattaactacagctctgtagattataagggacgtctgtaaaggagataaatacaaacttgaatacttccttcatccactccagcaaataactcatcagagaactgagttttccaagttcctttttaggcgctttgtggaacttgactrtattcatgttggtaaaatgtactttgccttgtaatgagcctcctgattaaaaaaacagatctgtccagtattttttaaagataaattctatttatctttaaaccaactatttatcttcaaccaataaactgcagtgacttagctgaacctttctcttgtagcaagctttccaaaaggtgtgcagtgcaaattaaccacctgaaccttacagatttgctgaatcatatatctgagaaaaaaatatggtgactttgtttttgctatcagcaggtctcgtaaataaagaa

SEQ ID NO: 89505 - DNA, 600 bp, Chicken  19866894396062_1
ggctggacataaagcacaatcagactcaatggccacactgtcgttctccatggcagcacaggcaccgtgggctttaatgcaaatgcatgctgtggtgtgtatttgttcttttctcccctctgctttttctcctgctctcccgcatctccccaaatcccgagtccccacttcagccccattcctgctctcactgcctctcacagctgagaaatgagtccaggtcaaatgagtgagcggtgaatccaagaccacaccacaatgtgtttgattccctgagccatgcgctatccactgggcctycttgcctctctcataatccctctacttacttctggagtcaataattaagataattatatggtaacctgatataataagtagccactaaatcaaaccatacatcaacaaataatataacactaaattacgtgagctttgatttgctctttcaaataggttctataccttcaggggattagcagtttagagaacaaaacaaaagtgcaaaaccaactgattttccttggaagaaaattccttttgcttacatacagaaaaaggggtcagtcaaatggcagcacagtgaactcagctatcatg

SEQ ID NO: 89506 - DNA, 600 bp, Chicken  19866894396062_2
aggaggcaccacactgcaggtaatgaaatattctgtattttaattttgcagccactgctttgcacagcagtttgtctgacgctttgcaaagccctgtagtatctctccctgctgacttggaagtggaacagccatgtaaatcttgtggcatttctctttgtgcctcttccccctttttgacttccagaggggtggtggtacgccttcacccatcccaggcaaatgactcacttctgaggtccagcaaatgtctgttttggctacaaattctcttttatgtctggcagcacaacccaggcytcaaatccctagaaaaaggtgggaaattaattcctaaccccacagaggaccctgcagcaaaatactagccgtgattataaaattctctacatgctacaagaatgatgcatgttttaatccccatagaagttccaagagagataactgccttcagatccacctctgcttttcagttttggctttagcgttttcaaggcaggcaaacctattttctgccaccaccctcagttaacttttagttcttcaacgagcaccaagggaatcaaagtgctgacatgagaggtctggccaatctttctg

SEQ ID NO: 89507 - DNA, 600 bp, Chicken  19866894396064_1
atcaatacaacatttttgttgttgttgttgtcatttttaatctttcttaattgtgtttatgaatgtaggattaaaaactctgtggtacagcgtaaccactagtgtcagtaaatacaacccagaaattaaacaatctctgcagaaatgactgcagagaaaaatcttctgaaaaatgcagaatatttctgaatataaaatatttttatgaaagaagagtttgaggaagaaattcaattcacatagatggaaatagattacataaaatatgttcaaaagaaaacagacacagactcaagtgckatggtacttagaacagatctgtggcaaaaccatgctgatacaatgctctagcagcaatgcagggccattagcattgtgaaagttgcaaatattttccatggcattgatctatttatggtgaagagaaggaaaaagaaggagcagaaaatgacacagtgttccagagtcaatttgactgagtcagacaatcctccaacttttaagaagaacagttttggaatctttaattctcttcagcccctagaaattatggcggcctgccaaagagaaacaggttttctgctaagcctctgcttaggc

SEQ ID NO: 89508 - DNA, 600 bp, Chicken  19866894396065_1
ccatgtgcagtccctcttgtttgtgcactgaagctcagagtcaacaggaattgtttagctgatgcttaatacctgcagcttcttgccctctgctccccccttcccacctcaacccccttcccaatccttatcttttaatattttttttgctgtgggccatcagagatgctttattagtatttagaagctgcaccttgaacaagcgaattgaaagctgacagccgagcccattaaacacagccttgtacagctcatcaaggtgcagaacacaactctgtgtgagattggcatagatgtacrtcttgttccacttaatttgtaatcacagtaacaaaaaatttcttctcattaaaattttaaggttaacaataaaagaacatcaagaaaaaagaccatgttcagaatgaaatttcactgctggaattgaatatatcaactcctccataaacattttcttccctcttgaaaatgagatggtgggaagagagaagaaacatcgactgcatttaaaaacagcttcttgactgatgccatcagtgtagccagccttgcagttaatcagctctgccctcaccaacagatgtcactgcaagcaaaagg

SEQ ID NO: 89509 - DNA, 600 bp, Chicken  19866894396074_1
gccatgccccaaaggaacaccgactgcagtgaggtgtgctgggaggctgcagtagtgctgtctcagtactgccactgggatgcattcatctgtgtgcagagcctttgtgggtacggctggcttactgtggcacctgttagcaggtacagttcctaattgtatgagtgcagaaagctttgcttttatactgagcacagaaattgtactggggtaggagagaattggttagaaattgggagaatggatgggagaggacactgtgtgggcacagagcttttacaaagggattttccctcatgyrggttgggctttcagggcatcgtcggtgagatgtctggcagtctcattgcactgtaggttagatagtccatgagattacgttcctcttgctttgttcaacagagtctttcctgtgtagttcccacaattcaacacccatggcatttccctggccctgaggagggagttcccttctctattccagataccagaagaactcgtacagccactgaataaaccttcctggggctgctgagcattctatccaatgtgaaacatcagatcgggtcctgctggttctgtgggatgctcatgtatgtt

SEQ ID NO: 89510 - DNA, 600 bp, Chicken  19866894396074_2
ccatgccccaaaggaacaccgactgcagtgaggtgtgctgggaggctgcagtagtgctgtctcagtactgccactgggatgcattcatctgtgtgcagagcctttgtgggtacggctggcttactgtggcacctgttagcaggtacagttcctaattgtatgagtgcagaaagctttgcttttatactgagcacagaaattgtactggggtaggagagaattggttagaaattgggagaatggatgggagaggacactgtgtgggcacagagcttttacaaagggattttccctcatgyrggttgggctttcagggcatcgtcggtgagatgtctggcagtctcattgcactgtaggttagatagtccatgagattacgttcctcttgctttgttcaacagagtctttcctgtgtagttcccacaattcaacacccatggcatttccctggccctgaggagggagttcccttctctattccagataccagaagaactcgtacagccactgaataaaccttcctggggctgctgagcattctatccaatgtgaaacatcagatcgggtcctgctggttctgtgggatgctcatgtatgttt

SEQ ID NO: 89511 - DNA, 600 bp, Chicken  19866894396074_3
aacatcagatcgggtcctgctggttctgtgggatgctcatgtatgtttggagatagaaacgtgaccgattatctatgagaagcttttagcttctcaatcacaagaccgactcagcttgtgattgaggtgtttttccaccgacttcctaagctgcagaaaagaaagtatgttcctctaagtttgtaaaataactgcttgctataaagcaaggataacttcttacaaaattattctcctaattggaaacgctatttaaacttggcccaggtttgcagataagcagtttgagaacatagttgyattaccaacacataatataaaacccaggctcttcatttggcttgtccatatggccaggcaagaagagaagctctctgcaaagctgtcaggagaaagcatgtgttactgtgcagaagttamgagctatcacttgtagctccacagagagcctgagccacagttctcgtgcttatggtttggttggttggtgttcattatctttcctggtctcagcacccatctcttgaaccaaatgaaactggctgggactgaacacaagctgctttctgcccatacgtccctgatcccaggactcccttt

SEQ ID NO: 89512 - DNA, 553 bp, Chicken  19866894396074_4
attgaggtgtttttccaccgacttcctaagctgcagaaaagaaagtatgttcctctaagtttgtaaaataactgcttgctataaagcaaggataacttcttacaaaattattctcctaattggaaacgctatttaaacttggcccaggtttgcagataagcagtttgagaacatagttgyattaccaacacataatataaaacccaggctcttcatttggcttgtccatatggccaggcaagaagagaagctctctgcaaagctgtcaggagaaagcatgtgttactgtgcagaagttamgagctatcacttgtagctccacagagagcctgagccacagttctcgtgcttatggtttggttggttggtgttcattatctttcctggtctcagcacccatctcttgaaccaaatgaaactggctgggactgaacacaagctgctttctgcccatacgtccctgatcccaggactccctttggacaaagcaggcacatttcttctgcactctgtcgtaatctactgtctttgtacaggggatacaagtagaaga

SEQ ID NO: 89513 - DNA, 600 bp, Chicken  19866894396080_1
tgtcggaagacttctctcatgcctgctccctcttgcagctcctggagcaagcactggtgattgaggagcagttgcggcgagctgcctatctgaatatgtcagaagaccccactcacccctcaatggctctgaacacacgttttgcggaggtggagtgcctggctgagagtcaccagcatctatccaaggagtcaatggccgggaataagcctgccaatgctgtgctgcacaaaggtgatgctatgagctaagcaagagtggatgcgttgagcatcaccgtcccctctggtcttccccatstgtggtgcccttttttcttttccctccsctgaatacgtgtccctttctcttctagttctgaagcagytagaggagcttctgagtgacatgaaggcagacgtgacacgcttgcctgccactattgcccgtatcccgccggtggcagtgcgcctgcagatgtcagaacgcaacatcctcagcaggctcgccaaccgcagcagtgagccccctccaccgccccctccccaacaagtatgtgccctccctgctttgcaggcggggctgtctcggggctatgtggggaaatagcccccatacaat

SEQ ID NO: 89514 - DNA, 600 bp, Chicken  19866894396080_2
cctcttgcagctcctggagcaagcactggtgattgaggagcagttgcggcgagctgcctatctgaatatgtcagaagaccccactcacccctcaatggctctgaacacacgttttgcggaggtggagtgcctggctgagagtcaccagcatctatccaaggagtcaatggccgggaataagcctgccaatgctgtgctgcacaaaggtgatgctatgagctaagcaagagtggatgcgttgagcatcaccgtcccctctggtcttccccatstgtggtgcccttttttcttttccctccsctgaatacgtgtccctttctcttctagttctgaagcagytagaggagcttctgagtgacatgaaggcagacgtgacacgcttgcctgccactattgcccgtatcccgccggtggcagtgcgcctgcagatgtcagaacgcaacatcctcagcaggctcgccaaccgcagcagtgagccccctccaccgccccctccccaacaagtatgtgccctccctgctttgcaggcggggctgtctcggggctatgtggggaaatagcccccatacaatggagtctagcggctgttctcttgcccta

SEQ ID NO: 89515 - DNA, 600 bp, Chicken  19866894396080_3
gcagttgcggcgagctgcctatctgaatatgtcagaagaccccactcacccctcaatggctctgaacacacgttttgcggaggtggagtgcctggctgagagtcaccagcatctatccaaggagtcaatggccgggaataagcctgccaatgctgtgctgcacaaaggtgatgctatgagctaagcaagagtggatgcgttgagcatcaccgtcccctctggtcttccccatstgtggtgcccttttttcttttccctccsctgaatacgtgtccctttctcttctagttctgaagcagytagaggagcttctgagtgacatgaaggcagacgtgacacgcttgcctgccactattgcccgtatcccgccggtggcagtgcgcctgcagatgtcagaacgcaacatcctcagcaggctcgccaaccgcagcagtgagccccctccaccgccccctccccaacaagtatgtgccctccctgctttgcaggcggggctgtctcggggctatgtggggaaatagcccccatacaatggagtctagcggctgttctcttgccctacaggtggcgcagcagcagtgagtctccagcccagtgctg

SEQ ID NO: 89516 - DNA, 600 bp, Chicken  19866894396087_1
gatccagaaattgatagtgcctgatagaacctacactgattacagcatgtccaaacaatttagaagacaatttttttttttacccaatgatttggattgcaaaagggatgcaattgagaatttaggatgcattttaaatctttgcagaagcttatgaacattaatgaattaattcttacaatctgagttgggtttacgtacatgtacacacatgtatttttaagcatagttagactatgcataggtttggtcaaatttttggagtagttcaatctgaaataacaataagtataaaaattyaaaaaaaaaaaaggaacagatcattcagcacttcrgaaagaaaacataactttccagtgacctaaaatctgtatgtaaatggatattcagtggcccatgaaagcggcagcatcaatataaatgataaagaagtgactcttttggcgtgcgaaattgtcatctctggtccagtgaacttttctagggaagtcttctgtaggctcacattgtgtccttgttattaagcacttagtacatgaggcattattaatctatatcctctgaatatctctaaagccatttaatccaccctttatctta

SEQ ID NO: 89517 - DNA, 600 bp, Chicken  19866894396087_2; identical to SEQ ID NO: 89516

SEQ ID NO: 89518 - DNA, 600 bp, Chicken  19866894396087_3; identical to SEQ ID NO: 89516

SEQ ID NO: 89519 - DNA, 583 bp, Chicken  19866894396087_4
ctgattacagcatgtccaaacaatttagaagacaatttttttttttacccaatgatttggattgcaaaagggatgcaattgagaatttaggatgcattttaaatctttgcagaagcttatgaacattaatgaattaattcttacaatctgagttgggtttacgtacatgtacacacatgtatttttaagcatagttagactatgcataggtttggtcaaatttttggagtagttcaatctgaaataacaataagtataaaaattaaaaaaaaaaaaaggaacagatcattcagcacttcrgaaagaaaacataactttccagtgacctaaaatctgtatgtaaatggatattcagtggcccatgaaagcggcagcatcaatataaatgataaagaagtgactcttttggcgtgcgaaattgtcatctctggtccagtgaacttttctagggaagtcttctgtaggctcacattgtgtccttgttattaagcacttagtacatgaggcattattaatctatatcctctgaatatctctaaagccatttaatccaccctttatcttactttcagcaaagccaaaa

SEQ ID NO: 89520 - DNA, 600 bp, Chicken  19866894396088_1
tctgcatggaaacagggcactggcagactgtgagccagggaaacggggcaggcagtgttaggtgctaaatgccagcagtatcccctcacttctgtgaaataatcaattgacacggtggaacttccgtaatgacacagtgtacctgaaattttgtctctttctttcaaactgggtatattaactttgatggtaactatggaagtgaaaatactaagtggtacagtttcacgaactgtattggctggagctctgtagacgcctacaccgaagtgtctgagcacagacctgcacccagtcccygaggctataaataagcatccccatctgcttctgacagtgcrttgcaggcagggggatgctgcctatagcttggttgcagtttttcttaatctttttggagaatcctggtgaattgttttggcagtcgtrgcagccttgktgcagcagggacacaactgcaggctttmagacctctgtccsagcttgtatgcgagtgatctttctgcaggttgatcgagggcatcagagaaggaggctcatgaagtacctggtggcagggagtgtgaaggagggacacttcaggaggaattctttgggatg

SEQ ID NO: 89521 - DNA, 600 bp, Chicken  19866894396088_10
trgcagccttgktgcagcagggacacaactgcaggctttmagacctctgtccsagcttgtatgcgagtgatctttctgcaggttgatcgagggcatcagagaaggaggctcatgaagtacctggtggcagggagtgtgaaggagggacacttcaggaggaattctttgggatgataacacatgcttttttttcatccgttagaatggtttcagtgaagaccyrtgtgtgtctgaaggcgtaaggagcatattgttttaagtctctttgcctcaaagtagcctcagccttcacrgcttaayctgtcaatcagaagagagcttaatctgaatggytttctcctttctttccaggaaagcactgacaagataccagatgcttttcagacacatgttctattgcaaacatgtggaaaggcagttgtgcaatgtttggatcagcaataagacagccaagcagttctccctacattcagctaaatggtatggcttctttttctgccgaggctttggttttccttcttcctagttagatgcattgtgacatgaatcagattattttgacatggaacagatcattccaaatttctgacaggcagtggg

SEQ ID NO: 89522 - DNA, 600 bp, Chicken  19866894396088_11
ggctttmagacctctgtccsagcttgtatgcgagtgatctttctgcaggttgatcgagggcatcagagaaggaggctcatgaagtacctggtggcagggagtgtgaaggagggacacttcaggaggaattctttgggatgataacacatgcttttttttcatccgttagaatggtttcagtgaagaccyrtgtgtgtctgaaggcgtaaggagcatattgttttaagtctctttgcctcaaagtagcctcagccttcacrgcttaayctgtcaatcagaagagagcttaatctgaatggytttctcctttctttccaggaaagcactgacaagataccagatgcttttcagacacatgttctattgcaaacatgtggaaaggcagttgtgcaatgtttggatcagcaataagacagccaagcagttctccctacattcagctaaatggtatggcttctttttctgccgaggctttggttttccttcttcctagttagatgcattgtgacatgaatcagattattttgacatggaacagatcattccaaatttctgacaggcagtgggaggtcaaacatgacattttaggatgcagtagga

SEQ ID NO: 89523 - DNA, 600 bp, Chicken  19866894396088_2
aacggggcaggcagtgttaggtgctaaatgccagcagtatcccctcacttctgtgaaataatcaattgacacggtggaacttccgtaatgacacagtgtacctgaaattttgtctctttctttcaaactgggtatattaactttgatggtaactatggaagtgaaaatactaagtggtacagtttcacgaactgtattggctggagctctgtagacgcctacaccgaagtgtctgagcacagacctgcacccagtcccygaggctataaataagcatccccatctgcttctgacagtgcrttgcaggcagggggatgctgcctatagcttggttgcagtttttcttaatctttttggagaatcctggtgaattgttttggcagtcgtrgcagccttgktgcagcagggacacaactgcaggctttmagacctctgtccsagcttgtatgcgagtgatctttctgcaggttgatcgagggcatcagagaaggaggctcatgaagtacctggtggcagggagtgtgaaggagggacacttcaggaggaattctttgggatgataacacatgcttttttttcatccgttagaatggtttcagt

SEQ ID NO: 89524 - DNA, 600 bp, Chicken  19866894396088_3
tgacacagtgtacctgaaattttgtctctttctttcaaactgggtatattaactttgatggtaactatggaagtgaaaatactaagtggtacagtttcacgaactgtattggctggagctctgtagacgcctacaccgaagtgtctgagcacagacctgcacccagtcccygaggctataaataagcatccccatctgcttctgacagtgcrttgcaggcagggggatgctgcctatagcttggttgcagtttttcttaatctttttggagaatcctggtgaattgttttggcagtcgtrgcagccttgktgcagcagggacacaactgcaggctttmagacctctgtccsagcttgtatgcgagtgatctttctgcaggttgatcgagggcatcagagaaggaggctcatgaagtacctggtggcagggagtgtgaaggagggacacttcaggaggaattctttgggatgataacacatgcttttttttcatccgttagaatggtttcagtgaagaccyrtgtgtgtctgaaggcgtaaggagcatattgttttaagtctctttgcctcaaagtagcctcagccttcacrgcttaayct

SEQ ID NO: 89525 - DNA, 600 bp, Chicken  19866894396088_4
tacctgaaattttgtctctttctttcaaactgggtatattaactttgatggtaactatggaagtgaaaatactaagtggtacagtttcacgaactgtattggctggagctctgtagacgcctacaccgaagtgtctgagcacagacctgcacccagtcccygaggctataaataagcatccccatctgcttctgacagtgcrttgcaggcagggggatgctgcctatagcttggttgcagtttttcttaatctttttggagaatcctggtgaattgttttggcagtcgtrgcagccttgktgcagcagggacacaactgcaggctttmagacctctgtccsagcttgtatgcgagtgatctttctgcaggttgatcgagggcatcagagaaggaggctcatgaagtacctggtggcagggagtgtgaaggagggacacttcaggaggaattctttgggatgataacacatgcttttttttcatccgttagaatggtttcagtgaagaccyrtgtgtgtctgaaggcgtaaggagcatattgttttaagtctctttgcctcaaagtagcctcagccttcacrgcttaayctgtcaatcaga

SEQ ID NO: 89526 - DNA, 600 bp, Chicken  19866894396088_5
actgggtatattaactttgatggtaactatggaagtgaaaatactaagtggtacagtttcacgaactgtattggctggagctctgtagacgcctacaccgaagtgtctgagcacagacctgcacccagtcccygaggctataaataagcatccccatctgcttctgacagtgcrttgcaggcagggggatgctgcctatagcttggttgcagtttttcttaatctttttggagaatcctggtgaattgttttggcagtcgtrgcagccttgktgcagcagggacacaactgcaggctttmagacctctgtccsagcttgtatgcgagtgatctttctgcaggttgatcgagggcatcagagaaggaggctcatgaagtacctggtggcagggagtgtgaaggagggacacttcaggaggaattctttgggatgataacacatgcttttttttcatccgttagaatggtttcagtgaagaccyrtgtgtgtctgaaggcgtaaggagcatattgttttaagtctctttgcctcaaagtagcctcagccttcacrgcttaayctgtcaatcagaagagagcttaatctgaatggytttctcc

SEQ ID NO: 89527 - DNA, 600 bp, Chicken  19866894396088_6
actttgatggtaactatggaagtgaaaatactaagtggtacagtttcacgaactgtattggctggagctctgtagacgcctacaccgaagtgtctgagcacagacctgcacccagtcccygaggctataaataagcatccccatctgcttctgacagtgcrttgcaggcagggggatgctgcctatagcttggttgcagtttttcttaatctttttggagaatcctggtgaattgttttggcagtcgtrgcagccttgktgcagcagggacacaactgcaggctttmagacctctgtccsagcttgtatgcgagtgatctttctgcaggttgatcgagggcatcagagaaggaggctcatgaagtacctggtggcagggagtgtgaaggagggacacttcaggaggaattctttgggatgataacacatgcttttttttcatccgttagaatggtttcagtgaagaccyrtgtgtgtctgaaggcgtaaggagcatattgttttaagtctctttgcctcaaagtagcctcagccttcacrgcttaayctgtcaatcagaagagagcttaatctgaatggytttctcctttctttccagga

SEQ ID NO: 89528 - DNA, 600 bp, Chicken  19866894396088_7
agggggatgctgcctatagcttggttgcagtttttcttaatctttttggagaatcctggtgaattgttttggcagtcgtrgcagccttgktgcagcagggacacaactgcaggctttmagacctctgtccsagcttgtatgcgagtgatctttctgcaggttgatcgagggcatcagagaaggaggctcatgaagtacctggtggcagggagtgtgaaggagggacacttcaggaggaattctttgggatgataacacatgcttttttttcatccgttagaatggtttcagtgaagaccyrtgtgtgtctgaaggcgtaaggagcatattgttttaagtctctttgcctcaaagtagcctcagccttcacrgcttaayctgtcaatcagaagagagcttaatctgaatggytttctcctttctttccaggaaagcactgacaagataccagatgcttttcagacacatgttctattgcaaacatgtggaaaggcagttgtgcaatgtttggatcagcaataagacagccaagcagttctccctacattcagctaaatggtatggcttctttttctgccgaggctttggttttccttcttc

SEQ ID NO: 89529 - DNA, 600 bp, Chicken  19866894396088_8
gggggatgctgcctatagcttggttgcagtttttcttaatctttttggagaatcctggtgaattgttttggcagtcgtrgcagccttgktgcagcagggacacaactgcaggctttmagacctctgtccsagcttgtatgcgagtgatctttctgcaggttgatcgagggcatcagagaaggaggctcatgaagtacctggtggcagggagtgtgaaggagggacacttcaggaggaattctttgggatgataacacatgcttttttttcatccgttagaatggtttcagtgaagaccyrtgtgtgtctgaaggcgtaaggagcatattgttttaagtctctttgcctcaaagtagcctcagccttcacrgcttaayctgtcaatcagaagagagcttaatctgaatggytttctcctttctttccaggaaagcactgacaagataccagatgcttttcagacacatgttctattgcaaacatgtggaaaggcagttgtgcaatgtttggatcagcaataagacagccaagcagttctccctacattcagctaaatggtatggcttctttttctgccgaggctttggttttccttcttcc

SEQ ID NO: 89530 - DNA, 600 bp, Chicken  19866894396088_9
gcagtcgtrgcagccttgktgcagcagggacacaactgcaggctttmagacctctgtccsagcttgtatgcgagtgatctttctgcaggttgatcgagggcatcagagaaggaggctcatgaagtacctggtggcagggagtgtgaaggagggacacttcaggaggaattctttgggatgataacacatgcttttttttcatccgttagaatggtttcagtgaagaccyrtgtgtgtctgaaggcgtaaggagcatattgttttaagtctctttgcctcaaagtagcctcagccttcacrgcttaayctgtcaatcagaagagagcttaatctgaatggytttctcctttctttccaggaaagcactgacaagataccagatgcttttcagacacatgttctattgcaaacatgtggaaaggcagttgtgcaatgtttggatcagcaataagacagccaagcagttctccctacattcagctaaatggtatggcttctttttctgccgaggctttggttttccttcttcctagttagatgcattgtgacatgaatcagattattttgacatggaacagatcattccaaatttctgacagg

SEQ ID NO: 89531 - DNA, 600 bp, Chicken  19866894396089_1
ggaacagtcatggtaagtagactggattaaatggaccaatttgatctgaagttgaacagtaccaacacagaactgcgttgagcagagcagcgaggagatccgtgcctttagtagcaccttcaaatggacacattctgtaaaaagggcacaggggattgtgtagaaatgaatttcgctgcagagtaggcaggcactttggtgtggggaggcatgagttgccctgcctagcccagtgtaaacacagagtcaagagccatcattcagtgctgcagaacagggtacgatactgactttgaacaycaatataaagtcatatcctttatcaccaatgtttcctccattaccaaagccacatttgcatcctgcagaaattcccagctttgccctggtgagatcgacctaaaatacagttatatattgttacgaatgaaaaaacaaacatcatgaaggtttgtagcacaacagataacatggggggatgcctaattaaactacatgcactatcgagttaactaaaataggcgttattgaataaaaccctaataaaacctgaacactatcaagcatgagctctcaaggctgctgcaggagaatgacaca

SEQ ID NO: 89532 - DNA, 600 bp, Chicken  19866894396100_1
gaataaaatgtgacaaatgaagaatctggttaagacctaacctgttcctcttattattatccaagagcaggactccttaaatgtttcatattggtctttagaagtttgacatgagggcctcttacagacaactgacaccaaactacagttgctggttcatttgtatacaaagctcaaagtacccgggacaatagatgccaagtgcaggttagaaaagattaaagaaaaataacttgtctggatcaagtcataaaacaagtcactgctaaatagaaaggtgctgaagcataatgaccccamcacagcctttagaaatattgcttttcaaatgtctctatcaaaattgcagttacttggaagaaagcaaataaggtacaagaagaagatatttctggagcaacgatcaacaatacattgtttctacatgggatgattagttttccatctagaatacataactttacaaaatagttgacaacatgttagacagcacaagattagagccaatagctaagaaaataattaatcagttcaaacacaatggtttcaaggtttcaagtgggaaacaaaaagcactgctgctcaagattttttcttmtt

SEQ ID NO: 89533 - DNA, 600 bp, Chicken  19866894396100_2
amcacagcctttagaaatattgcttttcaaatgtctctatcaaaattgcagttacttggaagaaagcaaataaggtacaagaagaagatatttctggagcaacgatcaacaatacattgtttctacatgggatgattagttttccatctagaatacataactttacaaaatagttgacaacatgttagacagcacaagattagagccaatagctaagaaaataattaatcagttcaaacacaatggtttcaaggtttcaagtgggaaacaaaaagcactgctgctcaagattttttcttmttmttattattattttaagtagcatctgatggtgcagcatctgacagtcagcaagaytacatatagaaagaaatgggtgcctgcaaagacagcacccttgaggggaaggaacaccagggagcacagcactgcttagcactatctgcgacaagaagactgagtgaggggttggtcttatatatgcatgcaaatgcagttattgctccagtgcatccacagaatccagcatgcgtgacaacatgggaacatgcaatatccaaaccaggtctgtgtggtggcttggcacacacttaccctttt

SEQ ID NO: 89534 - DNA, 600 bp, Chicken  19866894396100_3
acagcctttagaaatattgcttttcaaatgtctctatcaaaattgcagttacttggaagaaagcaaataaggtacaagaagaagatatttctggagcaacgatcaacaatacattgtttctacatgggatgattagttttccatctagaatacataactttacaaaatagttgacaacatgttagacagcacaagattagagccaatagctaagaaaataattaatcagttcaaacacaatggtttcaaggtttcaagtgggaaacaaaaagcactgctgctcaagattttttcttmttmttattattattttaagtagcatctgatggtgcagcatctgacagtcagcaagaytacatatagaaagaaatgggtgcctgcaaagacagcacccttgaggggaaggaacaccagggagcacagcactgcttagcactatctgcgacaagaagactgagtgaggggttggtcttatatatgcatgcaaatgcagttattgctccagtgcatccacagaatccagcatgcgtgacaacatgggaacatgcaatatccaaaccaggtctgtgtggtggcttggcacacacttaccctttttct

SEQ ID NO: 89535 - DNA, 600 bp, Chicken  19866894396100_4
ggaagaaagcaaataaggtacaagaagaagatatttctggagcaacgatcaacaatacattgtttctacatgggatgattagttttccatctagaatacataactttacaaaatagttgacaacatgttagacagcacaagattagagccaatagctaagaaaataattaatcagttcaaacacaatggtttcaaggtttcaagtgggaaacaaaaagcactgctgctcaagattttttcttmttmttattattattttaagtagcatctgatggtgcagcatctgacagtcagcaagaytacatatagaaagaaatgggtgcctgcaaagacagcacccttgaggggaaggaacaccagggagcacagcactgcttagcactatctgcgacaagaagactgagtgaggggttggtcttatatatgcatgcaaatgcagttattgctccagtgcatccacagaatccagcatgcgtgacaacatgggaacatgcaatatccaaaccaggtctgtgtggtggcttggcacacacttaccctttttctttactgggggaagttttcagcctaacaacgttcccatttgttgctattaactga

SEQ ID NO: 89536 - DNA, 599 bp, Chicken  19866894396104_1
  misc_feature (1)..(105): n is any nucleotide
nnnnnnnnnnnnnnnnnnnnnnnnnnnnnnnnnnnnnnnnnnnnnnnnnnnnnnnnnnnnnnnnnnnnnnnnnnnnnnnnnnnnnnnnnnnnnnnnnnnnnnnnncctctgtagaaaaatgtgctcatcttggatgaacactcttcttttgtgcgtttctgaatggacctacatatgggaaaagtgaaaaaatccctctccgccccaaagaagccttattttactgaaagcagcagcacttccctccccggtttctcactgtcctttcgatgccacttgcctgctatttggagattggayacttatgcacaagtgtgtgtgaatatacatacagacaccaaataagattcagaggaagagtctggaattgacatgagaagagtagcttcttattcactggcattaatactgtcttccttctgcacatctgtgaaagcctcagagcagagatgactgaattaggctacgtctaagtctaaacacttaacagatattaattaaatagacctccttcccatygcagtgagatctatccttttgtctgcaagaaggctggatgcccagacracttgacagagttcagaaagcagagtggtgat

SEQ ID NO: 89537 - DNA, 600 bp, Chicken  19866894396104_2
tttactgaaagcagcagcacttccctccccggtttctcactgtcctttcgatgccacttgcctgctatttggagattggayacttatgcacaagtgtgtgtgaatatacatacagacaccaaataagattcagaggaagagtctggaattgacatgagaagagtagcttcttattcactggcattaatactgtcttccttctgcacatctgtgaaagcctcagagcagagatgactgaattaggctacgtctaagtctaaacacttaacagatattaattaaatagacctccttcccatygcagtgagatctatccttttgtctgcaagaaggctggatgcccagacracttgacagagttcagaaagcagagtggtgatacattctcccaactccccatcccatgcaaacctgttcttccttccagacgggctgagtatgtttaccaagtctctacctttgttttttctcaccttccatccccccagggagccctcaagcacgtatttatttgcactttgaacctgtgcttgcttgcatagagatgcttctgctcaggctgggacctgactgctttaagggagacagagacaaggttgt

SEQ ID NO: 89538 - DNA, 600 bp, Chicken  19866894396104_3
cgatgccacttgcctgctatttggagattggayacttatgcacaagtgtgtgtgaatatacatacagacaccaaataagattcagaggaagagtctggaattgacatgagaagagtagcttcttattcactggcattaatactgtcttccttctgcacatctgtgaaagcctcagagcagagatgactgaattaggctacgtctaagtctaaacacttaacagatattaattaaatagacctccttcccatygcagtgagatctatccttttgtctgcaagaaggctggatgcccagacracttgacagagttcagaaagcagagtggtgatacattctcccaactccccatcccatgcaaacctgttcttccttccagacgggctgagtatgtttaccaagtctctacctttgttttttctcaccttccatccccccagggagccctcaagcacgtatttatttgcactttgaacctgtgcttgcttgcatagagatgcttctgctcaggctgggacctgactgctttaagggagacagagacaaggttgtctgagtgccagtaaagctccagcgcctctgcctgccattccaccccag

SEQ ID NO: 89539 - DNA, 600 bp, Chicken  19866894396112_1
aaatggtaagtgtccctgagttctgcttgcataagaaaaggaagatcttgctttctgatatgcttttggaaggtcaaagagcaaaatgacatgagagccagtccctctggagaaagtaatgactgttggtttcatggccccatgctgtaaccacgcctgtgctcttagcagatccacaacaaggattggcctgcttctttatcacacctttcttaggtgacctcaaactttaagatgagaaggactcacagacaggagatggataagaagatatattttttgaacagaagatatattttytgaacagaaaaagcaggagcaacactgagaagaggtgaaattcagagaggtattcatattttttataccttggtttcaaatagatcctcaaatgcttgtggccctgtagaactgcagcccttggcaccagctggcagaagtgcagtataacccttgatgctattctattgaaatgcacaaaatgatgttccttgatcacatgagaaactggtgctaaaagattctcatcaccagctctcttagtttacctgcataatcagtactgggtcccaaggactttggtttctgctttaccttgga

SEQ ID NO: 89540 - DNA, 599 bp, Chicken  19866894396121_1
  misc_feature (1)..(99): n is any nucleotide
nnnnnnnnnnnnnnnnnnnnnnnnnnnnnnnnnnnnnnnnnnnnnnnnnnnnnnnnnnnnnnnnnnnnnnnnnnnnnnnnnnnnnnnnnnnnnnnnnnncactttccacatttctggggggaatcaagctttatgtaaagaagggtctcgaaactcttctgcattcagaatgacttgagcacaaaacatcaaagttacttcatgcatcagatgcaacactgcttgcctacgcaggcaagacagtgctgctaccaatgcattctagtacttacagcacaggaggacagaggaatacacaaracattatggagtaagtttaatatttctagctcataaaactgtcaatagaaagcattcagtacagaaacggrcagtagaactcatgcgataacttgcttaagccaccatacctggagtcatactgacattcaggacaatttaattcaaataaactttaaaggtaagttaagactgcaagagtttgggtggatggctgaattcagaagtctcacttggatttaaaaacctttgaaagcaactcagaaagtcacctacagccttattacccatgcagacaagccagtagaacgggatgccgc

SEQ ID NO: 89541 - DNA, 599 bp, Chicken  19866894396121_2
  misc_feature (1)..(28): n is any nucleotide
nnnnnnnnnnnnnnnnnnnnnnnnnnnncactttccacatttctggggggaatcaagctttatgtaaagaagggtctcgaaactcttctgcattcagaatgacttgagcacaaaacatcaaagttacttcatgcatcagatgcaacactgcttgcctacgcaggcaagacagtgctgctaccaatgcattctagtacttacagcacaggaggacagaggaatacacaaracattatggagtaagtttaatatttctagctcataaaactgtcaatagaaagcattcagtacagaaacggrcagtagaactcatgcgataacttgcttaagccaccatacctggagtcatactgacattcaggacaatttaattcaaataaactttaaaggtaagttaagactgcaagagtttgggtggatggctgaattcagaagtctcacttggatttaaaaacctttgaaagcaactcagaaagtcacctacagccttattacccatgcagacaagccagtagaacgggatgccgcagctcagtgcttcaccaggaaggcacttcctactgctacctgcacacrgtgccaagcattcgcactaagta

SEQ ID NO: 89542 - DNA, 398 bp, Chicken  19866894396121_3
gaaagcattcagtacagaaacggrcagtagaactcatgcgataacttgcttaagccaccatacctggagtcatactgacattcaggacaatttaattcaaataaactttaaaggtaagttaagactgcaagagtttgggtggatggctgaattcagaagtctcacttggatttaaaaacctttgaaagcaactcagaaagtcacctacagccttattacccatgcagacaagccagtagaacgggatgccgcagctcagtgcttcaccaggaaggcacttcctactgctacctgcacacrgtgccaagcattcgcactaagtacaggatgttcccactagcaaggcggaccctttccagagctactcatcagaagagaccaaaccaggaggccttgtg

SEQ ID NO: 89543 - DNA, 415 bp, Chicken  19866894396143_1
gagctggacctcgaggttccccgtgggtctcttccaactcaggatattctgtgatcctgcagttctataaacccccatgacagcccggccagactgtcacctcccacaggtactgcagcccacaagactcctgcctccctccttaccatccttcttcccgctcttcccacatttctgaggaggttttatgtgtttcggcatcacctggaagggttgggtgtagttgcagcccctcatctcccacgtgaagacggagctgaaggcaggagggaagccaggtcctcaaggagggtacatcasagacttctactggaagtgccaactacagaactatgtaacacttattaatgttctattaataggtaataaaattacctaatctactaatgtgttctctgatgataactcgctggtt

SEQ ID NO: 89544 - DNA, 599 bp, Chicken  19866894396144_1
  misc_feature (1)..(48): n is any nucleotide
nnnnnnnnnnnnnnnnnnnnnnnnnnnnnnnnnnnnnnnnnnnnnnnnccttgaatacagcaatgcacccacctttttcaaacaaatctgtgtgcgaggaagcaaacggcaaggcttgaaacaggaaactgaaagaggtcactccacttttattgagcttttcctccttgtcaaaccaccaggctgtgtgttgtaattcttatgggtcaccaggagcctaccacaaagccccctctgtctgggtacccttctgtgaaactccaccagccagcagagcagaaacactgaggtggagctacmgtccaaaagctccccggcacaatagctgctgctgtcacagtaggacaataaagtggattttatgctggtatatttttctcatcatatgcatgacagaaagtttaatgggccttgctagtttcttggtggcttttaaggccctataaaatagcctgctatcagttcgatctgtgttctcaagatgtctgcctgaacatcagagagctccagcaggagctatgttttcattcccaaacctgcacaggagagataagctaattagctgagaaattagaaagggaaactattagcatcacaga

SEQ ID NO: 89545 - DNA, 600 bp, Chicken  19866894396153_1
gggctataagaaagaaggggacagactcttttgcagggtctgttgtgataggataagaggaaatggtttcaaattaaaaggggggagacttagattggatatccgggaagtttttcacaataagggtagtgaagcactggaacaggttgcctagagaggtggtggatgccccatccctggacacattcaagaccaggctggaccaggctctgagcacctcatctagctgtaggtgttgctgttccctgcaagggagttagattagatgacctttaaaggtcccttccaactgaaatgatyctatgattcagttattctggttccactttttggctaatgcagacactctccagcttgggattcttgtccgtgctgctctccaacaagaaccatatcactgagaggcatggaccacagccctcctcacttgccagcccacaacaggacaacccagacagccagctcatgccaccacttctggcaggcaaatgcccagagtgagaggcaccaactgctgcaggcaccaatggatgttcccaagagcttctcatacaagcccatgcaaaaagcacttgctccctgaagatgaagtccagcagc

SEQ ID NO: 89546 - DNA, 576 bp, Chicken  19866894396170_1
agatgctcactagagattgcaactcctccatttattgattctttctcttccttcttcatcttacgagcttttaaatgatgataaaacaggggaagagcatgcgtgcagcatgcggtgtgtggctttctgccccagcctatgcctggatggatggcatgtgcgtgtgaccttggccacaaaggactgcaggatgccgtgtggaatggtgcggggaagcagacatctgcagcaagggaggaggtgaaaatgtctttcctgttatcctgggggctgctggcatgttatgctgctgccacagcrtcacacaccaactctgccctcagcagctgaggggattcatacctaagctgatgcagctggggtgtgctcctgtcctcaggtggagggcgcaaaataccagttgggtgccttgcaattctgccagctcataagtgcatttttggtttctgtttttaatcaagagcaatgttaaatgttatgctctcattaaagctttggcttctggagtcagcatgggatgttgttagaatcccctttttgttttctgagcagagaaaagaagtctagaagcacaga

SEQ ID NO: 89547 - DNA, 600 bp, Chicken  19866894396172_1
tggcggcgggccgcgctcggacgctatgttcgcgcgggttttgctctcccacaccgccctctgcagccgctttccctaagcgaggaagggctgaagtcgaggaaaaatgacataaaacgaatgaatgaaagtgtccagaggggcttctcgctcagtcagtcgggagcgagagatatgagcagacccatgtcaatccctggggctccaacgcctcacaggatgctttagcacagggtctcctgcacacatctgacaggaatctctccttttctccccaaacaatgccaaattcaagctgcrgtgagtcatactaaagctttaaatgagtttccgtgtgcctgccagcagcatgatgcatttgtgacccacgctggtgggctaccaggacgggtgtggggtgccaggccccaaggcacacacatttgtatgcacctgcctgcgctgactgtcttctgctaaataaatccttcagagaaatagattagtacattgttgtagcagtcagtgatgtatttactgctgcaaagctccagatgctctatatgccgcaataatacagttaagtggaaaatgagtcatttaaaaccataatgactatca

SEQ ID NO: 89548 - DNA, 599 bp, Chicken  19866894396185_1
  misc_feature (1)..(189): n is any nucleotide
nnnnnnnnnnnnnnnnnnnnnnnnnnnnnnnnnnnnnnnnnnnnnnnnnnnnnnnnnnnnnnnnnnnnnnnnnnnnnnnnnnnnnnnnnnnnnnnnnnnnnnnnnnnnnnnnnnnnnnnnnnnnnnnnnnnnnnnnnnnnnnnnnnnnnnnnnnnnnnnnnnnnnnnnnnnnnnnnnnnnnnnnnnnnnaattgctgtgacactgggcagccttgcccttacagcttccatgaaaattgtcactctgtttaaaatgtgcaatcttttatgagtctttataaatataataatgtagaaagraaattcaatacaaataagattaagtattcatggccctcagaacaaagtttgagcayrttctgtttttctttgaacaggaaagttaatttttttttcttctacacagataatttccacattcactaacaaagagctaactgcgtatgcaaaagcaggagctgtggctgaggaagttctggcagcagttcgaactgtggtagcatttggaggacagagaaaagaaactgaaaggtgagaaaaagttccctttatttgactgccttatattggtatctacagaggttttgtctttgctgctg

SEQ ID NO: 89549 - DNA, 599 bp, Chicken  19866894396185_2
  misc_feature (1)..(133): n is any nucleotide
nnnnnnnnnnnnnnnnnnnnnnnnnnnnnnnnnnnnnnnnnnnnnnnnnnnnnnnnnnnnnnnnnnnnnnnnnnnnnnnnnnnnnnnnnnnnnnnnnnnnnnnnnnnnnnnnnnnnnnnnnnnnnnnnnnnnnaattgctgtgacactgggcagccttgcccttacagcttccatgaaaattgtcactctgtttaaaatgtgcaatcttttatgagtctttataaatataataatgtagaaagraaattcaatacaaataagattaagtattcatggccctcagaacaaagtttgagcayrttctgtttttctttgaacaggaaagttaatttttttttcttctacacagataatttccacattcactaacaaagagctaactgcgtatgcaaaagcaggagctgtggctgaggaagttctggcagcagttcgaactgtggtagcatttggaggacagagaaaagaaactgaaaggtgagaaaaagttccctttatttgactgccttatattggtatctacagaggttttgtctttgctgctgaaattttaattttctcttctttttcatcatttttaaagaacctcrtaaggtaatgc

SEQ ID NO: 89550 - DNA, 599 bp, Chicken  19866894396185_3
  misc_feature (1)..(132): n is any nucleotide
nnnnnnnnnnnnnnnnnnnnnnnnnnnnnnnnnnnnnnnnnnnnnnnnnnnnnnnnnnnnnnnnnnnnnnnnnnnnnnnnnnnnnnnnnnnnnnnnnnnnnnnnnnnnnnnnnnnnnnnnnnnnnnnnnnnnaattgctgtgacactgggcagccttgcccttacagcttccatgaaaattgtcactctgtttaaaatgtgcaatcttttatgagtctttataaatataataatgtagaaagraaattcaatacaaataagattaagtattcatggccctcagaacaaagtttgagcayrttctgtttttctttgaacaggaaagttaatttttttttcttctacacagataatttccacattcactaacaaagagctaactgcgtatgcaaaagcaggagctgtggctgaggaagttctggcagcagttcgaactgtggtagcatttggaggacagagaaaagaaactgaaaggtgagaaaaagttccctttatttgactgccttatattggtatctacagaggttttgtctttgctgctgaaattttaattttctcttctttttcatcatttttaaagaacctcrtaaggtaatgca

SEQ ID NO: 89551 - DNA, 562 bp, Chicken  19866894396185_4
aagtttgagcayrttctgtttttctttgaacaggaaagttaatttttttttcttctacacagataatttccacattcactaacaaagagctaactgcgtatgcaaaagcaggagctgtggctgaggaagttctggcagcagttcgaactgtggtagcatttggaggacagagaaaagaaactgaaaggtgagaaaaagttccctttatttgactgccttatattggtatctacagaggttttgtctttgctgctgaaattttaattttctcttctttttcatcatttttaaagaacctcrtaaggtaatgcagagatgaactccctttccctaaaaatatatgctatttcaggcttcatatacttatagtgagagttgtaagcaaaaaacaacagacgtgaaaaaagcaagtataatgcaaaggtcacaggccaagggcacaaatcaaagcatgtaagtgtatttatttatattgtaccatggaacatcatgcttgccttcttttttgatcttttatctaaagataaccatcgtgaccaccaaagttgggcagaagtttttt

SEQ ID NO: 89552 - DNA, 558 bp, Chicken  19866894396188_1
ctctgggaggctttgaactgctgtttctttcttttgcagatttaacagcatcccatgtgttttaggctttctcttgagttgtttttcttttgtctgttgtgctgtcagaactactgattcaacttgtgttatttcaggttttaataatgatacagaatccagcctttggtgtttttgttgttgttgttgctgttgttgttgttgtttgtttgtttttagtcttccctgcttgcatataaagctggaaccttcttatgtttcatctacatggctgtctggattcaggagtaaatttacatyttggatcagaaataaatttacacaaccagattttttagccattgccatcttatttgtttacattttcttaccactgcaagcagtttagctctgataaatcatcaacagtatatttaattggatgtttttatgcgtcttaatatgattttacaacaaactacttctactatttactgctatgtaatcaggtaatctgattctaagattttaatcaagtaatatttcagctatttccatgccaagtttcagagtgctgat

SEQ ID NO: 89553 - DNA, 599 bp, Chicken  19866894396190_1
  misc_feature (1)..(96): n is any nucleotide
nnnnnnnnnnnnnnnnnnnnnnnnnnnnnnnnnnnnnnnnnnnnnnnnnnnnnnnnnnnnnnnnnnnnnnnnnnnnnnnnnnnnnnnnnnnnnnnnttctttttctctttatacctttccttttctttcttagagcttgtctgtttctccttgttctctttgttctctttcttcttctgtttctttttcactgggctcttgtccaagccatcatcctagaaaatcagtcacagcgcagtcaaagctggagtccttcacctcacatacacattcttccataaaacatgcatctttgaaaarcaagcatttgttgagatccatccaaatttgccctcacacctctttaacccgacagcaagaccggtactgcaatccacccaaacaaccttgaacaacagggcataaaaattatacgagcccctggcagacttcagataagctccactttcctatgccagttgtgctggagaacgctcagtccgtaaggcagatactgatcagaacatgaacaaaaagccttagactacaagccaaaccactcaatgacagaaggttttctaagcaacactatgaccttggtaagctccagcttccccact

SEQ ID NO: 89554 - DNA, 599 bp, Chicken  19866894396206_1
  misc_feature (1)..(95): n is any nucleotide
nnnnnnnnnnnnnnnnnnnnnnnnnnnnnnnnnnnnnnnnnnnnnnnnnnnnnnnnnnnnnnnnnnnnnnnnnnnnnnnnnnnnnnnnnnnnnnnaatatttttaaagcattttctctaccctcatctattcttcgagtttttgaactcacatgatctgttcacaaaaggaaagaagagtggactgcagctttctggaaatgttgctaaacattatttagggcacattacagtatagtgactggaccattttcagctacatccccatgaacaggttgactacccacaaagtgatgcaacrcaaaacttgggtttctgtgacaggcatgcactgaataggaatgtcctattctccgagtcaccaaagcatacctgagctttgaattatgccaggccaggaacaaagaaatattgctcataacaaaaacttttaataactcattttctgagaaacccttcctttcatctctgccaarcttcagaaaaggctgggaggcaagcagaaataaacattatacagactcaccactgctggctctaaagtaaactctccaacttcctatttacattttaagatctgaagctttgtggtttactagt

SEQ ID NO: 89555 - DNA, 600 bp, Chicken  19866894396206_2
agagtggactgcagctttctggaaatgttgctaaacattatttagggcacattacagtatagtgactggaccattttcagctacatccccatgaacaggttgactacccacaaagtgatgcaacrcaaaacttgggtttctgtgacaggcatgcactgaataggaatgtcctattctccgagtcaccaaagcatacctgagctttgaattatgccaggccaggaacaaagaaatattgctcataacaaaaacttttaataactcattttctgagaaacccttcctttcatctctgccaarcttcagaaaaggctgggaggcaagcagaaataaacattatacagactcaccactgctggctctaaagtaaactctccaacttcctatttacattttaagatctgaagctttgtggtttactagttctgcaagtaagtgctttgggttttggaggctgcctgcacatgatgtcccaccactactgaattcttcctagcttttattaatataataaggaggtcagaaaagcaacaatcttttatatgccctgctagcagaaatattttacttctcgccttttataaacaaaacaaagaaaac

SEQ ID NO: 89556 - DNA, 600 bp, Chicken  19866894396211_1
catcttaatgcaaccacttggccactgccatcttgtaatgcctattattacatgtagcttgggtttatgcctcgatcttaacacacagagatgggaacgtatgtaggtggatcccaccctgccagtctagttcattttacttagtggattgtgtgaaaatactgaatgcagggtttgggattatccaatcttaaattgtcttcaaatttatccagggtccatgaccctaggattatgtatagcatacctagaattgctgtctacttaaaagtgcattcattgaaaagctccagcaaactstctatgaagtgtcaatacctacattttttggtgctctagcctgtctcagtttatgtatgtgaagggcaatagacaagcacaaaaaatcatcctattttgttttcaaagtaattggctcctagttcttgtacttcctagcaagaaaatgagagacttctctgaaaagggagagtgggaggaaggaaatgtccttgtttgcatcctctgttgctttttacattttagtattttctcctcattcctcttgctattctcacatttactgcctacctttacacttgttcacttgccagagaaaga

SEQ ID NO: 89557 - DNA, 599 bp, Chicken  19866894396213_1
  misc_feature (1)..(150): n is any nucleotide
nnnnnnnnnnnnnnnnnnnnnnnnnnnnnnnnnnnnnnnnnnnnnnnnnnnnnnnnnnnnnnnnnnnnnnnnnnnnnnnnnnnnnnnnnnnnnnnnnnnnnnnnnnnnnnnnnnnnnnnnnnnnnnnnnnnnnnnnnnnnnnnnnnnnnnaccttcctcagtccttctgatctttgtaaaatttctaacctataatccttcaggctgtcagtaactctcttagtcaaaatattattgaaatatttcacatcatccttagttattttagtttcatcattaaaataacagtgcaatttatgwgatcatgtaaatggagaatgtaaaatgagtcagaaagagaataagatttatagagcattcaytactgacgtaatgatgaggtccaagtgataaaacagttcagtaaacttyaagttttattcagaattatatcgtgcctgttgtttatgaccaagatgatcaktgtatctctgggtayagaaaagggttaatgctatgaaaggatgtaatgtagacctaggaacaatcaaagctggatttgaagactttgaaaatacaagttatcatcagacttgatccacattaggcactgagtctaa

SEQ ID NO: 89558 - DNA, 599 bp, Chicken  19866894396213_2
  misc_feature (1)..(88): n is any nucleotide
nnnnnnnnnnnnnnnnnnnnnnnnnnnnnnnnnnnnnnnnnnnnnnnnnnnnnnnnnnnnnnnnnnnnnnnnnnnnnnnnnnnnnnnnaccttcctcagtccttctgatctttgtaaaatttctaacctataatccttcaggctgtcagtaactctcttagtcaaaatattattgaaatatttcacatcatccttagttattttagtttcatcattaaaataacagtgcaatttatgwgatcatgtaaatggagaatgtaaaatgagtcagaaagagaataagatttatagagcattcaytactgacgtaatgatgaggtccaagtgataaaacagttcagtaaacttyaagttttattcagaattatatcgtgcctgttgtttatgaccaagatgatcaktgtatctctgggtayagaaaagggttaatgctatgaaaggatgtaatgtagacctaggaacaatcaaagctggatttgaagactttgaaaatacaagttatcatcagacttgatccacattaggcactgagtctaagctacccaactatctagaaaatctaaagacagaccatgacctacagagacagtctgtggtaa

SEQ ID NO: 89559 - DNA, 599 bp, Chicken  19866894396213_3
  misc_feature (1)..(39): n is any nucleotide
nnnnnnnnnnnnnnnnnnnnnnnnnnnnnnnnnnnnnnnaccttcctcagtccttctgatctttgtaaaatttctaacctataatccttcaggctgtcagtaactctcttagtcaaaatattattgaaatatttcacatcatccttagttattttagtttcatcattaaaataacagtgcaatttatgwgatcatgtaaatggagaatgtaaaatgagtcagaaagagaataagatttatagagcattcaytactgacgtaatgatgaggtccaagtgataaaacagttcagtaaacttyaagttttattcagaattatatcgtgcctgttgtttatgaccaagatgatcaktgtatctctgggtayagaaaagggttaatgctatgaaaggatgtaatgtagacctaggaacaatcaaagctggatttgaagactttgaaaatacaagttatcatcagacttgatccacattaggcactgagtctaagctacccaactatctagaaaatctaaagacagaccatgacctacagagacagtctgtggtaacggtatgatcctaaataatagtccagacagctaacttcagtcagctaag

SEQ ID NO: 89560 - DNA, 600 bp, Chicken  19866894396213_4
cttctgatctttgtaaaatttctaacctataatccttcaggctgtcagtaactctcttagtcaaaatattattgaaatatttcacatcatccttagttattttagtttcatcattaaaataacagtgcaatttatgwgatcatgtaaatggagaatgtaaaatgagtcagaaagagaataagatttatagagcattcaytactgacgtaatgatgaggtccaagtgataaaacagttcagtaaacttyaagttttattcagaattatatcgtgcctgttgtttatgaccaagatgatcaktgtatctctgggtayagaaaagggttaatgctatgaaaggatgtaatgtagacctaggaacaatcaaagctggatttgaagactttgaaaatacaagttatcatcagacttgatccacattaggcactgagtctaagctacccaactatctagaaaatctaaagacagaccatgacctacagagacagtctgtggtaacggtatgatcctaaataatagtccagacagctaacttcagtcagctaagattaggtaagattaatctctcaccttatgccaaaggaaaataattttgtataa

SEQ ID NO: 89561 - DNA, 600 bp, Chicken  19866894396213_5
aaatttctaacctataatccttcaggctgtcagtaactctcttagtcaaaatattattgaaatatttcacatcatccttagttattttagtttcatcattaaaataacagtgcaatttatgwgatcatgtaaatggagaatgtaaaatgagtcagaaagagaataagatttatagagcattcaytactgacgtaatgatgaggtccaagtgataaaacagttcagtaaacttyaagttttattcagaattatatcgtgcctgttgtttatgaccaagatgatcaktgtatctctgggtayagaaaagggttaatgctatgaaaggatgtaatgtagacctaggaacaatcaaagctggatttgaagactttgaaaatacaagttatcatcagacttgatccacattaggcactgagtctaagctacccaactatctagaaaatctaaagacagaccatgacctacagagacagtctgtggtaacggtatgatcctaaataatagtccagacagctaacttcagtcagctaagattaggtaagattaatctctcaccttatgccaaaggaaaataattttgtataataaatgttatatcta

SEQ ID NO: 89562 - DNA, 600 bp, Chicken  19866894396217_1
tcatttcagtcttagcatttgttcttactctattagctaagtaaactgctgaaatcaggaatgtgaggttatagtttggtcttcatgttcaactcagtttaaataaggaaataaaacataaaatacaataatctgagggatgagatggttgacttggagaagttcatagaatcatgaatatttttagttcgaagggaccctaaaaggtcacctagttcaatgcccctgcaatgagcagggacatctacagctcgatcaggttattcggagccctgtccagcctgaccttgagtgtctccrgggatggagcatccaccatctgcctgggcaacctgttcctgtgggcaggatcacctcccttgctctgctggccacacttccttttatgcagcccaggatacagctggctgtctgggcaatgaagtcgcattgctggttcatgtccagctgccattccccagtacccctaagtccttttcagtatagctgtcctctatgcttacattcttaatacttgtagtgatagtgggagctgttgcgacccaggtgccagaccgtgcacttggctttgtttacctcatgaagttcacctggccccac

SEQ ID NO: 89563 - DNA, 600 bp, Chicken  19866894396218_1
ggatgacgtcttctgggaagctgtccttagagaccaaggaatggagcaaagctggctactctttaaggatgcctttttgagagtgcaagagctctccatccctcagaataagaaagcaggcagaaaaggcaggaaaccagcatggcttggaaaagacactgctggtcaaactgagggaaaagaagggtatgtacaggtagtggaaatgaggactgtcacctgggaagattacagggatgctgtccagggatgcagaggtgagattaggaaagctaaggcacagatagaactgaacttggygaaggaggttaaaaacagaaataaargttctgaaggtacgttggtcagaagagacagaccaagaagagtatacctcctctgataaatgagaaaggagaactgactacaacagatatgtagaaggctgaggtactcagtgagttctttgcctcagtcttcagtggcagcgaggattctcatgtttatcatatccctgcacctcttggtgggaactgaaggagcaaactcctcccactgcaagggcagagcaagtctgagaggacctcattagactgaatctgtacaggtctatgggtccat

SEQ ID NO: 89564 - DNA, 600 bp, Chicken  19866894396218_2
ttagagaccaaggaatggagcaaagctggctactctttaaggatgcctttttgagagtgcaagagctctccatccctcagaataagaaagcaggcagaaaaggcaggaaaccagcatggcttggaaaagacactgctggtcaaactgagggaaaagaagggtatgtacaggtagtggaaatgaggactgtcacctgggaagattacagggatgctgtccagggatgcagaggtgagattaggaaagctaaggcacagatagaactgaacttggygaaggaggttaaaaacagaaataaargttctgaaggtacgttggtcagaagagacagaccaagaagagtatacctcctctgataaatgagaaaggagaactgactacaacagatatgtagaaggctgaggtactcagtgagttctttgcctcagtcttcagtggcagcgaggattctcatgtttatcatatccctgcacctcttggtgggaactgaaggagcaaactcctcccactgcaagggcagagcaagtctgagaggacctcattagactgaatctgtacaggtctatgggtccatatgacatgcattccaaagtactaagg

SEQ ID NO: 89565 - DNA, 599 bp, Chicken  19866894396233_1
  misc_feature (1)..(160): n is any nucleotide
nnnnnnnnnnnnnnnnnnnnnnnnnnnnnnnnnnnnnnnnnnnnnnnnnnnnnnnnnnnnnnnnnnnnnnnnnnnnnnnnnnnnnnnnnnnnnnnnnnnnnnnnnnnnnnnnnnnnnnnnnnnnnnnnnnnnnnnnnnnnnnnnnnnnnnnnnnnnnnnnattccctgcaggctgcagactgtagaggtgtctgtttaatggcagcagatatcttccttcagctgccttttctgttgcagatgtgctggacctgaggctggtgctgactcagagcttgcaggcttgctgtgtgcaggcayggcagcaccracagctcgctccttccaaacacagggctcatagggcatcacgaggtacctcggctggagcatttggtagctgtaatttggtggcactgatgcgaggtggaactgatgtgctcctcggagcggtacccccatggtgggatgcagcaccgtgctctgaagtcacagagctccggctttcctcagcagagatccacgtgggagatggatcagaagcagcaggcctggggctccccacccaggaagagacttcctcagagcaggtgcagaagatgcagcaaaatcacccaact

SEQ ID NO: 89566 - DNA, 599 bp, Chicken  19866894396233_2
  misc_feature (1)..(150): n is any nucleotide
nnnnnnnnnnnnnnnnnnnnnnnnnnnnnnnnnnnnnnnnnnnnnnnnnnnnnnnnnnnnnnnnnnnnnnnnnnnnnnnnnnnnnnnnnnnnnnnnnnnnnnnnnnnnnnnnnnnnnnnnnnnnnnnnnnnnnnnnnnnnnnnnnnnnnnattccctgcaggctgcagactgtagaggtgtctgtttaatggcagcagatatcttccttcagctgccttttctgttgcagatgtgctggacctgaggctggtgctgactcagagcttgcaggcttgctgtgtgcaggcayggcagcaccracagctcgctccttccaaacacagggctcatagggcatcacgaggtacctcggctggagcatttggtagctgtaatttggtggcactgatgcgaggtggaactgatgtgctcctcggagcggtacccccatggtgggatgcagcaccgtgctctgaagtcacagagctccggctttcctcagcagagatccacgtgggagatggatcagaagcagcaggcctggggctccccacccaggaagagacttcctcagagcaggtgcagaagatgcagcaaaatcacccaacttccccaaaac

SEQ ID NO: 89567 - DNA, 600 bp, Chicken  19866894396251_1
gtgctctccctgtgtacggaaagcacataggaaaccattttctctccttgttactcccactcaaaggtaaatgctgcgcagggcagaagcgatccatcaggctgaggacctgtatttatgtttcaatcaagtggaaatgagtaagtacctgggcagcaggagcggtgctttgcatctggctgctgaaaggtctgggaccctgggggctctgctgtcctgatggatggggctgcgtgttgggatgctgccccgggtcagcccctctcagcccgggttggggggtggacacctcctgcagcygcagccgggctctgccctgggtgggtgcaaaggcagagccagggcgctctgtgctcccactcctcgtggttctgcaaacacatccttggttacgctgagggttcagcgacttctgtcttatcgtctgccctgttgcatgcagctctattcccatgaagaaatccaataaagtacattagagacaccgtgctgtaacagactgatgtctgattgcctctctgggtacccaaaccttttaacaccagtcagaaaagtcggggatgggcaaagcgtagcacagcaacaacagattgaaacgcc

SEQ ID NO: 89568 - DNA, 600 bp, Chicken  19866894396265_1
cctaatcactatttgaaattaggatccctctttgcctgttttccttctggcctacttacggttacattcagtagagagagtggaatgcagccatctccagagataatacccatagctgtggtgtacagtctgtgtacaatctgtacaaggtgtggtttcaatcatgaagtggaatcattaaggttggaaaagccctctaagatcacctagtccaaccgccaacccatcacaccatgcccactgaccacatccctcagtgccacatccacactccaccacctccctgggcatcctgtgccrctgcatcactgctcttttggagaataattttttcctattattcactgtagtacttctgagcactgacacatatgcatctgagcagtcacactagggaagatctgaaaatccagccctcccgttttctaccaggaaaacgtttgaactgctgtgctgctctgcaaaaggtggcagctgtgttatctttgaatgagagatggatacagcctgtcactgcttggcaaaattgtacctgttcttctgtggaagggatttctcattcctctgaactgcagcagagatgacttctgaggctacttc

SEQ ID NO: 89569 - DNA, 600 bp, Chicken  19866894396267_1
ttaacacagtccttcagtcagcccattcctttggaaggttgttctggtcctggtccccagggatgaggtgggtgatgcctcccactttctagcattccctcctgttgctctggacttgctgaatttcctgtttctccagctcctgtacaagaacatctcaaattcaagaagcttcttttactgtggttcccaacttactttgtagctgtgacagtcttgggccctcttattaaaggaaaactttttagttttgtgcatattcgtatggaattctcattattttttacatcctatagcttytgctagctctgcctattcagctgtcatggctggtaggataatttgacartgtaacttccctataacacccataaggaaataaaggctcaaacagtgttatgagcctattgcagtatagcacagtctccaatctcttatacaatccttaaaaaaaggtcatttggttatttgataagaccagacttcttgsattcctaccttttaatggttttaaaaaggtaagtctgtaccaaaaaaaaaatcatttttacagtaacacaaaactttatttacaagaaggtcctggtttcccttaaaagt

SEQ ID NO: 89570 - DNA, 600 bp, Chicken  19866894396267_2
ctggtccccagggatgaggtgggtgatgcctcccactttctagcattccctcctgttgctctggacttgctgaatttcctgtttctccagctcctgtacaagaacatctcaaattcaagaagcttcttttactgtggttcccaacttactttgtagctgtgacagtcttgggccctcttattaaaggaaaactttttagttttgtgcatattcgtatggaattctcattattttttacatcctatagcttytgctagctctgcctattcagctgtcatggctggtaggataatttgacartgtaacttccctataacacccataaggaaataaaggctcaaacagtgttatgagcctattgcagtatagcacagtctccaatctcttatacaatccttaaaaaaaggtcatttggttatttgataagaccagacttcttgsattcctaccttttaatggttttaaaaaggtaagtctgtaccaaaaaaaaaatcatttttacagtaacacaaaactttatttacaagaaggtcctggtttcccttaaaagtacgtagttgatctagttctattacttatttgataaacctgtttttgcaa

SEQ ID NO: 89571 - DNA, 600 bp, Chicken  19866894396267_3
caacttactttgtagctgtgacagtcttgggccctcttattaaaggaaaactttttagttttgtgcatattcgtatggaattctcattattttttacatcctatagcttytgctagctctgcctattcagctgtcatggctggtaggataatttgacartgtaacttccctataacacccataaggaaataaaggctcaaacagtgttatgagcctattgcagtatagcacagtctccaatctcttatacaatccttaaaaaaaggtcatttggttatttgataagaccagacttcttgsattcctaccttttaatggttttaaaaaggtaagtctgtaccaaaaaaaaaatcatttttacagtaacacaaaactttatttacaagaaggtcctggtttcccttaaaagtacgtagttgatctagttctattacttatttgataaacctgtttttgcaacaagaaaaatattaatattgataaattgttcatagcttacatttcttttaatacccatccatgagtgctggacaggaaaacattattgataccactttctattacagaattgtgttgattttgccatatttcagtctgaac

SEQ ID NO: 89572 - DNA, 600 bp, Chicken  19866894396267_4
tcttgttttcacgttctgggaattaaacactatttttttcttgttctgaaagcattgccttcctttgaattgtttaatttagcattccatttcatattgtgataacattgctgtgaaataaaatcaaaacagcctcatcgttgaaatgtattttgatcaacctgaaatgaatcttcaaaaagttttctaggagaattttgaagcacaagtgtttcgtacttaactgcagtgaaaactgacatcaagaccttgaaaatttacattaaacagaatttctattctctgcgcagcttcattctygatgcaaaatgctcaacaattcagcacaacccaccacatckagttcttgcgtggtttcgcaatcgagacttgaagaactagaaaataacaggaaggtttttctgcctgcctaagcagatgtagttttctgccccaggattggtataggttatgcagccacacrcaccaccctgtgagggtggttttctgcagagccaagatgtttctttttccaagatgagctgtcaacatgtttatctgtaatagcctcaataacaagcacagaaagaggaatgagtaaaactggtctgatgtcaggaa

SEQ ID NO: 89573 - DNA, 600 bp, Chicken  19866894396267_5
tgttctgaaagcattgccttcctttgaattgtttaatttagcattccatttcatattgtgataacattgctgtgaaataaaatcaaaacagcctcatcgttgaaatgtattttgatcaacctgaaatgaatcttcaaaaagttttctaggagaattttgaagcacaagtgtttcgtacttaactgcagtgaaaactgacatcaagaccttgaaaatttacattaaacagaatttctattctctgcgcagcttcattctygatgcaaaatgctcaacaattcagcacaacccaccacatckagttcttgcgtggtttcgcaatcgagacttgaagaactagaaaataacaggaaggtttttctgcctgcctaagcagatgtagttttctgccccaggattggtataggttatgcagccacacrcaccaccctgtgagggtggttttctgcagagccaagatgtttctttttccaagatgagctgtcaacatgtttatctgtaatagcctcaataacaagcacagaaagaggaatgagtaaaactggtctgatgtcaggaatacgtgttgtacagcctaattccaggctacgattcaaactc

SEQ ID NO: 89574 - DNA, 600 bp, Chicken  19866894396267_6
gaaatgaatcttcaaaaagttttctaggagaattttgaagcacaagtgtttcgtacttaactgcagtgaaaactgacatcaagaccttgaaaatttacattaaacagaatttctattctctgcgcagcttcattctygatgcaaaatgctcaacaattcagcacaacccaccacatckagttcttgcgtggtttcgcaatcgagacttgaagaactagaaaataacaggaaggtttttctgcctgcctaagcagatgtagttttctgccccaggattggtataggttatgcagccacacrcaccaccctgtgagggtggttttctgcagagccaagatgtttctttttccaagatgagctgtcaacatgtttatctgtaatagcctcaataacaagcacagaaagaggaatgagtaaaactggtctgatgtcaggaatacgtgttgtacagcctaattccaggctacgattcaaactctcttttcttttacaggaaggttgcctttggcttcatttccacctatagctcatcaattgatgtatcagcttctagaaatcaaatttttttttattcccagcccccaagtgtttccatggagg

SEQ ID NO: 89575 - DNA, 589 bp, Chicken  19866894396272_1
atcatcctcatggatgtgttggctacgctatatccactgaagtaaagaggagcagtagtttaatttcagaatgaaaatgagaaaagatcactgaaagcccacactggctgaagcagagaaaacgctcagaataaaagctttgctgaaaggataatgtgttgtctaacaactggttcaagacctgtaagaatacctcttgtgctgaacgcagtttcagaaagagataatagatttcatttctgtgtaaccattgttcatgatactcatttggagagttcaaggattggtctcctgagagtycaaacttcacaaccrtctgtggaaaaaatttttcattcctcctccttcytttagctctgcttcccctttctttataggtactgtccaggmttcagtaagagctctatgtacaaaatgccaagaaacacatattttttaaaaaacaaggtagctctttcacatttggtttaaacttagtaattcttcaattgttaatgaatttcagcttggcttgtccattttaaaactccagggcctccatccaggaacttaataccagcaatataattttaatactactaaataatcc

SEQ ID NO: 89576 - DNA, 574 bp, Chicken  19866894396272_2
gtgttggctacgctatatccactgaagtaaagaggagcagtagtttaatttcagaatgaaaatgagaaaagatcactgaaagcccacactggctgaagcagagaaaacgctcagaataaaagctttgctgaaaggataatgtgttgtctaacaactggttcaagacctgtaagaatacctcttgtgctgaacgcagtttcagaaagagataatagatttcatttctgtgtaaccattgttcatgatactcatttggagagttcaaggattggtctcctgagagtycaaacttcacaaccrtctgtggaaaaaatttttcattcctcctccttcytttagctctgcttcccctttctttataggtactgtccaggmttcagtaagagctctatgtacaaaatgccaagaaacacatattttttaaaaaacaaggtagctctttcacatttggtttaaacttagtaattcttcaattgttaatgaatttcagcttggcttgtccattttaaaactccagggcctccatccaggaacttaataccagcaatataattttaatactactaaataatcc

SEQ ID NO: 89577 - DNA, 540 bp, Chicken  19866894396272_3
gagcagtagtttaatttcagaatgaaaatgagaaaagatcactgaaagcccacactggctgaagcagagaaaacgctcagaataaaagctttgctgaaaggataatgtgttgtctaacaactggttcaagacctgtaagaatacctcttgtgctgaacgcagtttcagaaagagataatagatttcatttctgtgtaaccattgttcatgatactcatttggagagttcaaggattggtctcctgagagtycaaacttcacaaccrtctgtggaaaaaatttttcattcctcctccttcytttagctctgcttcccctttctttataggtactgtccaggmttcagtaagagctctatgtacaaaatgccaagaaacacatattttttaaaaaacaaggtagctctttcacatttggtttaaacttagtaattcttcaattgttaatgaatttcagcttggcttgtccattttaaaactccagggcctccatccaggaacttaataccagcaatataattttaatactactaaataatcc

SEQ ID NO: 89578 - DNA, 499 bp, Chicken  19866894396272_4
ctgaaagcccacactggctgaagcagagaaaacgctcagaataaaagctttgctgaaaggataatgtgttgtctaacaactggttcaagacctgtaagaatacctcttgtgctgaacgcagtttcagaaagagataatagatttcatttctgtgtaaccattgttcatgatactcatttggagagttcaaggattggtctcctgagagtycaaacttcacaaccrtctgtggaaaaaatttttcattcctcctccttcytttagctctgcttcccctttctttataggtactgtccaggmttcagtaagagctctatgtacaaaatgccaagaaacacatattttttaaaaaacaaggtagctctttcacatttggtttaaacttagtaattcttcaattgttaatgaatttcagcttggcttgtccattttaaaactccagggcctccatccaggaacttaataccagcaatataattttaatactactaaataatcc

SEQ ID NO: 89579 - DNA, 600 bp, Chicken  19866894396284_1
accttgaaataactgagtagtctgatctaaagccctgcattgctaaaatggattttttagtatttttcatttcagtgactcaaaagaaataacttcaaataaataaatacataaaatccagtaattgtaccttagaataatcaaggtgaatgtaatgatttttttttttctgccatctccagtccttaaagtgaaagctggaattcatgcattccccaatggaaacgtgaaaaagtcctaggctgacagactgagccatagcgtgctctgattgaaatcggaggctaaatgagtggtacrtttgaagaggccccgattctacacattaactagaacaaaccgaagggaacggaaacagctctacctatctggtttgctcctcgattcagttctcgaacccccccccctcccccaaggacatttagtttcatagcgttttgcttgttatcttttcaatgtttattgaatagataaaggagattattttcacactccaaccatcactgcccttgagaaaacagcgtattcacgaggatgctgatccaggcagagacacaaaaagttgaggtccaacctgagcacagccgctgctgtaatcag

SEQ ID NO: 89580 - DNA, 484 bp, Chicken  19866894396284_2
tgagcacagccgctgctgtaatcagagccttgcgcaaactcatgtgctggaggaactttccggatcagcagctcattaaaacccacaagataatcccatttaatggtgcattatatgacaaaagtttacttttgaggacaaacaaaaactgaaaccggtttgcaaacttttctagatgtagcatcactgaagcgatgccgctgaaaccagcgagaaaggaaaacagtgcagagctgcgagttgtttaacagggtttgtggttttgtgttttatcaatccgagaaataaatctgaagtgcwaccaaaacacttacactgccacgtacagctgctattctgtcyctatgcaaaggaggtgcagcatccacgagttggaagttcggcgaccaccttgcaaaacaatataaatagaaaaataaaaagcgatgcagacaaaacgcctcctctgggcacggtgcacttccagcgcttgtcagaaacgctg

SEQ ID NO: 89581 - DNA, 442 bp, Chicken  19866894396284_3
tgtgctggaggaactttccggatcagcagctcattaaaacccacaagataatcccatttaatggtgcattatatgacaaaagtttacttttgaggacaaacaaaaactgaaaccggtttgcaaacttttctagatgtagcatcactgaagcgatgccgctgaaaccagcgagaaaggaaaacagtgcagagctgcgagttgtttaacagggtttgtggttttgtgttttatcaatccgagaaataaatctgaagtgcwaccaaaacacttacactgccacgtacagctgctattctgtcyctatgcaaaggaggtgcagcatccacgagttggaagttcggcgaccaccttgcaaaacaatataaatagaaaaataaaaagcgatgcagacaaaacgcctcctctgggcacggtgcacttccagcgcttgtcagaaacgctg

SEQ ID NO: 89582 - DNA, 600 bp, Chicken  19866894396292_1
tgccagctcattagttggtaatctccacaattaagaataaacaattcttcattttcaagctggaagaagatagatttaagttagatataaggaaaaagtcttttacagtgagagtgctgaggcactggaacaggttgcccagaggtgcctatccctggagactttcaaggcgaggctggacccggccctgggcaacctgacctagctgagcatgtccctgttcattgcaggggagttggactagatggcctttaaaggtctcttccaactccaagcattctgtcattctgtgattttacwctacacagttggttttccctctccttctgggattaagaggcaaggaagggaattccagaatcttctagtaaccagaagtaactatttggcagtcctaaattccaagctttgcacataaggttatacagcttttatctctttattttacttctacgtttgagtaacagtttctaagctcgtccctattggcagacagtgctaaagctattatattatacatctctggctatggactagggtttttcttgtcttagcttgtcttgtccatgtatcaatgataaaagaaaatggagggggggg

SEQ ID NO: 89583 - DNA, 600 bp, Chicken  19866894396329_1
cgtgtgtttaagcagatgttcaacaacatgggggagtggcagcccaatataaatcattatcctgagcaccttattccacatcagtcgtgccctctgtatatgtccctgtgtgcaacatgcaatggtatatgagcctaatatctgctgttggcatgtggaatgagagcatggagtcctgtgtctcactgcatgaaggacagctgagcagagcaatgcatttccccctcccatctgcaagcaggctcctccagaataaatcctaaaaggcaggggagccactagagtctggtccagtccatyggagaacagaatttcttagattgaaaaacctccacagtccttctgaggctgggcagcattctgagttaggggactgaaggtaccaaacatctctgagatgcacagcatgggcctacagagcaggttgttgtgctgttctgatatcagaggataaacctgcagaatcccatgaccaagtactatgttcaccatcatgatactcactgcaaatggaccagcagtcagatccaagggcagcctcccagaattatttgtgtgcttttcctgtttggcctgtaggttgtgtgaatgcaggaccaa

SEQ ID NO: 89584 - DNA, 599 bp, Chicken  19866894396335_1
  misc_feature (1)..(158): n is any nucleotide
nnnnnnnnnnnnnnnnnnnnnnnnnnnnnnnnnnnnnnnnnnnnnnnnnnnnnnnnnnnnnnnnnnnnnnnnnnnnnnnnnnnnnnnnnnnnnnnnnnnnnnnnnnnnnnnnnnnnnnnnnnnnnnnnnnnnnnnnnnnnnnnnnnnnnnnnnnnnnnacagcggaggctcagaggcattcaaccccacaattcccccccttcctcccagagcatccgtgcaagttccatttctcctgggcaaaaacacagcggggtcacccaagctgggctgggacccaactcctaaccaacttcaggktgggtattagggaacatttcctctccaaaagagtgatgatgcagtggcacaggctgccgagggaggtggtggagtcaccatccctggtggtgtccaagaaccatggagatggggcgctgagggatatggtcagtggcaagggtgggccggggttgtgtttggggatcttagaggtcttttccagccttaatgattctgtgattctcacattgctttccccacttacgctcctagtctggctgctctggtttatcactgctgctccacatccccacttccttccagagcatctctttggg

SEQ ID NO: 89585 - DNA, 599 bp, Chicken  19866894396343_1
  misc_feature (1)..(166): n is any nucleotide
nnnnnnnnnnnnnnnnnnnnnnnnnnnnnnnnnnnnnnnnnnnnnnnnnnnnnnnnnnnnnnnnnnnnnnnnnnnnnnnnnnnnnnnnnnnnnnnnnnnnnnnnnnnnnnnnnnnnnnnnnnnnnnnnnnnnnnnnnnnnnnnnnnnnnnnnnnnnnnnnnnnnnnccaatctttggtggtggtgtttttgtgtcaaacaaacatgggcaagatccaaagaagagcatgtaaagaaatagcaggctgaaagtgttgcttagagaagaggttgcctgtatggctgctgaaggacattggarcttattcacttgtgcagtggaacgtgtgcagcacagcctggctgcgccagtgactgaaggcatctcgtatgcaactgtaagaaggtgtgtttgctggtgacaggcwggggatggcccccgcgttcattgactgcctccgtgcattgcacacytgaaaataagtaggaaaaataygttctggaagtactttgcttgtataaccgagtcctgagagagctatttatgatttttctacctgttcttggcacaggcgttttttctgttagaagcggtttgacagttggatgagatcactcctg

SEQ ID NO: 89586 - DNA, 599 bp, Chicken  19866894396343_2
  misc_feature (1)..(60): n is any nucleotide
nnnnnnnnnnnnnnnnnnnnnnnnnnnnnnnnnnnnnnnnnnnnnnnnnnnnnnnnnnnnccaatctttggtggtggtgtttttgtgtcaaacaaacatgggcaagatccaaagaagagcatgtaaagaaatagcaggctgaaagtgttgcttagagaagaggttgcctgtatggctgctgaaggacattggarcttattcacttgtgcagtggaacgtgtgcagcacagcctggctgcgccagtgactgaaggcatctcgtatgcaactgtaagaaggtgtgtttgctggtgacaggcwggggatggcccccgcgttcattgactgcctccgtgcattgcacacytgaaaataagtaggaaaaataygttctggaagtactttgcttgtataaccgagtcctgagagagctatttatgatttttctacctgttcttggcacaggcgttttttctgttagaagcggtttgacagttggatgagatcactcctggattcgtgccctgcgagctaaaaatgcggagtcactgcttgtgaggacaagactgagctggaagaaaatagaaacattgcccttgtgttggctgctaatactgcat

SEQ ID NO: 89587 - DNA, 599 bp, Chicken  19866894396343_3
  misc_feature (1)..(14): n is any nucleotide
nnnnnnnnnnnnnnccaatctttggtggtggtgtttttgtgtcaaacaaacatgggcaagatccaaagaagagcatgtaaagaaatagcaggctgaaagtgttgcttagagaagaggttgcctgtatggctgctgaaggacattggarcttattcacttgtgcagtggaacgtgtgcagcacagcctggctgcgccagtgactgaaggcatctcgtatgcaactgtaagaaggtgtgtttgctggtgacaggcwggggatggcccccgcgttcattgactgcctccgtgcattgcacacytgaaaataagtaggaaaaataygttctggaagtactttgcttgtataaccgagtcctgagagagctatttatgatttttctacctgttcttggcacaggcgttttttctgttagaagcggtttgacagttggatgagatcactcctggattcgtgccctgcgagctaaaaatgcggagtcactgcttgtgaggacaagactgagctggaagaaaatagaaacattgcccttgtgttggctgctaatactgcattgggaaggggagcagcttcgtaaagcttcagcacggcttagtttct

SEQ ID NO: 89588 - DNA, 600 bp, Chicken  19866894396343_4
tggtggtggtgtttttgtgtcaaacaaacatgggcaagatccaaagaagagcatgtaaagaaatagcaggctgaaagtgttgcttagagaagaggttgcctgtatggctgctgaaggacattggarcttattcacttgtgcagtggaacgtgtgcagcacagcctggctgcgccagtgactgaaggcatctcgtatgcaactgtaagaaggtgtgtttgctggtgacaggcwggggatggcccccgcgttcattgactgcctccgtgcattgcacacytgaaaataagtaggaaaaataygttctggaagtactttgcttgtataaccgagtcctgagagagctatttatgatttttctacctgttcttggcacaggcgttttttctgttagaagcggtttgacagttggatgagatcactcctggattcgtgccctgcgagctaaaaatgcggagtcactgcttgtgaggacaagactgagctggaagaaaatagaaacattgcccttgtgttggctgctaatactgcattgggaaggggagcagcttcgtaaagcttcagcacggcttagtttctgtccagtcattccttgcctttag

SEQ ID NO: 89589 - DNA, 600 bp, Chicken  19866894396348_1
tcctgctcttccctggcgcagagaaagtcgtgcttcgcgtttgtggccgccgctctcgtctgactccttctatcctccctcttccctgcggccggcaggtgtggggctcaggtaggcgccaggagccagggcagggcgggaggcgcgggcggacttggcggcggggctgtgtgggctgaggagtcgggcaccgtccggagggcagcgggagccgcgcccccgtggataaccccgcggtcctccggcgtcttcggctgtgcttttcggggcggtatgccgcttcaacataaatctgttccycgctccggagggytctcgctgtgcgtttcgctcccggcgcgctctgtgcgccttagctctgaggtaggtttgattccggatgagccgctgaagcgaacgccgctcccaggtcgcggctccgcgcccgtcccgcagccgccgctctctaccgggagctrccgccgggggtccgcccgtgttggcggctctgcccctgctgtgcctgcgctgctcagcacgaggaggaagggctgtcgctgttggttttttttcttttttctttcctgcccacgtctcaagaaaataggttaattaaatcca

SEQ ID NO: 89590 - DNA, 600 bp, Chicken  19866894396348_2
tggcgcagagaaagtcgtgcttcgcgtttgtggccgccgctctcgtctgactccttctatcctccctcttccctgcggccggcaggtgtggggctcaggtaggcgccaggagccagggcagggcgggaggcgcgggcggacttggcggcggggctgtgtgggctgaggagtcgggcaccgtccggagggcagcgggagccgcgcccccgtggataaccccgcggtcctccggcgtcttcggctgtgcttttcggggcggtatgccgcttcaacataaatctgttccycgctccggagggytctcgctgtgcgtttcgctcccggcgcgctctgtgcgccttagctctgaggtaggtttgattccggatgagccgctgaagcgaacgccgctcccaggtcgcggctccgcgcccgtcccgcagccgccgctctctaccgggagctrccgccgggggtccgcccgtgttggcggctctgcccctgctgtgcctgcgctgctcagcacgaggaggaagggctgtcgctgttggttttttttcttttttctttcctgcccacgtctcaagaaaataggttaattaaatccaggcgcttcaggat

SEQ ID NO: 89591 - DNA, 600 bp, Chicken  19866894396348_3
cggcggggctgtgtgggctgaggagtcgggcaccgtccggagggcagcgggagccgcgcccccgtggataaccccgcggtcctccggcgtcttcggctgtgcttttcggggcggtatgccgcttcaacataaatctgttccycgctccggagggytctcgctgtgcgtttcgctcccggcgcgctctgtgcgccttagctctgaggtaggtttgattccggatgagccgctgaagcgaacgccgctcccaggtcgcggctccgcgcccgtcccgcagccgccgctctctaccgggagctrccgccgggggtccgcccgtgttggcggctctgcccctgctgtgcctgcgctgctcagcacgaggaggaagggctgtcgctgttggttttttttcttttttctttcctgcccacgtctcaagaaaataggttaattaaatccaggcgcttcaggatggtgctgagttgatgaagcgtccatttgagggcgaattaagcaatttgagctttaaatactccgttactggaagccgtttggaattattcctcagcacttgctgatttatttttattaggagatgtggaatggctggagaaaggg

SEQ ID NO: 89592 - DNA, 600 bp, Chicken  19866894396349_1
taacttccagcaactaatacagcattatcagtcccggtaaaagaggcttgccttgaatttatgaatttcaaagactatttccagtggtgaatctctgttaaacactgggtcagccaccagcacgtgcactccatgtcatatgccacagtcgcatggaagttacttgggctaaagtgctggagaatcccatggccagttccctagctgctagctgacacatccagtcacaattaaggtgtgacgaagatatcttgttgtagacagctcactcagacagaaaattttgctctgaatgaccaragacatggaatgtaccttccttcatttcccaggtaagataggatcatttaacagtaaaaaagagcaacagattttaagcaaagatatattttatataaggtaaaggctgaagttctgctaaagataagaacttggaagccattgaggctacaagcccaagtaaatgctgttcagccatgattcaaatagcaatagaattagtagaatattgcttttctgaggagaagaacaaagtaaacatgctatcaacacatcttggggaagacactgatctccaaattgatgttgtattacaggcac

SEQ ID NO: 89593 - DNA, 600 bp, Chicken  19866894396353_1
cagtccaacttggacaaaaatgtgttggtggctttttttagaacgtcgcagcaagacagttctgtctcttgacattttcagtatttctttgctgtgttgaaaggctcagtcagatccttttggtagggtatgagagctagaaagtactgctgacttaacaaaccaaccttatttggttgtatttggaagagcggcttcgccaacagcaaacggaggtccgtggaattctattggaagtgcagttgttctgtagttacaagtggcagtgctgctgctaagaagaagatcactcggcattcrttctgccctgtggtttactggtacacatctgatttccccagttactgttcttgttaaatgtacctttctgatctgaagaaatgagcaccttacacacarttcagaagagctctctgaaaaaccccttagttgtgctgcaagccttcatccccttcctccgtcctcttgctaccaggaacgatggctttgtaactccatatgcagattggcacgcagaagtatgtgcatgctttcttctgatttaattggatttgctagtctgaaatgtagaatgcttgctaatttcataagctagctact

SEQ ID NO: 89594 - DNA, 600 bp, Chicken  19866894396353_2
aaaggctcagtcagatccttttggtagggtatgagagctagaaagtactgctgacttaacaaaccaaccttatttggttgtatttggaagagcggcttcgccaacagcaaacggaggtccgtggaattctattggaagtgcagttgttctgtagttacaagtggcagtgctgctgctaagaagaagatcactcggcattcrttctgccctgtggtttactggtacacatctgatttccccagttactgttcttgttaaatgtacctttctgatctgaagaaatgagcaccttacacacarttcagaagagctctctgaaaaaccccttagttgtgctgcaagccttcatccccttcctccgtcctcttgctaccaggaacgatggctttgtaactccatatgcagattggcacgcagaagtatgtgcatgctttcttctgatttaattggatttgctagtctgaaatgtagaatgcttgctaatttcataagctagctactgtaactaaaatcagacacagttaccaaaaaaagccccactgcattctagtccaaaagggatatttccatgcttaaagggtggtctcctttctccctttc

SEQ ID NO: 89595 - DNA, 600 bp, Chicken  19866894396359_1
cacaacacaggttccttggagaaatcggagaggcaagagaagggggaaagtcggtgtttttcagtcactcccaggccaggtttcctctctgtgatttagacctccctggtacttgctaagagagaaagcctgcccaacccggcctctaacagtgtagaacaaacccagctcagctgcaccagtgtgtttccattgagctccttccagtgctattgggcatatttccatctggcttgagcacgtctctcaaaagaaaactgcgtaaagcttttctgcttggggttggtgtgtttgcaagcrccrgcgctgtgtgtgcgtgtgtctgtgtgtgtgtgtacacmagagccaggcagcaaaacacatgccttctgcagaaggagcaccaggctgagggtggaggggctgcctgctttcctctgaggaaactgcctcttctgatccgcaaggaagatgtttctcaagccttcacgaggctgctcactagaaacatagtgttaggtaggaggaaccttgtggcattcctctgtggtttatattcatattcttgkatttctgccttcattttataatgcttttcgggatttaacgtagatagatttt

SEQ ID NO: 89596 - DNA, 600 bp, Chicken  19866894396359_2
aacacaggttccttggagaaatcggagaggcaagagaagggggaaagtcggtgtttttcagtcactcccaggccaggtttcctctctgtgatttagacctccctggtacttgctaagagagaaagcctgcccaacccggcctctaacagtgtagaacaaacccagctcagctgcaccagtgtgtttccattgagctccttccagtgctattgggcatatttccatctggcttgagcacgtctctcaaaagaaaactgcgtaaagcttttctgcttggggttggtgtgtttgcaagcrccrgcgctgtgtgtgcgtgtgtctgtgtgtgtgtgtacacmagagccaggcagcaaaacacatgccttctgcagaaggagcaccaggctgagggtggaggggctgcctgctttcctctgaggaaactgcctcttctgatccgcaaggaagatgtttctcaagccttcacgaggctgctcactagaaacatagtgttaggtaggaggaaccttgtggcattcctctgtggtttatattcatattcttgkatttctgccttcattttataatgcttttcgggatttaacgtagatagattttttt

SEQ ID NO: 89597 - DNA, 600 bp, Chicken  19866894396359_3
gggggaaagtcggtgtttttcagtcactcccaggccaggtttcctctctgtgatttagacctccctggtacttgctaagagagaaagcctgcccaacccggcctctaacagtgtagaacaaacccagctcagctgcaccagtgtgtttccattgagctccttccagtgctattgggcatatttccatctggcttgagcacgtctctcaaaagaaaactgcgtaaagcttttctgcttggggttggtgtgtttgcaagcrccrgcgctgtgtgtgcgtgtgtctgtgtgtgtgtgtacacmagagccaggcagcaaaacacatgccttctgcagaaggagcaccaggctgagggtggaggggctgcctgctttcctctgaggaaactgcctcttctgatccgcaaggaagatgtttctcaagccttcacgaggctgctcactagaaacatagtgttaggtaggaggaaccttgtggcattcctctgtggtttatattcatattcttgkatttctgccttcattttataatgcttttcgggatttaacgtagatagattttttttaggtctgtcaacgatcagctagaagtcaatctatgtt

SEQ ID NO: 89598 - DNA, 600 bp, Chicken  19866894396359_4
aaaagaaaactgcgtaaagcttttctgcttggggttggtgtgtttgcaagcrccrgcgctgtgtgtgcgtgtgtctgtgtgtgtgtgtacacmagagccaggcagcaaaacacatgccttctgcagaaggagcaccaggctgagggtggaggggctgcctgctttcctctgaggaaactgcctcttctgatccgcaaggaagatgtttctcaagccttcacgaggctgctcactagaaacatagtgttaggtaggaggaaccttgtggcattcctctgtggtttatattcatattcttgkatttctgccttcattttataatgcttttcgggatttaacgtagatagattttttttaggtctgtcaacgatcagctagaagtcaatctatgttgctgttctgtacgtgcaagactaaattctaaatgctttcccatgtttatacgtgttggcactttataagtgatattgcaggagtggctaccagcacacagatggatgcacagagcagcagaaggttttctgaaaaatttgacagttccatacataatccatggacgtgccatgacctgggactggtcttaaaatgtattatcagaac

SEQ ID NO: 89599 - DNA, 600 bp, Chicken  19866894396365_1
agggctggtaagtaatgcagtgtttgcctggcagttaagactattaaagctttattccttttcacttgctttattctagcacctcttctttgtgttcacagatgactctgggataatttattgcctttcccgtcatgaatgtgacacgacagcagccattctgcagaaggaaggccttgctgcacttgcctatcatgctggcctcactgactccaacagagatcttgtacagaagaagtgggttaatcaagaagggtgccaggtaacagaattgcaactggggaggaggaaaaaaaaaawggaatttagagcacttttatcacttttggcccagtaagagaaaagagagttgtgtaaccatagtgccaaatcagctgcaggcgatatcagtcagaacagatctgccaaacgttagccttcttttcattttcattacaaatcaaaggctgcagctctgcaccaaggtgtggtgctctgggaggaaggagctgagctgtgtgaggctgcgggagcagctcgaggtgtgcttgctgaattgcattttaagactctccaatctgcagttttccttctgtctcctgaaagaaagggagatatgta

SEQ ID NO: 89600 - DNA, 600 bp, Chicken  19866894396367_1
gcatttttatgagaacgttttaaaagggggttcctctcgcactcccccccccccccccgagcgacgctgtgctgctccggtgaggatctcctgagaagatggggaggaaaaagatccagatccagcggatcacggatgagcggaaccggcaggtgggtgcccccctccccgcccccatatacccattttcacacatttttagggtcccattaactccccacttgcgcccctcagggccaagctctgcttttctcatccagctcataatattaagcctcacggtgtgggttcatgctgctyrcagcagatgccccgggcccagcagaccaccccattttccaatcccaaacgcagagctgcccccacctcagccctttccagaagaacgcatcttccccacttagctgccacttctcttgcaaaaagcctatttcgtttgacattttccacgaggcttttccaatgagaaacagccacgacaaggatccctttttctgaaggaatcgtaatgcttttcaatggagagctaacatgtgtccagggcttttttcctcctcgtgccagattttcactgcgctgatgctgagctgttgacacacg

SEQ ID NO: 89601 - DNA, 600 bp, Chicken  19866894396367_2
catttttatgagaacgttttaaaagggggttcctctcgcactcccccccccccccccgagcgacgctgtgctgctccggtgaggatctcctgagaagatggggaggaaaaagatccagatccagcggatcacggatgagcggaaccggcaggtgggtgcccccctccccgcccccatatacccattttcacacatttttagggtcccattaactccccacttgcgcccctcagggccaagctctgcttttctcatccagctcataatattaagcctcacggtgtgggttcatgctgctyrcagcagatgccccgggcccagcagaccaccccattttccaatcccaaacgcagagctgcccccacctcagccctttccagaagaacgcatcttccccacttagctgccacttctcttgcaaaaagcctatttcgtttgacattttccacgaggcttttccaatgagaaacagccacgacaaggatccctttttctgaaggaatcgtaatgcttttcaatggagagctaacatgtgtccagggcttttttcctcctcgtgccagattttcactgcgctgatgctgagctgttgacacacgc

SEQ ID NO: 89602 - DNA, 491 bp, Chicken  19866894396367_3
cagcagaccaccccattttccaatcccaaacgcagagctgcccccacctcagccctttccagaagaacgcatcttccccacttagctgccacttctcttgcaaaaagcctatttcgtttgacattttccacgaggcttttccaatgagaaacagccacgacaaggatccctttttctgaaggaatcgtaatgcttttcaatggagagctaacatgtgtccagggcttttttcctcctcgtgccagattttcactgcgctgatgctgagctgttgacacacgcgcgtgtgtgtgcatgcgygggtaaatgcatccatgcatctcaaagggggggggggaaaccccatcgtttctccctcattttcatcttgctgagcccaagctgcagagtggcagcgctttgctggagcagctttgctgtgcggttgctccaccattgtatttcctgaggacgtggaggacgtccagtgcatgtcctgctgcacttttctg

SEQ ID NO: 89603 - DNA, 600 bp, Chicken  19866894396376_1
ccagcagtacaatccatcgatatgaatgaaagattaataaatcttgccacagctcaacagttttccttataagaactggatgtggatatgccatcttgatctctgcaagaaatatggtttaaagcaattctgcagcttctaaagtagttcgtatttctcgacaaaaagaagctctgtgttcagaacaaaccttagcttttttttattgtaaaacatctatttgtttgaaatgagcctgtatgtgagatgtaagcgttttctttcaatgttctcattcagaagacttgtacacagagggtytgtgaatggtcaaatattccatttatatgtcttcatagaaatttctgaactttagctctggttgagatgatcatatgtgagagactatgctgaatcaaaattgtctataaacagtcaaaacctaaacaattagaaattcctagaattatacttggtactctgtccattcatgtttttttcctccacttcatctggtactctgtccattcatgtttttttcctccacttcatcattttaaaaaattcttcagccctgatataaaaacatttccagctgttggaaacttcttgttggggaaa

SEQ ID NO: 89604 - DNA, 600 bp, Chicken  19866894396378_1
aattggagaaatttgatatctagtctctgttctgccacaaacttcttgtgagaggaggagggacatactctcccagatgcctgaagtactctgtgaactacctcccttaaactataagcacttaagtacctttgtggctcccagacttgccattcagctgtttagtgtctgagaactctcaagagaaacatacactttgtgtttcattgtttctggaaacaatacagcaaatagaagtcgactaacctactttcctgcactcccccaacaaattctcttgcatatctattctgaaactcytttttttttcttctcttttctttatataatcagttttgatgcctaatggaagtggaaaaagtacctaactgggccagatgcagcgcatctccagtatcagtattaaataattgattgactagagaccatttaaaaaaaaaaawgtcaagatacctgaggcctttgtctagatgcagtattttgaaatgagttgttaggatccccatagcacagatcatgtaaaatgctgtatatgtgcttaacttatgccatcggcaaggtcctgatgcctggcaagacatgtgcattgtgtgactgaat

SEQ ID NO: 89605 - DNA, 544 bp, Chicken  19866894396378_2
gacttgccattcagctgtttagtgtctgagaactctcaagagaaacatacactttgtgtttcattgtttctggaaacaatacagcaaatagaagtcgactaacctactttcctgcactcccccaacaaattctcttgcatatctattctgaaactcttttttttttcttctcttttctttatataatcagttttgatgcctaatggaagtggaaaaagtacctaactgggccagatgcagcgcatctccagtatcagtattaaataattgattgactagagaccatttaaaaaaaaaaawgtcaagatacctgaggcctttgtctagatgcagtattttgaaatgagttgttaggatccccatagcacagatcatgtaaaatgctgtatatgtgcttaacttatgccatcggcaaggtcctgatgcctggcaagacatgtgcattgtgtgactgaatttaagcccttggcttattccctttcaagttaaacaaatgtgtaacttctgcaggtctttgcacaagctgtcttctttgtgaacacag

SEQ ID NO: 89606 - DNA, 599 bp, Chicken  19866894396392_1
  misc_feature (1)..(110): n is any nucleotide
nnnnnnnnnnnnnnnnnnnnnnnnnnnnnnnnnnnnnnnnnnnnnnnnnnnnnnnnnnnnnnnnnnnnnnnnnnnnnnnnnnnnnnnnnnnnnnnnnnnnnnnnnnnnnntctgttgttggtcgaagttcttctgcttattttatgtgtcaagatctttctgtaaaggataaccccattatactgcagtaccaacagaaagactccagccttcatctgcaaactcctaccagtcgctactgcagttgtttttctcacccagagagggacaaggttgacattactcataggatttcagagrctcaaacaaagtccttatgctgtgagtacccaaattcctctgaaaagtatttctgagaacctagattttaacatttctcaagttttccatgaacgtcctatggaagataacaaaatgtcgatgaaagctgagacaataagaagggagctgcaattaatcccgttttatcgctcttgcaactagaagctgaaatagccacagagaatgcaccaagagcattctcccatcttgccagagccacacatccctctgcacagttcactaccacagcctcacttcacgggggaatgggtgctctg

SEQ ID NO: 89607 - DNA, 600 bp, Chicken  19866894396401_1
taaaaacacttatttgttcttctttctccatttctacaaagaaatgcctttaagatgcctaatgacctgaatcttttgctgtgaggtcttaggtacatgaggttaagaagttcattgttgtaactatgctggggctaaaaaaaagaaaaagaatatattagcacagcaaatgtcttaagggttaaattatttttccttccctgccttactcaggagtgggagctacaaagtattataacgctatcacctcaatgccttatctccctgttattcacaggagggcagaggtcacttccataygcaatttgcgcaaggaagcctactattctcccttacagtcctgtagactgagagttgcagtgggaaatagtctatttcaccttcatgaaatacagatttgaaccatccttatgttgtctagtgtagtcttctatatgtcataagctagagttttcaacagacctaaaagcataagatgaagagtgttattttttttcaaaacatctgcacaactgtagcaagcttcaaacacttttgtagatgagtgagacctaagggctttaactgaaattgcagtataggttttattttagcaatttg

SEQ ID NO: 89608 - DNA, 599 bp, Chicken  19866894396409_1
  misc_feature (1)..(17): n is any nucleotide
nnnnnnnnnnnnnnnnnttccatttgaatatttgtattttactaccactgcccttggggttgaaaggtctcacttttttcttgataagtctgacaaacttacctttcaagcttgtatcctactactgtcctttatgttgagggaaaggggctttcacaattaataatgaagcacaaaactgatcagacttgtgcctaggatatgcaagtcatgagcatagcagaaatcaaactatgtccactaacaaagctgcatactaacctccattcagtttaccatgttagcattatttatcttacrggcttcttttagtctagttttatcttattcatttaggtgcagagaatttattcatctgatcgtactgtttagaaacacacagactggaaggaggaagtcctgagaatctggcagagtcatcactgattgtgcaaaagcagcagatgaatgctggatggcttaacgttttattcatggctctagcacagattttctgattaagtagtaacactagggaatatatactgagtcaggcagaggctttgtgtggaaaagtctttcagcctcatgctggtcatcagaagatatgtaaggacaaa

SEQ ID NO: 89609 - DNA, 600 bp, Chicken  19866894396418_1
ttacccaccaattaccatgtgacaagtaacaggcagcaagaaaccacaaacaatggatcctttaaatttaaaattacatgttattttaataaagagttttattgttaatatttcaaaaaacaaacaaacaaacaaacacactttaattcttattaaacttaaatgaaataaaaatggcttatataaataaaataacaataatgaccaagtaattaaaaattcaaggacactacaaggatataaattacttttttattttaggtacacagataattttgtaacattcatgtaagctaatcrtacactcttagaatgatggtgtggtatgaaaagktatggaatgatcatgaaggtttttatcctatacctttcagccctgtaatttcctatatcaatctagaacagtgggagagtacacagtgtgcactgcacattttatcactggaaatgtagtaaagttaaagagaattgagtttccctctttccttccttttatcgtgttttatgtgatgtatttacacataataggaaacatcagtataaaatatctgtacatatttccttgaggatcataaacaagtttaatacttgaaatttaac

SEQ ID NO: 89610 - DNA, 600 bp, Chicken  19866894396418_2
agcaagaaaccacaaacaatggatcctttaaatttaaaattacatgttattttaataaagagttttattgttaatatttcaaaaaacaaacaaacaaacaaacacactttaattcttattaaacttaaatgaaataaaaatggcttatataaataaaataacaataatgaccaagtaattaaaaattcaaggacactacaaggatataaattacttttttattttaggtacacagataattttgtaacattcatgtaagctaatcrtacactcttagaatgatggtgtggtatgaaaagktatggaatgatcatgaaggtttttatcctatacctttcagccctgtaatttcctatatcaatctagaacagtgggagagtacacagtgtgcactgcacattttatcactggaaatgtagtaaagttaaagagaattgagtttccctctttccttccttttatcgtgttttatgtgatgtatttacacataataggaaacatcagtataaaatatctgtacatatttccttgaggatcataaacaagtttaatacttgaaatttaacaccaataaacgtttcctaatctctgaaacacatc

SEQ ID NO: 89611 - DNA, 600 bp, Chicken  19866894396419_1
agaatctgagatcttcctgtgcagcctcagatctgctgttgtactaaacgtcattttctagatgatgtttgcacccttgatgagtttgtgtcgttattttaaagataagctttgactttccattaatagacttttctctctgatgtaatattcagattacgaagatttgaagttgatggattttttttaagcttagtgttataggttatgcagtgttgaaaataagacagaaaactaaagttccacattatgctgttagtaagtctaattctgttttcagaatttccttagtactacaaytttgtatcacccttagtgttattccaggaattcttctgctcctatcccctcacatgtgaaagaatctgtttctggatgccacagctgccaactggtgccacctcctasctgaaagcttttgctgttgcatactgaagcttagcacagaattaagatggctttaaatttaacctctgccttccaaacattagactcctctggataattcagaaagacctgtccaaacagytacaacactgcaatttctacagttttgtgtattctgtctactcccatgcactcttgtcttcagttaattac

SEQ ID NO: 89612 - DNA, 600 bp, Chicken  19866894396419_2
gctttgactttccattaatagacttttctctctgatgtaatattcagattacgaagatttgaagttgatggattttttttaagcttagtgttataggttatgcagtgttgaaaataagacagaaaactaaagttccacattatgctgttagtaagtctaattctgttttcagaatttccttagtactacaaytttgtatcacccttagtgttattccaggaattcttctgctcctatcccctcacatgtgaaagaatctgtttctggatgccacagctgccaactggtgccacctcctasctgaaagcttttgctgttgcatactgaagcttagcacagaattaagatggctttaaatttaacctctgccttccaaacattagactcctctggataattcagaaagacctgtccaaacagytacaacactgcaatttctacagttttgtgtattctgtctactcccatgcactcttgtcttcagttaattacctcaggctgtgtatgtctttgagtgacctctggttgcctttccagtcttggtgctaagtcatagtggtaccatcaacacatcggccaatgtactgtgctaaaaaccat

SEQ ID NO: 89613 - DNA, 600 bp, Chicken  19866894396419_3
gaaaactaaagttccacattatgctgttagtaagtctaattctgttttcagaatttccttagtactacaaytttgtatcacccttagtgttattccaggaattcttctgctcctatcccctcacatgtgaaagaatctgtttctggatgccacagctgccaactggtgccacctcctasctgaaagcttttgctgttgcatactgaagcttagcacagaattaagatggctttaaatttaacctctgccttccaaacattagactcctctggataattcagaaagacctgtccaaacagytacaacactgcaatttctacagttttgtgtattctgtctactcccatgcactcttgtcttcagttaattacctcaggctgtgtatgtctttgagtgacctctggttgcctttccagtcttggtgctaagtcatagtggtaccatcaacacatcggccaatgtactgtgctaaaaaccatcaagccctgtgttagcccagtttgacatctaatactgtccaaatgaggtaatttaaggtaaactcatgcatcttcatgctcagtttctatgccagcagtattttttttttccagcaaaatt

SEQ ID NO: 89614 - DNA, 600 bp, Chicken  19866894396432_1
tatgctgttataactcctcattaagtttttgctgtacattgtctctttctgactctgtgggaagatgtagaaaattgtgttgtgtggatgataaccaggagatttgtcaaggtcaggagaaccaccggagcacaaggaggcaggggaatcccagtagaatctagctgtctgaaatactctgcttatgactggattaagtcacattaattgagcgtaaaagcagagtgtttagtgcttagagtgcgattggcattgatgtgaggattcctatgcagtgaaatgcactaagcgtgcttaacrcaaaattgtctctaacgttgtcagtatatgactgttcctctgtattttatttatgtctgtttaaaagagcctcagtgaactccattgaaaactacagctgtctggccacagatgatgttcagcacaggatgccttcctgttagtgtaggctccgcacagctctgagtctgttcagcctcacttcgttcccaccagcagtggcctttgttaaacatcctaaaagtctgacgtattgcattggcacttcctgattcatgtggtctaaacagttccaaatatgttcacgttttttagttggct

SEQ ID NO: 89615 - DNA, 600 bp, Chicken  19866894396433_1
tttgctatgaagcctcccctgcctctaatgtcattgtgtcaagaagaggttgtacgctgtggggtgcaggaggcaaaggcagcagagggcacgtgtctgagtcagcagtgctacagctgcactgactctcacttgtctttgtaggaagcctctgtagcaactccctgaagtcctaaggcagcaagtatgtttatagcacgttaagaatgaatcaaaacatgcattttgtcagaaaacaggccgcacaatttagagtggagaaaacaaaaacaaggaaaatctgtgcaaagaaaaacacastagaaaaaagatmcagaamgaggaaagcttgaatggcattctataaagaggttaagggaggaggagtttttggtagtctgaattttttcacatagggaaatatgttgtttacttaaatgtttcaaaacatctttattcaagcacctcctggagacacagaagacaaaaactgctgtaactacagcaaccaaatctggtgtgaaagatctctgttatgctcagcacacagcagtggcagcagatagcatcatctggagcaggtagacaactaggggtgaggaggtatgtggataatgttaa

SEQ ID NO: 89616 - DNA, 600 bp, Chicken  19866894396433_2
ctcccctgcctctaatgtcattgtgtcaagaagaggttgtacgctgtggggtgcaggaggcaaaggcagcagagggcacgtgtctgagtcagcagtgctacagctgcactgactctcacttgtctttgtaggaagcctctgtagcaactccctgaagtcctaaggcagcaagtatgtttatagcacgttaagaatgaatcaaaacatgcattttgtcagaaaacaggccgcacaatttagagtggagaaaacaaaaacaaggaaaatctgtgcaaagaaaaacacastagaaaaaagatmcagaamgaggaaagcttgaatggcattctataaagaggttaagggaggaggagtttttggtagtctgaattttttcacatagggaaatatgttgtttacttaaatgtttcaaaacatctttattcaagcacctcctggagacacagaagacaaaaactgctgtaactacagcaaccaaatctggtgtgaaagatctctgttatgctcagcacacagcagtggcagcagatagcatcatctggagcaggtagacaactaggggtgaggaggtatgtggataatgttaatcagtcccaattc

SEQ ID NO: 89617 - DNA, 600 bp, Chicken  19866894396433_3
tgcctctaatgtcattgtgtcaagaagaggttgtacgctgtggggtgcaggaggcaaaggcagcagagggcacgtgtctgagtcagcagtgctacagctgcactgactctcacttgtctttgtaggaagcctctgtagcaactccctgaagtcctaaggcagcaagtatgtttatagcacgttaagaatgaatcaaaacatgcattttgtcagaaaacaggccgcacaatttagagtggagaaaacaaaaacaaggaaaatctgtgcaaagaaaaacacastagaaaaaagatmcagaamgaggaaagcttgaatggcattctataaagaggttaagggaggaggagtttttggtagtctgaattttttcacatagggaaatatgttgtttacttaaatgtttcaaaacatctttattcaagcacctcctggagacacagaagacaaaaactgctgtaactacagcaaccaaatctggtgtgaaagatctctgttatgctcagcacacagcagtggcagcagatagcatcatctggagcaggtagacaactaggggtgaggaggtatgtggataatgttaatcagtcccaattctccaca

SEQ ID NO: 89618 - DNA, 487 bp, Chicken  19866894396433_4
agggaggaggagtttttggtagtctgaattttttcacatagggaaatatgttgtttacttaaatgtttcaaaacatctttattcaagcacctcctggagacacagaagacaaaaactgctgtaactacagcaaccaaatctggtgtgaaagatctctgttatgctcagcacacagcagtggcagcagatagcatcatctggagcaggtagacaactaggggtgaggaggtatgtggataatgttaatcagtcccaattctccacagagataatcagcatctactgaggtctcatttgtgyacaaaaaggaattatcagcaaaatcaaaagcaacgcccagaagcatggaatgtaggcattattcctgatgtacctacgtatgctttacattggagaaggtttacgtaagttatgatcacttctcccttccctttcaatgcagtatcaatgaatagaaactatctttaacacatattagaatcattcc

SEQ ID NO: 89619 - DNA, 600 bp, Chicken  19866894396434_1
aaatctggttcatgatgcaaaacctgtcattgatttcagtacgaccaagatttctctctttcaagtattgcaattgttactgcacaattatgctgaactgcatatagttccgatatcatcaggttttagattatggtgacataaatgaatggaggttagggtagaggaattatatagaaaggatgctttgaggatgctactgcacaagcagagaaccaaggtgtagagcaaaaactatatatgcagatagagatgagatgactcatcactttgagccacttcagagtaacttatcctagmccgaagaagaggaagaacaattatggtcattggcacacctctttacttacagagcttttgaactgactgtataaaatatagtgggagatataaaaatattttcaaaaatgcatatgaaccaattaataagaaactataaaatatgaaaactaagctgatactccaaggagtagtagttattcatcttgcatacaatatgagtatgtataactgtgtcacatggtattacctcagtatataaaaatttcttatgatgtatcaagtaaaaaaaaattcttaagaatggaggatattcagggt

SEQ ID NO: 89620 - DNA, 600 bp, Chicken  19866894396438_1
gatccagctgttagacacttactacggcaccaaatgcagaacttacagcccccacattaagcaaaacagcatccaaaccagcatgaacctcactaagttgttagctcatctaagttttgtaacgaaatctagatctacaaagtaaacttatcatggatcaagacactgaaccttggagcatctgttacaagataccttaagactgaatttactgtactgagatctaaaaatctcatgctccatttcaacagtatggatatcagcagaatggaaccttaacaaatcactttccctcctatmtcctttctcatcccagcttccctgggtatagttgctgccaatcctgtgggactggatatgactggccagaagtctctagcacagatgaaaattcatctttctaaaaccttacttgttcatccatctgcagagtgctgtccrtggcagcaakagatgagaatgttaaaacgtagggtgggtgtaaaggasactgccaaagacgcctaatgtggaatagagtgtttgaacatgggacattttgactgccggatccagacaaggcagaaaaattggtaagagtcaaaggmctcaacttgatca

SEQ ID NO: 89621 - DNA, 600 bp, Chicken  19866894396438_2
gtaaacttatcatggatcaagacactgaaccttggagcatctgttacaagataccttaagactgaatttactgtactgagatctaaaaatctcatgctccatttcaacagtatggatatcagcagaatggaaccttaacaaatcactttccctcctatmtcctttctcatcccagcttccctgggtatagttgctgccaatcctgtgggactggatatgactggccagaagtctctagcacagatgaaaattcatctttctaaaaccttacttgttcatccatctgcagagtgctgtccrtggcagcaakagatgagaatgttaaaacgtagggtgggtgtaaaggasactgccaaagacgcctaatgtggaatagagtgtttgaacatgggacattttgactgccggatccagacaaggcagaaaaattggtaagagtcaaaggmctcaacttgatcaggaaagtggagactaatataatggaaaaaatgcactgtgaaaaaggaaactgagctacagcagttattcatctgtcataggtagtcctttacaaaaacttctggatgtaacttaccttccagaaggtaccattctaaaaca

SEQ ID NO: 89622 - DNA, 600 bp, Chicken  19866894396438_3
catggatcaagacactgaaccttggagcatctgttacaagataccttaagactgaatttactgtactgagatctaaaaatctcatgctccatttcaacagtatggatatcagcagaatggaaccttaacaaatcactttccctcctatmtcctttctcatcccagcttccctgggtatagttgctgccaatcctgtgggactggatatgactggccagaagtctctagcacagatgaaaattcatctttctaaaaccttacttgttcatccatctgcagagtgctgtccrtggcagcaakagatgagaatgttaaaacgtagggtgggtgtaaaggasactgccaaagacgcctaatgtggaatagagtgtttgaacatgggacattttgactgccggatccagacaaggcagaaaaattggtaagagtcaaaggmctcaacttgatcaggaaagtggagactaatataatggaaaaaatgcactgtgaaaaaggaaactgagctacagcagttattcatctgtcataggtagtcctttacaaaaacttctggatgtaacttaccttccagaaggtaccattctaaaacagctccacagc

SEQ ID NO: 89623 - DNA, 600 bp, Chicken  19866894396438_4
agataccttaagactgaatttactgtactgagatctaaaaatctcatgctccatttcaacagtatggatatcagcagaatggaaccttaacaaatcactttccctcctatmtcctttctcatcccagcttccctgggtatagttgctgccaatcctgtgggactggatatgactggccagaagtctctagcacagatgaaaattcatctttctaaaaccttacttgttcatccatctgcagagtgctgtccrtggcagcaakagatgagaatgttaaaacgtagggtgggtgtaaaggasactgccaaagacgcctaatgtggaatagagtgtttgaacatgggacattttgactgccggatccagacaaggcagaaaaattggtaagagtcaaaggmctcaacttgatcaggaaagtggagactaatataatggaaaaaatgcactgtgaaaaaggaaactgagctacagcagttattcatctgtcataggtagtcctttacaaaaacttctggatgtaacttaccttccagaaggtaccattctaaaacagctccacagcaaatatttattcttaaagcagaattactcaaaaatgat

SEQ ID NO: 89624 - DNA, 600 bp, Chicken  19866894396438_5
tttccctcctatmtcctttctcatcccagcttccctgggtatagttgctgccaatcctgtgggactggatatgactggccagaagtctctagcacagatgaaaattcatctttctaaaaccttacttgttcatccatctgcagagtgctgtccrtggcagcaakagatgagaatgttaaaacgtagggtgggtgtaaaggasactgccaaagacgcctaatgtggaatagagtgtttgaacatgggacattttgactgccggatccagacaaggcagaaaaattggtaagagtcaaaggmctcaacttgatcaggaaagtggagactaatataatggaaaaaatgcactgtgaaaaaggaaactgagctacagcagttattcatctgtcataggtagtcctttacaaaaacttctggatgtaacttaccttccagaaggtaccattctaaaacagctccacagcaaatatttattcttaaagcagaattactcaaaaatgatttctctagactttactgtcatgattaacattgcttacagtttagttttcacaaatatatagggcagctgaaggtaacaagcaaagttcatgtctgtgc

SEQ ID NO: 89625 - DNA, 600 bp, Chicken  19866894396457_1
tcttaaatctaaagatttaaatacaaagcttctagtgctaataattccgtattattccatagctaaatgcattttccaagggaaagtccaagctgctgctttcatactatcgttgaccctttgcagtacagcagtgtcaatgctgtggaaggcaaagttggtcttttaatcagtgagttttgtgaaatatgttcagaagccacattggaagtctcaataaagcagcatgctttgccggagaagtcagcagaaactagatgcaacaagcaggagatgacaaacaatcaggggtgaaaaaawgtcatagawaagaagagggaccactgtctgctttgaaatwtttttttacaaatgtattggaacagataccaagtaagtctcacacttagctctcgtaggttggtttcattgcattctttttgtcagcagcacctactaaaaatctcctaggacaagattgttggaaatacctttgctgagtgggtcggtctcggctgctggagcagtctgtcatgtagagttttttcatagaatatggttgatgtaaagcttgttactgtatgaaattggaagtccggaccttaggattcaaaactattc

SEQ ID NO: 89626 - DNA, 600 bp, Chicken  19866894396457_2
taaagatttaaatacaaagcttctagtgctaataattccgtattattccatagctaaatgcattttccaagggaaagtccaagctgctgctttcatactatcgttgaccctttgcagtacagcagtgtcaatgctgtggaaggcaaagttggtcttttaatcagtgagttttgtgaaatatgttcagaagccacattggaagtctcaataaagcagcatgctttgccggagaagtcagcagaaactagatgcaacaagcaggagatgacaaacaatcaggggtgaaaaaawgtcatagawaagaagagggaccactgtctgctttgaaatwtttttttacaaatgtattggaacagataccaagtaagtctcacacttagctctcgtaggttggtttcattgcattctttttgtcagcagcacctactaaaaatctcctaggacaagattgttggaaatacctttgctgagtgggtcggtctcggctgctggagcagtctgtcatgtagagttttttcatagaatatggttgatgtaaagcttgttactgtatgaaattggaagtccggaccttaggattcaaaactattcttgattggg

SEQ ID NO: 89627 - DNA, 593 bp, Chicken  19866894396457_3
ataattccgtattattccatagctaaatgcattttccaagggaaagtccaagctgctgctttcatactatcgttgaccctttgcagtacagcagtgtcaatgctgtggaaggcaaagttggtcttttaatcagtgagttttgtgaaatatgttcagaagccacattggaagtctcaataaagcagcatgctttgccggagaagtcagcagaaactagatgcaacaagcaggagatgacaaacaatcaggggtgaaaaaawgtcatagawaagaagagggaccactgtctgctttgaaatwtttttttacaaatgtattggaacagataccaagtaagtctcacacttagctctcgtaggttggtttcattgcattctttttgtcagcagcacctactaaaaatctcctaggacaagattgttggaaatacctttgctgagtgggtcggtctcggctgctggagcagtctgtcatgtagagttttttcatagaatatggttgatgtaaagcttgttactgtatgaaattggaagtccggaccttaggattcaaaactattcttgattgggaataccaagaaatttagaaggatg

SEQ ID NO: 89628 - DNA, 599 bp, Chicken  19866894396465_1
  misc_feature (1)..(171): n is any nucleotide
nnnnnnnnnnnnnnnnnnnnnnnnnnnnnnnnnnnnnnnnnnnnnnnnnnnnnnnnnnnnnnnnnnnnnnnnnnnnnnnnnnnnnnnnnnnnnnnnnnnnnnnnnnnnnnnnnnnnnnnnnnnnnnnnnnnnnnnnnnnnnnnnnnnnnnnnnnnnnnnnnnnnnnnnnnntttggaagggacctctaaaggacacctacagcttggtcaggtgctcagagcctgacctttgatgtcatgtagtgctctgtaatttttgctgtgagtaacagcagtttacgccctcatctcctcctccawggcacctatgattttatagacctctctattacccttcttggccctgtcagtttatcaagtctttttagggaagttatcccatatttctgtgcatcttcgttgctttcctctgacttctccagctcagtgctgtatttgacatagtatttgaaatgacaaatgtctttaaagtaagagcataaaagcactctgatttcatgcagtagaataattatttcctcttctcccattcccagtgtttgtattttgagtaatgcttagcgctgggctaatgttttcacagaactggccacaatgag

SEQ ID NO: 89629 - DNA, 600 bp, Chicken  19866894396474_1
cttaaaagccaggtgtctgcacttgtctcagtgtcactgcaaggagagaaaagttgtgtttcatcctcattactgcatgaggaaaacgaagagagggacatgcataatgaaatgggagggacagatgagttcaactaattctatatgcagcccataacacaagaagctaagggcagggaaaatatggaagtagccttgagcttttatgtcctggaaataaaagcctgcctttttttagagactatatgatttaagctgtacatgtcatgggaaatggagacagcctctggaaagcattcytcatgagaggcctctgcagtcactcccagactgatggatgcagttcagcagtgaaatcctgkcccagcagcagccctagggcaccttctgaggctgctgatgagaggacttggttattggcctcaacacgacccacctggcccaaatgtttgggagctgctgttcgctcattctttcagtggtgttgtgcccactgctaggccgagactgagaggccaaagattttgtaagggctcctacttcatttagtttctaatatattgaatgtttgaatctctgctaaaaaatgcttagcttgga

SEQ ID NO: 89630 - DNA, 600 bp, Chicken  19866894396474_2
atcctcattactgcatgaggaaaacgaagagagggacatgcataatgaaatgggagggacagatgagttcaactaattctatatgcagcccataacacaagaagctaagggcagggaaaatatggaagtagccttgagcttttatgtcctggaaataaaagcctgcctttttttagagactatatgatttaagctgtacatgtcatgggaaatggagacagcctctggaaagcattcytcatgagaggcctctgcagtcactcccagactgatggatgcagttcagcagtgaaatcctgkcccagcagcagccctagggcaccttctgaggctgctgatgagaggacttggttattggcctcaacacgacccacctggcccaaatgtttgggagctgctgttcgctcattctttcagtggtgttgtgcccactgctaggccgagactgagaggccaaagattttgtaagggctcctacttcatttagtttctaatatattgaatgtttgaatctctgctaaaaaatgcttagcttggaagatgcaaggttctatgggaaggcaggtggctgaggtagaagtatgtgacagcagtggcggg

SEQ ID NO: 89631 - DNA, 600 bp, Chicken  19866894396476_1
ggtattaatctgtgggtttttaagctgatatggtagcacataagtggggcaaggattcaatcctcttcaatttgtactatccaaaaagcattttgagtttgccaggtgaatttactgttagtacaaaaactcaggagttttaactaaaacaacaattatatgatttttccattgcctgcattgcaaatgttacggagtggtggtggttttcactataatagatcctaaatattccccagtgtcttcgtacctctatttctgtagatctagattttactagatggtgctgggcgttttctytgtgaatctacttctgttagaaagttgtgattgtagcctaaacagacagaattagaagcatatgaaaaaaactcaggcaaaagttacttttacaatgatctaggaaaagagcatttaaaccaatagaaagaagaatttaaacttagaatgacccctgtaaaaaaggatatatrcatggtagaggtagaaattgaaaaaaaaattacttttattttagtcctttgtatcccgcagagtaacttttgttgatatcatagtgaaattcccccttctttagtaatatacctgtctagaatatct

SEQ ID NO: 89632 - DNA, 600 bp, Chicken  19866894396476_2
gcctgcattgcaaatgttacggagtggtggtggttttcactataatagatcctaaatattccccagtgtcttcgtacctctatttctgtagatctagattttactagatggtgctgggcgttttctytgtgaatctacttctgttagaaagttgtgattgtagcctaaacagacagaattagaagcatatgaaaaaaactcaggcaaaagttacttttacaatgatctaggaaaagagcatttaaaccaatagaaagaagaatttaaacttagaatgacccctgtaaaaaaggatatatrcatggtagaggtagaaattgaaaaaaaaattacttttattttagtcctttgtatcccgcagagtaacttttgttgatatcatagtgaaattcccccttctttagtaatatacctgtctagaatatctggcactggatatttctttattggatcagacctggccactggcaacactgagtttctaaaatcttgtttctttatgttataatagagcttttattcagaaatatagaagagtccccgtatcaccttttcttcatgttcttctgtctgtgataagccttcattacagctctgata

SEQ ID NO: 89633 - DNA, 600 bp, Chicken  19866894396477_1
agttaaactgagctttctcaattctggctctgaaatgaacagtggatttaaggaagccgcaggggaggcgtggggctcgatcctgccagctgcactgcacactgacctcagcctggcacagagggaaggcactgctccatgagaacgctttggttgtgaaacttgcatacagaaataactaggaaagaaaacaacactgtcaggtgtttactcacagactagacagtattactgaaggcagcggtttcctggcatacaaccaccactacattgttacaggtcaacagataaagcaaaaayccagcctaagcctctcattagttgtgagagaaaaaaatgcatcaaaagtgacactacagagatcagtcagcactcaaacgctagagggacagcgcccaccttcctaatccaaaagtaggcattctaatggatattacctcccttcacctcctgaaagagtggtttcaaggacttcagagaatacactaatcagcatctgaggagagatggcggcataaattatctcaaggtgctatcaagattcatcccaacgcacccgtgatcaggagtcatgatttttccatttctatttatcccctc

SEQ ID NO: 89634 - DNA, 600 bp, Chicken  19866894396483_1
caatgagacattacatgctgtaagaatactgcaagagttttggagagctctccaaaggagaaaggcaaagcacagcccgctgggaatactggaatgatttgccattcaaaagagctcctgcaaatgccctttgtgccactgctactgtaacaggccacagccagctgtatttactgcccaacattaagggcaaattatgccatttgagctcattgggaggttttgggcatgctttcacacaaatctctctcagaactgcttgacaccactaaaagattacagctccagcagaggctttaraggcttcaatgacatcaaactacaaggagtccaatttcactcccttagcagtgtttgcctacctactgctggtcctggcacagacaccgcagcagcatctaaatcatctatgctatctaaaactttcttcatgttttagacatcatttcctttttaaagtgataataccaatacttcttgagaaacggtattgcgaactactagttaaagaaataaatttttatcttcattggctgtttgagcatatgaagaatttgttgacctgcagcttcttctctaaaagtcttcctcatcttctgg

SEQ ID NO: 89635 - DNA, 600 bp, Chicken  19866894396494_1
aaccaaatgaagctgcagctccaagactatcaggccaggcaatatgcagttttgtacttagttttatgggaaaacccaacaatcagaaattctctgtcgtctctgcagcacttgttattcttttcccagagaaactgtagacaaatatcgctttcagctctgctaaattcgtaacagaagaagtgaggaaactccatagagtgcaatgaaaatgttttaaaaatgcaaataaggagtgacatacaacagagaagaaagggaaagctttttcccagggagcatcaactccattatttgaaygtaatcccaatacatttataataaacccatttccttgaacaattcctcttctcttcgaatgaccctttaaaaagagctatagatcatggcgctactgtcttaacagctgacttctcactgtgactaacctgattgtattactgaaacacgtttaaaatgtatatacttcccacaaaacaggacaggaataaaaacctggtaatgtgagaatagccttgcatatctatcttaatctcaccaaatttaaacctgcttaacccaagtccttctcttcagaacgtacccagtgaagaagggagt

SEQ ID NO: 89636 - DNA, 600 bp, Chicken  19866894396521_1
ggctcacagccatccactggagtccctggttttgctcttcgatgctgctgcctcaaggggtgagttgcaatactttgttttgcaataggaaatggcctcttcctgaaagtgtaatgccacttcggctgctttttgggttgctggatctgcagaatggttggaacattctcccagaggagagaaagagtttgtcagtgctcccccaggagcatcccaggcacccagatggttgtgttaatgcagttaggaaagagttgaggcatttagaaagctgacagcaaggactgccttaatataccrctctcttccccagttcagctacagcttaagagtagtttccagcacagttgtgtgagatgtttagttagtatcctcccttactaggcaaccagttcttgtgggtccctagagtggctgcttgagacagatttgctgttagagtayaacacggtgcacatctcctgcctcgctgggtgctgtgagccgcagggagggctgtgtgaaaggatgctctggaagcaggtgggaattcaacctcacacgtctgctctgtttgtagaaaataccctgccttagtatttgcatttgtgtttctgcact

SEQ ID NO: 89637 - DNA, 600 bp, Chicken  19866894396521_2
atctgcagaatggttggaacattctcccagaggagagaaagagtttgtcagtgctcccccaggagcatcccaggcacccagatggttgtgttaatgcagttaggaaagagttgaggcatttagaaagctgacagcaaggactgccttaatataccrctctcttccccagttcagctacagcttaagagtagtttccagcacagttgtgtgagatgtttagttagtatcctcccttactaggcaaccagttcttgtgggtccctagagtggctgcttgagacagatttgctgttagagtayaacacggtgcacatctcctgcctcgctgggtgctgtgagccgcagggagggctgtgtgaaaggatgctctggaagcaggtgggaattcaacctcacacgtctgctctgtttgtagaaaataccctgccttagtatttgcatttgtgtttctgcacttacaaatctccctttacatatatcctgtcagaagcagtcagcaaacaggctttggcattattggagttgctcctcgatctgaaggaaaccataaatctgaaacttcaatcatatctttatgatcattcagcaaacagagatgga

SEQ ID NO: 89638 - DNA, 599 bp, Chicken  19866894396558_1
  misc_feature (1)..(225): n is any nucleotide
nnnnnnnnnnnnnnnnnnnnnnnnnnnnnnnnnnnnnnnnnnnnnnnnnnnnnnnnnnnnnnnnnnnnnnnnnnnnnnnnnnnnnnnnnnnnnnnnnnnnnnnnnnnnnnnnnnnnnnnnnnnnnnnnnnnnnnnnnnnnnnnnnnnnnnnnnnnnnnnnnnnnnnnnnnnnnnnnnnnnnnnnnnnnnnnnnnnnnnnnnnnnnnnnnnnnnnnnnnnnnnnnntagctttttttatcttatttaataaaaaacgaggtcactttgagactacattggcagagaaatgttggagagtgraatgtttggtttggttaaacccaagacagaatatctttctgtcttctaactattaagttggcagaattcattgtgaagaacatgagattcttagctctgggaatgcgtatcactgaaagaggagttaattgctggcaacataattcgtttttcattttatattagcgtttagctacaacttccttttccaggtggaccatgcagtatttgatacctctccttgaacatgacagcacagtgagtaaaccgcttgatgaaggttagctgtgtcaaaaagggggcaaaagcaaagaacaaga

SEQ ID NO: 89639 - DNA, 600 bp, Chicken  19866894396568_1
gtctagtaatttatggaataattatgaccatatttggagatgcctattccttacatttctgatctgtcctcctcccatatatcttgacaatgttgttgtaattcatgtatattgtaccgactgaatatatttaaagacagacaattcaatccagacaaatacattaaaaatataacacagctgtttggagctctagttctccatgggaatttaacagcagacattttgttagcaatgaaggaattctgcaattctaccctttattcctaatccaggagaccatgaacgatcatttgtacwgcatcgtcatctaaatctgcttaagcctctaaagaattcagttgatatatatatgaaatgctttatttcaagaagagggtggtaggtagcattatacgtacttgaaaataattcctcaacagcttaacccaatttaatttaaacatctagccttacttattacagttttctcagattttaattttctyagttcaaagaactacacaaatgtaggaatttatttccttgttagtttttaataattctttttaagactgtacattgcaakagtttaaatcttaaaatactttaaaatagtac

SEQ ID NO: 89640 - DNA, 600 bp, Chicken  19866894396568_2
agctctagttctccatgggaatttaacagcagacattttgttagcaatgaaggaattctgcaattctaccctttattcctaatccaggagaccatgaacgatcatttgtacwgcatcgtcatctaaatctgcttaagcctctaaagaattcagttgatatatatatgaaatgctttatttcaagaagagggtggtaggtagcattatacgtacttgaaaataattcctcaacagcttaacccaatttaatttaaacatctagccttacttattacagttttctcagattttaattttctyagttcaaagaactacacaaatgtaggaatttatttccttgttagtttttaataattctttttaagactgtacattgcaakagtttaaatcttaaaatactttaaaatagtacaagactattattccacaaggcttagtatttcctagagcagcaatattaacaagtaaagagcacaattagtggaagtcggcacatgtaacatataaacctacctgcgtgttgtgattcattatcatctaaaaacaattccatcagaactgacatggccattcactttctgaaaacagctcattttcaaa

SEQ ID NO: 89641 - DNA, 600 bp, Chicken  19866894396568_3
aatccaggagaccatgaacgatcatttgtacwgcatcgtcatctaaatctgcttaagcctctaaagaattcagttgatatatatatgaaatgctttatttcaagaagagggtggtaggtagcattatacgtacttgaaaataattcctcaacagcttaacccaatttaatttaaacatctagccttacttattacagttttctcagattttaattttctyagttcaaagaactacacaaatgtaggaatttatttccttgttagtttttaataattctttttaagactgtacattgcaakagtttaaatcttaaaatactttaaaatagtacaagactattattccacaaggcttagtatttcctagagcagcaatattaacaagtaaagagcacaattagtggaagtcggcacatgtaacatataaacctacctgcgtgttgtgattcattatcatctaaaaacaattccatcagaactgacatggccattcactttctgaaaacagctcattttcaaattttcattagaaattagcaaatttgtcatgttctctgaactgagtagctgaaaatatcattaaaatagcactactgattt

SEQ ID NO: 89642 - DNA, 599 bp, Chicken  19866894396580_1
  misc_feature (1)..(28): n is any nucleotide
nnnnnnnnnnnnnnnnnnnnnnnnnnnncctgcttgatctggaactgaagtgtggaactagaaaatcctggatttagataatactgctccctcttaagatttcctccctctgtttctgcagaggttatctgtagtttgcaatactcaatactgtggctatcagcttccaggctcagctgggctctgtggccccagaacttctcacaagccttgaaactggtgatggaagtgtctgcaggggccccatccatcaagccaaaagtctgggcctgatttggcatggtcaactttttgctctaygaggaagttttactatgataaagttttgggcttctctgaagaggatgtactttccagggccttcactcttcaaaatccccagctctttaatgtgtcatcagggctcagtgcaaatgagttaactccttgctcttctctcagtcccaaagytgcatctccctttccccagaagaggccttgcgccttctatgagaggggaaaagtctgttrcctccattccaggtggggtttcctagaaatattcattattactccactggcttgttcttattaacaacagtggaagctctagaatggat

SEQ ID NO: 89643 - DNA, 583 bp, Chicken  19866894396580_2
ctgtggctatcagcttccaggctcagctgggctctgtggccccagaacttctcacaagccttgaaactggtgatggaagtgtctgcaggggccccatccatcaagccaaaagtctgggcctgatttggcatggtcaactttttgctctaygaggaagttttactatgataaagttttgggcttctctgaagaggatgtactttccagggccttcactcttcaaaatccccagctctttaatgtgtcatcagggctcagtgcaaatgagttaactccttgctcttctctcagtcccaaagytgcatctccctttccccagaagaggccttgcgccttctatgagaggggaaaagtctgttrcctccattccaggtggggtttcctagaaatattcattattactccactggcttgttcttattaacaacagtggaagctctagaatggatgaagggatggctttcaacagaattttgattaagaggtactgtaatgtgtaagagagaatcttgtttcatccccacgagagctcagtgtttgagcgttagatggcagtgttagcaaagaggagacattgaaataa

SEQ ID NO: 89644 - DNA, 523 bp, Chicken  19866894396580_3
ttgaaactggtgatggaagtgtctgcaggggccccatccatcaagccaaaagtctgggcctgatttggcatggtcaactttttgctctaygaggaagttttactatgataaagttttgggcttctctgaagaggatgtactttccagggccttcactcttcaaaatccccagctctttaatgtgtcatcagggctcagtgcaaatgagttaactccttgctcttctctcagtcccaaagytgcatctccctttccccagaagaggccttgcgccttctatgagaggggaaaagtctgttrcctccattccaggtggggtttcctagaaatattcattattactccactggcttgttcttattaacaacagtggaagctctagaatggatgaagggatggctttcaacagaattttgattaagaggtactgtaatgtgtaagagagaatcttgtttcatccccacgagagctcagtgtttgagcgttagatggcagtgttagcaaagaggagacattgaaataa

SEQ ID NO: 89645 - DNA, 599 bp, Chicken  19866894396581_1
  misc_feature (1)..(74): n is any nucleotide
nnnnnnnnnnnnnnnnnnnnnnnnnnnnnnnnnnnnnnnnnnnnnnnnnnnnnnnnnnnnnnnnnnnnnnnnnntatatttattttaagatgttgagatgcaagtggctgccctgtctcagggatgagcatagaggttgatttatttatgctgcattcactagtcttacagtgtgagatactgtttttattgctgacctcgcagaattacttccttcacaaaagaatatatgttctctttccatatcaaaatattaagatctgaatttgaaaatattaagtagaattaagtgggcgtgcrtgtccaaaggaaactgctagatatgagtcatcatgagccaygtcttaattaggtagaagacatgaaacagctttggtccagaataattatctgtacatatatagaaatgcctgtttcagacttgaggtgaataaatagatatgaatggctgaggttccaccaaaactcttcctccactctgtgcaggcagcagcgagcgaggggccctggattagctctggggcttcaaggtgcagggatgcaggaggggtggaggttgttagaaacagcccaaagagcttacaacagagctgagrcta

SEQ ID NO: 89646 - DNA, 599 bp, Chicken  19866894396581_2
  misc_feature (1)..(33): n is any nucleotide
nnnnnnnnnnnnnnnnnnnnnnnnnnnnnnnnntatatttattttaagatgttgagatgcaagtggctgccctgtctcagggatgagcatagaggttgatttatttatgctgcattcactagtcttacagtgtgagatactgtttttattgctgacctcgcagaattacttccttcacaaaagaatatatgttctctttccatatcaaaatattaagatctgaatttgaaaatattaagtagaattaagtgggcgtgcrtgtccaaaggaaactgctagatatgagtcatcatgagccaygtcttaattaggtagaagacatgaaacagctttggtccagaataattatctgtacatatatagaaatgcctgtttcagacttgaggtgaataaatagatatgaatggctgaggttccaccaaaactcttcctccactctgtgcaggcagcagcgagcgaggggccctggattagctctggggcttcaaggtgcagggatgcaggaggggtggaggttgttagaaacagcccaaagagcttacaacagagctgagrctataaagaygagtgctcctggctgcrtgctgtctgacagactc

SEQ ID NO: 89647 - DNA, 600 bp, Chicken  19866894396581_3
tgcrtgtccaaaggaaactgctagatatgagtcatcatgagccaygtcttaattaggtagaagacatgaaacagctttggtccagaataattatctgtacatatatagaaatgcctgtttcagacttgaggtgaataaatagatatgaatggctgaggttccaccaaaactcttcctccactctgtgcaggcagcagcgagcgaggggccctggattagctctggggcttcaaggtgcagggatgcaggaggggtggaggttgttagaaacagcccaaagagcttacaacagagctgagrctataaagaygagtgctcctggctgcrtgctgtctgacagactcatttcagtgaagtgacaaaataaaattacgctgtgaggaagctgttgcagcgaccacttactgggamgaaggatggcagcttggcctataagagagcaaactccttyaagcaactgcagattagaggactaacactcctgcatcagagagaagtgctcttgctgagctctttataaataagtattttcaaagggaggagctgaaggatgtggaacagcttgtgagctctgggctgcccgggagcgtttcagcagca

SEQ ID NO: 89648 - DNA, 600 bp, Chicken  19866894396581_4
aaggaaactgctagatatgagtcatcatgagccaygtcttaattaggtagaagacatgaaacagctttggtccagaataattatctgtacatatatagaaatgcctgtttcagacttgaggtgaataaatagatatgaatggctgaggttccaccaaaactcttcctccactctgtgcaggcagcagcgagcgaggggccctggattagctctggggcttcaaggtgcagggatgcaggaggggtggaggttgttagaaacagcccaaagagcttacaacagagctgagrctataaagaygagtgctcctggctgcrtgctgtctgacagactcatttcagtgaagtgacaaaataaaattacgctgtgaggaagctgttgcagcgaccacttactgggamgaaggatggcagcttggcctataagagagcaaactccttyaagcaactgcagattagaggactaacactcctgcatcagagagaagtgctcttgctgagctctttataaataagtattttcaaagggaggagctgaaggatgtggaacagcttgtgagctctgggctgcccgggagcgtttcagcagcaggacaggaat

SEQ ID NO: 89649 - DNA, 600 bp, Chicken  19866894396581_5
tgagtcatcatgagccaygtcttaattaggtagaagacatgaaacagctttggtccagaataattatctgtacatatatagaaatgcctgtttcagacttgaggtgaataaatagatatgaatggctgaggttccaccaaaactcttcctccactctgtgcaggcagcagcgagcgaggggccctggattagctctggggcttcaaggtgcagggatgcaggaggggtggaggttgttagaaacagcccaaagagcttacaacagagctgagrctataaagaygagtgctcctggctgcrtgctgtctgacagactcatttcagtgaagtgacaaaataaaattacgctgtgaggaagctgttgcagcgaccacttactgggamgaaggatggcagcttggcctataagagagcaaactccttyaagcaactgcagattagaggactaacactcctgcatcagagagaagtgctcttgctgagctctttataaataagtattttcaaagggaggagctgaaggatgtggaacagcttgtgagctctgggctgcccgggagcgtttcagcagcaggacaggaatcatgcttagtgactgca

SEQ ID NO: 89650 - DNA, 600 bp, Chicken  19866894396581_6
tgcctgtttcagacttgaggtgaataaatagatatgaatggctgaggttccaccaaaactcttcctccactctgtgcaggcagcagcgagcgaggggccctggattagctctggggcttcaaggtgcagggatgcaggaggggtggaggttgttagaaacagcccaaagagcttacaacagagctgagrctataaagaygagtgctcctggctgcrtgctgtctgacagactcatttcagtgaagtgacaaaataaaattacgctgtgaggaagctgttgcagcgaccacttactgggamgaaggatggcagcttggcctataagagagcaaactccttyaagcaactgcagattagaggactaacactcctgcatcagagagaagtgctcttgctgagctctttataaataagtattttcaaagggaggagctgaaggatgtggaacagcttgtgagctctgggctgcccgggagcgtttcagcagcaggacaggaatcatgcttagtgactgcatgagaaagtcttgatagataaatctctctataagtgctccttctgcagaaagtccccacagacagaccgtgtttttctaagtga

SEQ ID NO: 89651 - DNA, 600 bp, Chicken  19866894396581_7
gctgaggttccaccaaaactcttcctccactctgtgcaggcagcagcgagcgaggggccctggattagctctggggcttcaaggtgcagggatgcaggaggggtggaggttgttagaaacagcccaaagagcttacaacagagctgagrctataaagaygagtgctcctggctgcrtgctgtctgacagactcatttcagtgaagtgacaaaataaaattacgctgtgaggaagctgttgcagcgaccacttactgggamgaaggatggcagcttggcctataagagagcaaactccttyaagcaactgcagattagaggactaacactcctgcatcagagagaagtgctcttgctgagctctttataaataagtattttcaaagggaggagctgaaggatgtggaacagcttgtgagctctgggctgcccgggagcgtttcagcagcaggacaggaatcatgcttagtgactgcatgagaaagtcttgatagataaatctctctataagtgctccttctgcagaaagtccccacagacagaccgtgtttttctaagtgatatttattgtgttttcagagcacctcagcctaagattatt

SEQ ID NO: 89652 - DNA, 600 bp, Chicken  19866894396586_1
gaatttcacacaccatttggaaagcacggcagtgccattgctgattttcttcagtacttcaggagcaatgttcaattacaaaagggaacattactattttggttttggttgtagatacttttacatgacattatcagtctttattgaattctgttttattgtactgctactaatagcgtacttacacactatagtgtatgacgtgtactttgcactaaaagtgtactgaagtgtacttacacactttatagagtaaaagagatgagattttaacaataccagaagttctttaatggacartggagcacaaagagacaccagtttgaaggttatgtttggtttcagacgcttctttgccatagagaagcaggaactgctatgcaggagtgaatcagcccacctcgtctacatccagacttcaactctgctttgtatttggacacgtgagaggactggaccaggaaatcaggcatgaacttgcctccaggaaatttcccaatacccaacagacaaaggatgtccaacatccaatatataaaggatggcatataggtttacaaatcttttaattctcctcagttctgtagcatttactgctgt

SEQ ID NO: 89653 - DNA, 600 bp, Chicken  19866894396588_1
tgcccaggatgcctgccacaaagatgcagatgtcgagcaaggccagagtgatcttgatccaaggagatacctcaaactcagagatgtggctgtggtcaatgagatgagaacagtctgaagaggatgtctgtccagccatcagcaacctcgaggaaaagggaggaaaagcctctccgatgtttgatatcacagcaaatcaatcttttctcaccttgccccctacacaaatatgcacaagtctgagcagtcaggtacaacgaaattgtctcaactagccacacctgtgggtttttttttttkttttktttttagcaacaactgttgagtcaatgatctaagtgggaaagaaagtatctcggtgcttaccaatctttacagcaaacagttcttgctctttttggattttcctcctcttttctctattgcgtgaagctactgctccccagcccctccgtgatgtgaactgctcctcgctcagctctcatctcttcctctgcgagcagaggcagttttctgtcctgacctcagtaggaggaagtcagagtttctgtgtggcctggttaaccattaacttaaatcttgcctgtccccagtcactgg

SEQ ID NO: 89654 - DNA, 600 bp, Chicken  19866894396588_2
aggatgcctgccacaaagatgcagatgtcgagcaaggccagagtgatcttgatccaaggagatacctcaaactcagagatgtggctgtggtcaatgagatgagaacagtctgaagaggatgtctgtccagccatcagcaacctcgaggaaaagggaggaaaagcctctccgatgtttgatatcacagcaaatcaatcttttctcaccttgccccctacacaaatatgcacaagtctgagcagtcaggtacaacgaaattgtctcaactagccacacctgtgggtttttttttttkttttktttttagcaacaactgttgagtcaatgatctaagtgggaaagaaagtatctcggtgcttaccaatctttacagcaaacagttcttgctctttttggattttcctcctcttttctctattgcgtgaagctactgctccccagcccctccgtgatgtgaactgctcctcgctcagctctcatctcttcctctgcgagcagaggcagttttctgtcctgacctcagtaggaggaagtcagagtttctgtgtggcctggttaaccattaacttaaatcttgcctgtccccagtcactggtagca

SEQ ID NO: 89655 - DNA, 600 bp, Chicken  19866894396590_1
caatgtgtgtgtcctgatggctctgcatagaggacagcctaatcttatcgctgaaagactcatgctggaaatatgtaagagcctgctcactttcatcactcaattcagtaatccaagttgtttgggtacattttggagatttctagcacttgatacataaacttatttttaagcccaattcatgaatcaagatttagtctttgggcctgaggactaggctttctcaaaaattatttgatgcaaaattattaatgagctacacaaattgcttttggtgataccagatccagactttgtccygtctttcagtgattttaagtcaagctcaagggtctttggatgtccgtcattagatctacccaaagaacataaatctgcactgctctttcatcttctaacttgcaacccacaactgcataggtaaaagcaccttcaactgtactcctcccgcatcaaagatttatatcaacagacatatgggagaagagcagaagcctatgttgtcctgcctcatgctttttcttgtactgcatgaattagtcagggagcttttctcaacattctcagctgaagaatcaatatgcaggtgctctcactcca

SEQ ID NO: 89656 - DNA, 600 bp, Chicken  19866894396591_1
gaatatcaccaaaaaagagatgattcatcactggaccatcagcagagaggcccataggccatcttggatgtgggatcacatgagaagtcaggtttggaaagcaaaagcttcatccctatcctgcgcgttcagttcaaatgagagcagaaagtacagactgttactctatgtgacacgaaaggaaattaatctaagccacagtcattctttcctcttctcctctacacctcctattgacctgaagaggggagttttcttttcttacttatgcaacataatttgctgtgccctggggaaggrcaagatgcttctttgtgctggggtctccccagagcagcaccagtggaaggcaatcatgatgctggcaatgctctttccatccctgaagagttaactaattctgttcccctattgttgctcagctgggctttccccgggactcacggcatggcagggcttgtcatgctctgaaaaggagtttgcttcctggtaacagagccatccattagctctcatagctgttgtgcttgaactgaaagctctgtgctctaaagcccagcaggaggagataattagcactagattgtgtattctgggcaa

SEQ ID NO: 89657 - DNA, 600 bp, Chicken  19866894396594_1
tatctgtgttatcttaccttaagctgtaatggagtccttcctgcacctatttcaggggacaaagcaattcagcaacacaaaaggaatgaaaaattccgcatgtcactgaaaggataggacactgaagcggtggtgaagaagcacctcacattgaaactcatcaaggatcaagatcactcttttcttaagggactcatttaggaatctctggaatgctctaaactaatcttatgttttgatcaaagtcttcctttctaagggcatactggtccctctgctgctcagctggtcacttgacaktctctagaaggatgttgctgttcctggtatttgatgtttcckgatgccctccctcagctacttcaaactggatttagtttgttaacccaagcagcagcagaagtgctcctgccattaagtgctgtttggtgaaagtttctgctaacaggccccatggaaagctccggcacagcaaggctgagaaaaacaagtgcaagttttcttccagatctggtgagcaagatagcgagcaccacgcattgtgggttactctacacatcatttcaaagagaggtgtgccatctgttccatcctctaatt

SEQ ID NO: 89658 - DNA, 600 bp, Chicken  19866894396594_2
gcacctatttcaggggacaaagcaattcagcaacacaaaaggaatgaaaaattccgcatgtcactgaaaggataggacactgaagcggtggtgaagaagcacctcacattgaaactcatcaaggatcaagatcactcttttcttaagggactcatttaggaatctctggaatgctctaaactaatcttatgttttgatcaaagtcttcctttctaagggcatactggtccctctgctgctcagctggtcacttgacaktctctagaaggatgttgctgttcctggtatttgatgtttcckgatgccctccctcagctacttcaaactggatttagtttgttaacccaagcagcagcagaagtgctcctgccattaagtgctgtttggtgaaagtttctgctaacaggccccatggaaagctccggcacagcaaggctgagaaaaacaagtgcaagttttcttccagatctggtgagcaagatagcgagcaccacgcattgtgggttactctacacatcatttcaaagagaggtgtgccatctgttccatcctctaattacaaaatataacccaaacataactcataattgaatcataaaa

SEQ ID NO: 89659 - DNA, 592 bp, Chicken  19866894396597_1
tttaaaaaataccttgctaactgtatatcgcaccaggtaaactatatccaactgcatcaaataccataaatgctgttcaggggaaagatggaagttcctgggattccatccttactgtgggcatgagctcagacaggctcttgtagggagaggcgtgcgcaggaattgtttcggtgctgctgtcttgaagttgcatttggcagttcagcttccttcagagccggtctgcctctgcagctgggaaaaggtcaaaagccacaagaaaagtattcaaatttcttttctttcctcagatcagcrttggcattttgacataatacactataagttggttactgcctgcgctgtctgtaagaagttattactaatggaaatctgaaaccttagttgttaaaaaaacataaaagcaaagctggagagaaatgttcagtgctattgcaagttatttctccagggtgacagtgatggctttctcacttgtgtgagatctgttgtgggagcttgaaatggtgttggagttatttcccagctttactgtagaaaagagcaactctaactgttggtgagagatgtttttttctccctgtccaca

SEQ ID NO: 89660 - DNA, 599 bp, Chicken  19866894396604_1
  misc_feature (1)..(21): n is any nucleotide
nnnnnnnnnnnnnnnnnnnnntttcttgtgtatggatattcattttcagatcggtttccatttctaaaaaaaaatcttgcatcttttattaaccatctgtgagtcatggcatattttagatggaatagtatgtcagatgtatttcatttaaatgagggtctttattccccatacatattggcatctttggtctgttaccacttaccgtactccttgaggtagactgcgtagtttttttaacgttgcagtatcatgtctgtttcctgaatgtatacaagaccatcgatactgaaaagcatrtatactggatcrgactgcaagtctgttgagttagtgtccaaccttcaagtggtcaaaaccagatacctggagtcaagcacgttaggagaagcctgtatgataagtcctggtaatacagccacctccaaccactygtctctcaacggcttcataagacaaaggggaattctgtggattcaataaatgtacagtatttacaataatgtctttcaaaccccgtggttgcccatagattttgtcttcaaagccaacacattctgaaatgctatgctataattagaagtaatcatcttccacgt

SEQ ID NO: 89661 - DNA, 599 bp, Chicken  19866894396604_2
  misc_feature (1)..(9): n is any nucleotide
nnnnnnnnntttcttgtgtatggatattcattttcagatcggtttccatttctaaaaaaaaatcttgcatcttttattaaccatctgtgagtcatggcatattttagatggaatagtatgtcagatgtatttcatttaaatgagggtctttattccccatacatattggcatctttggtctgttaccacttaccgtactccttgaggtagactgcgtagtttttttaacgttgcagtatcatgtctgtttcctgaatgtatacaagaccatcgatactgaaaagcatrtatactggatcrgactgcaagtctgttgagttagtgtccaaccttcaagtggtcaaaaccagatacctggagtcaagcacgttaggagaagcctgtatgataagtcctggtaatacagccacctccaaccactygtctctcaacggcttcataagacaaaggggaattctgtggattcaataaatgtacagtatttacaataatgtctttcaaaccccgtggttgcccatagattttgtcttcaaagccaacacattctgaaatgctatgctataattagaagtaatcatcttccacgtacctggaccagg

SEQ ID NO: 89662 - DNA, 600 bp, Chicken  19866894396604_3
agatgtatttcatttaaatgagggtctttattccccatacatattggcatctttggtctgttaccacttaccgtactccttgaggtagactgcgtagtttttttaacgttgcagtatcatgtctgtttcctgaatgtatacaagaccatcgatactgaaaagcatrtatactggatcrgactgcaagtctgttgagttagtgtccaaccttcaagtggtcaaaaccagatacctggagtcaagcacgttaggagaagcctgtatgataagtcctggtaatacagccacctccaaccactygtctctcaacggcttcataagacaaaggggaattctgtggattcaataaatgtacagtatttacaataatgtctttcaaaccccgtggttgcccatagattttgtcttcaaagccaacacattctgaaatgctatgctataattagaagtaatcatcttccacgtacctggaccaggtacaggagtgggagaagtatctcagtaacctagtttcaatttggcttgaaagaaacagtgataggagaagtaacagccatttccaaattcagaccacatctgccaccaaatgtgcccacagac

SEQ ID NO: 89663 - DNA, 600 bp, Chicken  19866894396606_1
aactgctctacttgtgatatttcattcaaaattaatgacagccaacctggcagaaagagaattttgaaataaaaaatataggccaagaagcttttatgttgacttatcaattaaggtttttcacaggaactgattgcctcagatcccagaaacatttgaactgacacatattccattttgtcaacattagaaatgcagctcagattcattaaagtactttaattatttttttcttcctgaagtcattctgaagacaaaatagatcgaatgttttgtatttgatataaatgtgatagtatytcatgaatctgtctcctatctgcatagacctatggtgcattgagcctctgacagaaaacacttacaaatagtctgcagtctagttcactctacccaaatattaaagcagattactacaatatggatggaaaaggtgatgcaaggcttcactggaaaccaaacattttgatacagaacacttataataggttctagtataagaaactggcttctaagatggccacttacaatcactgcaactcaggggttcagtgctgtctaatatcttcattaataaggtggagtacaagtggctgagag

SEQ ID NO: 89664 - DNA, 600 bp, Chicken  19866894396608_1
agaaaatgcccatcacagatttccaatactctgacagtaggaaatatgtaatatttttcttggatattgttggaataaaatgcagatgtagatatgagtcaaacacagagaataggcatagcaaaatgtagttgatattttagaagatgaaatgtaagtcttattttattttataagatttacataatctttgattctccatgaatttcagagtacaattttaatgaagggtaaatctattttgcaaataatcattaaaatttcactagaatttttgtagatgtctcagtgttgtgatckatccttaactctggtgtacttatcttctggtaaagattctcactcacccctcaccaatcactgtctcgaaattttggaaattattgaaaatctttgtagttcttttgaagaaagaacattaatatcctactgtgaattatttcagttgtcatccatataataattattcaagaattctggtcacctgagaaaatgctgaaagaaccaactactcatttatcctcttgtaaaaagtatatccgacttccttgctgttgatttgcctactaacagcttctgttaacttcccatatttcccag

SEQ ID NO: 89665 - DNA, 600 bp, Chicken  19866894396614_1
agtgctttagcagtgacttcagagcttatgaggttagtgagttgcacagtggctgagaactgtgttgtttcagattagttagaacagaactaaagaaagaattaacttgacaaaaagggtctgtaaagaagagtaacatcctactagtctgcaggaattgcacagggctggacagaaattgtatctcctctgcatatctgtaagactgttttgaaatgttgtgccaggaagagtaggactcagacaaactccaagttctggcctgaacaaaatgtatatgtgatcattgcattaataaaracgtaataaaaaatgcttcttagaattctaaactatttaaattttaatattcactctgggcaacatgaaattctcataagtacattttcagaaacatctgagttgtcaacatttgatctcttttttttttctttaataatttcagttattcctccagtgaaattgcagaaacatcaggctttgtactatattccattttgaagtcttctttcccattgtagagggatacaaatattactttatatgttgttttctamgcaaaggagcagtaggaatgtcatggtatttttgtagctttca

SEQ ID NO: 89666 - DNA, 600 bp, Chicken  19866894396614_2
ctggcctgaacaaaatgtatatgtgatcattgcattaataaaracgtaataaaaaatgcttcttagaattctaaactatttaaattttaatattcactctgggcaacatgaaattctcataagtacattttcagaaacatctgagttgtcaacatttgatctcttttttttttctttaataatttcagttattcctccagtgaaattgcagaaacatcaggctttgtactatattccattttgaagtcttctttcccattgtagagggatacaaatattactttatatgttgttttctamgcaaaggagcagtaggaatgtcatggtatttttgtagctttcatgttgtcatctgtggaatgatgaatctgacttctaacattacactaactcagctatattttcctgtcaactggcagatcttttgtgtgtgcccagtgttccatagattcatcttgtccttgactcagtctccatgaggcagtttcctggaaggtcagagtgargtaaaacagatgtatggaatgggaggggaggatattcaaaacttccagattttgctacaatttctcttgcagttcaggtagaggctaaaagact

SEQ ID NO: 89667 - DNA, 600 bp, Chicken  19866894396614_3
tgcagaaacatcaggctttgtactatattccattttgaagtcttctttcccattgtagagggatacaaatattactttatatgttgttttctamgcaaaggagcagtaggaatgtcatggtatttttgtagctttcatgttgtcatctgtggaatgatgaatctgacttctaacattacactaactcagctatattttcctgtcaactggcagatcttttgtgtgtgcccagtgttccatagattcatcttgtccttgactcagtctccatgaggcagtttcctggaaggtcagagtgargtaaaacagatgtatggaatgggaggggaggatattcaaaacttccagattttgctacaatttctcttgcagttcaggtagaggctaaaagactaaattcaaagtctagatgcargttggcaccattaaatrccaagattagtttgtggtttcctacagagaaagtgtgttatcctgctggcttctttgcagttttttttcttgccctgtgtggtgcaggtgcctaaatgctagcgaaggggagctgcaggtctcctgtgtgaggaaagactggggctgccctgtgtcagatacagctgg

SEQ ID NO: 89668 - DNA, 600 bp, Chicken  19866894396614_4
catggtatttttgtagctttcatgttgtcatctgtggaatgatgaatctgacttctaacattacactaactcagctatattttcctgtcaactggcagatcttttgtgtgtgcccagtgttccatagattcatcttgtccttgactcagtctccatgaggcagtttcctggaaggtcagagtgargtaaaacagatgtatggaatgggaggggaggatattcaaaacttccagattttgctacaatttctcttgcagttcaggtagaggctaaaagactaaattcaaagtctagatgcargttggcaccattaaatrccaagattagtttgtggtttcctacagagaaagtgtgttatcctgctggcttctttgcagttttttttcttgccctgtgtggtgcaggtgcctaaatgctagcgaaggggagctgcaggtctcctgtgtgaggaaagactggggctgccctgtgtcagatacagctggctgggcctggttctaacagccccacagcagggctcagctgggcccaacagctatcccgacacatcttattttagaaaggacaaacactgcatggcagaaagtgaagtgaggaaaa

SEQ ID NO: 89669 - DNA, 600 bp, Chicken  19866894396614_5
tttcatgttgtcatctgtggaatgatgaatctgacttctaacattacactaactcagctatattttcctgtcaactggcagatcttttgtgtgtgcccagtgttccatagattcatcttgtccttgactcagtctccatgaggcagtttcctggaaggtcagagtgargtaaaacagatgtatggaatgggaggggaggatattcaaaacttccagattttgctacaatttctcttgcagttcaggtagaggctaaaagactaaattcaaagtctagatgcargttggcaccattaaatrccaagattagtttgtggtttcctacagagaaagtgtgttatcctgctggcttctttgcagttttttttcttgccctgtgtggtgcaggtgcctaaatgctagcgaaggggagctgcaggtctcctgtgtgaggaaagactggggctgccctgtgtcagatacagctggctgggcctggttctaacagccccacagcagggctcagctgggcccaacagctatcccgacacatcttattttagaaaggacaaacactgcatggcagaaagtgaagtgaggaaaacagtgtgagaacaaatg

SEQ ID NO: 89670 - DNA, 600 bp, Chicken  19866894396629_1
gtggttgaacctggaaaaggtccgaagtagccgcaaataaatcaagtaatgttctaacttttaacaatgtcattctgatttcctgagttttttttcattctctgaattaaggctgctaggacaagatacattgttatcagcttgaaataagaatttatgttgcattaacatgaatattaataagagaaattaaattcccaaatttgttctagcaagataaaaagccaacagagtaatagcagaagagtggtagaagtcagaagaatagtaagagaactggtcctagaaaatcctgagagraacccccccagtaaaaactactattcaacttgttttttcataataatcagatrtcagggataatcagatctctagtttgtgtcaacagtctgtagaacttgtaccatctgggcactctttttcaaggatcctcttctgagagagaggacaattgctgctgtacctcactgctgggtgttgaaatcagagcctgccagaggaccaggtgtaggcaatggccggaggcagaggggatggaaagatgctcatgtgactgctcacaataagcccaatcagccaagaaagatgaaagcaggtgcc

SEQ ID NO: 89671 - DNA, 600 bp, Chicken  19866894396629_2
ctaacttttaacaatgtcattctgatttcctgagttttttttcattctctgaattaaggctgctaggacaagatacattgttatcagcttgaaataagaatttatgttgcattaacatgaatattaataagagaaattaaattcccaaatttgttctagcaagataaaaagccaacagagtaatagcagaagagtggtagaagtcagaagaatagtaagagaactggtcctagaaaatcctgagagraacccccccagtaaaaactactattcaacttgttttttcataataatcagatrtcagggataatcagatctctagtttgtgtcaacagtctgtagaacttgtaccatctgggcactctttttcaaggatcctcttctgagagagaggacaattgctgctgtacctcactgctgggtgttgaaatcagagcctgccagaggaccaggtgtaggcaatggccggaggcagaggggatggaaagatgctcatgtgactgctcacaataagcccaatcagccaagaaagatgaaagcaggtgcccagtgtttcttgtattggttttctctacctagggattcccttttcatggagga

SEQ ID NO: 89672 - DNA, 600 bp, Chicken  19866894396633_1
ttctgtgcagtctcctgactttctttgtgctggttttctcaatgatgtacccaatagaacatatctgtctttaagtttaggattaatttagcgtttgggaaaccttaaatcagaagaataatagctgtaacaaaaatacttgtttttatccttaggtacttttttaaacacaatccatgaaagggcaaagcatcttcctttctgccatattcattctaagttggaaatttatgccgttttctcaaatagattttctttgcagttaaaatagtttggttacaagcttgttttgcagaaaaygatgactatatccattttaacctcattttttttcccacgttccatgacaatacatatgaaaagtggatacattacttaccctctacacccaagtttcattaaaatactacccagcttaacctataatgcaatctaactcactataatatctaatgcacattataattactttttatgcttttcctgtcatgagtaatcaaaatcaatttactgaaaatgtgttttgttggggtttgcactggggaattgctttgcctgcagcaatccaggttgccatgacactatttcaaaaatgtcctt

SEQ ID NO: 89673 - DNA, 600 bp, Chicken  19866894396635_1
ctataaatcttcttgcattcaaatataagctaggcactatctaataagaattcagaagaaattttccctgtaggcagattttcaatagagattttagtatatttttctgatatatccaatcctgactactgaagatgaaataaacggacagaggcttgactcgttataacaaattctgtatatttacatgttcttaaagactacttgggccttgaaaattcagtcagactggaggcatttcaaaattgctattgatgtgaaaaagggttcacttcaacatttcaaaatgtaaaatagaartagggcatatatccacattaaaagtaggctaagtttgaatgagagtatgcttgctgcattccctctttttttttttttttttttttttttttttttccctgtattcttgatggattgttgtctgagtgctctagacataacacatgcagagctatttgatatccatcatttggtctactgtagcctgcaaaacattttactctagaaagccttagaataaagctttagcttaaaatgtgagatcatagatctgtcaaagcagatctgcagtacacgtgaaaatctgttgtggaaaatact

SEQ ID NO: 89674 - DNA, 600 bp, Chicken  19866894396635_2
tgcaaaacattttactctagaaagccttagaataaagctttagcttaaaatgtgagatcatagatctgtcaaagcagatctgcagtacacgtgaaaatctgttgtggaaaatactttactgaaaaagttttcattttcatagtgctcaaatttgatcagctaaatggtattttatttgtttcccatataagagataatcattttcccaaagaatataaaggttcaagtaaatattttagcagctgttcattctgctctgcttttacatgtgctacttttcaagtaagaaagtcctacttycaaaggcatatcaaccaaataattttctgccaccatgtaacttgggaaaacaaacaaacaaataataataattataataaaaacattacaaaaaccccacagaagaaattcaattttctttagctctaataatgactatttatgtcattacttatatgcatgagttaactgctaagataggctttgcagagacttaggtagagatcatggaatcatagagtggcctgggttgaaaaggaccataatgaacatcgagtttcaacccccctgctatatgcagggtcgccaaagtataaaagt

SEQ ID NO: 89675 - DNA, 599 bp, Chicken  19866894396638_1
  misc_feature (1)..(124): n is any nucleotide
nnnnnnnnnnnnnnnnnnnnnnnnnnnnnnnnnnnnnnnnnnnnnnnnnnnnnnnnnnnnnnnnnnnnnnnnnnnnnnnnnnnnnnnnnnnnnnnnnnnnnnnnnnnnnnnnnnnnnnnnnnnncccaacttgcaacacacttgtttgtgcagcccggcacagcattcgcagcttttgcaatgcgagaatctggctgactcacagcctgtttgggtgccaaacccttccgtgcagatccactgcctgccaatcaccgtcccctttccattccgcacctggctgttctcatcatgaccagrgtctgcatttgccccagctgaactgcatccaaggcttcctaacagtattctgtcagcttgtcacacacttccaatactgagtgaccaccaaaagaagacccatttcacaatgctacccagaactcatctcagaaatggtcaaaaaccagaaaattctgcaagtctgctgaaagaatctgcagaaaccctgtaactacctgtaaatagaacattttatcttgaaccatatattacactcaaacaaaatagccaaacaactgtgctcccctttcaggggatttctagtagtccattacttt

SEQ ID NO: 89676 - DNA, 599 bp, Chicken  19866894396646_1
  misc_feature (1)..(105): n is any nucleotide
nnnnnnnnnnnnnnnnnnnnnnnnnnnnnnnnnnnnnnnnnnnnnnnnnnnnnnnnnnnnnnnnnnnnnnnnnnnnnnnnnnnnnnnnnnnnnnnnnnnnnnnnntgctgcgattactgtgtgcctaattctttctttgtctattctgcatctgcaccagagaagccattatggaggtgtaattaccaaatttgaacaaaagaaaagaaaaattattgaaaaagtttatttttatgtattctcaaatactgaagtattgatttaagtaacttattgcagaacttcaatagttttttggcrtgatgctccctgcagtctgtcaaagagaaatcctattaactcatcagtgaaccctcattttacctgatggcttaggttaatggcagagcacccaatacacataaaayggacttactccaggagttcaaaaacataccgaattaaggcttgcatccatacagaaccatgtccctctgcgaagtcgataacatgatcagcacaaatctgatctcaaacagtaagtaactgggatgtgaattaaagagtttttctgttccttaatatgggtgcaggcttcaggtataatttctaattcactg

SEQ ID NO: 89677 - DNA, 546 bp, Chicken  19866894396646_2
tgctgcgattactgtgtgcctaattctttctttgtctattctgcatctgcaccagagaagccattatggaggtgtaattaccaaatttgaacaaaagaaaagaaaaattattgaaaaagtttatttttatgtattctcaaatactgaagtattgatttaagtaacttattgcagaacttcaatagttttttggcrtgatgctccctgcagtctgtcaaagagaaatcctattaactcatcagtgaaccctcattttacctgatggcttaggttaatggcagagcacccaatacacataayggacttactccaggagttcaaaaacataccgaattaaggcttgcatccatacagaaccatgtccctctgcgaagtcgataacatgatcagcacaaatctgatctcaaacagtaagtaactgggatgtgaattaaagagtttttctgttccttaatatgggtgcaggcttcaggtataatttctaattcactgggaaaaagcagtgcctccaaactggcctttattaaccttaaagtccagactgca

SEQ ID NO: 89678 - DNA, 599 bp, Chicken  19866894396655_1
  misc_feature (1)..(215): n is any nucleotide
nnnnnnnnnnnnnnnnnnnnnnnnnnnnnnnnnnnnnnnnnnnnnnnnnnnnnnnnnnnnnnnnnnnnnnnnnnnnnnnnnnnnnnnnnnnnnnnnnnnnnnnnnnnnnnnnnnnnnnnnnnnnnnnnnnnnnnnnnnnnnnnnnnnnnnnnnnnnnnnnnnnnnnnnnnnnnnnnnnnnnnnnnnnnnnnnnnnnnnnnnnnnnnnnnnnnnnncaggatgctgtatctgaagcagctctctctggagcaggcaacatttctgcaggtgtcttagcagcccttccaggtcgggtacagytcaggaaatgcaaaagtgcttgaaagtacttattccagacccagattatgctatgcttaaatgctacgtccagcgggatggctggttggactggatgatctcagaggtctcttccaatcttagtgattccaaggcacactccctgraygcctygcggtgacaagctcctccagcaccagtttcctcccctgggtcatggcaggtgagtgctccttgcagcacatgcacagcaaggagcagaacggaaagcacagcaccagagcagtgaggacaagcagcagggaatccacygtatttga

SEQ ID NO: 89679 - DNA, 599 bp, Chicken  19866894396655_2
  misc_feature (1)..(69): n is any nucleotide
nnnnnnnnnnnnnnnnnnnnnnnnnnnnnnnnnnnnnnnnnnnnnnnnnnnnnnnnnnnnnnnnnnnnncaggatgctgtatctgaagcagctctctctggagcaggcaacatttctgcaggtgtcttagcagcccttccaggtcgggtacagytcaggaaatgcaaaagtgcttgaaagtacttattccagacccagattatgctatgcttaaatgctacgtccagcgggatggctggttggactggatgatctcagaggtctcttccaatcttagtgattccaaggcacactccctgraygcctygcggtgacaagctcctccagcaccagtttcctcccctgggtcatggcaggtgagtgctccttgcagcacatgcacagcaaggagcagaacggaaagcacagcaccagagcagtgaggacaagcagcagggaatccacygtatttgacaggggaatgtgaaagctgtgtgtttgtaggcatttgctggcagatacaaacacataaaacagaccctactgtttctctcaaaaattcaccactcaaaccaccaaaggatgcgctgagaggcaggaagaacattccctgtatgcat

SEQ ID NO: 89680 - DNA, 599 bp, Chicken  19866894396655_3
  misc_feature (1)..(67): n is any nucleotide
nnnnnnnnnnnnnnnnnnnnnnnnnnnnnnnnnnnnnnnnnnnnnnnnnnnnnnnnnnnnnnnnnnncaggatgctgtatctgaagcagctctctctggagcaggcaacatttctgcaggtgtcttagcagcccttccaggtcgggtacagytcaggaaatgcaaaagtgcttgaaagtacttattccagacccagattatgctatgcttaaatgctacgtccagcgggatggctggttggactggatgatctcagaggtctcttccaatcttagtgattccaaggcacactccctgraygcctygcggtgacaagctcctccagcaccagtttcctcccctgggtcatggcaggtgagtgctccttgcagcacatgcacagcaaggagcagaacggaaagcacagcaccagagcagtgaggacaagcagcagggaatccacygtatttgacaggggaatgtgaaagctgtgtgtttgtaggcatttgctggcagatacaaacacataaaacagaccctactgtttctctcaaaaattcaccactcaaaccaccaaaggatgcgctgagaggcaggaagaacattccctgtatgcatca

SEQ ID NO: 89681 - DNA, 599 bp, Chicken  19866894396655_4
  misc_feature (1)..(62): n is any nucleotide
nnnnnnnnnnnnnnnnnnnnnnnnnnnnnnnnnnnnnnnnnnnnnnnnnnnnnnnnnnnnnncaggatgctgtatctgaagcagctctctctggagcaggcaacatttctgcaggtgtcttagcagcccttccaggtcgggtacagytcaggaaatgcaaaagtgcttgaaagtacttattccagacccagattatgctatgcttaaatgctacgtccagcgggatggctggttggactggatgatctcagaggtctcttccaatcttagtgattccaaggcacactccctgraygcctygcggtgacaagctcctccagcaccagtttcctcccctgggtcatggcaggtgagtgctccttgcagcacatgcacagcaaggagcagaacggaaagcacagcaccagagcagtgaggacaagcagcagggaatccacygtatttgacaggggaatgtgaaagctgtgtgtttgtaggcatttgctggcagatacaaacacataaaacagaccctactgtttctctcaaaaattcaccactcaaaccaccaaaggatgcgctgagaggcaggaagaacattccctgtatgcatcagctgt

SEQ ID NO: 89682 - DNA, 600 bp, Chicken  19866894396655_5
gggtacagytcaggaaatgcaaaagtgcttgaaagtacttattccagacccagattatgctatgcttaaatgctacgtccagcgggatggctggttggactggatgatctcagaggtctcttccaatcttagtgattccaaggcacactccctgraygcctygcggtgacaagctcctccagcaccagtttcctcccctgggtcatggcaggtgagtgctccttgcagcacatgcacagcaaggagcagaacggaaagcacagcaccagagcagtgaggacaagcagcagggaatccacygtatttgacaggggaatgtgaaagctgtgtgtttgtaggcatttgctggcagatacaaacacataaaacagaccctactgtttctctcaaaaattcaccactcaaaccaccaaaggatgcgctgagaggcaggaagaacattccctgtatgcatcagctgtgtgtgactgcccattttagcttgtgccactccctcagacacagatttgtcatagacacaaaaaacaactgatttccatgcatgtacctttaaaaactcctyttttttttttaattagctctccctctcactgcttagac

SEQ ID NO: 89683 - DNA, 544 bp, Chicken  19866894396655_6
gcaccagagcagtgaggacaagcagcagggaatccacygtatttgacaggggaatgtgaaagctgtgtgtttgtaggcatttgctggcagatacaaacacataaaacagaccctactgtttctctcaaaaattcaccactcaaaccaccaaaggatgcgctgagaggcaggaagaacattccctgtatgcatcagctgtgtgtgactgcccattttagcttgtgccactccctcagacacagatttgtcatagacacaaaaaacaactgatttccatgcatgtacctttaaaaactcctyttttttttttaattagctctccctctcactgcttagacctctacctttgctytcctcctttagatggaacacggaaagagttttattaggagccttcacctctttgctaagtctgagcacactgttcctataaatctaagacactttagcagggaaaccaaagaccaaagcagagccttctgcgtgacaaggcaaaggatcacactgcttagctcttcctccctggctgcatcctttctgctgt

SEQ ID NO: 89684 - DNA, 492 bp, Chicken  19866894396655_7
aatgtgaaagctgtgtgtttgtaggcatttgctggcagatacaaacacataaaacagaccctactgtttctctcaaaaattcaccactcaaaccaccaaaggatgcgctgagaggcaggaagaacattccctgtatgcatcagctgtgtgtgactgcccattttagcttgtgccactccctcagacacagatttgtcatagacacaaaaaacaactgatttccatgcatgtacctttaaaaactcctyttttttttttaattagctctccctctcactgcttagacctctacctttgctytcctcctttagatggaacacggaaagagttttattaggagccttcacctctttgctaagtctgagcacactgttcctataaatctaagacactttagcagggaaaccaaagaccaaagcagagccttctgcgtgacaaggcaaaggatcacactgcttagctcttcctccctggctgcatcctttctgctgt

SEQ ID NO: 89685 - DNA, 600 bp, Chicken  19866894396665_1
ccccgtgggccttatccctttcattggaacctgttttttgttgctgcagttcactttttgaaatgagcgacagaagtctttctcactttagtcgataaaatacaaaaaataaaaaagaataaataaatgagagagagagcttcattgaggatttctgcagcggtcaaatctgtcctcacttgtgaacatccctcactagataagctaaaaagtaactccagcataaacaaaagaagggaatttctggatgttttgaagctactcagctaacttttccgcagatctgtttttgatgacacygtttccaccccatgcctatctggacagactcctacaactaagaaaacccctggttkcaggctgtattttagtgcttacatcaagacagcctgttggtgtccctcagcacatttctgagacttatcatccatgacccctttgcttccccctctatttcaggacagaacttctccgtgttacttcgttggaaaacccatccttccttagtggcaatggattgccagaacagccaaaacaagctgtgtgctgagcccacctgcctgcaggctgatcagctgcctcctgcttctaatgagaact

SEQ ID NO: 89686 - DNA, 600 bp, Chicken  19866894396665_2
tttgaaatgagcgacagaagtctttctcactttagtcgataaaatacaaaaaataaaaaagaataaataaatgagagagagagcttcattgaggatttctgcagcggtcaaatctgtcctcacttgtgaacatccctcactagataagctaaaaagtaactccagcataaacaaaagaagggaatttctggatgttttgaagctactcagctaacttttccgcagatctgtttttgatgacacygtttccaccccatgcctatctggacagactcctacaactaagaaaacccctggttkcaggctgtattttagtgcttacatcaagacagcctgttggtgtccctcagcacatttctgagacttatcatccatgacccctttgcttccccctctatttcaggacagaacttctccgtgttacttcgttggaaaacccatccttccttagtggcaatggattgccagaacagccaaaacaagctgtgtgctgagcccacctgcctgcaggctgatcagctgcctcctgcttctaatgagaactggatgaggagcctctgaagaacgggattattgttccatctcgcacactgtttttgc

SEQ ID NO: 89687 - DNA, 600 bp, Chicken  19866894396665_3
ttcttgatgttaaaatcagtgcatcccacattctgcagagagtatctttgagttttgctgatttatttccttggagcaacaattatttagcaaatatatttctgcagtgtgacaggaaaggaatgaagagcactttattttgcagacatatcatggtgaacctcaggtttgggaagggaaaattatgtctgtgattatgatctgaaaggaaaagacaaacggtaaataaaccacagccttggggagggaacgaatgtctgaggtttaaaagtaatcccgcaacactgatccaaaggtgtyattactgcaaaaaataacgaagtgaaataggaagactggctagtgtgcctcctatggacctgaaacaaagtttttaaagtgttagattagcccaacactcatcataaagtgtcaaacagagcagcctgaaagccgggtttgaggcaggctacacacaggaactcttgatgttccactccagcgckcagttccgcactcagcagcaggacacagaccgttcagagcaactgactcactttcagaaatgtgacttttttgcttcagtgctcgcagtcgggatgaagtgacccgggcagcata

SEQ ID NO: 89688 - DNA, 600 bp, Chicken  19866894396665_4
tgtctgtgattatgatctgaaaggaaaagacaaacggtaaataaaccacagccttggggagggaacgaatgtctgaggtttaaaagtaatcccgcaacactgatccaaaggtgtyattactgcaaaaaataacgaagtgaaataggaagactggctagtgtgcctcctatggacctgaaacaaagtttttaaagtgttagattagcccaacactcatcataaagtgtcaaacagagcagcctgaaagccgggtttgaggcaggctacacacaggaactcttgatgttccactccagcgckcagttccgcactcagcagcaggacacagaccgttcagagcaactgactcactttcagaaatgtgacttttttgcttcagtgctcgcagtcgggatgaagtgacccgggcagcataggctgaccagtctagaaaatgcacacggtattaatattattttgttacttactcgggcttccgaggggaaagaatgacaaaagagcagtgtgttattggtatcattgcctgtgggttattgtgggaagtgagaggtgataaagagccgtttgctgtcaccaaggaaatgcaggataactttagga

SEQ ID NO: 89689 - DNA, 450 bp, Chicken  19866894396665_5
ctattaaacctctactagcgtggaagggctcgatcctattctgctgggagcaggaggagggctcgcatcttaacttcggtgggaacatgatcgagcccagaccaccttaacatagaatattggtagcaaatgactcacatgggagaaaaaaatcggcctaaaattttaaacggaatgaccctccatatttaaggagtttttggaaggttcgtgcttgactcacagagactcggaaaagactttctgaaatgtcttaatgactggaaaagatggaagagaaaagagaaaaaggagaagacrtttcwgtttaaagaaaatatttctgatgtgagagcgtagcacttgaaagctgtaattatgtgaatgtcggtagtaaaaaccatccttctggggctggccagctgaaacctgggcacaaacagaaacttggcatctgaaggaggaaagaat

SEQ ID NO: 89690 - DNA, 445 bp, Chicken  19866894396665_6
aaacctctactagcgtggaagggctcgatcctattctgctgggagcaggaggagggctcgcatcttaacttcggtgggaacatgatcgagcccagaccaccttaacatagaatattggtagcaaatgactcacatgggagaaaaaaatcggcctaaaattttaaacggaatgaccctccatatttaaggagtttttggaaggttcgtgcttgactcacagagactcggaaaagactttctgaaatgtcttaatgactggaaaagatggaagagaaaagagaaaaaggagaagacrtttcwgtttaaagaaaatatttctgatgtgagagcgtagcacttgaaagctgtaattatgtgaatgtcggtagtaaaaaccatccttctggggctggccagctgaaacctgggcacaaacagaaacttggcatctgaaggaggaaagaat

SEQ ID NO: 89691 - DNA, 600 bp, Chicken  19866894396668_1
ttgttcaagaaggaaactgggatcctttgcagctctattacttgctctgctcttcagtttctctgtggtcctgaaatgcatttaacttacaactttgtttccatttctataaaattaggtaataattaaatacttatttcaaaaagatagcttaatgatgagttagacttttacaagattattttaagaatataaagccctatataactactaattatattaacttggtgcaaggcactgagtcttaaatacacactgagaaagaagaaagctaagaaaggagaaagtagttataagaasaacgtaagaaacaaaaaggaaaagaagaatatgagtgcaattaggtatatctgcyyctcattttcagcagtcagtttctgtggaatccagtcctgcagattaatgagataaaatgccatattttttcaatagttattgcaaacaattttctgaaagcaaattaacttctgagaaaaaaaaaaaaaaggaacagcatgttgttttttaacaaatttttgctatgctctctggtatttcactaactcacccagttactgttcctgggaattccaccttgcattttcttctgtgtttgagctc

SEQ ID NO: 89692 - DNA, 600 bp, Chicken  19866894396668_2
agtttctctgtggtcctgaaatgcatttaacttacaactttgtttccatttctataaaattaggtaataattaaatacttatttcaaaaagatagcttaatgatgagttagacttttacaagattattttaagaatataaagccctatataactactaattatattaacttggtgcaaggcactgagtcttaaatacacactgagaaagaagaaagctaagaaaggagaaagtagttataagaasaacgtaagaaacaaaaaggaaaagaagaatatgagtgcaattaggtatatctgcyyctcattttcagcagtcagtttctgtggaatccagtcctgcagattaatgagataaaatgccatattttttcaatagttattgcaaacaattttctgaaagcaaattaacttctgagaaaaaaaaaaaaaaggaacagcatgttgttttttaacaaatttttgctatgctctctggtatttcactaactcacccagttactgttcctgggaattccaccttgcattttcttctgtgtttgagctccaccaggatacccttgttcatccattttggccttctgccacaacctattttcagt

SEQ ID NO: 89693 - DNA, 600 bp, Chicken  19866894396668_3
gtttctctgtggtcctgaaatgcatttaacttacaactttgtttccatttctataaaattaggtaataattaaatacttatttcaaaaagatagcttaatgatgagttagacttttacaagattattttaagaatataaagccctatataactactaattatattaacttggtgcaaggcactgagtcttaaatacacactgagaaagaagaaagctaagaaaggagaaagtagttataagaasaacgtaagaaacaaaaaggaaaagaagaatatgagtgcaattaggtatatctgcyyctcattttcagcagtcagtttctgtggaatccagtcctgcagattaatgagataaaatgccatattttttcaatagttattgcaaacaattttctgaaagcaaattaacttctgagaaaaaaaaaaaaaaggaacagcatgttgttttttaacaaatttttgctatgctctctggtatttcactaactcacccagttactgttcctgggaattccaccttgcattttcttctgtgtttgagctccaccaggatacccttgttcatccattttggccttctgccacaacctattttcagtg

SEQ ID NO: 89694 - DNA, 546 bp, Chicken  19866894396675_1
ttttttaatgtaaattgtactcaaaaccaaaaatgcttcatacaagagatgccaagcagttcctagaatctacaataatactccaagtatactgaaatgtctcttttgttcttccctttcttcagaatttgccaagaacaatgctatgttgactttcttgctcttaaatttgtgagcattaatttaaaaagaattccctcgcttcttgctcacatttatttattttttgtttaatttccaggccccttgcaaagaatcatcactttcaacattaacatcaccgtgtccatgcaggacacrgacagtaaaattagaatgtgccagtttgggatcatgctttcatttgtcagacaygtcctaagcagcagcactagcatttgctttagtgtgccagctcaccttctaatttagttctgctgaaaactttggcccatacctctctcagtctcttagatttatcttgttttttttctttcatttcaatcaatccttgatcaattttatactcaaagagcctgataaaaggtactatctaagtcaaaatca

SEQ ID NO: 89695 - DNA, 492 bp, Chicken  19866894396675_2
agcagttcctagaatctacaataatactccaagtatactgaaatgtctcttttgttcttccctttcttcagaatttgccaagaacaatgctatgttgactttcttgctcttaaatttgtgagcattaatttaaaaagaattccctcgcttcttgctcacatttatttattttttgtttaatttccaggccccttgcaaagaatcatcactttcaacattaacatcaccgtgtccatgcaggacacrgacagtaaaattagaatgtgccagtttgggatcatgctttcatttgtcagacaygtcctaagcagcagcactagcatttgctttagtgtgccagctcaccttctaatttagttctgctgaaaactttggcccatacctctctcagtctcttagatttatcttgttttttttctttcatttcaatcaatccttgatcaattttatactcaaagagcctgataaaaggtactatctaagtcaaaatca

SEQ ID NO: 89696 - DNA, 599 bp, Chicken  19866894396677_1
  misc_feature (1)..(27): n is any nucleotide
nnnnnnnnnnnnnnnnnnnnnnnnnnnattgccctgaaataaactacttatggtgattattttgtctgctgactgggtaacagtaataatcgcttaatctgcttaacaccttagctttcactttaacagccttgacaaatcttgaagagctaaaaaggttagaactaatcagcgttctgttctaataggaacacttactggttcctactcaaagccataatatctcttgcttataggaaaacagtaacttaaaggagaagctctgcactcatgtccttcactgtattttaaatagctttyctaatggcaaccaygacagaatgaagtgataacatggtgcctagttccctttattcatgtaggcttttcttataatcctgtgcaaaactgaaaaaactgaactgccttttcatacatgtagagccaaggggtacatacaaccttaacgctcttctttgctacacttacaactccagctcttgcagttgtttccattgggtttaaccttactgccaagacaccagcttcagacaggccccggctcatggcattaactgctgcttcctgcttccctccaccacagcggggccatcactcta

SEQ ID NO: 89697 - DNA, 599 bp, Chicken  19866894396677_2
  misc_feature (1)..(13): n is any nucleotide
nnnnnnnnnnnnnattgccctgaaataaactacttatggtgattattttgtctgctgactgggtaacagtaataatcgcttaatctgcttaacaccttagctttcactttaacagccttgacaaatcttgaagagctaaaaaggttagaactaatcagcgttctgttctaataggaacacttactggttcctactcaaagccataatatctcttgcttataggaaaacagtaacttaaaggagaagctctgcactcatgtccttcactgtattttaaatagctttyctaatggcaaccaygacagaatgaagtgataacatggtgcctagttccctttattcatgtaggcttttcttataatcctgtgcaaaactgaaaaaactgaactgccttttcatacatgtagagccaaggggtacatacaaccttaacgctcttctttgctacacttacaactccagctcttgcagttgtttccattgggtttaaccttactgccaagacaccagcttcagacaggccccggctcatggcattaactgctgcttcctgcttccctccaccacagcggggccatcactctaraaatggatgaata

SEQ ID NO: 89698 - DNA, 600 bp, Chicken  19866894396677_3
ctaatggcaaccaygacagaatgaagtgataacatggtgcctagttccctttattcatgtaggcttttcttataatcctgtgcaaaactgaaaaaactgaactgccttttcatacatgtagagccaaggggtacatacaaccttaacgctcttctttgctacacttacaactccagctcttgcagttgtttccattgggtttaaccttactgccaagacaccagcttcagacaggccccggctcatggcattaactgctgcttcctgcttccctccaccacagcggggccatcactctaraaatggatgaatatttcccacccacatrtgagccatatgtatgcaccggaacattcacgctctttaaatgtcttattttatcatgcttacaacctaaacacatttttgttgctaagagaccacccccctcaaaacagcagaaacttgagcacagccttgacatgtctgctcagctaacattaatgaattcactgccactgatttacgggaatccagagcgagctgtcatgcacactgaagtggcagggaaggattttgattatcatttgtctactgttaagctgaacggccttctgagtc

SEQ ID NO: 89699 - DNA, 600 bp, Chicken  19866894396677_4
ataacatggtgcctagttccctttattcatgtaggcttttcttataatcctgtgcaaaactgaaaaaactgaactgccttttcatacatgtagagccaaggggtacatacaaccttaacgctcttctttgctacacttacaactccagctcttgcagttgtttccattgggtttaaccttactgccaagacaccagcttcagacaggccccggctcatggcattaactgctgcttcctgcttccctccaccacagcggggccatcactctaraaatggatgaatatttcccacccacatrtgagccatatgtatgcaccggaacattcacgctctttaaatgtcttattttatcatgcttacaacctaaacacatttttgttgctaagagaccacccccctcaaaacagcagaaacttgagcacagccttgacatgtctgctcagctaacattaatgaattcactgccactgatttacgggaatccagagcgagctgtcatgcacactgaagtggcagggaaggattttgattatcatttgtctactgttaagctgaacggccttctgagtcatcctcagatctcacccaaaacattttc

SEQ ID NO: 89700 - DNA, 600 bp, Chicken  19866894396678_1
agtccaagttcccagctgcatctggggagcaagtgggtcttggcaaacacctctgtgcctttctgctgcttcaagcagaagcatgggcagagaggagagggagaggaggaggcttccttcaccatctgaagaagagggattatttaccaaccacagatacggttagattaatttctatgttctgtgtgtatggctgggctcctgagaattcattgtgtaagcctgaggacaagacagcatctttctattaataagtacagagcagataatttaaacattcatgtgagaatttcattgttkcagaaaatcagcagtrgacctgaggcatgtagtatgtctttaattagtgttattcattaaagtaagtaatacagtgaaaaatctccttgagttctctgatagcatattcattacctaatcaacagtactattatttcctttgaagtatgccctactctgctgtactaaagtgcatgcactgatttactggtaagagtaattaaagggcatgtcataaactccactgacgtcatggaatgttgttctttaactgtctttccagttaactcttccacgtggaaaaatagatattttgcagct

SEQ ID NO: 89701 - DNA, 600 bp, Chicken  19866894396678_2
tgcatctggggagcaagtgggtcttggcaaacacctctgtgcctttctgctgcttcaagcagaagcatgggcagagaggagagggagaggaggaggcttccttcaccatctgaagaagagggattatttaccaaccacagatacggttagattaatttctatgttctgtgtgtatggctgggctcctgagaattcattgtgtaagcctgaggacaagacagcatctttctattaataagtacagagcagataatttaaacattcatgtgagaatttcattgttkcagaaaatcagcagtrgacctgaggcatgtagtatgtctttaattagtgttattcattaaagtaagtaatacagtgaaaaatctccttgagttctctgatagcatattcattacctaatcaacagtactattatttcctttgaagtatgccctactctgctgtactaaagtgcatgcactgatttactggtaagagtaattaaagggcatgtcataaactccactgacgtcatggaatgttgttctttaactgtctttccagttaactcttccacgtggaaaaatagatattttgcagctgaccctcacctggtgt

SEQ ID NO: 89702 - DNA, 600 bp, Chicken  19866894396678_3
atagcatattcattacctaatcaacagtactattatttcctttgaagtatgccctactctgctgtactaaagtgcatgcactgatttactggtaagagtaattaaagggcatgtcataaactccactgacgtcatggaatgttgttctttaactgtctttccagttaactcttccacgtggaaaaatagatattttgcagctgaccctcacctggtgttgagcgttctccatctcgcagtgtcactgcacttttgggaacccagggcagtggaggatgtaggcttgcatttatggcttcycatggccgtgaagtagatgggtttgaaagtcttccatttaacagcctttgcaaaaagcgtggcagtgccacagaaacttcttccaagaaaagtcttacacaggaatttcaaagagagccttcacccgtgtaacctacccaacccagcagtgaagctctggtggggaggtgagcacttcagaaagaaaccttttcccatcaccgttctcttgacttataccttccctgaaggtggaaacacagcccctggctggacaacacagatggcgtacacctttaaggtttttaatggagatctact

SEQ ID NO: 89703 - DNA, 599 bp, Chicken  19866894396699_1
  misc_feature (1)..(68): n is any nucleotide
nnnnnnnnnnnnnnnnnnnnnnnnnnnnnnnnnnnnnnnnnnnnnnnnnnnnnnnnnnnnnnnnnnnnaattattttttcctaaggagctttgctgaagaagccataatattattttttttccaagtattttggtgtgtgttagcagtatgaatactgctgctaccaaactgagtgtcattaacagaaaacgctgcctgaaagcagcatctttaccagcatctctatttaaaaacattatctcatctcatgtagatgtgatctgtctttatccagacagaaggttacgcagagaagggayatgcttaatgagcctgggctttttccactttgttgtgttttctccattaaataaagcagtagcataaatatgcatttctcttgaagaagtaggggaaatgttgcagttgtggctggcttagcttacttgttcctttgctcttgactcaacaggactctgaactatttctcacagacatttactggagaagagaaacttccagatgggctacagttactagaattgagcagatgattttgtaacagaattagaactgattggatttacctctgcaatttcaggagcactctgagaaatat

SEQ ID NO: 89704 - DNA, 600 bp, Chicken  19866894396701_1
aacagaaagttcatgtttatgtaagtggattggagccagatggtaagatatcataaactgaaaagttcataaggtcagacagacatatggttgaaaggccaaaatgttacgttagggccagaaagtcactgcaataagaaatacacaggagtatttctgctgctttgcgaaagggataagagggcagtaattgtccattactgagctaaaaacacaaataccttctgctttctgcccttacaggtcccaacttataattggctttagtcaatagcattgacttagtgggcattactgacyaggacaactcctacttaagaaaggagatggcaacactttcctattttggctgaagatttaaatatccctgctgacactgtattaatctcaactttccctcttaccaataagttttaccaacaacaattttttagtcatctgtctatcaaacatctgattcctcaaggtagtatccataaaccacatgtggaatagtggaatggcaccatggcaggtgattctgcattaagagtttagtgatgtagacacagtgttcaatgttttaaaagaatcacatttaaagaacatcagggtctagag

SEQ ID NO: 89705 - DNA, 600 bp, Chicken  19866894396707_1
tttatttcctatgccacaacttcttttttttttttttttttttaatgccagtccatttaaacttgaatagctccttttacaatgccgttgtggagtttctacatctgcatcagagacagatttaaccccataatttttctgaacattttatatagtggctttcttctttaagcagcttgttcaatgttgaagtaaagctagcacctcctatgggctgtacattcaaaagtgtagactggcagtgctcaagatggagttacgtcaactgacaccaagggagaacacagcatttagaacctmaaatctctataatgaaagactggagtcccataccaacttaggaaaggcatttagattactcccattaactttagccgtacatatgttaagctgtcacattttaactctttcccagcaaaactcttttatctgacacatgttgtggctctcctgtatgtgatgaagagatgtgtaacacattcttcattattcttaatttgggccttttgtaggctcttgctgcactaccatgtggatcttccatgtctgctacaagtgctgaattggcagaagatactatgctgtaaatgaacataaata

SEQ ID NO: 89706 - DNA, 599 bp, Chicken  19866894396710_1
  misc_feature (1)..(149): n is any nucleotide
nnnnnnnnnnnnnnnnnnnnnnnnnnnnnnnnnnnnnnnnnnnnnnnnnnnnnnnnnnnnnnnnnnnnnnnnnnnnnnnnnnnnnnnnnnnnnnnnnnnnnnnnnnnnnnnnnnnnnnnnnnnnnnnnnnnnnnnnnnnnnnnnnnnnncggatgttttaattgggcacagtactgcccgggtactgtctgtctgctcacatgtaagtcggtagcaaagctggtgatgtcggtggcagcagatcctacttctggcttctgctttgcagtaacagattaaatgaccgtttccttcttttcstttcttcccctctgcctcccgatgaagctttgatgtgcgcaagaaatgccctctttgcgatctgatgtttccacccaactacgaccagagcaagtttgaggagcacgtggagagccactggaaggtgtgccccatgtgcagcgagcagttcccacctgactacgaccagcagggcttcgagaggcaygttcagacgcactttgatcagaacgttttaaactttgattaaatacttctgttttgcggtgtagcttaaacagaaactactttgagtagtctacctatggaaaacaaacagc

SEQ ID NO: 89707 - DNA, 600 bp, Chicken  19866894396710_10
caatgctcagctcagggcagggctcagcagagcgtgatcacacacacaysartggcagcgccccccgtggccactgcatcctctgcattcytttatctttaaactcagggattcttgttggcctaaaacagagcacaggcagactgaaataacgatatgtaatgttttaagtaactcaatagctcagtagccctctgggtgtggctacttacttaaataatgtagtgagggtgcaccacagaggccaaatctctctactgaaacctaacaatgcagatggcaacaattcctcctttcccrgggctttcatttctgacagccttttcaagagaagttttcatatcccagcacaaagagggggtcctggcacacccacactgccctgctgtcacgttggaaggaaaccacctgtgaaatgcagcatcctttgacacacygaatcaaaatgctcagtttatccccctggctgcagcattttgtgtattgtgtgtgtgtgtgtgtgtgtagctcagaagttgctgcaggtgctacagaaatgcagcttgacgatagcaaagtaaaatgcacagctaaggctgtgtgcagccccagagctgaact

SEQ ID NO: 89708 - DNA, 588 bp, Chicken  19866894396710_11
ggcagactgaaataacgatatgtaatgttttaagtaactcaatagctcagtagccctctgggtgtggctacttacttaaataatgtagtgagggtgcaccacagaggccaaatctctctactgaaacctaacaatgcagatggcaacaattcctcctttcccrgggctttcatttctgacagccttttcaagagaagttttcatatcccagcacaaagagggggtcctggcacacccacactgccctgctgtcacgttggaaggaaaccacctgtgaaatgcagcatcctttgacacacygaatcaaaatgctcagtttatccccctggctgcagcattttgtgtattgtgtgtgtgtgtgtgtgtgtagctcagaagttgctgcaggtgctacagaaatgcagcttgacgatagcaaagtaaaatgcacagctaaggctgtgtgcagccccagagctgaactgtacgtcagtgatgagctgagagcagactttttaggtcagaggcagtttattttaaatgtgatttgatttacatttataagcagctttcttgacaggaatttggtaagttgccttcagttctcaa

SEQ ID NO: 89709 - DNA, 600 bp, Chicken  19866894396710_2
tctgtctgctcacatgtaagtcggtagcaaagctggtgatgtcggtggcagcagatcctacttctggcttctgctttgcagtaacagattaaatgaccgtttccttcttttcstttcttcccctctgcctcccgatgaagctttgatgtgcgcaagaaatgccctctttgcgatctgatgtttccacccaactacgaccagagcaagtttgaggagcacgtggagagccactggaaggtgtgccccatgtgcagcgagcagttcccacctgactacgaccagcagggcttcgagaggcaygttcagacgcactttgatcagaacgttttaaactttgattaaatacttctgttttgcggtgtagcttaaacagaaactactttgagtagtctacctatggaaaacaaacagcacatctttcctttaacagtgcaaatctccgagtaaagctagtgtactctaatgggagccatgataagtcttggctgtgagctgctatttgggttatcttctctctacctaacattatactaaaaaacccaacaaaaaaaaamccctttgttgtgtatgtagttatttattcccctacttagtggcagt

SEQ ID NO: 89710 - DNA, 600 bp, Chicken  19866894396710_3
cgagcagttcccacctgactacgaccagcagggcttcgagaggcaygttcagacgcactttgatcagaacgttttaaactttgattaaatacttctgttttgcggtgtagcttaaacagaaactactttgagtagtctacctatggaaaacaaacagcacatctttcctttaacagtgcaaatctccgagtaaagctagtgtactctaatgggagccatgataagtcttggctgtgagctgctatttgggttatcttctctctacctaacattatactaaaaaacccaacaaaaaaaaamccctttgttgtgtatgtagttatttattcccctacttagtggcagttgttaaggacgcgggaatgacagcctcagaaaaaagcccaccttcatgatgttcttcagctgtatagaaaaccacccgaacacctctggctctcttctccgtgatagctgaggcgtgattaaaaygtaatacacggatgcttctcctcatggagtcctgcactctctttgagtatcagttaaatcagaaagtgatagagttaacccagtgaaaatagagttttctagaacctttctgcagtgtggctgcatgta

SEQ ID NO: 89711 - DNA, 600 bp, Chicken  19866894396710_4
aacagtgcaaatctccgagtaaagctagtgtactctaatgggagccatgataagtcttggctgtgagctgctatttgggttatcttctctctacctaacattatactaaaaaacccaacaaaaaaaaamccctttgttgtgtatgtagttatttattcccctacttagtggcagttgttaaggacgcgggaatgacagcctcagaaaaaagcccaccttcatgatgttcttcagctgtatagaaaaccacccgaacacctctggctctcttctccgtgatagctgaggcgtgattaaaaygtaatacacggatgcttctcctcatggagtcctgcactctctttgagtatcagttaaatcagaaagtgatagagttaacccagtgaaaatagagttttctagaacctttctgcagtgtggctgcatgtactgtgagattacatgcccgcaacgaaagcaagggtgggtccttcagttttacacatagaatgtatttgccttaaggaktaatgttaaatgaacgatgttgtacttcaaggcagtatttttgagttgaaagataaggctgtgcttaaatgcctggaaatgaattctttaagt

SEQ ID NO: 89712 - DNA, 600 bp, Chicken  19866894396710_5
aaagcccaccttcatgatgttcttcagctgtatagaaaaccacccgaacacctctggctctcttctccgtgatagctgaggcgtgattaaaaygtaatacacggatgcttctcctcatggagtcctgcactctctttgagtatcagttaaatcagaaagtgatagagttaacccagtgaaaatagagttttctagaacctttctgcagtgtggctgcatgtactgtgagattacatgcccgcaacgaaagcaagggtgggtccttcagttttacacatagaatgtatttgccttaaggaktaatgttaaatgaacgatgttgtacttcaaggcagtatttttgagttgaaagataaggctgtgcttaaatgcctggaaatgaattctttaagtcattaaccattacgttgcaactgcattcagtagaaaacgttatattttcacaacagtgaattgtgtttgttttggcttttaaaaccttttaactttatgtatttctttctagtaaatataaatgtgtgtatatctaaacattttatatttacttaactgtattaagtaaaattgctatccacttgttgtacagtagtcttgttacat

SEQ ID NO: 89713 - DNA, 600 bp, Chicken  19866894396710_6
ctgtattaagtaaaattgctatccacttgttgtacagtagtcttgttacattaaaagcgaagttactcatggactccgtggtcctgttttcctgctgcttgttttgaaataaagcagagttcaggtgttgcatcgttctggcacgtgctgctgtttctgttctgtacaacaaaggaactgctgctcagagagggggggttggaggttcagagtaattcctgggccgtgcagttctcttccataaacacacgcaatgctcagctcagggcagggctcagcagagcgtgatcacacacacaysartggcagcgccccccgtggccactgcatcctctgcattcytttatctttaaactcagggattcttgttggcctaaaacagagcacaggcagactgaaataacgatatgtaatgttttaagtaactcaatagctcagtagccctctgggtgtggctacttacttaaataatgtagtgagggtgcaccacagaggccaaatctctctactgaaacctaacaatgcagatggcaacaattcctcctttcccrgggctttcatttctgacagccttttcaagagaagttttcatatcccagc

SEQ ID NO: 89714 - DNA, 600 bp, Chicken  19866894396710_7
tgtattaagtaaaattgctatccacttgttgtacagtagtcttgttacattaaaagcgaagttactcatggactccgtggtcctgttttcctgctgcttgttttgaaataaagcagagttcaggtgttgcatcgttctggcacgtgctgctgtttctgttctgtacaacaaaggaactgctgctcagagagggggggttggaggttcagagtaattcctgggccgtgcagttctcttccataaacacacgcaatgctcagctcagggcagggctcagcagagcgtgatcacacacacaysartggcagcgccccccgtggccactgcatcctctgcattcytttatctttaaactcagggattcttgttggcctaaaacagagcacaggcagactgaaataacgatatgtaatgttttaagtaactcaatagctcagtagccctctgggtgtggctacttacttaaataatgtagtgagggtgcaccacagaggccaaatctctctactgaaacctaacaatgcagatggcaacaattcctcctttcccrgggctttcatttctgacagccttttcaagagaagttttcatatcccagca

SEQ ID NO: 89715 - DNA, 600 bp, Chicken  19866894396710_8
tattaagtaaaattgctatccacttgttgtacagtagtcttgttacattaaaagcgaagttactcatggactccgtggtcctgttttcctgctgcttgttttgaaataaagcagagttcaggtgttgcatcgttctggcacgtgctgctgtttctgttctgtacaacaaaggaactgctgctcagagagggggggttggaggttcagagtaattcctgggccgtgcagttctcttccataaacacacgcaatgctcagctcagggcagggctcagcagagcgtgatcacacacacaysartggcagcgccccccgtggccactgcatcctctgcattcytttatctttaaactcagggattcttgttggcctaaaacagagcacaggcagactgaaataacgatatgtaatgttttaagtaactcaatagctcagtagccctctgggtgtggctacttacttaaataatgtagtgagggtgcaccacagaggccaaatctctctactgaaacctaacaatgcagatggcaacaattcctcctttcccrgggctttcatttctgacagccttttcaagagaagttttcatatcccagcaca

SEQ ID NO: 89716 - DNA, 600 bp, Chicken  19866894396710_9
ttgttacattaaaagcgaagttactcatggactccgtggtcctgttttcctgctgcttgttttgaaataaagcagagttcaggtgttgcatcgttctggcacgtgctgctgtttctgttctgtacaacaaaggaactgctgctcagagagggggggttggaggttcagagtaattcctgggccgtgcagttctcttccataaacacacgcaatgctcagctcagggcagggctcagcagagcgtgatcacacacacaysartggcagcgccccccgtggccactgcatcctctgcattcytttatctttaaactcagggattcttgttggcctaaaacagagcacaggcagactgaaataacgatatgtaatgttttaagtaactcaatagctcagtagccctctgggtgtggctacttacttaaataatgtagtgagggtgcaccacagaggccaaatctctctactgaaacctaacaatgcagatggcaacaattcctcctttcccrgggctttcatttctgacagccttttcaagagaagttttcatatcccagcacaaagagggggtcctggcacacccacactgccctgctgtca

SEQ ID NO: 89717 - DNA, 599 bp, Chicken  19866894396712_1
  misc_feature (1)..(54): n is any nucleotide
nnnnnnnnnnnnnnnnnnnnnnnnnnnnnnnnnnnnnnnnnnnnnnnnnnnnnntcctgaattgcaagggaccccaagaatcatgtagtccaactcctagctcctcaaaggacaatataaaattgaaataatatctctgagaatgttgtccaaatgcttcttgagcttgttctagtaccaaccacatactcagtgaagagcctttttctaatactcaacctggccctctcttgatgcacatccatgccattcccttggctcttaatgctatcactggaaagaagagatcatttcctgccygtcatgaggaagacatatattaaaatatgggcacaattagccatttagcaaacagtttgaaaacatagtgctaatactctgctttctgtcatactgatttattacagaccagggagaacctttaaacaagaccacctcctcctatttctttttgtttggacattgtcaaagcttattcatctgggggtcctcagcaaggtcgatctgaattaactaatcagatgtcagttggctatttaagccaattctgaattcttgctcagaattaaagtagccttcatttaattttatttatttta

SEQ ID NO: 89718 - DNA, 352 bp, Chicken  19866894396712_2
ctcctcctatttctttttgtttggacattgtcaaagcttattcatctgggggtcctcagcaaggtcgatctgaattaactaatcagatgtcagttggctatttaagccaattctgaattcttgctcagaattaaagtagccttcatttaattttatttattttactcatgaagtggattaaactaaattaaattaaagctattttaattccatgtgggactgtcctcccaggaatttaatgtggcataattcatccatccacaaagtaaatttacatgtggtttctctgagaatctcaayataaatttgtccttatcaagaaaacagtttgctgttaggcaatgcacttggg

SEQ ID NO: 89719 - DNA, 600 bp, Chicken  19866894396716_1
tcaaagtctagggagagctgctggatttactatgcatgaccttggggcatctgccaatggccacagccgagggctgactgctgtgttttcctgtgcttgcaggataagccccagtgatcccttaatttcaggtaggacaggtgagggaattgctatcagctgttgattttaatatataaatacaatcatttactagtgcaggtatggcctcctttaagcagccagctctgttttagaagcatttgcttctcctttaaagtcgacatttgtcctgaaataacttttaatggtcctgtatcrtttctctgcctttgttgtagcacttggaattcaactgggcaggcatgagcaacctcctggatgtcccagggattaagtgagtgtctgttttgtttcattttattcctttttgaaaagcctttgggaactgggaaagcttttttcagcaatcaccagaagttattctcaagagtgatatgtagaagttgttatgctgacatgccatcatcatatcttgctgtggggctggcaaaccctgagtagggtgctcttgcatcatgtcaaaattgatttaatcacttcactttgggaattagggtg

SEQ ID NO: 89720 - DNA, 599 bp, Chicken  19866894396724_1
  misc_feature (1)..(18): n is any nucleotide
nnnnnnnnnnnnnnnnnnccccccaaaaaaaaatctggtctcaggaaattaaatactgaactcttggactgaaggcattatttcgtgatcttacgatcacgttgtcctatatggattctctgttacattgttttctgttattagttttttttaatcataggttgcagaaatgcaagctcaaaatggttatctccccagatataatcagaagagtcttactgatggcctctcttacttaaataataagcaaatcacccaatcatgggagtacttgtagcagctctggagactttgtgcacmgtatttctggaattcttgttgatttctctcgtttttctaggcatatattatgaactacttacagtaaaaagacatttgaagacatttgtttactgttatctccttggctttggtactcttcttataggatatgttgacagcagttaaaatgttctgtgagaagactctgaccttgcctgaggctgtgaaacttcttactctgtgatcattttgacctacaactcccttaagattaggaggggctcagactttatagtacaataaattcttaaggaattattgtcttcaaaaacctagca

SEQ ID NO: 89721 - DNA, 599 bp, Chicken  19866894396725_1
  misc_feature (1)..(34): n is any nucleotide
nnnnnnnnnnnnnnnnnnnnnnnnnnnnnnnnnntcagaatagaggggatctattctcaagcaatccaaagcagaaaacaaataaggagtctcagagacaagctaccagaagctgaatgcctgtttgtggcagaacagaaaatatttctggacaaggagatggattcatttgatcatttttcacttgcctttaaatatatgcatagagcacgtgaaggtccaaaggcgcttaagagggaatcagagcttctgaagaccctaaggactcatcccttgtgaaactcaagctgctgacaatcwgccagcacataaattccttcagcacccaagatagtgaccagctcctgaggaggcctcagctgccacgctcccagcacacagccctgagcacacatgctgaggctgcagcctgctagcaaagagttttgcttgacacccatcagttcagcttccccacaagcactcccagcccatagctggtcatctgagtggttccctgacatagaacaactgaatatcagcttgtccgtataatttacgaccacattagaacttcatgacttatrctatggtctgcagcatcactgaaagaagattct

SEQ ID NO: 89722 - DNA, 516 bp, Chicken  19866894396725_2
tcatcccttgtgaaactcaagctgctgacaatcwgccagcacataaattccttcagcacccaagatagtgaccagctcctgaggaggcctcagctgccacgctcccagcacacagccctgagcacacatgctgaggctgcagcctgctagcaaagagttttgcttgacacccatcagttcagcttccccacaagcactcccagcccatagctggtcatctgagtggttccctgacatagaacaactgaatatcagcttgtccgtataatttacgaccacattagaacttcatgacttatrctatggtctgcagcatcactgaaagaagattctgtgctcataataattctcttatgttaacaacaattacatttgcagatggagtaagcacctgagattattgctacaaagtacagcttgttcatccctgtgtggattttttccccttcatacaaggtgtcaaagagcaaacaaaaatactaaggctgcccttgtacagttatttcatatctcaca

SEQ ID NO: 89723 - DNA, 599 bp, Chicken  19866894396726_1
  misc_feature (1)..(58): n is any nucleotide
nnnnnnnnnnnnnnnnnnnnnnnnnnnnnnnnnnnnnnnnnnnnnnnnnnnnnnnnnntctatgtaagaaatgctgtcacagaaaacctcactattatcattctaaaagagccaagaaaagacccagttatgctctgctaataattgtccagacagcaaacaggcactgaactctggggactgaggtcctcagaatcaaaaacaaagcagaagtgtgaattttttaatttatttttattttttaaaaaaacaatggaccttcacggctatcatcttatattgcaaaattccatttaaaarctgcaactgattacagcattcatcagcattatccaaagccccactcaagcacacttgaggaatgaggctgttccttgaaatagcgcagtgagtagagttggtggccagaaagttctctcagtaagggaagcttaagactgaaaagaaacacttctgaaattcactttctgagacattctctttctaattcctgccgctccacacaagcatgccatgctctttatgtatgctcttgatgttttcctatcgcccttctcagcaaaaagtactagttgcttcttttagacttggtctgtaaa

SEQ ID NO: 89724 - DNA, 600 bp, Chicken  19866894396727_1
tgtacacgagcatcagatgttctgctattgtaaatgtaaggtaggcaggtacagaaatcagtgttaaaaatataacagaggaaaaggaggaaatgaaacttggagcaaatgcaagcatttggaaaagtgggattatctgtagaggtgtcctccacagtgttactaagggacttggtttcacaaagcaacacctccctactcccagaggcgacggcagtggaagagccccggctttctccagctcctgagccagaccctatgtgccaactgtgctccctcatcccccaccagtgccactgyggggcaggatgcaatttcccccggattaaatggatcaattaagcacagaagataccgcaaaagtgatcatctgagcagtggaatcagaatttwccmccaccaatcctccaaagtagtctcgaggtaaggcatcagctcagagtaatgaggtgacagaaagcagctttattccttttggaccgcagcacggagaggccacgctttccactatgctgttctctaatggaaaactaggaacacatattttctttctttcttaaacgttaaggtaagaagtttgctagccaaagcagagaaaca

SEQ ID NO: 89725 - DNA, 600 bp, Chicken  19866894396727_2
tgaaacttggagcaaatgcaagcatttggaaaagtgggattatctgtagaggtgtcctccacagtgttactaagggacttggtttcacaaagcaacacctccctactcccagaggcgacggcagtggaagagccccggctttctccagctcctgagccagaccctatgtgccaactgtgctccctcatcccccaccagtgccactgyggggcaggatgcaatttcccccggattaaatggatcaattaagcacagaagataccgcaaaagtgatcatctgagcagtggaatcagaatttwccmccaccaatcctccaaagtagtctcgaggtaaggcatcagctcagagtaatgaggtgacagaaagcagctttattccttttggaccgcagcacggagaggccacgctttccactatgctgttctctaatggaaaactaggaacacatattttctttctttcttaaacgttaaggtaagaagtttgctagccaaagcagagaaacacatctcccccacccctccaaacaaaacgtgtagggtctctttataaaaaatgactaagtatttgacataggaagcaaaaaaaccctagtacat

SEQ ID NO: 89726 - DNA, 600 bp, Chicken  19866894396727_3
aacttggagcaaatgcaagcatttggaaaagtgggattatctgtagaggtgtcctccacagtgttactaagggacttggtttcacaaagcaacacctccctactcccagaggcgacggcagtggaagagccccggctttctccagctcctgagccagaccctatgtgccaactgtgctccctcatcccccaccagtgccactgyggggcaggatgcaatttcccccggattaaatggatcaattaagcacagaagataccgcaaaagtgatcatctgagcagtggaatcagaatttwccmccaccaatcctccaaagtagtctcgaggtaaggcatcagctcagagtaatgaggtgacagaaagcagctttattccttttggaccgcagcacggagaggccacgctttccactatgctgttctctaatggaaaactaggaacacatattttctttctttcttaaacgttaaggtaagaagtttgctagccaaagcagagaaacacatctcccccacccctccaaacaaaacgtgtagggtctctttataaaaaatgactaagtatttgacataggaagcaaaaaaaccctagtacattac

SEQ ID NO: 89727 - DNA, 599 bp, Chicken  19866894396730_1
  misc_feature (1)..(144): n is any nucleotide
nnnnnnnnnnnnnnnnnnnnnnnnnnnnnnnnnnnnnnnnnnnnnnnnnnnnnnnnnnnnnnnnnnnnnnnnnnnnnnnnnnnnnnnnnnnnnnnnnnnnnnnnnnnnnnnnnnnnnnnnnnnnnnnnnnnnnnnnnnnnnnnnattggccatttcattacatgaatttagaaactgcagctgtagtttctaaagagacaatgcatattctctcccttcctataaccagcagcctatggagagtatacacagctcagaagataaactgcaatttacaagtgagaaatataattctccccwaacaccaccctgagttgaattcagatgcctcatttctgtatgtcagctcctactctcaaaccactgcaaaccaaccatacacacctgcactttyattacttagaaaaagccctcaccaactatccagcaaaaaagcacccccctttgtacagatgagaggcattccttagtactgaccttctaacgccttcagaaggactgaaaagtcttcatcctctgaaagaaagggccttattagcaacatgcatgttcttagcaattataatgaattacatctcaaagatctaagtatggaacat

SEQ ID NO: 89728 - DNA, 599 bp, Chicken  19866894396730_2
  misc_feature (1)..(50): n is any nucleotide
nnnnnnnnnnnnnnnnnnnnnnnnnnnnnnnnnnnnnnnnnnnnnnnnnnattggccatttcattacatgaatttagaaactgcagctgtagtttctaaagagacaatgcatattctctcccttcctataaccagcagcctatggagagtatacacagctcagaagataaactgcaatttacaagtgagaaatataattctccccwaacaccaccctgagttgaattcagatgcctcatttctgtatgtcagctcctactctcaaaccactgcaaaccaaccatacacacctgcactttyattacttagaaaaagccctcaccaactatccagcaaaaaagcacccccctttgtacagatgagaggcattccttagtactgaccttctaacgccttcagaaggactgaaaagtcttcatcctctgaaagaaagggccttattagcaacatgcatgttcttagcaattataatgaattacatctcaaagatctaagtatggaacatgcttttcctgttaaaaatttgccacaattatgttcatttttcaaagtctacgaccatacacttgcgatggaaatacagcatggcaagtgtccag

SEQ ID NO: 89729 - DNA, 565 bp, Chicken  19866894396742_1
ctctggaaggggcagtcaggtgttgtgaataactgtgtctgctgttgcatgaaatctcgatcttcatagttttgtgacacaatccttctgttcctcgacagcctaacaaaatagcaaataagtgaaaagtcccccaaaatccaaacaaaaacactgttctttcactattatttgacatactatttgcagacactgtttacgcttactattttcttagtggtactgtcttctcttgctctactgcctgaaacagtgagcttggcagaagccactgggaaaatcttatcctaaatctgccayagcacttctaatgaaagagaaggtcttagccatgatgtcctggctgaaggccaaccccagtaattgcatactgaattcttgtagttccatgcactttcaaccagagctaagattcttcagctctgccacaaggttttaagccatgcactctgatgctcagttcataacagagtatatgctccatcatcacctgagcacccacttcataacagcctctgccttctttcagcatcaccccaagatatgtcacttttctatgcatgaa

SEQ ID NO: 89730 - DNA, 600 bp, Chicken  19866894396755_1
gagagagccagggctgcctggaccactgccactaccatggaatcttgtcaaagtctctcctgcctgtccttacaagggagcaaggctgagcttgggctgattatgttaatctcaacaggagatgaggacaaaccatattttagtcacaccatataagcctgtcatgaaacaaatcagggcactcttaacattacgtcttctgctcctccatctcgcagactgtttggagtagctgtcatttagtttctctttaagcacagagcagaactgatgaaagcacattttctaaacaagcaaacraacaaacaaaacaaaacctaactgaaaggctatgtgtgagttgtgtcaaactgctagatgatttctttcctagacattgtcttatgaaagcccttctccagcagccagttcaagaaagacaatgaaaaacatactactcactygactatccacrtgaaaggaggcactgcattgtctactggctataagcagcggtacaaaagccacatccagccagttcaggtaatatctgttccttccgattcatgtaaaatctgctttcgtaggacaccaagcaaagtaggctcccaggttccctaa

SEQ ID NO: 89731 - DNA, 600 bp, Chicken  19866894396755_2
tcacaccatataagcctgtcatgaaacaaatcagggcactcttaacattacgtcttctgctcctccatctcgcagactgtttggagtagctgtcatttagtttctctttaagcacagagcagaactgatgaaagcacattttctaaacaagcaaacraacaaacaaaacaaaacctaactgaaaggctatgtgtgagttgtgtcaaactgctagatgatttctttcctagacattgtcttatgaaagcccttctccagcagccagttcaagaaagacaatgaaaaacatactactcactygactatccacrtgaaaggaggcactgcattgtctactggctataagcagcggtacaaaagccacatccagccagttcaggtaatatctgttccttccgattcatgtaaaatctgctttcgtaggacaccaagcaaagtaggctcccaggttccctaaatactagaaaatatcagcaagtgattatacccaaacaccacttactgagcagtatccccttgaattcataattaactttccctcaggcctcctccacttctcttggcagaagtccctgctggactgtaaagccaacttctgaa

SEQ ID NO: 89732 - DNA, 600 bp, Chicken  19866894396755_3
aagcctgtcatgaaacaaatcagggcactcttaacattacgtcttctgctcctccatctcgcagactgtttggagtagctgtcatttagtttctctttaagcacagagcagaactgatgaaagcacattttctaaacaagcaaacraacaaacaaaacaaaacctaactgaaaggctatgtgtgagttgtgtcaaactgctagatgatttctttcctagacattgtcttatgaaagcccttctccagcagccagttcaagaaagacaatgaaaaacatactactcactygactatccacrtgaaaggaggcactgcattgtctactggctataagcagcggtacaaaagccacatccagccagttcaggtaatatctgttccttccgattcatgtaaaatctgctttcgtaggacaccaagcaaagtaggctcccaggttccctaaatactagaaaatatcagcaagtgattatacccaaacaccacttactgagcagtatccccttgaattcataattaactttccctcaggcctcctccacttctcttggcagaagtccctgctggactgtaaagccaacttctgaacaactatatga

SEQ ID NO: 89733 - DNA, 599 bp, Chicken  19866894396758_1
  misc_feature (1)..(111): n is any nucleotide
nnnnnnnnnnnnnnnnnnnnnnnnnnnnnnnnnnnnnnnnnnnnnnnnnnnnnnnnnnnnnnnnnnnnnnnnnnnnnnnnnnnnnnnnnnnnnnnnnnnnnnnnnnnnnnncctgaccgtggcacatttatagctctagctcttgctctaatctccgtggtgttggcatgagagctgctcacatttctttctttttcagacttccaggtaacatttcaggttatttggagttgtacaaaagggaggcaaaaccaactccagaccgattgctgtgaggctgcagagcatcagactttgcaraaatgaattsctgctgacatcagcaagtagcccatttttaaggaactcaggctcagggaaggtttgcccaccctcagcttctgcaatcyaagaggcaaggtgacatttgggaaccaagcctcctgacacgtaccccatttccatcagcagggtgacttttctagctgctgatgcaggtctgtgattaaaaggcattagctcggaacgtatcgtttgttctagaggtttgcctaatgcaatttgtataatgcataatcatccctgcttcggttatctaatatgggtggaaaataactcag

SEQ ID NO: 89734 - DNA, 599 bp, Chicken  19866894396758_2
  misc_feature (1)..(101): n is any nucleotide
nnnnnnnnnnnnnnnnnnnnnnnnnnnnnnnnnnnnnnnnnnnnnnnnnnnnnnnnnnnnnnnnnnnnnnnnnnnnnnnnnnnnnnnnnnnnnnnnnnnnncctgaccgtggcacatttatagctctagctcttgctctaatctccgtggtgttggcatgagagctgctcacatttctttctttttcagacttccaggtaacatttcaggttatttggagttgtacaaaagggaggcaaaaccaactccagaccgattgctgtgaggctgcagagcatcagactttgcagaaatgaattsctgctgacatcagcaagtagcccatttttaaggaactcaggctcagggaaggtttgcccaccctcagcttctgcaatcyaagaggcaaggtgacatttgggaaccaagcctcctgacacgtaccccatttccatcagcagggtgacttttctagctgctgatgcaggtctgtgattaaaaggcattagctcggaacgtatcgtttgttctagaggtttgcctaatgcaatttgtataatgcataatcatccctgcttcggttatctaatatgggtggaaaataactcaggttatgaaac

SEQ ID NO: 89735 - DNA, 599 bp, Chicken  19866894396758_3
  misc_feature (1)..(22): n is any nucleotide
nnnnnnnnnnnnnnnnnnnnnncctgaccgtggcacatttatagctctagctcttgctctaatctccgtggtgttggcatgagagctgctcacatttctttctttttcagacttccaggtaacatttcaggttatttggagttgtacaaaagggaggcaaaaccaactccagaccgattgctgtgaggctgcagagcatcagactttgcagaaatgaattsctgctgacatcagcaagtagcccatttttaaggaactcaggctcagggaaggtttgcccaccctcagcttctgcaatcyaagaggcaaggtgacatttgggaaccaagcctcctgacacgtaccccatttccatcagcagggtgacttttctagctgctgatgcaggtctgtgattaaaaggcattagctcggaacgtatcgtttgttctagaggtttgcctaatgcaatttgtataatgcataatcatccctgcttcggttatctaatatgggtggaaaataactcaggttatgaaacttgcaagagagacttgtggtctcaacattttggaaataaaaaaccctgatgattgtttatgtttttgttctcctctatg

SEQ ID NO: 89736 - DNA, 600 bp, Chicken  19866894396758_4
gaccatgttttgacgtgtgttgtggtgtgtacctctggcactcactgtgtcacatatgggctgcagcttcttgtgtgtctatatatatatcacttcataaagagcactactgctgcttccctgtgattcagaaataggcttaatacatacagcctcttttgccagatttgctgtcatctgctgatcagggtctttttttatgacaagttttgatgctgtcaagcaaacaatagcaacagtttactgatctatctggcacaatgtaggcagatcatcaataggaattccaaatgcatcccrtttaaaaatgatgtgtagtatcaggtattgaacacttctattcacctagaataatgattaggtcaaatgtggtcaataccgtatcatcttatgaatctgtatataatctctatcttaatttcccttgacagtaataagaacagtgaaaacaaagatgtttaatacatttatcatctatgccattcagtgttactgataggcatgtttcatgcagacccaccttggctgaatatggaaagatcttgtaaactgttctctgcatctggttgccgtaatggtgcccctttccagctcgttatc

SEQ ID NO: 89737 - DNA, 465 bp, Chicken  19866894396758_5
ttaatttcccttgacagtaataagaacagtgaaaacaaagatgtttaatacatttatcatctatgccattcagtgttactgataggcatgtttcatgcagacccaccttggctgaatatggaaagatcttgtaaactgttctctgcatctggttgccgtaatggtgcccctttccagctcgttatctttttcagttaggtagtcttgcttcataatgtttatgttagtttttctaaaagcttgccaggccatagctgtagctcacagatcttccaaagccacctgagaatcttgtaagamctttttcagatttctggtaagtccataagtatcatgagagacatgatctgggggttctgataaatgtttgcaaatatctaaagggagatgggagacaagtggatgaggccaagctcttctcggggggtgtgtagcgataggacaaggagtaacggcctaaaactg

SEQ ID NO: 89738 - DNA, 599 bp, Chicken  19866894396760_1
  misc_feature (1)..(27): n is any nucleotide
nnnnnnnnnnnnnnnnnnnnnnnnnnncagagttggaagacattgaaggcaagtgtatagtagtggtagtgtagttgggagcttctgcaaagattcaacaacctccggtgcttggtaatgatacttgctggaatctgaaagcttacgccattcagagaagttgcagcaatccaaagatgcttcttggaacggttgtctcttagttcctgaatgcactggaagcggttggtattggaattacgtctttttgaggtgtcaatcttttcattttctgaaatctcttgctattttacattactrtcckctcttctaatgtgctactgggtcagttcagggatttctgtgcatgaaagtagtcaaattctccttccttttattagatagaaggttgtaggtacagcgttacatgattaatrctatatgtgatgttcagttttctaagtctttcaaaacagggaggtttctagggaaaaataaagaacttttctccctatttttacttcaactaagtatattttattgcacctgtctgacaagaaacccagttagaactgctttaaatctcatctctcggaagcaaagaaacagagggcaaactt

SEQ ID NO: 89739 - DNA, 599 bp, Chicken  19866894396760_2
  misc_feature (1)..(23): n is any nucleotide
nnnnnnnnnnnnnnnnnnnnnnncagagttggaagacattgaaggcaagtgtatagtagtggtagtgtagttgggagcttctgcaaagattcaacaacctccggtgcttggtaatgatacttgctggaatctgaaagcttacgccattcagagaagttgcagcaatccaaagatgcttcttggaacggttgtctcttagttcctgaatgcactggaagcggttggtattggaattacgtctttttgaggtgtcaatcttttcattttctgaaatctcttgctattttacattactrtcckctcttctaatgtgctactgggtcagttcagggatttctgtgcatgaaagtagtcaaattctccttccttttattagatagaaggttgtaggtacagcgttacatgattaatrctatatgtgatgttcagttttctaagtctttcaaaacagggaggtttctagggaaaaataaagaacttttctccctatttttacttcaactaagtatattttattgcacctgtctgacaagaaacccagttagaactgctttaaatctcatctctcggaagcaaagaaacagagggcaaacttaagt

SEQ ID NO: 89740 - DNA, 600 bp, Chicken  19866894396760_3
aatgatacttgctggaatctgaaagcttacgccattcagagaagttgcagcaatccaaagatgcttcttggaacggttgtctcttagttcctgaatgcactggaagcggttggtattggaattacgtctttttgaggtgtcaatcttttcattttctgaaatctcttgctattttacattactrtcckctcttctaatgtgctactgggtcagttcagggatttctgtgcatgaaagtagtcaaattctccttccttttattagatagaaggttgtaggtacagcgttacatgattaatrctatatgtgatgttcagttttctaagtctttcaaaacagggaggtttctagggaaaaataaagaacttttctccctatttttacttcaactaagtatattttattgcacctgtctgacaagaaacccagttagaactgctttaaatctcatctctcggaagcaaagaaacagagggcaaacttaagttgccgagttgctcaaatgtggtagcaaccgttcacaaccaaggacgtcttggtaaaatatgataagtcccataagcgtgcgatcagttgcaactcctacagttgggatagatc

SEQ ID NO: 89741 - DNA, 600 bp, Chicken  19866894396766_1
ggtttataaaactttaaagctagtgctataacaaactgaaacaatgttattgcagatgtaggagagcatctcgggatgaataaattataggagccacaaagaaatcacgacgacagcggctgcatgctctgagttgcttatggtgagcagatacacagggagagcaggtttaggaatgcacagatcatagggcagggaaattgaagcattacgaagggtaaccatctcatcttctaaatgcatacaatgcttctggttgttttacttattgaaatagttcatgaatgcctgaagggagtstgaactgtctggtactaggaaaatacatccctgaagatgagtgaggcaaggctgcaggtggraatagcggcctcctctcctaccctgcagaaagtgtccagaatgagccatttctcagctgtctgctggaagggcatgcagggaagacttccagctcctgaagcagttagtgctggataccatcagagctggatccaaacaagtaggttggctgaggaagaccactaaaatgatggtgactttgggcgacattactggcaygtgccacaaggacagaactctgcatttttctggctgtag

SEQ ID NO: 89742 - DNA, 600 bp, Chicken  19866894396766_2
agagcatctcgggatgaataaattataggagccacaaagaaatcacgacgacagcggctgcatgctctgagttgcttatggtgagcagatacacagggagagcaggtttaggaatgcacagatcatagggcagggaaattgaagcattacgaagggtaaccatctcatcttctaaatgcatacaatgcttctggttgttttacttattgaaatagttcatgaatgcctgaagggagtstgaactgtctggtactaggaaaatacatccctgaagatgagtgaggcaaggctgcaggtggraatagcggcctcctctcctaccctgcagaaagtgtccagaatgagccatttctcagctgtctgctggaagggcatgcagggaagacttccagctcctgaagcagttagtgctggataccatcagagctggatccaaacaagtaggttggctgaggaagaccactaaaatgatggtgactttgggcgacattactggcaygtgccacaaggacagaactctgcatttttctggctgtagagtgacttgagctccaggctggcagcaccccttactctcctggttcagaaatgctgctgact

SEQ ID NO: 89743 - DNA, 600 bp, Chicken  19866894396766_3
ttacttattgaaatagttcatgaatgcctgaagggagtstgaactgtctggtactaggaaaatacatccctgaagatgagtgaggcaaggctgcaggtggraatagcggcctcctctcctaccctgcagaaagtgtccagaatgagccatttctcagctgtctgctggaagggcatgcagggaagacttccagctcctgaagcagttagtgctggataccatcagagctggatccaaacaagtaggttggctgaggaagaccactaaaatgatggtgactttgggcgacattactggcaygtgccacaaggacagaactctgcatttttctggctgtagagtgacttgagctccaggctggcagcaccccttactctcctggttcagaaatgctgctgactgaggcaccagaggaggaggtctgcacacagcactgtccacataccataatataccagcaactatgcttagttgtgtgctctctgtagttcagccacctgcagcaaaacgacgtttgcatgagaacttatccagcctgtttcctcaaaggacaactaggaagtaccatctctttgttcttagcagatccactgagctcag

SEQ ID NO: 89744 - DNA, 600 bp, Chicken  19866894396769_1
tttctgctcctgcatcctcagtgatttttagggaaaccaggctttctgaggtacctctgaagtcactgcatagagattgcaagggacaagcagaaggaagatataaagcttgctcatgtaaggtgctgccatgcaaacagcagagcatgttgctatcattatcccagtgtcatccagttccataacattgagaagccccagcaatggtgtggggctggatgtgctgaagctgcgtgcctgtgtacagattgactctggctacaggtaggacagcctggtatgtgctggtctgagtggcaygtgtaatgccaggggtgggtttttatgcccttctcagcgcatggatacatctgtgcaacctgaaagttagatgtgggatctgtcatctgcatcgcgggaagacagagaagggccgcagaggttttcatcagtgtgtgactcttcagtgcatgccagccaaggagaaagcatgtttgtttttcaaatagggtaatttagaggaaaaagttgttattagtggctgagtagaagtacgtctctgtagcgtgtgagaggcgatgctcaagttggagagaagccatgaaaaaaagcacagcgttt

SEQ ID NO: 89745 - DNA, 600 bp, Chicken  19866894396771_1
gctagatgtgagtgtggtggtaataagacagcgtgcttgttacagaatgtaattcaaagtaaataccaactggagatgtctcacatggggccagaccatacacaaattacatatgcacagacagaagtcctaattgtgataactacagagagcagactctgagtcactgggaagtgagcggctttctgtggatgactcctttcggacaacaaatgcattgcataaaagagcgacttcaggaaatagcctttctatagatacatggcaagtctctatataaatgcggttgtttgaaatacraagggttttcagcaatgctataatatttttatatctacacagtcactatctattccatatgcacaaacatccgcctacccagaaaataattgtggataattcaatgttcagattcgataatggatgctcaaataaatatgagaattccaagcaaatttgtgcaaatgaaaaaagatttcctctgacataatggcatggtgcaaggctgtctgtaatgagctgtaatttgtctggaagagcattttaaaggggttgatccatccactggaagaccagcaactgctctgagactagaagcaa

SEQ ID NO: 89746 - DNA, 600 bp, Chicken  19866894396776_1
gaaaagctgaaataagaacccattataataatatcaaaatacatcccaagaaatacatatgtatacataatatatatagaaaatatatatatataggtagatataattttttctgtgtttaactgtaaaaattttaattagaaccaagaaattgtttgctttcttttcgaaagggaaaagcacagcaagtcacacagaggcatttttttgtcctacccttctttcaaccaattcttgtgactcatcatagtgatatttctgagtttttcaatacagcatttcccttcaggctggaagackttcagatgcttctgaaaatttctaggagtctttcaaggccaacrtagcacaagaaagcactgtgtgaaaggttctaaagactgtatgcacagaaaatgatccaagaaagtgcagtatatgaccaagcaaattaggaaacaaaagctagtaagttctgtgtcgtataaaactcatatacaacaatcatgccagtrcgagtccaattaggttttttggtaccacactgatgcagattttcagtgactacctatttgtgcctcatctctcctcatgagtggagtttaaactgcttccctaatc

SEQ ID NO: 89747 - DNA, 600 bp, Chicken  19866894396776_2
cccaagaaatacatatgtatacataatatatatagaaaatatatatatataggtagatataattttttctgtgtttaactgtaaaaattttaattagaaccaagaaattgtttgctttcttttcgaaagggaaaagcacagcaagtcacacagaggcatttttttgtcctacccttctttcaaccaattcttgtgactcatcatagtgatatttctgagtttttcaatacagcatttcccttcaggctggaagackttcagatgcttctgaaaatttctaggagtctttcaaggccaacrtagcacaagaaagcactgtgtgaaaggttctaaagactgtatgcacagaaaatgatccaagaaagtgcagtatatgaccaagcaaattaggaaacaaaagctagtaagttctgtgtcgtataaaactcatatacaacaatcatgccagtrcgagtccaattaggttttttggtaccacactgatgcagattttcagtgactacctatttgtgcctcatctctcctcatgagtggagtttaaactgcttccctaatctatattcccttaaaaacaaaagaattaatacacaaataatgtgt

SEQ ID NO: 89748 - DNA, 600 bp, Chicken  19866894396776_3
cagaggcatttttttgtcctacccttctttcaaccaattcttgtgactcatcatagtgatatttctgagtttttcaatacagcatttcccttcaggctggaagackttcagatgcttctgaaaatttctaggagtctttcaaggccaacrtagcacaagaaagcactgtgtgaaaggttctaaagactgtatgcacagaaaatgatccaagaaagtgcagtatatgaccaagcaaattaggaaacaaaagctagtaagttctgtgtcgtataaaactcatatacaacaatcatgccagtrcgagtccaattaggttttttggtaccacactgatgcagattttcagtgactacctatttgtgcctcatctctcctcatgagtggagtttaaactgcttccctaatctatattcccttaaaaacaaaagaattaatacacaaataatgtgtggactgtgattcccctaacaatatacccttctcccatattgcccaaaagaattactacttctagcaagttttcattcatcaacatcagattctggctcatttgtaattttttaagtgttattagaaaacattatttcttaccaaatatac

SEQ ID NO: 89749 - DNA, 599 bp, Chicken  19866894396786_1
  misc_feature (1)..(190): n is any nucleotide
nnnnnnnnnnnnnnnnnnnnnnnnnnnnnnnnnnnnnnnnnnnnnnnnnnnnnnnnnnnnnnnnnnnnnnnnnnnnnnnnnnnnnnnnnnnnnnnnnnnnnnnnnnnnnnnnnnnnnnnnnnnnnnnnnnnnnnnnnnnnnnnnnnnnnnnnnnnnnnnnnnnnnnnnnnnnnnnnnnnnnnnnnnnnnnttgagaaaaaggatctaagcagctgcttttgttgccaaaagctcccttgattgcatcacatgcacggctcaaatcagtcacactgaacacagtgtctcactgataattayaacgctttatctggaaatatggacatgtcaaatagcgactttcatctgccagattccatgatgcagagataattagaagaacatgaaagtggtcacagggtccagtgagagaagaagcacacctgagcttagaaattagctcagaataatttcagactttccagggcactgagtaccggctaagattcataattattgtgaaaacatctgggaaaagtgttacttgcagaggatagccatggattaaaaggaaaggattacagggtgtagaagctctaagtgcaaactgaatgcatcat

SEQ ID NO: 89750 - DNA, 600 bp, Chicken  19866894396801_1
tttgatggggtcagcctaaaacaaccattgttaatgggcagaacatggtgggagcgttgtattgtgttgattcaatttaagcatttaaatctaatttcagcatctgttgtgtcacatttagcttttaaattaagctcttgggaaaattaatgttgtgaatgcaggaaggtgattataaaattattggtccccaagaagcatgatttatgaagtttttaatgctgcgtattgttggttgaaacaggagaagctaggtagagaagagcacagtaggcatgttaattaagagagcttaaagascatggggaaggaaattattattccccattctggcatttgataacttaatgccaaattgttgtaaacaggggcaagcttttctgtaaggtgagtgagcaggaaaacgggagagatttgcagaagaggtactcagagttattagcctcaaaccccccccttctccacagctgcatctgttctamtaacaggagcaggaaaggtgctttcagaggacctctcccagagaacacacctgctctgtggtaagaggtaggaaggagcagtgctctgcctctgaaggtggctgagctactgctgtgt

SEQ ID NO: 89751 - DNA, 600 bp, Chicken  19866894396801_2
attggtccccaagaagcatgatttatgaagtttttaatgctgcgtattgttggttgaaacaggagaagctaggtagagaagagcacagtaggcatgttaattaagagagcttaaagascatggggaaggaaattattattccccattctggcatttgataacttaatgccaaattgttgtaaacaggggcaagcttttctgtaaggtgagtgagcaggaaaacgggagagatttgcagaagaggtactcagagttattagcctcaaaccccccccttctccacagctgcatctgttctamtaacaggagcaggaaaggtgctttcagaggacctctcccagagaacacacctgctctgtggtaagaggtaggaaggagcagtgctctgcctctgaaggtggctgagctactgctgtgtctcaatagttgaatgtggtctgtaattttgactttcatttataaccactgcaagaatgggagagaaagccccagagaaggggatggtcttaaacctatcacaatatacagaacactgacgtttctgtgtgaatgattggcgtgtgtgtactgagctgcagcaatcaaaattaaacacaatcg

SEQ ID NO: 89752 - DNA, 600 bp, Chicken  19866894396816_1
ttttgctcagtactgtctaaatctctgcacaaggcagctaaagatgaggaatgatataatgtatactgataggtttccaaggcacgtcttgaaaactggctgtcgaactgacaaggaagagcttctccacaggaaatcaaacagtaacaaaagtagagcacctcagagctgagaaggaagcaagcagatgaaaagagatgagagggaggtgctgagatttgcatcataccttcctgaaagtagagggaatttcaaaattgcaataactccagtgatatctttttttccccaccaatgcawatctattgcatatgccttctgtagagttattctcatgaccagaattagccctcactcccacctacctcattcttagctatgtggggctttgtgactatagcagcctcccagaactccttagcgcagaggatgcatatggcagcgtgaccaagttgaaccccacacgcatcaccctcttgcctcacatttggttttttgtttctaaatggcaagatgcatttgtctacatttccttcatttggcagagctgttcagtgaatgttaccgcaacagcgaggagagagcattttctctgctggt

SEQ ID NO: 89753 - DNA, 600 bp, Chicken  19866894396817_1
actacaagcaattaaaaagacggatttactagtaagacacccactgagtgcataactcctaaccttgctgtctgacctctatccttttacatatctgcctcctgggaagtgctctcacaacctgaaaaatctgttacgtagactatatatttgctctccagtggtttttgtggggcaggaatagggaaatgaagggaagtgtctcccttctttgtgtgaaagagcctttgcatttatcgaggagtccttaaaacatcagatgcatgattccagccttatttctcactgagtaaacgccawtccactttaagagtatggatcagcacataatagatgttatataacttatgctagtttgattatttttttccttctatttttattttttaaatgggggcaattttacttacataaaaggcttttctaaagtcttaaattgtgtagaatgctttgagaatcattttttattaaagtagctatataatgatatcagtatttcgtttgtattttgttttatttgttaatggtctcaagttgtgccaggggagttttagactggacattaggaagaatttcttcacagagtggatggtcaagcac

SEQ ID NO: 89754 - DNA, 600 bp, Chicken  19866894396827_1
caggacctcacacaaggctgggtgctggacttagcaaagagagatgctgaagagccatttttgaagtgggaaaaggaaaagaagcagcaaggcatagggggagatgtaaagagttgtttctcatcacatcacagcagaagcctggcagtttgatcttccagcccatatggctagaaggccatacacacagattcacacaccccacacaatttaacaatcagtggctgcacatcctcttgtattcatgttcagcacatcttcacaaaatttgtgttctgttctgataattaatatctacamctccccttgccttttcaacctaattcaagaagtgatgccagattattttgcctacttagcaagcaggactgcctcctggtggacttcaaccatgggcaaggcagcagcctatttagattggatataagaaagaagttgtggggktttttgtttgtttttacagtcagtgtggtgaggcactggaacaagtccagagaggaggtagatatcccatccctggagacacctccaaggccaagctggatgagggtctgagcacccactgtgctcacaggagagctggactagatgaccataaaa

SEQ ID NO: 89755 - DNA, 600 bp, Chicken  19866894396827_2
gcagtttgatcttccagcccatatggctagaaggccatacacacagattcacacaccccacacaatttaacaatcagtggctgcacatcctcttgtattcatgttcagcacatcttcacaaaatttgtgttctgttctgataattaatatctacamctccccttgccttttcaacctaattcaagaagtgatgccagattattttgcctacttagcaagcaggactgcctcctggtggacttcaaccatgggcaaggcagcagcctatttagattggatataagaaagaagttgtggggktttttgtttgtttttacagtcagtgtggtgaggcactggaacaagtccagagaggaggtagatatcccatccctggagacacctccaaggccaagctggatgagggtctgagcacccactgtgctcacaggagagctggactagatgaccataaaagggtcattgcaactcaaacgattctgtgataatatactgcattcctctttgctcattagaggacctgctacctcacagctctttcccagattccagtgactcccaccaatttcaatcactacctactcccctccttctccaaaa

SEQ ID NO: 89756 - DNA, 600 bp, Chicken  19866894396833_1
cacaaagctttgttaatatgcaggcactgcggctccctcctggcttccttcccttgcagtttgttttacttcaggattcacccactgggattataaaggctgcagacaagggttagaggtgaaacaaagaaaacaaggatgtttgtttatttagatggagccagaattcataacgctggagacaccgggctcctccccagagataaccgtaattttacagcacccctccacaacctttcttccagaaataaagcagcgacaaatccaaaataccatttccctcagtagctcctagaaccraaacaagaaggagagtttttcctgcaaagtggccagccactggaacaaaacaaacacacctctattgatctccacgtgggagaacatctaaaaaaagaaatgaagacaactctgcctacctcagaggccttcttttattcactcaacatgtgccttattacagaggtctttttttggccacagatactttttcctcaggtggcaaccttatttcccccacaaacccttcaatgggaaggccaaattttgctttcatttacttgcgtagcaaacaggcatattccaggcagcctggcaatg

SEQ ID NO: 89757 - DNA, 565 bp, Chicken  19866894396858_1
ctgattaacagtagacatcagtgctgctaactcaagacaggcaacactaggcataacagaatcataggagcatttgagttgacagggacctttaaaggtcaagtggcctctgcaataaacagggacatctagagctagatcaaagtgcccagagccccatccagcctgacctggaatgtttccagaaatgaggcgtccatcacctctctgggcaacgtgttccgtgatggtcattatgggatttagagctgaaggaggtgttgtgctggcctgaatcttgtccaggtcatgccattaackctttctgctattattactcatgggaaacaccacttgctacttatttcagctgcagctggctcataaagcagcctagtgctgctctgtgatggcatctcaaaggtggctttctaattacgcagggaatgtgtttggcaaaacaattaaatatgtacttaaatttaaatgtatatttcagtctcatttgacttcgatggggatgccacttaatgtcttactcaataaacatgccctcaaacaaatgatagggacaccctccataacc

SEQ ID NO: 89758 - DNA, 600 bp, Chicken  19866894396859_1
tgctaacttaaaaatgcaaagtgaaaaatgtactggcatgcgtaatttccatatggatggttttctaccaatggggagaaattatcacaattctatatgatctttttcagaaatgtcatttttattaaaatcttaatatcgcaaccgctttcaataaggagctgatttcaatctggcttaaaatttctttttttttttttcccctttcctcaaactaatctctgagagggaaaaaaaatgaagtccattgaaataggtttcttgtgtgtatgagtgaaaaatcagacttgcagaacatcrgccttgcacaaactccattaaaatcaaaggtctcccatttgactttaatgggctttggatcaaatccgaaatcctgataccatgtaaaatgaagtctgttcattacggatgagacaagagcattcagaaacagaggaagtcagaagagttaaggttatggtacttcagcttagttacatgtttctgaaatgctgtgtaatggaaagtgggaaggccttccagtaggaagctttgccaacagtatgttggtgtatgtaggctataaagtctttgaagatacatagtgtttattttacagtc

SEQ ID NO: 89759 - DNA, 600 bp, Chicken  19866894396868_1
actggaatagtttcatctctggtatcttctcatataaacctctctgacaaagaatgtgcatttcactcaagctgccacaacactttagctgtagagactgctttagaaaggctctggccataatttgttttcagagctttaacatcagagagaactaatgcggttgtttgggcaagaccactgcagagacagaacagaagcctgtataaaagcatacattttcaagacacatttgtgaaatgctgctgaatgtttgactactcattgcttcaaaaggcctgacatactgcattaaaggtygacttttccaatacactacttagtgttgtttgtaatactgaggaattccttttagcaagatctctacacgcatacctatccactcatcaccacacaacctactttcttgattgaaaccaaaaccatmattaaacatcactgtaaggcttgttttcccaaccttgggcagtgttggtggccctcctggaaatttgctctaacatttctctgttgccctaaaagagattcaggaacaagacatggtaccccactgaggaacacatgtcatgcacagattgaccacaagagctaacctcaccc

SEQ ID NO: 89760 - DNA, 600 bp, Chicken  19866894396868_2
ttttcagagctttaacatcagagagaactaatgcggttgtttgggcaagaccactgcagagacagaacagaagcctgtataaaagcatacattttcaagacacatttgtgaaatgctgctgaatgtttgactactcattgcttcaaaaggcctgacatactgcattaaaggtygacttttccaatacactacttagtgttgtttgtaatactgaggaattccttttagcaagatctctacacgcatacctatccactcatcaccacacaacctactttcttgattgaaaccaaaaccatmattaaacatcactgtaaggcttgttttcccaaccttgggcagtgttggtggccctcctggaaatttgctctaacatttctctgttgccctaaaagagattcaggaacaagacatggtaccccactgaggaacacatgtcatgcacagattgaccacaagagctaacctcaccctacatccactgtgatgaatttacaaacacagaggaagtaacacagccatgaaactggatctgtccctgaacatttcagagacgagatcatctctgctcctgctttatattcttacccttttattact

SEQ ID NO: 89761 - DNA, 599 bp, Chicken  19866894396884_1
  misc_feature (1)..(210): n is any nucleotide
nnnnnnnnnnnnnnnnnnnnnnnnnnnnnnnnnnnnnnnnnnnnnnnnnnnnnnnnnnnnnnnnnnnnnnnnnnnnnnnnnnnnnnnnnnnnnnnnnnnnnnnnnnnnnnnnnnnnnnnnnnnnnnnnnnnnnnnnnnnnnnnnnnnnnnnnnnnnnnnnnnnnnnnnnnnnnnnnnnnnnnnnnnnnnnnnnnnnnnnnnnnnnnnnnnatcattcctttttaggagccccagctatttttaaaggaaaaatgaaagagacagagtttttttctacaattgaacagctcttcatctttmcttcccactccatgtcctcagaggcaaaggtaatcttgtgggccttctcctgatggaggaagctgatggtgtctcattctcacagtggggtggagagagatcaatgtcttgtcactgacataaatgtttaatgcccagacaggcagaactgtctcatgatggcttgctaattatccactgtggcagactggatctgatgtccttaaattattctccttattggctagrgttttaaaactaatcactcatcaaattttcagaaaaatcaaacctaatcttttcacagtaaaggttctacc

SEQ ID NO: 89762 - DNA, 600 bp, Chicken  19866894396884_2
ccccagctatttttaaaggaaaaatgaaagagacagagtttttttctacaattgaacagctcttcatctttmcttcccactccatgtcctcagaggcaaaggtaatcttgtgggccttctcctgatggaggaagctgatggtgtctcattctcacagtggggtggagagagatcaatgtcttgtcactgacataaatgtttaatgcccagacaggcagaactgtctcatgatggcttgctaattatccactgtggcagactggatctgatgtccttaaattattctccttattggctagrgttttaaaactaatcactcatcaaattttcagaaaaatcaaacctaatcttttcacagtaaaggttctaccagtaatgggaatgatactaaaaacagagcagaagaggacagtggtttctttgatccggcatcattactagtcatgcagactgcagagcgtgagtggagtttccattgaagatgagatcttcctgatacctaaagccgtggacattacctctgttggatgagtaattaggtgcaatttgcagaaaattagaattttttttttatatgagaaatgtcatttgtatctagga

SEQ ID NO: 89763 - DNA, 599 bp, Chicken  19866894396886_1
  misc_feature (1)..(91): n is any nucleotide
nnnnnnnnnnnnnnnnnnnnnnnnnnnnnnnnnnnnnnnnnnnnnnnnnnnnnnnnnnnnnnnnnnnnnnnnnnnnnnnnnnnnnnnnnnnaccccggctccagcagggacacccaaagcagggtgcccagccccatgtcctgctggggtctgaaggtctccaaggaggagagcccacaggctctgggcagcctgtgccacggctctgtcacctgcacagcacagctgtgctgcctggtgctctgggggagcccctgtgctccagtcctgaagaccctggctccatcttctcttctcacrgaaaaggttcaccagaccctatcttgttactagaagtacttcacatttttactttgaaactatagcaaagctatgcatcagctaatatttaattacttttcttttccatgtaccggtgaacttagaatagccctctctgagcatccagaatggtactcatcaaagtatagctttggggatatgattagtgaagtaattagttgtactttgaagctgggaactgtgattctgacttgctactaggctgtctattaatcaggccttgtatttcccaaatcccagctttccttttaattagc

SEQ ID NO: 89764 - DNA, 600 bp, Chicken  19866894396886_2
gcccactgccctgggcagcccattccatgctcaccaccctctggtgcagaccctttttctgatcttacaaggattctggagcaagagagatataaacgcatcattcatcacagttccctcacatgtcccattttagtcctttgaggtatgaattcacttggtttgttattagtacaagaagaaagctgcctacctagaacaggtttctagtaaagttaccctaggcggatgagcaacaataatatatctcacctgccggattcaccgtacatctggctttctagagatgctgttttcctyccacagacagaataaggacagcatcttaggatcttgactatttgtttgaaatttccaggtctgtttgggtggatggaacagtggttaggacctggcacggagaaaagtgggaatggcacgtgccagggtcctgtcctgccttacactgggacacagcagagtgtgcgctcagatggaggacctggaaggtgaccctgagtcctgtggcacagatgtaagcaaagggcagatgagatcatcgcttttttttcccatcaatctcatttttaaatctgaaagtagaacaacaaaaaaaacaaa

SEQ ID NO: 89765 - DNA, 600 bp, Chicken  19866894396895_1
tttaaatatcagcccctgatgaagcatctcaggtgtcctcaagctatcaagcaaccaactaaggatacttgaaacaaaactattttagaagtattccattttcttaaaggaagtggtttcagccattaataaacttgttcttttgtttttaatgttctcaaaaatggcactttatctcaacaaaaatatcaggaaaatcttttacattttcagtcagctgtcaaaaaagtattttcttttaattgttatttatttatttattttgaggggagctgtaacttttttgtgtcatctcaaagycttttagcttctgatgtaaaactatsgttttacatcatggcgtggcttgggatctccagctgaagaccccatcaaacacaagagtagcaaaaaatttccagtctcaagtgcagaaggaatgataatatatatctrtatctatatatattgctggacatactgctgacatgtatgtcaattacctgcaatcacttttcgctctgcctttccctctagtagacaggcaatgctttattaatttaattacagctctctaacctcctcaggtggcagccatgcttgagtctgagaatggtgaaa

SEQ ID NO: 89766 - DNA, 600 bp, Chicken  19866894396895_2
tctcaggtgtcctcaagctatcaagcaaccaactaaggatacttgaaacaaaactattttagaagtattccattttcttaaaggaagtggtttcagccattaataaacttgttcttttgtttttaatgttctcaaaaatggcactttatctcaacaaaaatatcaggaaaatcttttacattttcagtcagctgtcaaaaaagtattttcttttaattgttatttatttatttattttgaggggagctgtaacttttttgtgtcatctcaaagycttttagcttctgatgtaaaactatsgttttacatcatggcgtggcttgggatctccagctgaagaccccatcaaacacaagagtagcaaaaaatttccagtctcaagtgcagaaggaatgataatatatatctrtatctatatatattgctggacatactgctgacatgtatgtcaattacctgcaatcacttttcgctctgcctttccctctagtagacaggcaatgctttattaatttaattacagctctctaacctcctcaggtggcagccatgcttgagtctgagaatggtgaaaggaatagtgtggcagagaaagtccta

SEQ ID NO: 89767 - DNA, 600 bp, Chicken  19866894396895_3
tgttcttttgtttttaatgttctcaaaaatggcactttatctcaacaaaaatatcaggaaaatcttttacattttcagtcagctgtcaaaaaagtattttcttttaattgttatttatttatttattttgaggggagctgtaacttttttgtgtcatctcaaagycttttagcttctgatgtaaaactatsgttttacatcatggcgtggcttgggatctccagctgaagaccccatcaaacacaagagtagcaaaaaatttccagtctcaagtgcagaaggaatgataatatatatctrtatctatatatattgctggacatactgctgacatgtatgtcaattacctgcaatcacttttcgctctgcctttccctctagtagacaggcaatgctttattaatttaattacagctctctaacctcctcaggtggcagccatgcttgagtctgagaatggtgaaaggaatagtgtggcagagaaagtcctacaacccttcattttattgattcaaagcatggcaccttattaaataatatcttaattgccagtagctccagagcctttgtggatcagaggttaatttttattttctctcc

SEQ ID NO: 89768 - DNA, 599 bp, Chicken  19866894396896_1
  misc_feature (1)..(53): n is any nucleotide
nnnnnnnnnnnnnnnnnnnnnnnnnnnnnnnnnnnnnnnnnnnnnnnnnnnnntaattagaagaaaaaaaaaacaaaaaacaaatccacaacagaacaactctctgaacaacgtaacccaatctactgcaaaatgttaaaactaaaaattgcttgctaggtaattcagttaatgtagtggcacattattgtgcacttgggagaaatttttattagcttatataggcagagacaatggtgattactgattatcatttaattagaacatacaatttgaatgttgattaggttactttttttwaatatctttaatgaactgtaagactattttgaaaccaggttcccttataccttgactgcttctatcaggtgataaaagaaaacagattgatgtgtgcaagaaaatatttattttatatatatacatataatgtatatgtatacatatacttgcattcatttttctgttaagtggtttctattaaagaagcaagaatcacagcaccacagtggttggaaggaatctctgaggatcatcaagtccaacctccctgctaaagcagtttccctacagtagattacacaggaaagtgtccaggt

SEQ ID NO: 89769 - DNA, 600 bp, Chicken  19866894396898_1
atgtacatgatatatgcatcaacctacacattttccatctaaaagaaaaaaattatttttaagcaagtatttagaagcaaactacatagccttgcaaaccaagtaaattagctctacatactgcagaataaaacagagaacaaattcttcccatagggttcacagcactaaagcagctgttctgtagtcattactgcagtctatgggcagtagcagtcacagctgctatacattaccttaaacaagcattttgggcagtagattcatgtattcagtctttatggtcatcttccctccccmcacaacttactaactcctcctcactttcaaagggggataaaaacacgtagagattttcccagagtgaacaaggaattcagaactcctggtatgcttccaatggctttcccttattacaacattctataactactcctatcygcattgcgcagaacaatggaaatttgccttctgaacagtatctttcttctacatcatctttattttccctttatttttctctgcataattgggttttgaagtgcccacgcgttttgactatattctggacrttattggaaatgtgccctctaatctgct

SEQ ID NO: 89770 - DNA, 600 bp, Chicken  19866894396898_2
aaattcttcccatagggttcacagcactaaagcagctgttctgtagtcattactgcagtctatgggcagtagcagtcacagctgctatacattaccttaaacaagcattttgggcagtagattcatgtattcagtctttatggtcatcttccctccccmcacaacttactaactcctcctcactttcaaagggggataaaaacacgtagagattttcccagagtgaacaaggaattcagaactcctggtatgcttccaatggctttcccttattacaacattctataactactcctatcygcattgcgcagaacaatggaaatttgccttctgaacagtatctttcttctacatcatctttattttccctttatttttctctgcataattgggttttgaagtgcccacgcgttttgactatattctggacrttattggaaatgtgccctctaatctgctcaataaattgaataattagccaatccttattgctaatctgcacatgcatttcatatccaattatatttaaaatttctgtcaacaaagcaattctctttcagaattttgattctatttttaaaattattcattacaatagtc

SEQ ID NO: 89771 - DNA, 474 bp, Chicken  19866894396898_3
cagtctttatggtcatcttccctccccmcacaacttactaactcctcctcactttcaaagggggataaaaacacgtagagattttcccagagtgaacaaggaattcagaactcctggtatgcttccaatggctttcccttattacaacattctataactactcctatcygcattgcgcagaacaatggaaatttgccttctgaacagtatctttcttctacatcatctttattttccctttatttttctctgcataattgggttttgaagtgcccacgcgttttgactatattctggacrttattggaaatgtgccctctaatctgctcaataaattgaataattagccaatccttattgctaatctgcacatgcatttcatatccaattatatttaaaatttctgtcaacaaagcaattctctttcagaattttgattctatttttaaaattattcattacaatagtctccaa

SEQ ID NO: 89772 - DNA, 600 bp, Chicken  19866894396916_1
ttctgaatcagaaaggacattactgatgcgtccatcccagtaacgcaggatttaactgtattctacacaaaggcctaaagtctgagaaaaggaagccttacagttaaggaactagatttaagagatgtctgttttccctcagaagatctgtttccttgtatagctagagaggacagtttgtcctagttaacctgactgggaagtatttaggaataagattcatacttaaaagccaagagcagtagaacacgaacactggcaaacagtcaattaaagaaagcacaaattcagtaggcaagrgtgagtgagtaatgggcattttttgttatttttttttttgctgtcagagaagaatctttgaaattcatggggaacagttactttggttacatattaagtagttttctaattaagctgtttttcatttcagaggtggaatggctgatgcatgcacatactgttttgcaaattcatggttaaatcactgcatttacatactgcacatctgacggagcagggcgcaaattcagttacttagaagtggttttaactgcactgcatgaacagagactaattcctgtctgttccagcattagataa

SEQ ID NO: 89773 - DNA, 600 bp, Chicken  19866894396917_1
tgtcatgtataacggagaaatgaatgaaaagattaagttcctgtataagctgcacatcccacctggtaagaaatttgaaaggatatacctcagtttcccttaaaaaaaaagcaatcagcaaaccagctgatggaaactgttgggaagaggctactttatgaactgtctcgcttccttcagctgggatttgcgtttctaattacgctcactccagttaaaagctttttgggtagaatttatggatacaaaacgttaaggctcacatctgccgcatccggagatgttttgccaccagttctrtggttacttctagactaaatacaaactgggattacgktattggatggytgtactcartttgcagtggaaatgtcctcatyacatctcgatgcagttgtgatgaggtgacgaaattttgcaatagtttctctgttcaaagttttgaattcagtgtgccattcctggcagacttcctactcttactgcggctccagccttacttacattaacagaattttacattacgattaaatgaagtaactgcttcaaaacatatttgccctattatttagctttcttcaagtatgtacrttttacaaa

SEQ ID NO: 89774 - DNA, 600 bp, Chicken  19866894396917_2
ttcctgtataagctgcacatcccacctggtaagaaatttgaaaggatatacctcagtttcccttaaaaaaaaagcaatcagcaaaccagctgatggaaactgttgggaagaggctactttatgaactgtctcgcttccttcagctgggatttgcgtttctaattacgctcactccagttaaaagctttttgggtagaatttatggatacaaaacgttaaggctcacatctgccgcatccggagatgttttgccaccagttctrtggttacttctagactaaatacaaactgggattacgktattggatggytgtactcartttgcagtggaaatgtcctcatyacatctcgatgcagttgtgatgaggtgacgaaattttgcaatagtttctctgttcaaagttttgaattcagtgtgccattcctggcagacttcctactcttactgcggctccagccttacttacattaacagaattttacattacgattaaatgaagtaactgcttcaaaacatatttgccctattatttagctttcttcaagtatgtacrttttacaaacagaaataaccactgtgcagcattagaaggattaatg

SEQ ID NO: 89775 - DNA, 600 bp, Chicken  19866894396917_3
gctgcacatcccacctggtaagaaatttgaaaggatatacctcagtttcccttaaaaaaaaagcaatcagcaaaccagctgatggaaactgttgggaagaggctactttatgaactgtctcgcttccttcagctgggatttgcgtttctaattacgctcactccagttaaaagctttttgggtagaatttatggatacaaaacgttaaggctcacatctgccgcatccggagatgttttgccaccagttctrtggttacttctagactaaatacaaactgggattacgktattggatggytgtactcartttgcagtggaaatgtcctcatyacatctcgatgcagttgtgatgaggtgacgaaattttgcaatagtttctctgttcaaagttttgaattcagtgtgccattcctggcagacttcctactcttactgcggctccagccttacttacattaacagaattttacattacgattaaatgaagtaactgcttcaaaacatatttgccctattatttagctttcttcaagtatgtacrttttacaaacagaaataaccactgtgcagcattagaaggattaatgatacctctttt

SEQ ID NO: 89776 - DNA, 600 bp, Chicken  19866894396917_4
cccacctggtaagaaatttgaaaggatatacctcagtttcccttaaaaaaaaagcaatcagcaaaccagctgatggaaactgttgggaagaggctactttatgaactgtctcgcttccttcagctgggatttgcgtttctaattacgctcactccagttaaaagctttttgggtagaatttatggatacaaaacgttaaggctcacatctgccgcatccggagatgttttgccaccagttctrtggttacttctagactaaatacaaactgggattacgktattggatggytgtactcartttgcagtggaaatgtcctcatyacatctcgatgcagttgtgatgaggtgacgaaattttgcaatagtttctctgttcaaagttttgaattcagtgtgccattcctggcagacttcctactcttactgcggctccagccttacttacattaacagaattttacattacgattaaatgaagtaactgcttcaaaacatatttgccctattatttagctttcttcaagtatgtacrttttacaaacagaaataaccactgtgcagcattagaaggattaatgatacctcttttggacagctc

SEQ ID NO: 89777 - DNA, 600 bp, Chicken  19866894396917_5
ggatatacctcagtttcccttaaaaaaaaagcaatcagcaaaccagctgatggaaactgttgggaagaggctactttatgaactgtctcgcttccttcagctgggatttgcgtttctaattacgctcactccagttaaaagctttttgggtagaatttatggatacaaaacgttaaggctcacatctgccgcatccggagatgttttgccaccagttctrtggttacttctagactaaatacaaactgggattacgktattggatggytgtactcartttgcagtggaaatgtcctcatyacatctcgatgcagttgtgatgaggtgacgaaattttgcaatagtttctctgttcaaagttttgaattcagtgtgccattcctggcagacttcctactcttactgcggctccagccttacttacattaacagaattttacattacgattaaatgaagtaactgcttcaaaacatatttgccctattatttagctttcttcaagtatgtacrttttacaaacagaaataaccactgtgcagcattagaaggattaatgatacctcttttggacagctctcacagaagatgaaagagacagc

SEQ ID NO: 89778 - DNA, 600 bp, Chicken  19866894396917_6
ccagttctrtggttacttctagactaaatacaaactgggattacgktattggatggytgtactcartttgcagtggaaatgtcctcatyacatctcgatgcagttgtgatgaggtgacgaaattttgcaatagtttctctgttcaaagttttgaattcagtgtgccattcctggcagacttcctactcttactgcggctccagccttacttacattaacagaattttacattacgattaaatgaagtaactgcttcaaaacatatttgccctattatttagctttcttcaagtatgtacrttttacaaacagaaataaccactgtgcagcattagaaggattaatgatacctcttttggacagctctcacagaagatgaaagagacagccagtcaccactgaagaatcctttgctgtcaacttcaagaccattagtcattgggaaatcaaacggtatggcggaagtggttctctactctatgcatgtgtgtatgagataaagactttcygcatgttaccccactccattatcttcactctctgggttttattctgaaatgttgatttactgcaatgacttgaaaactaattctccttttt

SEQ ID NO: 89779 - DNA, 600 bp, Chicken  19866894396917_7
ttacattaacagaattttacattacgattaaatgaagtaactgcttcaaaacatatttgccctattatttagctttcttcaagtatgtacrttttacaaacagaaataaccactgtgcagcattagaaggattaatgatacctcttttggacagctctcacagaagatgaaagagacagccagtcaccactgaagaatcctttgctgtcaacttcaagaccattagtcattgggaaatcaaacggtatggcggaagtggttctctactctatgcatgtgtgtatgagataaagactttcygcatgttaccccactccattatcttcactctctgggttttattctgaaatgttgatttactgcaatgacttgaaaactaattctcctttttgtgtccgctccataaaaggagatgcagtagattaccaaaagcaattgaaacagatgttgaaggatctagccaaagaaaaggatacgaaaactgaaaaagaattgccaaaaatgagccaggtatgtatgttaggggctgtggtctgtttttaaaccagagagcgttgacaaatgaactgagctcttagggtaacttaagcccaagctcag

SEQ ID NO: 89780 - DNA, 600 bp, Chicken  19866894396918_1
tcataccaggaaggcatttccagttccatctgtgggtcagcatcacgctgtctgtatttccttaaggcgtctgctaacaagccactgctaaatagctgtaatcctctgctgcaagcctgggtctgagggtggtttgctgcaacaggataatgaacattcctagctagagtgtgtgtgtttggagcccacatcatggcctgcctaaatacatgtgagtcttgggagggcctgacaagggagcaacctaaatcaaattaggaagacaaggggatgttcccaagggccactgcctcagagtgkgcccacaggactggaaaccctgagagattttttctcccatggaacagtagaaataggtaatccagattagtttctctgtgcctccaggatgaaggattattaaaaggaagagtctgcagtactcaaccagcagctgtaacagtaactttgcaggctcctgttcagccttatagggtcagatcatggggatgataaggagaatctctccaaaggccagcaggggtgtttgtgtgtgcaggagatgtgggtgagtgcactgcactgccttgtctttgctccgaatgccatgaccaaagtgcc

SEQ ID NO: 89781 - DNA, 600 bp, Chicken  19866894396918_2
cagattagtttctctgtgcctccaggatgaaggattattaaaaggaagagtctgcagtactcaaccagcagctgtaacagtaactttgcaggctcctgttcagccttatagggtcagatcatggggatgataaggagaatctctccaaaggccagcaggggtgtttgtgtgtgcaggagatgtgggtgagtgcactgcactgccttgtctttgctccgaatgccatgaccaaagtgccaagtttgctggggttttgtgtaagccatttgctgtgcccctcgattaattcatacggacagygtgagcaataagacagtatttcctcagtcggtgttgttttccccccaaagacctggtcagaaaaggaaatctttgtctgaagttcaccctacctgttaccttggatgttacatccacctcaacgtcctgcaacacaacatcagatcctttcaaacagtgactcctgcaattaacattggaaataacgtggaaatgcagagctgaggtgcgaggggcggcctttcccttcaggtggtgttgcagatgaggttctgactcacagttctctgggctgaatgatcataaggaagggacgtccat

SEQ ID NO: 89782 - DNA, 600 bp, Chicken  19866894396919_1
ggtaatagatggaccgtcccaaggtgaagccttactggacctggtgctcactaatgaataggaaagcattagagacgttaagtttggaggcagcctgggctgtagtgaccatgccttggtggagtttgtgatcttgaagaatgtgggcctggcaaaaagcagatctaggaccctgtgctttaagaaagcatacttctggctgctgaaggaactgctgagtgggatcccctgagaaactgtccttaagggcacgggtacagaacagagctggcagctctttaaggacacccttctgagagygcaatggctctctattccccagcagaaggagtcgagcaggggaggcaggcgactgccatggctgtgcartgacctgcagcttaaactgagagaaaagggggaaaggtatagaaggtggaagcagggttgtgtgtcctgggaggaatacagggctgttgtctgtgtgtgtagagataggattaggtagccaaggtgcagatggagctgaactgggcgagagatgtgaaagataacaagaaggggttctacaggtacgtaggcaggaggagactgcctcgtcaaggtcaaggagaatgttcc

SEQ ID NO: 89783 - DNA, 600 bp, Chicken  19866894396919_2
tagagacgttaagtttggaggcagcctgggctgtagtgaccatgccttggtggagtttgtgatcttgaagaatgtgggcctggcaaaaagcagatctaggaccctgtgctttaagaaagcatacttctggctgctgaaggaactgctgagtgggatcccctgagaaactgtccttaagggcacgggtacagaacagagctggcagctctttaaggacacccttctgagagygcaatggctctctattccccagcagaaggagtcgagcaggggaggcaggcgactgccatggctgtgcartgacctgcagcttaaactgagagaaaagggggaaaggtatagaaggtggaagcagggttgtgtgtcctgggaggaatacagggctgttgtctgtgtgtgtagagataggattaggtagccaaggtgcagatggagctgaactgggcgagagatgtgaaagataacaagaaggggttctacaggtacgtaggcaggaggagactgcctcgtcaaggtcaaggagaatgttccccctctgatgaaaggcaatggggagctggcttcctcagacatagaaaaagctgaggtactcagtgagtg

SEQ ID NO: 89784 - DNA, 512 bp, Chicken  19866894396919_3
gagagaaaagggggaaaggtatagaaggtggaagcagggttgtgtgtcctgggaggaatacagggctgttgtctgtgtgtgtagagataggattaggtagccaaggtgcagatggagctgaactgggcgagagatgtgaaagataacaagaaggggttctacaggtacgtaggcaggaggagactgcctcgtcaaggtcaaggagaatgttccccctctgatgaaaggcaatggggagctggcttcctcagacatagaaaaagctgaggtactcagtgagtgctttgcctcagtcttcaygggtggtcaggcttcctgtgtctgccaggactgcgagcctctaggtgaaggtgtggggagtggtttctgtcccactgtaatggttgaacaagtcctcctcatgaaattgaatgtgtataagtacatggggccaaatgatatccatcctagggttgtgaaagagatggctgatgtggttgccgagccgcactccatcatatttgaaaattcat

SEQ ID NO: 89785 - DNA, 599 bp, Chicken  19866894396920_1
  misc_feature (1)..(20): n is any nucleotide
nnnnnnnnnnnnnnnnnnnntccagtgcccttgcaacgaacagggacagctacagccagataaggtttctcagccccgttcagcctgatcttgagcgtctataaggatggagcttccacctcctctctggacaacctggtctagtgcctcaccacccttactgtaaaaaacttcttccttatgttcaatctaaatgtcctatcttttagtttgaaaccatttccccttgttccctcacaactgtctccttccttcctacagctcccatttagatatttaaagaatgctatctggtctccmcagaaaaacatcctctacccctgaactgatgttttgagttttcagtgagtagaatagtctggagaatgggaaaagcatgttttcatttaaatgtttagactagctaaaaccaagagacagatttacagagaatatgaaaaaaataaataagaggaaatgaagatatgaataaatttcagaaataatttacagaagtgaatacaggctcatgttaatataacacaagaaacaaagatcatttacttgaaaagaacagaaaaagtaatctacctatgaaattctcatggccttctttgttt

SEQ ID NO: 89786 - DNA, 600 bp, Chicken  19866894396922_1
agaaaacattgtaccttatatttcgtgttctatgtttttaaatgttaaaggttctgtgcatttagaggtgcactactttttactaattctaatcttctagtgtcggatttaacaattgtaattccatggttagtgtattgttttgctattttttctttattacttatatcaaacatgcaaatagggaggataatatttttagagtaagcagaaattcaatttataagggactaacacatggttttcccaaatagtaatcagataagtttcccttctattgtattaacttccatgacctawatcagtacagtgctgtacaaactcgcataaaaactcaaattctgacttcaaatttaaacgttaagatgaaagaaaagtgcttgcaaaagctaaaagattgtttgtaggactcaagtctggttttggacatctacatttgtcatcttaatatatatatatatctcaattatattgattgtgttatatacaattatattgtatatataatattatatatatcttaatatctttatatatatatatttaccatgaaaacagtcaatcactgtaacgacttccccagggatgatatggagatct

SEQ ID NO: 89787 - DNA, 599 bp, Chicken  19866894396926_1
  misc_feature (1)..(20): n is any nucleotide
nnnnnnnnnnnnnnnnnnnnacagtgcagaaatgtctcataatgcccagtctgaccctcccctggtacagctttgtgctactcccaggagcagagcccagcaactccctctgcgtctccctcctcagggagcaacagagacaaatgaggtcacatcttggcctcctccagactggacaactcacatgtcctcagtttctcctaccaggacatgactctactgtggaaattgtgtggatagttttaactttcagcatatgtatgattccagtaaagcagtgtaagtttccttataaagctwccaaagcacattatgattctaaaggactctaaccagcatttttataccattctcccaaagagcttttggtttgtagagcttggcccattattggatctcctgtgtactgctagaagccctgcagaacattagacacctggtcaccctcacacctctgtagttactgcagaaagatagaaattatgtatgagagctgctctgaaagtaatgtctcctatattatgctcgcccacaacatcagaggctgacgctggtagtacagcagtagaggttgaaccttcccaccaatattccattac

SEQ ID NO: 89788 - DNA, 600 bp, Chicken  19866894396928_1
aaaatctccagggacactgactcccccccacctccctgggcagcctgtgccagtgcaccaccactctttctgagaagaaatgtttcctaatatccaacctgaacctcccctggtgcaacttatagccattacttcccagtttattttcttttcagatttcaacagctcaagactcattcactgggaaggaacaaaatggggagatctgattttccccctacctgcagcatggaaatatgagggctttaaaagcgatcagtgttttaaatctattggtgaaattttcctctgtaggagtcrcaggcagtcagataaatttggaataggtattagaaaaaagatggatgtggcaggtctgattaatccaggtgcttttcttgaataacgataattggggtttagcacggctatacgaataaaatcaaatttaatcagcaaatggactgcctccaaacttactgccaacccaccctcacatttttctagggctactgctataatttcattgaaattgaagttttcatcctgaaaatttcttctttcaccttttatgccattttcatcctttccttcacagaacgcagatttagagtttcactc

SEQ ID NO: 89789 - DNA, 600 bp, Chicken  19866894396936_1
cacagtaactattagaaatgcagctgtgggcgttacttttaggctgctgaaggttcctgattaaataaggaaacatctttagggaccgcttgaccagcatcatccagagtatgcaataccttctgcataggcacgtgagaatggtttgtcctctgttgctttagcctcctcctctcccttcctgcagcacatgtactggaccatgaagcagcagctggcgcatcactccatcaatgggtgcaacctccgacctggagacctcctggcatcaggaaccatcagtgggcctgtgagtgttcragtgctgatagcaccagtaaccactcagcacatttaaaatactacacctacagacctaattttgcaagctattactcttgtatagacactggtggcaatgtctgagtaaggcactggctgaaacatcaaatataatcgctcttcatgctgtctttcagacagcttcaggctaagtggtttccaatcaaggatacctatccttccattctgagcacctctgaagtgatttcctgcagattgacattcatgatttacaaacctttgccagctttgcttctgaagaacaaaacataaatgaaa

SEQ ID NO: 89790 - DNA, 600 bp, Chicken  19866894396938_1
tatagaaagaaacaacacaattgttagggctaaacggagacaatgagaagaaacaataacaaattttgctattgcaatgacactggaaacgtgaaaaagtagaacaaggtaaagaactacagaacgccttcagagttagtggaacttcattagaaaaacgaaaaaggtgcaggagtccaaaacaaatttatagatagatattcttccacataatctatgttatacgatatatataatatattctttcttaggagctttgggctttgaccaagatattactggccaggaaagaactcagtrgatctctggaaaacatttccactgagaagttgagtatgtataaagaacaaacagaagaaattgctgcagaagttcataaaaccagaaagtactcttataacaacaggcatcattctgaatctcctcagcctaaagaagtgacagcaggaacaagaaatgcaccaaagttaattacaaagaaaagtacagaatggcaaccacacaagaaacagctaaatacataaggagtcctcactgtgaaggtgataagtaaagagggagagggaagagacatcyaaaaccaaagagacagagatcaga

SEQ ID NO: 89791 - DNA, 600 bp, Chicken  19866894396938_2
tactggccaggaaagaactcagtrgatctctggaaaacatttccactgagaagttgagtatgtataaagaacaaacagaagaaattgctgcagaagttcataaaaccagaaagtactcttataacaacaggcatcattctgaatctcctcagcctaaagaagtgacagcaggaacaagaaatgcaccaaagttaattacaaagaaaagtacagaatggcaaccacacaagaaacagctaaatacataaggagtcctcactgtgaaggtgataagtaaagagggagagggaagagacatcyaaaaccaaagagacagagatcagaaaataaccagctggttgcactgcctacttaacttagtgctttgagtaggagacaaaactacactggtgaaccaaagaagaagaagttaaaaaaaacacaacaattcaatagatatttttccctttcttgcacagataaactatgttattaattagcaacaaatatttgtccatactaaatttctgtgtgttcaaactcaattaaactcacataagaaaaatccaccaacagttactaaacacaaaactatgtcaaatcatactgccaagatcagca

SEQ ID NO: 89792 - DNA, 600 bp, Chicken  19866894396942_1
taatgaaaaaggtatcaaaaatgggaaagaaaatgaatataaaagaaaactataacagtgtgaagggatatgaaatagaataataatattagggtgtaaaactcaatgaaggttaatatttgagcaaagatgaaattatgttcctgaactaatgtctgtctttctcctttttggtttattgtatcaaacctgttggttaatgcagactaaagtgtatttgtgattaatatgtcttggtttgatttatcttttgaatttggtgcttggtaaattcatgtatttcattaaaattggaacttytgtaagctctragcccttactatgttctgctctgagctgttttgttcccttcccactgcagtgtggctaactgygaaggaagctgaactgtgtcaaagrttaattttattaatcattgcttgtaagttatatcaggtgattaatcaacacaggatctttctgatttacagcagaacttgtgagatgtttgacacccctgggtttttgagttcaggtttgttggtttacaggtctgctcgcagtgagtgatctccatttggtttccttggggctgccatccttgttgtagacctggctcac

SEQ ID NO: 89793 - DNA, 600 bp, Chicken  19866894396942_2
gtatcaaaaatgggaaagaaaatgaatataaaagaaaactataacagtgtgaagggatatgaaatagaataataatattagggtgtaaaactcaatgaaggttaatatttgagcaaagatgaaattatgttcctgaactaatgtctgtctttctcctttttggtttattgtatcaaacctgttggttaatgcagactaaagtgtatttgtgattaatatgtcttggtttgatttatcttttgaatttggtgcttggtaaattcatgtatttcattaaaattggaacttytgtaagctctragcccttactatgttctgctctgagctgttttgttcccttcccactgcagtgtggctaactgygaaggaagctgaactgtgtcaaagrttaattttattaatcattgcttgtaagttatatcaggtgattaatcaacacaggatctttctgatttacagcagaacttgtgagatgtttgacacccctgggtttttgagttcaggtttgttggtttacaggtctgctcgcagtgagtgatctccatttggtttccttggggctgccatccttgttgtagacctggctcacactagtgaagc

SEQ ID NO: 89794 - DNA, 600 bp, Chicken  19866894396942_3
atagaataataatattagggtgtaaaactcaatgaaggttaatatttgagcaaagatgaaattatgttcctgaactaatgtctgtctttctcctttttggtttattgtatcaaacctgttggttaatgcagactaaagtgtatttgtgattaatatgtcttggtttgatttatcttttgaatttggtgcttggtaaattcatgtatttcattaaaattggaacttytgtaagctctragcccttactatgttctgctctgagctgttttgttcccttcccactgcagtgtggctaactgygaaggaagctgaactgtgtcaaagrttaattttattaatcattgcttgtaagttatatcaggtgattaatcaacacaggatctttctgatttacagcagaacttgtgagatgtttgacacccctgggtttttgagttcaggtttgttggtttacaggtctgctcgcagtgagtgatctccatttggtttccttggggctgccatccttgttgtagacctggctcacactagtgaagcagtrccctgctgcagcaggacgcagcacggcctgttgctctgctggatgttgcagctctcctt

SEQ ID NO: 89795 - DNA, 600 bp, Chicken  19866894396942_4
aactcaatgaaggttaatatttgagcaaagatgaaattatgttcctgaactaatgtctgtctttctcctttttggtttattgtatcaaacctgttggttaatgcagactaaagtgtatttgtgattaatatgtcttggtttgatttatcttttgaatttggtgcttggtaaattcatgtatttcattaaaattggaacttytgtaagctctragcccttactatgttctgctctgagctgttttgttcccttcccactgcagtgtggctaactgygaaggaagctgaactgtgtcaaagrttaattttattaatcattgcttgtaagttatatcaggtgattaatcaacacaggatctttctgatttacagcagaacttgtgagatgtttgacacccctgggtttttgagttcaggtttgttggtttacaggtctgctcgcagtgagtgatctccatttggtttccttggggctgccatccttgttgtagacctggctcacactagtgaagcagtrccctgctgcagcaggacgcagcacggcctgttgctctgctggatgttgcagctctcctttggaagcagaggagggacrgtgcag

SEQ ID NO: 89796 - DNA, 600 bp, Chicken  19866894396942_5
cttactatgttctgctctgagctgttttgttcccttcccactgcagtgtggctaactgygaaggaagctgaactgtgtcaaagrttaattttattaatcattgcttgtaagttatatcaggtgattaatcaacacaggatctttctgatttacagcagaacttgtgagatgtttgacacccctgggtttttgagttcaggtttgttggtttacaggtctgctcgcagtgagtgatctccatttggtttccttggggctgccatccttgttgtagacctggctcacactagtgaagcagtrccctgctgcagcaggacgcagcacggcctgttgctctgctggatgttgcagctctcctttggaagcagaggagggacrgtgcagggcacttgcattgttgtgcctgacacaacgcactgctcaatgggagcctgcatttcttggagctgtcaatgtgggatattttgtgaatacaaaatcctctttaaaaatcccaaataaataaataaataaacaaaaaaatacccctagcactgaggcagagccaaactgcagaaatgaattacccagactaagacaagcattctgttttcagaaatg

SEQ ID NO: 89797 - DNA, 600 bp, Chicken  19866894396942_6
caaagrttaattttattaatcattgcttgtaagttatatcaggtgattaatcaacacaggatctttctgatttacagcagaacttgtgagatgtttgacacccctgggtttttgagttcaggtttgttggtttacaggtctgctcgcagtgagtgatctccatttggtttccttggggctgccatccttgttgtagacctggctcacactagtgaagcagtrccctgctgcagcaggacgcagcacggcctgttgctctgctggatgttgcagctctcctttggaagcagaggagggacrgtgcagggcacttgcattgttgtgcctgacacaacgcactgctcaatgggagcctgcatttcttggagctgtcaatgtgggatattttgtgaatacaaaatcctctttaaaaatcccaaataaataaataaataaacaaaaaaatacccctagcactgaggcagagccaaactgcagaaatgaattacccagactaagacaagcattctgttttcagaaatgatgcaaatgttagagagggttgaaaaaaaatgcctagtattgaagaaatgagaatttgtgttaagagaattgaaatca

SEQ ID NO: 89798 - DNA, 600 bp, Chicken  19866894396953_1
aagctaaacaagcctagctccctcagcacttcttcaaagaagaggtgctccagaccctgcttcacatttcttcctgctctctcagaagatcacataacccacaggaaggctatcatgggcagggcaggagacagcacccttcaaaacagtttcatccaaagcccctggcttttgggaggacattttccttgtcaagcaggctagtcaactgcagggagctggtgaaccagtgtactgcagaaaggtatgacatttctggagtactcactgtgacttgcccagagaggctgtggatgcccygtccctggaggtgttcaaggccaggttggatggggccctgggcagcctggtctagtattaaatgtggaggttggctgtcctgcctgtggcaggggggttggagcttgatgatccttgaggtcccttccaacccaagccattctatgattctatgattctatgcctgtgacttagagcctctgcagtgaagagagcaggagcaaggacagaggaacagaagactgagtcatgggcttcggtcactaagcaaaaggaacttctgggattgaaagaacaagagcaaatggcgttaaactgaaa

SEQ ID NO: 89799 - DNA, 600 bp, Chicken  19866894396959_1
gagcgctgagcacacagcctgcagccgccgcgttgcagcgctgccagctcccaaccagctcgctcccatcctgttcacagccctacctgccagagagctccggaaattgaaggaaaaatccagcctgaatagagcaatattagcaaatgctgcaaaacacaaaggtctgctcgacaacagcggtgtgcacaaacgcagactcccagcttagcggctcatgtgcaaagcagcacctgcacccaccggacctggtgcagagccctgctgttccctttctctgctgcaaggctgagaggaggygttttgatgggaaagttcatgctctgccctgtttcctccctgctcagaccacaacagagccttttgggtcagaaaggggatgttctgacacgaccccgctttgcaaaggcagccaygtgagctctgcaaagcacggcatgcaccgaaaccgtgagaaccatcagcggtgggatctggccctgcagctccaatcaagttcccacctggcgcctgatcctgttcctgtttgcaacaccgggaatgacagtgctgtggggtgagctgtgagccctgcagccggaccctgccctgctcctggcc

SEQ ID NO: 89800 - DNA, 484 bp, Chicken  19866894396959_2
aatccagcctgaatagagcaatattagcaaatgctgcaaaacacaaaggtctgctcgacaacagcggtgtgcacaaacgcagactcccagcttagcggctcatgtgcaaagcagcacctgcacccaccggacctggtgcagagccctgctgttccctttctctgctgcaaggctgagaggaggygttttgatgggaaagttcatgctctgccctgtttcctccctgctcagaccacaacagagccttttgggtcagaaaggggatgttctgacacgaccccgctttgcaaaggcagccaygtgagctctgcaaagcacggcatgcaccgaaaccgtgagaaccatcagcggtgggatctggccctgcagctccaatcaagttcccacctggcgcctgatcctgttcctgtttgcaacaccgggaatgacagtgctgtggggtgagctgtgagccctgcagccggaccctgccctgctcctggcc

SEQ ID NO: 89801 - DNA, 600 bp, Chicken  19866894396968_1
ccaaatttttccttagaattcagaatgtaaacatattaaaaatagaagagctgttaggagataagaaatcttggcataaacaaaaaatgacatgccactagcagctttatctatcattatatttcccatccttttttctccctactggtttttattggttcaaataagaaagatactgtaagcctgtccatataaaatatgtgtaaataaaacacaacccagagcatgaagtttttgttggattagagagtaacaagatgatatttgaatggggaaaacaaaacaagaaataaaattttsataaaatacaaactcattaaaatcaaacttctgaacagatgggcgtttcaatgcagaagataaatcatacttcagtgcattttaacctggccgtgaaattaaacttcaaaagcattatgcacactcagttatataaaactgatggaagttgacttcaaaattctttaaaatttatgacgaaacagtattacagaaaaagtaaactcaaaacccaagtcactcatgtacctacttttatgaaggcagcaaggctatggtttgcattttttgaagcctctggattgtctctgtacttctgag

SEQ ID NO: 89802 - DNA, 600 bp, Chicken  19866894396973_1
cattcagcttcctaacattctttgtgctgatccttccccaggtgttgtaacctgcaactacaagtatgctgacaaaatcaagcaaactacttgaaatggaagttgaacaatattaatataacatctgtggtttgtgaatgtttttacttaataaagttagctgataaatttccaggcaagttctttcagcttttttccccatgctttgtgtaagcaaatgactaagcgggatttggatggttggtaatcaaggtaatgtcttcaagaaacgcttaaatgctctttagttattatgagaayrtgatgtgttacagtgttgcaacaaaaacatcaattttgtttaaactgtaagccctcctttgtgtgtttggctttagctttgccatcggccagggacgtttctggctgaaagcatcgttttgctgatgagaggaacaaaatgataacctgaaaccttgtcagtgcaggttttgaagctcagcttgtgggccagctctaacttcaagatagctgaagttgacggagcaacaccaccatcatttgtgcttaatgtcacgtgtattaaagccagctgtttgtgccatggttttaattcctcag

SEQ ID NO: 89803 - DNA, 600 bp, Chicken  19866894396973_2
attcagcttcctaacattctttgtgctgatccttccccaggtgttgtaacctgcaactacaagtatgctgacaaaatcaagcaaactacttgaaatggaagttgaacaatattaatataacatctgtggtttgtgaatgtttttacttaataaagttagctgataaatttccaggcaagttctttcagcttttttccccatgctttgtgtaagcaaatgactaagcgggatttggatggttggtaatcaaggtaatgtcttcaagaaacgcttaaatgctctttagttattatgagaayrtgatgtgttacagtgttgcaacaaaaacatcaattttgtttaaactgtaagccctcctttgtgtgtttggctttagctttgccatcggccagggacgtttctggctgaaagcatcgttttgctgatgagaggaacaaaatgataacctgaaaccttgtcagtgcaggttttgaagctcagcttgtgggccagctctaacttcaagatagctgaagttgacggagcaacaccaccatcatttgtgcttaatgtcacgtgtattaaagccagctgtttgtgccatggttttaattcctcagg

SEQ ID NO: 89804 - DNA, 600 bp, Chicken  19866894396975_1
tccccagagttcctcctgtatccatgcttaccaaacctctgcagcaagcacaatgcttcatgtattccttcaagcatctggaaagcaggacagaggaatgatgaacatttggagtagtgcttgcaactgctgatccagtgctgtggaaacctcagagcatctcaagacctctcgtagccaagagggcttactgccaaccagaagcaaacccaggagcagcacagggctctgcaccacgctggtaaggtgtcccagttaagtctgaaaggcagggaggtgccagagcttccctggggaacrcaagcagcctagaccctaactagttccccatcagccagtccatgaaatcttaacgaatcaggtgcaggagcacacctaaatcaagtgtacttgcagcatcctgctctcaactcagcaagcacttgccaggagcaatacactcagctggacctacactggctctaatccctgacacagacaagttgaagcttcagcaatgaagaatctcactgcaaagcgtaagatgcactgcgtgcatcactccaacaccagtggagtggtttagtttagtggttccagatgctacactgaaagggtaaa

SEQ ID NO: 89805 - DNA, 599 bp, Chicken  19866894396977_1
  misc_feature (1)..(23): n is any nucleotide
nnnnnnnnnnnnnnnnnnnnnnnaactgagggtgaaataagcttttttaagcctaataaggcccagagtgaatgtgttggttaagacattacagaagctgtagggcaaagccatgtacatgtctagtatctagacaaatggactctcttccctcttaaatgagaaaagcagggaaacatttgaatgaattctctttccttaaagagaaacattattcccattggttccagatcattgttttgcaggcagtatgacttaacacactctggtccttggatcagtgttgcattggtcttaggrcaccaagaaggtttacaggtgtgatggggccctctgtaaacgtaacttycttcttcctctttgaataccaaacaccccaaaaaagytrctagaaaaggcattgctctgtaaacctggcactcagcttgcagcagtgatagaaagtkgaaaaatggggagtrgaaaaggtaggtgctgctctctgtcactgtacatcagtgctatagaatatgtcctgcagccttcaactcatagagccccccccmgttccctgggaagaacatttaaggacaaagacaaaacaacttgaagtaattgcc

SEQ ID NO: 89806 - DNA, 600 bp, Chicken  19866894396977_2
agcctaataaggcccagagtgaatgtgttggttaagacattacagaagctgtagggcaaagccatgtacatgtctagtatctagacaaatggactctcttccctcttaaatgagaaaagcagggaaacatttgaatgaattctctttccttaaagagaaacattattcccattggttccagatcattgttttgcaggcagtatgacttaacacactctggtccttggatcagtgttgcattggtcttaggrcaccaagaaggtttacaggtgtgatggggccctctgtaaacgtaacttycttcttcctctttgaataccaaacaccccaaaaaagytrctagaaaaggcattgctctgtaaacctggcactcagcttgcagcagtgatagaaagtkgaaaaatggggagtrgaaaaggtaggtgctgctctctgtcactgtacatcagtgctatagaatatgtcctgcagccttcaactcatagagccccccccmgttccctgggaagaacatttaaggacaaagacaaaacaacttgaagtaattgcctcaatttaataagaacttagcaaatctctggttctgaaaacaaggcaaaa

SEQ ID NO: 89807 - DNA, 600 bp, Chicken  19866894396977_3
cattacagaagctgtagggcaaagccatgtacatgtctagtatctagacaaatggactctcttccctcttaaatgagaaaagcagggaaacatttgaatgaattctctttccttaaagagaaacattattcccattggttccagatcattgttttgcaggcagtatgacttaacacactctggtccttggatcagtgttgcattggtcttaggrcaccaagaaggtttacaggtgtgatggggccctctgtaaacgtaacttycttcttcctctttgaataccaaacaccccaaaaaagytrctagaaaaggcattgctctgtaaacctggcactcagcttgcagcagtgatagaaagtkgaaaaatggggagtrgaaaaggtaggtgctgctctctgtcactgtacatcagtgctatagaatatgtcctgcagccttcaactcatagagccccccccmgttccctgggaagaacatttaaggacaaagacaaaacaacttgaagtaattgcctcaatttaataagaacttagcaaatctctggttctgaaaacaaggcaaaacttgccccggaactaaaagttcactgtgtgtagtggt

SEQ ID NO: 89808 - DNA, 600 bp, Chicken  19866894396977_4
ttacagaagctgtagggcaaagccatgtacatgtctagtatctagacaaatggactctcttccctcttaaatgagaaaagcagggaaacatttgaatgaattctctttccttaaagagaaacattattcccattggttccagatcattgttttgcaggcagtatgacttaacacactctggtccttggatcagtgttgcattggtcttaggrcaccaagaaggtttacaggtgtgatggggccctctgtaaacgtaacttycttcttcctctttgaataccaaacaccccaaaaaagytrctagaaaaggcattgctctgtaaacctggcactcagcttgcagcagtgatagaaagtkgaaaaatggggagtrgaaaaggtaggtgctgctctctgtcactgtacatcagtgctatagaatatgtcctgcagccttcaactcatagagccccccccmgttccctgggaagaacatttaaggacaaagacaaaacaacttgaagtaattgcctcaatttaataagaacttagcaaatctctggttctgaaaacaaggcaaaacttgccccggaactaaaagttcactgtgtgtagtggtaa

SEQ ID NO: 89809 - DNA, 600 bp, Chicken  19866894396977_5
cttccctcttaaatgagaaaagcagggaaacatttgaatgaattctctttccttaaagagaaacattattcccattggttccagatcattgttttgcaggcagtatgacttaacacactctggtccttggatcagtgttgcattggtcttaggrcaccaagaaggtttacaggtgtgatggggccctctgtaaacgtaacttycttcttcctctttgaataccaaacaccccaaaaaagytrctagaaaaggcattgctctgtaaacctggcactcagcttgcagcagtgatagaaagtkgaaaaatggggagtrgaaaaggtaggtgctgctctctgtcactgtacatcagtgctatagaatatgtcctgcagccttcaactcatagagccccccccmgttccctgggaagaacatttaaggacaaagacaaaacaacttgaagtaattgcctcaatttaataagaacttagcaaatctctggttctgaaaacaaggcaaaacttgccccggaactaaaagttcactgtgtgtagtggtaatgaattgctttctgtacttctgcaggtaccaagctgtgcctccaccaaattgctagct

SEQ ID NO: 89810 - DNA, 600 bp, Chicken  19866894396977_6
agaaaagcagggaaacatttgaatgaattctctttccttaaagagaaacattattcccattggttccagatcattgttttgcaggcagtatgacttaacacactctggtccttggatcagtgttgcattggtcttaggrcaccaagaaggtttacaggtgtgatggggccctctgtaaacgtaacttycttcttcctctttgaataccaaacaccccaaaaaagytrctagaaaaggcattgctctgtaaacctggcactcagcttgcagcagtgatagaaagtkgaaaaatggggagtrgaaaaggtaggtgctgctctctgtcactgtacatcagtgctatagaatatgtcctgcagccttcaactcatagagccccccccmgttccctgggaagaacatttaaggacaaagacaaaacaacttgaagtaattgcctcaatttaataagaacttagcaaatctctggttctgaaaacaaggcaaaacttgccccggaactaaaagttcactgtgtgtagtggtaatgaattgctttctgtacttctgcaggtaccaagctgtgcctccaccaaattgctagctcagagttctaattaa

SEQ ID NO: 89811 - DNA, 600 bp, Chicken  19866894396977_7
gcagtatgacttaacacactctggtccttggatcagtgttgcattggtcttaggrcaccaagaaggtttacaggtgtgatggggccctctgtaaacgtaacttycttcttcctctttgaataccaaacaccccaaaaaagytrctagaaaaggcattgctctgtaaacctggcactcagcttgcagcagtgatagaaagtkgaaaaatggggagtrgaaaaggtaggtgctgctctctgtcactgtacatcagtgctatagaatatgtcctgcagccttcaactcatagagccccccccmgttccctgggaagaacatttaaggacaaagacaaaacaacttgaagtaattgcctcaatttaataagaacttagcaaatctctggttctgaaaacaaggcaaaacttgccccggaactaaaagttcactgtgtgtagtggtaatgaattgctttctgtacttctgcaggtaccaagctgtgcctccaccaaattgctagctcagagttctaattaacagcatgtggtagtgctcagctgataataactatacctataaatatcagataaactgcagattatccttaaagttttaattagc

SEQ ID NO: 89812 - DNA, 600 bp, Chicken  19866894396980_1
cagtatctaaaggggaactacaggaaagaaagggacggactctttagcagggtctgttgtgataggacaagggaaaatgttttcaagctcaaagagggtagatttaggtgaaggagtggtgaggcactggaacagcttactcagtgatggtagtctccatccctggagactttcaaagccaggctggatcaggccctgggcaacctgatctaactgtgcatgtccctgttcattgcaggggaattggactagatgggctttaaaggtcccttccaactctaaggattctatgatttattyccaaatcatccgtactgtgggagacaaatttcactgtctgacttgaacatacctaacagtttcctaccagaagataaacaaggtctatccagttaaatgactgctgagaagcttcccccagctactgatttttctcctggaagctattggtagttagcagcaagacttgcagccggaaggcagaggaagaaaggagaggaagaccttgggcaagacacagcccctcgggttgcgattccctcagaggcatttctaaatgcagaggcatgcatacatcagtcacgacatacacaatgtcta

SEQ ID NO: 89813 - DNA, 600 bp, Chicken  19866894396981_1
tctgaggtctacaggaaaaatgaccaagggggtaataaggaagggcatacatgtgaggtataaatcaaaacactttactagttctctgttcttccttcaaatatttgtttcaccatgaatcacagaatcatatgcagaatggagggatgggtctatcaaagatgaccagggtctggatgggcatatcccagtcatgccacaggtcacagccatagcttcagtgcagtgtgctgatgtgctggggctccaaggcacatctcctcccaaaaatatacagcttaagcagacacctgggaagayctgcaagaagctgttggtttaggaaccttacatgcaatcctctctcacacttggatttccttgagagatcactgctgcaggatgctaagatgagcaacatgagtcaatcagaaatacaaagccaytcagtctcaacaaaatgcttggttgtgagtcaaacaatacaagttttgaaaactatttcagactaaattcttcctcaggacatggcctccaagggtgaaagcttggtcccactgaggccaagagcaaaattcctgcagacctcagcaggacctggctcgtacccaaagcaaactt

SEQ ID NO: 89814 - DNA, 600 bp, Chicken  19866894396981_2
aatcatatgcagaatggagggatgggtctatcaaagatgaccagggtctggatgggcatatcccagtcatgccacaggtcacagccatagcttcagtgcagtgtgctgatgtgctggggctccaaggcacatctcctcccaaaaatatacagcttaagcagacacctgggaagayctgcaagaagctgttggtttaggaaccttacatgcaatcctctctcacacttggatttccttgagagatcactgctgcaggatgctaagatgagcaacatgagtcaatcagaaatacaaagccaytcagtctcaacaaaatgcttggttgtgagtcaaacaatacaagttttgaaaactatttcagactaaattcttcctcaggacatggcctccaagggtgaaagcttggtcccactgaggccaagagcaaaattcctgcagacctcagcaggacctggctcgtacccaaagcaaacttttcaagtcccagccaaactcttcagctgcagacgttcatttctattatttttgtagcctttttgtcctgcaaaagggatccttctgcattgtccatccaacagtcattaacaagatggaagaaat

SEQ ID NO: 89815 - DNA, 527 bp, Chicken  19866894396989_1
tagcctctaagggatacttcattagggtatcaatctcccataggttctgtgtcatatctgtcagccctgtgcagatgtcttgagtacttcagagcttctgaaactgagctagaaacctatgtttaggcaactgaaatgaatctgtatgacagaaagctagattcttccaaatattttgagtatcccccccaaatgagactctgttgtctaaatataggtagccagtgacatttgaaactctttatgaaatttgaaacatctgcaaaaagctggcaaaacttacacaggacccacagaatraactaaaagggacacatcataatgcagctgaaccctgttccattagcttaaatgaaattttagtagtctacctgtcatgtacatacttgtgaagatgcacttaaatctggttaattgaaattcagactgaatctttcccctttctcattccaatatttgtattaaacatatcaaagtcacagtgcagcttgggtccccgaccactgccctgggaggcctgttccagt

SEQ ID NO: 89816 - DNA, 600 bp, Chicken  19866894396990_1
gggaaaggaaaaaaaaaaaaaagagtgaaagcttttctgatgcaaaaacaagaaaagaaaagaagagggggcacagggaaccaggattaagggttacaaagacacttagaggctctttcctctcttttcagcacatcggcctttgagtgtttgctcctctggacaaacgctgcagtatttcagtggataagaaggtgaaccttgtaaaggaggtcatgatccaccattttaccattttcttaagaatcacgccttgactttataaggataattactgacaaggggcacaaatcaattccraaagcctcatcctttatgttattgtattgtagcagttcacacacctaaggcacatgaggcagttatgtctgaaggatttgtgtcttaaacctacggttgcaagcaggctaacaagcaaaaggcactctgacatttaatcatttatttttttccttgtcagttttacaaaaacataagaaataaatgcaattcacagttctctgctgtgtggaaatacaaccaccaattgcaacaaacgcaacggcagtcagcactttcctctttccgtatcttttatcatacttccatggtgtcccatca

SEQ ID NO: 89817 - DNA, 600 bp, Chicken  19866894396997_1
tagaagcatgtgtaattcacttgttgtggatttgctaattttaaacagatttaacctactgatagtgttttcttctgtaaagtttattgagctttgtcagagctccattttgttttctacagcctgctttagggtatacatgaccagcagggagcttctctttgtgtatgggaatttctttcttcaagtaaaaaaaataaaatggtttagtaagtaatgaagttactgtggacgctaattacccactacatttgtgaataaaggttgagctatgattttcacaggaaataaaagcaaacwtcctcttattccatcttcattttttctttggaaggaatttaaggactctggccatctggatgtctggcaactcagtcagagctgtggctactgtgtgtgtgcagattaactgtgtagcacatgcacagtaagtccaatgtgtccagtacacatcagacctgctgcacatgtgctgcacagatggtctgtgcatacgcagtaaatcagatatgtgaagtctactgcgcatatgcaaaccatctgtgcaatacacatatatatatttctgcctgggaaatcccttgtcagagcatgaaaggt

SEQ ID NO: 89818 - DNA, 600 bp, Chicken  19866894397001_1
caaacgagagctctgtaaggtcacttagttcacctgttggtgaagaaatgattgttcccaaacactctcttttttcctttttcttcttctagattgattacaccaaaattctaacactatccttgtgtaacagtaacagaccaacaggcttcactctcagatttttttctataatgtctatcccatccctgtagcaattccacaattccaagacagcaccaacttctgtttttttaatgcactatcaaggactacaaccttatcactttattaagaaagtaaaagctccttaatttgtcrattaatctaaatctggagttcagcacagctaggagagcctaagggcaaaggaagtcatcctttgctttcttacagtcagagcatagtggccttcacctgtggttttacagcagcattgaggacttttctgcccgtcacatttgcctgttcctttcagacaaccccagcatcagcgagacagagtgcaattacaaaaaatgtgcaattgtgttttcttaatagtgaattttgttttcgttccgataagaaaatgtggtaataatgtaattcacatttcccttaaattgcatttttattatt

SEQ ID NO: 89819 - DNA, 600 bp, Chicken  19866894397002_1
tgaatggcactgtttcctcttgatgtggtggtcctgggtgaccactaattcacagagaattaggtttgaagagtatattttacaggcatactgaaaagaacagctaattctttttcattggcttgaatatcttttaattttggatctgttattctattagaagtagaactcatggtaatgctgcagcaaagtattgatttcagagaaacgagcttgcttccacacgtccccatggtgggcttgtgtgttgcaaggtgcattgcccacggtctttcagaacagcttggcgtacttaagtarctgggaagagagcacgtaggctcctagctcctcaacttctcccaagctgtcygcctgggcagatgtagaacccagttctctctgtgtattaagagcttagattgaggcagtgcagtgatgttttggggtttctgtaggatgtcaggtgacctcttctggtgtgtaaaacttgatggactttgccattgctattttcagaagtagggctatatatttctttaatcatgttagctgctaggtctggctgtgtaagtagcaatccattctgtttgccatgagaaattctatagaaaaatatgt

SEQ ID NO: 89820 - DNA, 600 bp, Chicken  19866894397002_2
cagagaattaggtttgaagagtatattttacaggcatactgaaaagaacagctaattctttttcattggcttgaatatcttttaattttggatctgttattctattagaagtagaactcatggtaatgctgcagcaaagtattgatttcagagaaacgagcttgcttccacacgtccccatggtgggcttgtgtgttgcaaggtgcattgcccacggtctttcagaacagcttggcgtacttaagtarctgggaagagagcacgtaggctcctagctcctcaacttctcccaagctgtcygcctgggcagatgtagaacccagttctctctgtgtattaagagcttagattgaggcagtgcagtgatgttttggggtttctgtaggatgtcaggtgacctcttctggtgtgtaaaacttgatggactttgccattgctattttcagaagtagggctatatatttctttaatcatgttagctgctaggtctggctgtgtaagtagcaatccattctgtttgccatgagaaattctatagaaaaatatgtgcttcattctaatttaaaygttgtgttacagtggctggtctagaccaaacca

SEQ ID NO: 89821 - DNA, 520 bp, Chicken  19866894397002_3
gctcctagctcctcaacttctcccaagctgtcygcctgggcagatgtagaacccagttctctctgtgtattaagagcttagattgaggcagtgcagtgatgttttggggtttctgtaggatgtcaggtgacctcttctggtgtgtaaaacttgatggactttgccattgctattttcagaagtagggctatatatttctttaatcatgttagctgctaggtctggctgtgtaagtagcaatccattctgtttgccatgagaaattctatagaaaaatatgtgcttcattctaatttaaaygttgtgttacagtggctggtctagaccaaaccaacgacaaaagctctggttgggaggtgggaaatgtctttccacttgaaaccctgtccgtaccaagactgtgaaggaggggagcawatggccgggaacaaattaatgtggattcgttttttttactgcatgtaaactaagggccagtttatgaagggtaacctggagtaagctgttggacaaaactttg

SEQ ID NO: 89822 - DNA, 403 bp, Chicken  19866894397002_4
ggatgtcaggtgacctcttctggtgtgtaaaacttgatggactttgccattgctattttcagaagtagggctatatatttctttaatcatgttagctgctaggtctggctgtgtaagtagcaatccattctgtttgccatgagaaattctatagaaaaatatgtgcttcattctaatttaaaygttgtgttacagtggctggtctagaccaaaccaacgacaaaagctctggttgggaggtgggaaatgtctttccacttgaaaccctgtccgtaccaagactgtgaaggaggggagcawatggccgggaacaaattaatgtggattcgttttttttactgcatgtaaactaagggccagtttatgaagggtaacctggagtaagctgttggacaaaactttg

SEQ ID NO: 89823 - DNA, 599 bp, Chicken  19866894397003_1
  misc_feature (1)..(117): n is any nucleotide
nnnnnnnnnnnnnnnnnnnnnnnnnnnnnnnnnnnnnnnnnnnnnnnnnnnnnnnnnnnnnnnnnnnnnnnnnnnnnnnnnnnnnnnnnnnnnnnnnnnnnnnnnnnnnnnnnnnnncttaatggttccgtgattttatgatacggggttttggtaagtcttacaaagaggacaaagagataccttcccaaatataggaagcaaaataatttgctcacccacatatgcaacaagagcagtgtgttcagtgaggttttcagaacagtgcaccccacatcagcccagagctgggagcacagwcaaatcggaatagtgatggtttggatagtgggaacaccacagcagctgaaaatcaggctcttcctctacttttgagggctgtggggctctatgtggggggcagggctygtgctccacgcttctgggaacaggcgatgagaaaagtctttgtagctgtagggctggagcctgatggctccataaatgcttgcctgttatgcaccgctcggccgctcagctgccatcgccccggctgcccccgctgcctcctcgcacctggggagacaccaaaaccagcaccatcagccccgttttccaga

SEQ ID NO: 89824 - DNA, 599 bp, Chicken  19866894397003_2
  misc_feature (1)..(9): n is any nucleotide
nnnnnnnnncttaatggttccgtgattttatgatacggggttttggtaagtcttacaaagaggacaaagagataccttcccaaatataggaagcaaaataatttgctcacccacatatgcaacaagagcagtgtgttcagtgaggttttcagaacagtgcaccccacatcagcccagagctgggagcacagwcaaatcggaatagtgatggtttggatagtgggaacaccacagcagctgaaaatcaggctcttcctctacttttgagggctgtggggctctatgtggggggcagggctygtgctccacgcttctgggaacaggcgatgagaaaagtctttgtagctgtagggctggagcctgatggctccataaatgcttgcctgttatgcaccgctcggccgctcagctgccatcgccccggctgcccccgctgcctcctcgcacctggggagacaccaaaaccagcaccatcagccccgttttccagatgcatggagaggtgaaggctgggttggggtctgtggcccctcagaaccatggggagggctcaggtctgtacccccctgcacctgccttggtttctcccttgatgctgt

SEQ ID NO: 89825 - DNA, 600 bp, Chicken  19866894397004_1
gagcagaatggattgcagcagggtacgctgaaggactcagcatcagactatgagatgcatttcaggagctaccaagtgtttgtgaatatgctgaatatctaaaagctttaaagtttagcgtgactaattctgaatcacatgttacttgctctttgctgaatttcctttttagaaggagaagattagaagatcgttgcaactaatcagagatgtcagcatttttaaggtaggtcctccactgctcaaaaatatctatgtgtcctgcggatacagtgggatctgtgatgaaagcgaggtccsttacaaactgacccactgaagtttgttagcataaagtgtctgttgaataattgggcatcagtaatgcattcctgcagggaagagcagatgataatgccctgaccatggccagcatccacctggcacggtgctgagtaagatctctgcaagatttggcaccataaacaacataagaggtgatgggtggcgctttgactcagtcagtagcctctgccatagccctgtacagtaatcgagtggagtacctcagtgacagaatcatagaatcatagaatcatagaatatcctgagttggaatgg

SEQ ID NO: 89826 - DNA, 600 bp, Chicken  19866894397004_2
gagtccaactcctatataagatgatgctgactttgatcacaggcaaagctatggaggatacatccattggtgtttttcagtccagacgcctatccttactgatgacttcaaagatggcaatgatggctgtccttcctaaacaccctgctgcaacttttcacctacccaagtactgttttcttcaaggaaaacattacaggactttgagacaggaatatgcatatcagggttatgaacaagctgagggcttggaagaagtgtaattttcacatagacttacagagctttggaggctttgakcttgatttcttggattttcctaacttgaaaataatcttgatgagaaataatatttttattaagtacattcctgtcttgtccttctttggctcaaatgtcactgaaccatctggtgaaatgtagtttgcagagaagtccataatgaattggaggaatttcaagctaattttaatgcctgcaggcacatgaagatctatgcactcagagatcttactcttatctgcaatcctttgcagaactctctgtgccaggaactatttacagtttgttggcagtatgtgagaagttaataagaaggga

SEQ ID NO: 89827 - DNA, 600 bp, Chicken  19866894397004_3
gtttgcagagaagtccataatgaattggaggaatttcaagctaattttaatgcctgcaggcacatgaagatctatgcactcagagatcttactcttatctgcaatcctttgcagaactctctgtgccaggaactatttacagtttgttggcagtatgtgagaagttaataagaagggaaacattcaaaccaaactttctttctggagagcaagtgttagattttatccacagctgactcagctagaagataatatcatgcacagttccttttgttggcttggtccaagacttcctgaaaygagcgtaaatattcccattacttcagtggctttggatcaaatctgtaataatttatagacctgaaatataaaatgaagacacacatttcatcttgtgycccttktatggattttggagatgctgttaccatgcrcctccaatcmctacttacgactgctaactcagagcaggagaagactgagattttggccaggtcttacaaaaacctgtatttccaggtgtggttgagcactgtgtggctcacgtaggcagcttgatagccaatatgtggaatttccagcccaaacctaggtgagaaa

SEQ ID NO: 89828 - DNA, 600 bp, Chicken  19866894397004_4
ctgcaatcctttgcagaactctctgtgccaggaactatttacagtttgttggcagtatgtgagaagttaataagaagggaaacattcaaaccaaactttctttctggagagcaagtgttagattttatccacagctgactcagctagaagataatatcatgcacagttccttttgttggcttggtccaagacttcctgaaaygagcgtaaatattcccattacttcagtggctttggatcaaatctgtaataatttatagacctgaaatataaaatgaagacacacatttcatcttgtgycccttktatggattttggagatgctgttaccatgcrcctccaatcmctacttacgactgctaactcagagcaggagaagactgagattttggccaggtcttacaaaaacctgtatttccaggtgtggttgagcactgtgtggctcacgtaggcagcttgatagccaatatgtggaatttccagcccaaacctaggtgagaaactgattaaagttcatgacattctatgtcagaagggcatcctattgggtgctctgtttctgtgctgtcactggcttgattacaatcattacatagaaca

SEQ ID NO: 89829 - DNA, 600 bp, Chicken  19866894397004_5
tcctttgcagaactctctgtgccaggaactatttacagtttgttggcagtatgtgagaagttaataagaagggaaacattcaaaccaaactttctttctggagagcaagtgttagattttatccacagctgactcagctagaagataatatcatgcacagttccttttgttggcttggtccaagacttcctgaaaygagcgtaaatattcccattacttcagtggctttggatcaaatctgtaataatttatagacctgaaatataaaatgaagacacacatttcatcttgtgycccttktatggattttggagatgctgttaccatgcrcctccaatcmctacttacgactgctaactcagagcaggagaagactgagattttggccaggtcttacaaaaacctgtatttccaggtgtggttgagcactgtgtggctcacgtaggcagcttgatagccaatatgtggaatttccagcccaaacctaggtgagaaactgattaaagttcatgacattctatgtcagaagggcatcctattgggtgctctgtttctgtgctgtcactggcttgattacaatcattacatagaacacacaga

SEQ ID NO: 89830 - DNA, 600 bp, Chicken  19866894397004_6
atttacagtttgttggcagtatgtgagaagttaataagaagggaaacattcaaaccaaactttctttctggagagcaagtgttagattttatccacagctgactcagctagaagataatatcatgcacagttccttttgttggcttggtccaagacttcctgaaaygagcgtaaatattcccattacttcagtggctttggatcaaatctgtaataatttatagacctgaaatataaaatgaagacacacatttcatcttgtgycccttktatggattttggagatgctgttaccatgcrcctccaatcmctacttacgactgctaactcagagcaggagaagactgagattttggccaggtcttacaaaaacctgtatttccaggtgtggttgagcactgtgtggctcacgtaggcagcttgatagccaatatgtggaatttccagcccaaacctaggtgagaaactgattaaagttcatgacattctatgtcagaagggcatcctattgggtgctctgtttctgtgctgtcactggcttgattacaatcattacatagaacacacagaggggttattaaatagccatactgtttaagt

SEQ ID NO: 89831 - DNA, 600 bp, Chicken  19866894397004_7
tgttggcagtatgtgagaagttaataagaagggaaacattcaaaccaaactttctttctggagagcaagtgttagattttatccacagctgactcagctagaagataatatcatgcacagttccttttgttggcttggtccaagacttcctgaaaygagcgtaaatattcccattacttcagtggctttggatcaaatctgtaataatttatagacctgaaatataaaatgaagacacacatttcatcttgtgycccttktatggattttggagatgctgttaccatgcrcctccaatcmctacttacgactgctaactcagagcaggagaagactgagattttggccaggtcttacaaaaacctgtatttccaggtgtggttgagcactgtgtggctcacgtaggcagcttgatagccaatatgtggaatttccagcccaaacctaggtgagaaactgattaaagttcatgacattctatgtcagaagggcatcctattgggtgctctgtttctgtgctgtcactggcttgattacaatcattacatagaacacacagaggggttattaaatagccatactgtttaagtatgcactaat

SEQ ID NO: 89832 - DNA, 599 bp, Chicken  19866894397010_1
  misc_feature (1)..(145): n is any nucleotide
nnnnnnnnnnnnnnnnnnnnnnnnnnnnnnnnnnnnnnnnnnnnnnnnnnnnnnnnnnnnnnnnnnnnnnnnnnnnnnnnnnnnnnnnnnnnnnnnnnnnnnnnnnnnnnnnnnnnnnnnnnnnnnnnnnnnnnnnnnnnnnnnnccttgccacaggctgcccagagaagctgtgggtgccccatatctagaagcgttcaaagccaggccagatgggatcctgggcagcccgatctcatgggcaacaaccctgagggttgaaaataaacagcctataaggtctcctccaacctaagccaytctgtgatgaaaacacagcctgacttatcttgctcactrtctatataccatttccccaaaataggcagtatcctgactggggagctggggattttcctatggccactactgagcctccttttccaacagctgaggagctgctgtcctaacccacttcaccaacagctaaaaacagccagagcccataacgtctttgcattgccacggtcccaactggcaaacgtgtcacctgtcttgtctcaaagctgttggaaagccttaagaacaccctccaacagcaggacgtcctcctgaaatca

SEQ ID NO: 89833 - DNA, 599 bp, Chicken  19866894397010_2
  misc_feature (1)..(106): n is any nucleotide
nnnnnnnnnnnnnnnnnnnnnnnnnnnnnnnnnnnnnnnnnnnnnnnnnnnnnnnnnnnnnnnnnnnnnnnnnnnnnnnnnnnnnnnnnnnnnnnnnnnnnnnnnnccttgccacaggctgcccagagaagctgtgggtgccccatatctagaagcgttcaaagccaggccagatgggatcctgggcagcccgatctcatgggcaacaaccctgagggttgaaaataaacagcctataaggtctcctccaacctaagccaytctgtgatgaaaacacagcctgacttatcttgctcactrtctatataccatttccccaaaataggcagtatcctgactggggagctggggattttcctatggccactactgagcctccttttccaacagctgaggagctgctgtcctaacccacttcaccaacagctaaaaacagccagagcccataacgtctttgcattgccacggtcccaactggcaaacgtgtcacctgtcttgtctcaaagctgttggaaagccttaagaacaccctccaacagcaggacgtcctcctgaaatcattctggatatctgccagcttttacacatgccgttaccga

SEQ ID NO: 89834 - DNA, 599 bp, Chicken  19866894397011_1
  misc_feature (1)..(185): n is any nucleotide
nnnnnnnnnnnnnnnnnnnnnnnnnnnnnnnnnnnnnnnnnnnnnnnnnnnnnnnnnnnnnnnnnnnnnnnnnnnnnnnnnnnnnnnnnnnnnnnnnnnnnnnnnnnnnnnnnnnnnnnnnnnnnnnnnnnnnnnnnnnnnnnnnnnnnnnnnnnnnnnnnnnnnnnnnnnnnnnnnnnnnnnnncggctgtctgcaggcgcgtctgtctgcctgtcctcttgcatcttctttatcccctcacatcttctctccttcccagccctcctcccacatgcgtgctgctattcctgcccctccrtgtggggtgtgatgagttctacccaggtctcagccctggaagcattcaaggccaggctggatgtggctctgggcagcccggtctggtggttggcgaccctgcacatagcagggggttgaaaccagatgatcattgtggtccttttcaacccaggccattctgtgattctatgattctcagcccaggcagtgcgttatgaagcagcaattgtygatcctcccaccctccctgctaggggacagaggtgttatttcaccaaacaacctcccagctgaacgccgtgcttgagcaacggaggg

SEQ ID NO: 89835 - DNA, 600 bp, Chicken  19866894397011_2
ctgtcctcttgcatcttctttatcccctcacatcttctctccttcccagccctcctcccacatgcgtgctgctattcctgcccctccrtgtggggtgtgatgagttctacccaggtctcagccctggaagcattcaaggccaggctggatgtggctctgggcagcccggtctggtggttggcgaccctgcacatagcagggggttgaaaccagatgatcattgtggtccttttcaacccaggccattctgtgattctatgattctcagcccaggcagtgcgttatgaagcagcaattgtygatcctcccaccctccctgctaggggacagaggtgttatttcaccaaacaacctcccagctgaacgccgtgcttgagcaacggaggggttgccgccaggaaaatgttacctttcccttttgagtgctgactgcggaggaaattctcacatttacagcttcrgcgctcatggaaagagtgggggaggctttggttttgctcctttttctccttggtttgataactttgcaacccccccactcccaccccttcaggaacccggccaccgatggaggctctcgtctcactcctggggagctgg

SEQ ID NO: 89836 - DNA, 553 bp, Chicken  19866894397011_3
cagcccggtctggtggttggcgaccctgcacatagcagggggttgaaaccagatgatcattgtggtccttttcaacccaggccattctgtgattctatgattctcagcccaggcagtgcgttatgaagcagcaattgtygatcctcccaccctccctgctaggggacagaggtgttatttcaccaaacaacctcccagctgaacgccgtgcttgagcaacggaggggttgccgccaggaaaatgttacctttcccttttgagtgctgactgcggaggaaattctcacatttacagcttcrgcgctcatggaaagagtgggggaggctttggttttgctcctttttctccttggtttgataactttgcaacccccccactcccaccccttcaggaacccggccaccgatggaggctctcgtctcactcctggggagctggctttcatttgatttctcccggaggcctggcatgcatgcggcggtgcgtgcgttgcaagcccgccggtgtgggggaggttaataaaaaataaacaaacagcacttttttcctccg

SEQ ID NO: 89837 - DNA, 600 bp, Chicken  19866894397012_1
ctaatatatgtagaagaagatgaaaaaataaacagaaataatttcatatatttcaagatgtagtacttaaaaatatttttgttcactagccaaattgatgaatcacccaatacagtctccatgtgaagcaatgggaaagaaacagttcagcacatgtggatacacttgaagagtgccaaggatttactgttcatagagtaagattcctcttgccctaaattagatagctgaagtaagtctgtccttttatagtctgcaccagtccttttatcaccattaattacagatgaaaggctcacrtgaagatgtttgcatctcagaaatttaaagtgatttaatcattcaaacttggtcagatcagtggctgattttatccaaataaacagaaagtatgaagtgaacaaagagtgtgtgcttcaaacgctatttaccagtgtggtacaaacaccagtgtgacaaatcaattaattggtcttattgaaagaacatttttctttctcctgttatttgctttctctaagtccccaaaggcatttagctctcctctttatgtagtaataacatggcttgcagagaaaaatctttctaaaaatcccacca

SEQ ID NO: 89838 - DNA, 600 bp, Chicken  19866894397019_1
ccccctaaggcctttctttaactttcttggtttgttgcatgactacaggatggatttcaagaagatccaggtctaccagagcccctagttcagatttttagaagcctcctttcgcttattgtaatgatcatagggattccgattgctcaaggtccccttcgctcacaatggatagggccctgacttgtggcattgggccagtttgagtggttttatctgtaagcgcagcaagtttatgctcaagccatttaattcaatcacgcactaagtgattttattcctcgagatgttgttctgatrtattcagatgatttaatgccattaatagaggccgtgctagaatagaagcagcaagccacctctcmttgtttgtcgtaatatttttcctaggccctcaacataagcagccatacgggctagggagctagcaatattcccccccccccccccccatctctcaatgggcccccattttttccacaatagaggccagcctgtgccacagagagcctaggaatcctgggatacatctatatagttatttttccagggggacagatttcccccctcccagacatcctgggacaccttttagtaaaa

SEQ ID NO: 89839 - DNA, 600 bp, Chicken  19866894397019_2
tccaggtctaccagagcccctagttcagatttttagaagcctcctttcgcttattgtaatgatcatagggattccgattgctcaaggtccccttcgctcacaatggatagggccctgacttgtggcattgggccagtttgagtggttttatctgtaagcgcagcaagtttatgctcaagccatttaattcaatcacgcactaagtgattttattcctcgagatgttgttctgatrtattcagatgatttaatgccattaatagaggccgtgctagaatagaagcagcaagccacctctcmttgtttgtcgtaatatttttcctaggccctcaacataagcagccatacgggctagggagctagcaatattcccccccccccccccccatctctcaatgggcccccattttttccacaatagaggccagcctgtgccacagagagcctaggaatcctgggatacatctatatagttatttttccagggggacagatttcccccctcccagacatcctgggacaccttttagtaaaaccattgtaagattagtattaccttcataggtgactcctgcctggctcaccaaatgtaagaatagg

SEQ ID NO: 89840 - DNA, 599 bp, Chicken  19866894397027_1
  misc_feature (1)..(221): n is any nucleotide
nnnnnnnnnnnnnnnnnnnnnnnnnnnnnnnnnnnnnnnnnnnnnnnnnnnnnnnnnnnnnnnnnnnnnnnnnnnnnnnnnnnnnnnnnnnnnnnnnnnnnnnnnnnnnnnnnnnnnnnnnnnnnnnnnnnnnnnnnnnnnnnnnnnnnnnnnnnnnnnnnnnnnnnnnnnnnnnnnnnnnnnnnnnnnnnnnnnnnnnnnnnnnnnnnnnnnnnnnnnnngggttgaatccctcagccaagtgcttccaggaggctgtcatttggatgtttgggtgcagaagtcaaagcaatggcaacrctaattcagtttatgctatctataaaaccactactaacagttttagatagctctatggttttagatgtctgcaacagcatccatgggaattcaggcatatggcccttaccatatgacaaagtgccttcagtaatttttagtcttttccacacttctgcttgtggataagatactgcagtataaaaggcatttcatgctttgattcatctccacaaaattcacttccagtgaaattttaagatactgccacttcctctgccagctctctgcctcatctcatttcattctcaggtttgtga

SEQ ID NO: 89841 - DNA, 599 bp, Chicken  19866894397030_1
  misc_feature (1)..(48): n is any nucleotide
nnnnnnnnnnnnnnnnnnnnnnnnnnnnnnnnnnnnnnnnnnnnnnnnatttaatacgcacacttgatttgtgtatatcgcctaaatcaaaaaaagacccaacatagctccgatttcctgtacaaggctgtcaaatggctttttctgcagtaaattcagagagatggaccttgctgttttgttctgcacacgggtcggttagtgagggagaaagggctccgtaagcactgggttcatctttcttattcttctgaacaacttctaaacgaatccctctcggagcatctgtaaacatctggragtgcagcgtttggcaaagggctgttggcgggttgggcttggggatctcagagggcttttccagccgtcctgattctgttccatggttaggttaggggagatcaaactcctctccctcacccacttataaagccagaaatggtggacctttatggcccaaactgtggtcaggcagaagctcagctcacattcccaactccactcttcctcctctcgctggytctctccccagcttgttattgcagctgyggatctcattttcacacttgtaaaataaacctgttcttgtagcttgcata

SEQ ID NO: 89842 - DNA, 600 bp, Chicken  19866894397030_2
taagcactgggttcatctttcttattcttctgaacaacttctaaacgaatccctctcggagcatctgtaaacatctggragtgcagcgtttggcaaagggctgttggcgggttgggcttggggatctcagagggcttttccagccgtcctgattctgttccatggttaggttaggggagatcaaactcctctccctcacccacttataaagccagaaatggtggacctttatggcccaaactgtggtcaggcagaagctcagctcacattcccaactccactcttcctcctctcgctggytctctccccagcttgttattgcagctgyggatctcattttcacacttgtaaaataaacctgttcttgtagcttgcataccatcagtgctaaatgcgtgtggtttatttccaatatcaggatcctcataagrcatcaaaaacacttaggatgctgactatcaccacgctttatgactctgtcacttacggactcgaagcaacaaatattttgatgtgacagtgacattaaaatacggctcagccactgaagaagcatgtcccacaatttgcaatgcacggtgcaacgatgagccgtccata

SEQ ID NO: 89843 - DNA, 592 bp, Chicken  19866894397030_3
tctgaacaacttctaaacgaatccctctcggagcatctgtaaacatctggragtgcagcgtttggcaaagggctgttggcgggttgggcttggggatctcagagggcttttccagccgtcctgattctgttccatggttaggttaggggagatcaaactcctctccctcacccacttataaagccagaaatggtggacctttatggcccaaactgtggtcaggcagaagctcagctcacattcccaactccactcttcctcctctcgctggytctctccccagcttgttattgcagctgyggatctcattttcacacttgtaaaataaacctgttcttgtagcttgcataccatcagtgctaaatgcgtgtggtttatttccaatatcaggatcctcataagrcatcaaaaacacttaggatgctgactatcaccacgctttatgactctgtcacttacggactcgaagcaacaaatattttgatgtgacagtgacattaaaatacggctcagccactgaagaagcatgtcccacaatttgcaatgcacggtgcaacgatgagccgtccatattaacgacggtgcagcttgt

SEQ ID NO: 89844 - DNA, 489 bp, Chicken  19866894397030_4
gggcttttccagccgtcctgattctgttccatggttaggttaggggagatcaaactcctctccctcacccacttataaagccagaaatggtggacctttatggcccaaactgtggtcaggcagaagctcagctcacattcccaactccactcttcctcctctcgctggytctctccccagcttgttattgcagctgyggatctcattttcacacttgtaaaataaacctgttcttgtagcttgcataccatcagtgctaaatgcgtgtggtttatttccaatatcaggatcctcataagrcatcaaaaacacttaggatgctgactatcaccacgctttatgactctgtcacttacggactcgaagcaacaaatattttgatgtgacagtgacattaaaatacggctcagccactgaagaagcatgtcccacaatttgcaatgcacggtgcaacgatgagccgtccatattaacgacggtgcagcttgt

SEQ ID NO: 89845 - DNA, 600 bp, Chicken  19866894397036_1
gtgcccaaatactgtctgctgaaccaaaagacgtcgcaggagacagaaggcctttctgcctccccttccccactctgcccactccagttcagttacgtcatacactgaaagatttcataccgttctggaagaatgcccagtttttaacttttcccatatgtggaatgcatgtaacttcagttcagattggacagagggtcaaaagcacaaacggacagtgagcactgagctgggggatgtttcaaacctgtattaaacccagaggtcagtggaaacagaggcagctcaacgctgtgtccmagggttgtccatctgatcttcttcccactgttcccattcctcagagaactctcctgtttcctccttcttttctcttcataacacaaagaatttttggactgctaatgatagttgtttgtggtagagagcatcacttacaatgtcaactcactctgtaataccatgacacagtaacgtgctgtagcagtagtagcatcaccatcaatttataataaacacaaaaccaacaagccacaaacagcaaatccactttgacaccgagcagtttaaccatttaaatcacgtcttataaacacaaaa

SEQ ID NO: 89846 - DNA, 478 bp, Chicken  19866894397038_1
tgcttctcaccaaataaacataaaatcttgtcaacaagttttcttcctctaccctaaaatctgatgtaaggagaacacaaagatgtcccatattcctttctctttcctgctttgtagatgctggaaagctgagtgaacaaataatttgcagtgctttgttcagaaatcttcatctcatgttgatggaataactgtccacaggaagcctgcggtttcctggaatgtatttgtttttgaataagtattcttcaaatgactttgactgctaatacagttacccagactatttacagtaaatgrttstttagtgacagcatatataatttacttttgtacttaaagtcagtgcatgtgagacatattgtagacacttggatagcaccagcacaaaggccttagtgaggaaggctggccactcagtctcagtccttcatgtgaggcaaaggagtggggacatcagcagtctctcaactttggt

SEQ ID NO: 89847 - DNA, 475 bp, Chicken  19866894397038_2
ttctcaccaaataaacataaaatcttgtcaacaagttttcttcctctaccctaaaatctgatgtaaggagaacacaaagatgtcccatattcctttctctttcctgctttgtagatgctggaaagctgagtgaacaaataatttgcagtgctttgttcagaaatcttcatctcatgttgatggaataactgtccacaggaagcctgcggtttcctggaatgtatttgtttttgaataagtattcttcaaatgactttgactgctaatacagttacccagactatttacagtaaatgrttstttagtgacagcatatataatttacttttgtacttaaagtcagtgcatgtgagacatattgtagacacttggatagcaccagcacaaaggccttagtgaggaaggctggccactcagtctcagtccttcatgtgaggcaaaggagtggggacatcagcagtctctcaactttggt

SEQ ID NO: 89848 - DNA, 503 bp, Chicken  19866894397040_1
  misc_feature (1)..(41): n is any nucleotide
nnnnnnnnnnnnnnnnnnnnnnnnnnnnnnnnnnnnnnnnncaggccgctgcctcctccctcacacaccgttaattatcttgcaaattcctcgcgaccccttctcttcgtttccgaaggtgatcccaatgctttcagccactagaggtcacaggctggacacacaatgcctgtgccctcaccaccacaggtgtgggggcctcgggacctgacactcatccccaggagctcattaaacattaactagaaaacaaacaaacaagcaaacctcccccctccccaaagaaaaaatcgacagtcycaccccgtgtcaaaactcagcgctatccctttaagagcgcgcatmcacccctcatcgcctccacctccccggctacgccccgcccccatgacatcatcccgcctcccgattggctgcccgccccgtcaggcaggcgccgccagccccgccccgccccctcgccctgcctagggcccgtagcttccccaggtgctcgcagctca

SEQ ID NO: 89849 - DNA, 458 bp, Chicken  19866894397040_2
caggccgctgcctcctccctcacacaccgttaattatcttgcaaattcctcgcgaccccttctcttcgtttccgaaggtgatcccaatgctttcagccactagaggtcacaggctggacacacaatgcctgtgccctcaccaccacaggtgtgggggcctcgggacctgacactcatccccaggagctcattaaacattaactagaaaacaaacaaacaagcaaacctcccccctccccaaagaaaaaatcgacagtcycaccccgtgtcaaaactcagcgctatccctttaagagcgcmcacccctcatcgcctccacctccccggctacgccccgcccccatgacatcatcccgcctcccgattggctgcccgccccgtcaggcaggcgccgccagccccgccccgccccctcgccctgcctagggcccgtagcttccccaggtgctcgcagctca

SEQ ID NO: 89850 - DNA, 600 bp, Chicken  19866894397041_1
agatggagaagattaggatctggaaaagtgtttgggctgtggtttaggtgctcctgcatccatgtgcatggggagacccctctagggtgcctcagaaccactttgctcctgcaccatggctgaagcagaggcactgtgtccctgcttcctctttctcctcttcctttcttgaagtgtgaagttattcaggagggaaagtacaaggattcaccccaccagtttgttcacagagcttgaaataaataaaccccaaacccaacgagggagctgtggtgatcgctagggcttgcagtgagcccmaggtgtgagcagcaatgctgccatgggaaagacaagcgcaggcaacgtgcaatcctaaaagaaaacagagaacataatttaagccagtcctgcactaataatgaagaaaatcctggcaggtgcttggaagcagcatttctgcaaagcaagaaagtgctgcctggagggaggtgcagcagcccaggggatgggagtgtgatggggccctgcacagctatggaaaggactcagcaaatatcacgtctcagatgctgtgaggaatgaataaatgagtgctyatttcattacagaagggagggc

SEQ ID NO: 89851 - DNA, 600 bp, Chicken  19866894397041_2
gctagggcttgcagtgagcccmaggtgtgagcagcaatgctgccatgggaaagacaagcgcaggcaacgtgcaatcctaaaagaaaacagagaacataatttaagccagtcctgcactaataatgaagaaaatcctggcaggtgcttggaagcagcatttctgcaaagcaagaaagtgctgcctggagggaggtgcagcagcccaggggatgggagtgtgatggggccctgcacagctatggaaaggactcagcaaatatcacgtctcagatgctgtgaggaatgaataaatgagtgctyatttcattacagaagggagggcctggaggattttccatgagagctcccactgctgcagaaacccatcctcagagctttaacaggacaaaaaacaaagttttccttcctctgctggagaagatctgaaattggcctgcaggaccaggatgtctcactttgtttttcttcttttttgatatcattaacaaatccaggactttcctcaatgaggtaggcacaaggagggctgtggggcactggggctcccatcagccaacaactgcatgtttctggcttttggggatgctcagccagttcatc

SEQ ID NO: 89852 - DNA, 484 bp, Chicken  19866894397042_1
tttactgcttacctataaaaaactgtttctcagaaccaagtgattatatgacaatcttatttttaaacagaagttcaggcatatacttccatggaagtgctaaatgttcaaatttgttaaaaattaaggatttctagagtctaatattttcctataatagcagacaatttaaaatcagtcactcctcatgatggtattagtcactgtaccaaaatcaatctatgaacaggtgaggcttcaaatacaaacttggggtccttttggcagagataccaataagaagtagctgttaaaaggttmtcatttttgggcacctgtgatctgagtgaggaaaggtttaatgctacagaatgtggcctttattcagtgcttctggagaacatacttccacaaagccccagacagatctcaaagttctttcattttacaatactctcttcaataaactgtcatctcaagttgataagcatctttttaaaagaaa

SEQ ID NO: 89853 - DNA, 600 bp, Chicken  19866894397043_1
tcctgccagctcggaggcataaaagttagagtacatgaagaacaaacaaggccctaaaaaggtgaataatgtatgtatacatatgttattcacagggaacatagctgtttctatcatttaaaaagtgactgccaaagttacaaatgtactagaagtgctgataattttttttccgcaaactttagggcacttccttctgaaagataactttgtttcctgtacagagactagaacataactgcaatctacttgaaatctaaaattacttcttttttctttttttctggattttttaaatcmtgagtatatatataataatggccacgacagatccattaagcagcaaatttccagattacctgcttccctgaggttcaatgattctgttatgagtaagacattcaaacacatacccaagactagatttttcttttaatttctcccctaagtactgacaaaaatcttctagcactggtctgctggtttgaactagagaaaccctgtgtgataagactttgtgctgaaatttcaaatcctctgataaatgtccctggccgtacttttaaatattttttcccaagctgatttattacataaaca

SEQ ID NO: 89854 - DNA, 600 bp, Chicken  19866894397043_2
ctagagaaaccctgtgtgataagactttgtgctgaaatttcaaatcctctgataaatgtccctggccgtacttttaaatattttttcccaagctgatttattacataaacaaattccacatcagagatacacgtcgttcggcacttgggatgtgttttttcactcttgatttatgaaaacacaaaggcctctaaaataaaaacagctaattttagaactgcgttccaaggatcaggtttcatcttgatcaactgtttacttgaggacagtgacaccaagtggcagagattactcactccytctttccctcycagctgttctaaaatcccagctatgagaccctatacggtacccaaaaaaggaatacggttaacccttctgcgtatyccaactgctttatctgtatgttgcattcayacacaagtgtgtttcaattgcgtttgacttgtgaaaaggcaccctggttcctctacttagcataaaacagtataaattaaaggcagagatttctgcttcatttgcaatatgcaattagatttcagaaccattaaattgtttactgtatgactgtatgtcataacgaattgctactttttgtgc

SEQ ID NO: 89855 - DNA, 600 bp, Chicken  19866894397043_3
ctgtgtgataagactttgtgctgaaatttcaaatcctctgataaatgtccctggccgtacttttaaatattttttcccaagctgatttattacataaacaaattccacatcagagatacacgtcgttcggcacttgggatgtgttttttcactcttgatttatgaaaacacaaaggcctctaaaataaaaacagctaattttagaactgcgttccaaggatcaggtttcatcttgatcaactgtttacttgaggacagtgacaccaagtggcagagattactcactccytctttccctcycagctgttctaaaatcccagctatgagaccctatacggtacccaaaaaaggaatacggttaacccttctgcgtatyccaactgctttatctgtatgttgcattcayacacaagtgtgtttcaattgcgtttgacttgtgaaaaggcaccctggttcctctacttagcataaaacagtataaattaaaggcagagatttctgcttcatttgcaatatgcaattagatttcagaaccattaaattgtttactgtatgactgtatgtcataacgaattgctactttttgtgcactgtcatgga

SEQ ID NO: 89856 - DNA, 600 bp, Chicken  19866894397043_4
ccaagctgatttattacataaacaaattccacatcagagatacacgtcgttcggcacttgggatgtgttttttcactcttgatttatgaaaacacaaaggcctctaaaataaaaacagctaattttagaactgcgttccaaggatcaggtttcatcttgatcaactgtttacttgaggacagtgacaccaagtggcagagattactcactccytctttccctcycagctgttctaaaatcccagctatgagaccctatacggtacccaaaaaaggaatacggttaacccttctgcgtatyccaactgctttatctgtatgttgcattcayacacaagtgtgtttcaattgcgtttgacttgtgaaaaggcaccctggttcctctacttagcataaaacagtataaattaaaggcagagatttctgcttcatttgcaatatgcaattagatttcagaaccattaaattgtttactgtatgactgtatgtcataacgaattgctactttttgtgcactgtcatggacaattcttccatttttacattctctacggtgttaaattcttctttatttttgcttgtactctacgcatactttaac

SEQ ID NO: 89857 - DNA, 600 bp, Chicken  19866894397043_5
acatcagagatacacgtcgttcggcacttgggatgtgttttttcactcttgatttatgaaaacacaaaggcctctaaaataaaaacagctaattttagaactgcgttccaaggatcaggtttcatcttgatcaactgtttacttgaggacagtgacaccaagtggcagagattactcactccytctttccctcycagctgttctaaaatcccagctatgagaccctatacggtacccaaaaaaggaatacggttaacccttctgcgtatyccaactgctttatctgtatgttgcattcayacacaagtgtgtttcaattgcgtttgacttgtgaaaaggcaccctggttcctctacttagcataaaacagtataaattaaaggcagagatttctgcttcatttgcaatatgcaattagatttcagaaccattaaattgtttactgtatgactgtatgtcataacgaattgctactttttgtgcactgtcatggacaattcttccatttttacattctctacggtgttaaattcttctttatttttgcttgtactctacgcatactttaacctcagcacaactgttgaccttcatatcttg

SEQ ID NO: 89858 - DNA, 600 bp, Chicken  19866894397049_1
agacaattattggtattggtttcaagggaggggagtctttgctcttcttcatcttctgcaggtatcagttgtataaaggaatataatgccatggaagagctcattctactgaagtttggttgctgctgatggctatctactcctggtctttcttcccccttctggatctccatagctgtgtgcctctttctgtgtgcactgcagcctgccttcagcctcacctgccaccctgctttgcacactgctcagcctgtggaagctctcggctgtgggatcctgggggcatgggcagctgaccastctgagtcctaggctcaaatcatagagtggtttgagtaaaccctgttggagttcttgtcttggcatttgttcctcrtgtctggtttgtttcccttgttgttctgcttgtttgtttgtttttctttctttctttaaatgatgcttagtgtcttgccaggttttaagcagtgcttttgttttctgttcttcttcccagatgttcacttctgtagctgttctgtaagctgcctgccttactgatttgccttgttgaattactgacatctgttcatttagaattttggtctgtgatttcatgat

SEQ ID NO: 89859 - DNA, 600 bp, Chicken  19866894397049_2
aggaatataatgccatggaagagctcattctactgaagtttggttgctgctgatggctatctactcctggtctttcttcccccttctggatctccatagctgtgtgcctctttctgtgtgcactgcagcctgccttcagcctcacctgccaccctgctttgcacactgctcagcctgtggaagctctcggctgtgggatcctgggggcatgggcagctgaccastctgagtcctaggctcaaatcatagagtggtttgagtaaaccctgttggagttcttgtcttggcatttgttcctcrtgtctggtttgtttcccttgttgttctgcttgtttgtttgtttttctttctttctttaaatgatgcttagtgtcttgccaggttttaagcagtgcttttgttttctgttcttcttcccagatgttcacttctgtagctgttctgtaagctgcctgccttactgatttgccttgttgaattactgacatctgttcatttagaattttggtctgtgatttcatgattcagaaattcagtatgcaacagtaccaatccaatatgagaagcttaagaactatttagcccttttatcaatttaag

SEQ ID NO: 89860 - DNA, 600 bp, Chicken  19866894397051_1
gctggggatacacagagagggtgctgtggagcagcagctcagcctacgtgattggagtgtgtccttcagggttgttttgggctatagctttgttgcctctgaaggagcatgtatctccagagttactggtgagtcagagatggaccttaactgaatgagcagtttaacacaggagagatgagcagattttttccaaccttcatcttctagggcagctagctgtagggatggagaagagccaggccaatacaagggagcaagcaagaaaagcatctagggtggtgggatatggaaaagcaytctgccaaggagaattcccaataaggctgagcaaccaccttactggcagcctcccatttcccaatggaatcctacaccaggactttaaagagacatgcctgaaaactaaaaggcctagttctgcagatgctaatgattaagaactctataaatgcatttcacagcacaataaaatctggggttaaatttgcttttccccacccccagcactctcactctgttgctgttctccttgccagctgcctctgctgtcacacaggtataacgtgtgggtataactatgtaatggcagatgggtga

SEQ ID NO: 89861 - DNA, 600 bp, Chicken  19866894397053_1
attatctgcctatgttcccatatatcgttcaataaatggccagtcgtcaaaaaaaagcacaaactggataaaaagaacaaaacagtgatatttgtatgaggcttgtggataatttatgaacaggaaaggtgacattgaaatcaattattcattggaaattcatttgcttgatgctgctgcagtataatttctacccagctctagagtgaaaccattacacattcattcgtgtttgcattctaattactttttgaacccagcctagcaatgcaatacaccattatatcatttacctcagcrtcccacaacatacacctaaaatacagcctgacatctcaagatcttctacaattataagatctcactgtattgagagtaaatgagaaaaagtacaaacagaaaatgtacaggatatagtaggaaagaaacgtctgtcttcttttaagcattatgataaagctaggaaaacaaattctaatatgcatgattcactcactgaactatgtaggctacaaaatgactgaacaattacatattctcagatttgcctttgctccctctacagataagtaactagcacagactcaagcacacctgaga

SEQ ID NO: 89862 - DNA, 600 bp, Chicken  19866894397055_1
aaggtcttgcatctttcatgtgatcttttccactagcataccaacatgacttctaccagtcactctccatgagccaagaccaatagatctgtatgttctatacgccttgaggaacagattcagataagtttcatcagcaagacccaacccatgtcaaagtaacaacttaaaattgactttagaagtaatttcagaagatttttctactaaggaaactacaaaaagtaaccaataaaataataatcaaaagtaaggctaacaaaactacaaaaaagttatgcaagtatggtcagatttgtwatgwggtgacatctacagaattacaactgacagctgaaactacactgcaaaggttccatattttcccagttatttggaaacatacatgttagaattactaactagattcaatagcaggaaggcatgttaatagcaaagatttctaagcaacatattgctccagaaacaaaggtgacagaaaaaggcaaatttcaactctgtgcaatggtttagaatagctaattgtaacctctttcttgatttttttaacaagtacactttgctaacttagaagctgtttagcagttaatcaatcagcgg

SEQ ID NO: 89863 - DNA, 600 bp, Chicken  19866894397055_2
tcttgcatctttcatgtgatcttttccactagcataccaacatgacttctaccagtcactctccatgagccaagaccaatagatctgtatgttctatacgccttgaggaacagattcagataagtttcatcagcaagacccaacccatgtcaaagtaacaacttaaaattgactttagaagtaatttcagaagatttttctactaaggaaactacaaaaagtaaccaataaaataataatcaaaagtaaggctaacaaaactacaaaaaagttatgcaagtatggtcagatttgtwatgwggtgacatctacagaattacaactgacagctgaaactacactgcaaaggttccatattttcccagttatttggaaacatacatgttagaattactaactagattcaatagcaggaaggcatgttaatagcaaagatttctaagcaacatattgctccagaaacaaaggtgacagaaaaaggcaaatttcaactctgtgcaatggtttagaatagctaattgtaacctctttcttgatttttttaacaagtacactttgctaacttagaagctgtttagcagttaatcaatcagcggggtt

SEQ ID NO: 89864 - DNA, 600 bp, Chicken  19866894397060_1
tctagagggacttaggcttgagaggtggaggatgcaaacctcacagaattcaataaggccaagtacagggtgctgtgcctgggttgggacaatccaaagcacaggctgggcaactaatgcattgggagcagccgtgcagagaaggatttggaggtgttggattggaaggatttggaggtggatgaaaaacctaatacaaactgggcttgcagcccagaaagccaaaagtatctcatctgctctcatgagacctcacctgcagtattgcatccagctctggggccctcagcacaagaaggrcataaaccctactggagtgagtccaggggatgccacaaggatgactagagggctggagcacctttcctacagcaggctgagagagctgggagtgtccagcctgcagaaggctccggggagacctcttgtggccttccactatttaaagagggcctacaggaaagctggggagagacgctccatcagggagtgtagtgacaggacaaggggtaatagttctaaactaaaagagggtcgatttagattagacattaagaggaaattatctactatgattctgtgattccaaaaccctatgaa

SEQ ID NO: 89865 - DNA, 600 bp, Chicken  19866894397065_1
gcttcacaactgcagatcagtagaacgggtatggttaactgttcaagccgaggctggaaatctccatcagaattgtaccttattatttattaaaaggattctttaagaaagcaaggtactgccagggttagagtaggaatattctttacacacacaaacttatcaccgtgctttttcatgcttaaagttaacaaaaacactgagtgctctacaagcagtggcctgcatttcatagaatcagagattttggaaaacacgagtacaatagtttagttcaatcaccaacccatccccaccacrtccactaactgtgtctctcagtaccatatctacaatccacacgtttcttgaacacctccaggtatggtgacaccacctcctctttaggcagcctattccaatgcaggaccagcgcttggtcttgttaaagttcattcwtatttcaatagggctgttcaattctgtccatttaagcaagcagtaagacagtctacgctttagaaatgcagctgttgtaagtgcaacttaaaatccaattgcatatacaaaaagccagacatgctgcaaaagcttgcagattctactgggctgaaatagatt

SEQ ID NO: 89866 - DNA, 600 bp, Chicken  19866894397065_2
atattctttacacacacaaacttatcaccgtgctttttcatgcttaaagttaacaaaaacactgagtgctctacaagcagtggcctgcatttcatagaatcagagattttggaaaacacgagtacaatagtttagttcaatcaccaacccatccccaccacrtccactaactgtgtctctcagtaccatatctacaatccacacgtttcttgaacacctccaggtatggtgacaccacctcctctttaggcagcctattccaatgcaggaccagcgcttggtcttgttaaagttcattcwtatttcaatagggctgttcaattctgtccatttaagcaagcagtaagacagtctacgctttagaaatgcagctgttgtaagtgcaacttaaaatccaattgcatatacaaaaagccagacatgctgcaaaagcttgcagattctactgggctgaaatagattcccattgtgattgattctgaactgattaaagaagcactcacgtgttgctgtggttttatgtgttataataactgagatactaattgaactcagaaatgcaatgaccaacaaaatactagccagttcctgtgttcacca

SEQ ID NO: 89867 - DNA, 600 bp, Chicken  19866894397073_1
ctgttttcaagcttgttttataaagctattttaaggaatgctgtatcaatttccattgcataaagacatttgcactgggcgttttcttttaatattgctgtactgtatttttgcttcgttcctctgactacataaaagccactctcaagtttggatttttgttgcatttctgagtttcacagagaagacagcgctgtgtgctacagcgaccattcccaccacttccttcctctgccagtgatcactaccccaacatattgccaagattattctagtgctttacaaaatcccatcgatttyccccagatatgacacttataaattacaaagcttggaaaaaagttatattctttctctgctaattgccatgaggaaactccacatcaaacacgttttagcacaagttgtattaaaaacaaaatggatgtgctaattatgttacaatgaaacgcatttttccaaagaaggaatttgattaaacagctacttgcaactggtagcagagattttcataaaggttttcattattaatttaattaatatgcattttaaactcttatccctaaaaacgtatcttaaattattattttattacattca

SEQ ID NO: 89868 - DNA, 600 bp, Chicken  19866894397073_2
ccactccatcagaaatgtttatgaagtaatgacctgtaactggaatccttgataggtaccaaagcagcaatgaaaagcggcctgaatgccaacagcgggtgtgcggccacgctgcccagcgagacagccatttctactgctcagagaaaaaggagttgtatcagctgctacctgattgcactccagcatcactgatgcagacagtaagaaatgtaacagcaaaaagtgaatatagatttgttataataggcagagaaagaaaaaatgtattggagttcttgtttcctttcttcagcgagyggacccctcccttcccttctttctgcagtgaggcctccgctgagctgtgctctgacctcaggcatgggctgcaccattggccatggctcacagggccaacaaatcacatggagcagtgctggcttctgcagcttagagtataaatccaactaaatgtttttgttttaattcattcccaarttaaaagttttcattcctgaacgaagttttcattcctgacactcctgtgcaaatgtcccatacgtgggaggagtaaacacgcagacacaccaccccatttggccaggagtaatatactga

SEQ ID NO: 89869 - DNA, 600 bp, Chicken  19866894397073_3
ctccagcatcactgatgcagacagtaagaaatgtaacagcaaaaagtgaatatagatttgttataataggcagagaaagaaaaaatgtattggagttcttgtttcctttcttcagcgagyggacccctcccttcccttctttctgcagtgaggcctccgctgagctgtgctctgacctcaggcatgggctgcaccattggccatggctcacagggccaacaaatcacatggagcagtgctggcttctgcagcttagagtataaatccaactaaatgtttttgttttaattcattcccaarttaaaagttttcattcctgaacgaagttttcattcctgacactcctgtgcaaatgtcccatacgtgggaggagtaaacacgcagacacaccaccccatttggccaggagtaatatactgatttccattctatctcagatggggcgaggacagaagactaattgtcaatttttcatgcctattttgtcttcctagttttcctatatatcaaatgtggggagtaaaacataagctcttgtgtgtawaccttgtcatgctctgcggagcagaagaaatcactgagtagtacctgtgtcatgca

SEQ ID NO: 89870 - DNA, 600 bp, Chicken  19866894397073_4
tctgcagcttagagtataaatccaactaaatgtttttgttttaattcattcccaarttaaaagttttcattcctgaacgaagttttcattcctgacactcctgtgcaaatgtcccatacgtgggaggagtaaacacgcagacacaccaccccatttggccaggagtaatatactgatttccattctatctcagatggggcgaggacagaagactaattgtcaatttttcatgcctattttgtcttcctagttttcctatatatcaaatgtggggagtaaaacataagctcttgtgtgtawaccttgtcatgctctgcggagcagaagaaatcactgagtagtacctgtgtcatgcaggagccatcaggcccactgcagcacagctcacccagcttcatcaagagcagcatttccttctcccctttccccagcaagggctctcccatctgctttccaacccgactttactcattctcgttaacyccttcaacaacgccacagtcgatcacaaacttcacccgtaccacacccgcaagtcagggctctgcacggggcagccccaacgggcagaacgaagcggacggcgtccatctgacgcgc

SEQ ID NO: 89871 - DNA, 574 bp, Chicken  19866894397073_5
tctatctcagatggggcgaggacagaagactaattgtcaatttttcatgcctattttgtcttcctagttttcctatatatcaaatgtggggagtaaaacataagctcttgtgtgtawaccttgtcatgctctgcggagcagaagaaatcactgagtagtacctgtgtcatgcaggagccatcaggcccactgcagcacagctcacccagcttcatcaagagcagcatttccttctcccctttccccagcaagggctctcccatctgctttccaacccgactttactcattctcgttaacyccttcaacaacgccacagtcgatcacaaacttcacccgtaccacacccgcaagtcagggctctgcacggggcagccccaacgggcagaacgaagcggacggcgtccatctgacgcgcaaagcacgacgagggctgacggccgggcagaccgcaccgactgccgcacagagcgaaccgcgccccgcagcgccgcgcggtggcgcccggccccagcgctgctgaccgagcggccgccgcgccccgcgtcgggctcttctgccggccgctcacggag

SEQ ID NO: 89872 - DNA, 599 bp, Chicken  19866894397084_1
  misc_feature (1)..(115): n is any nucleotide
nnnnnnnnnnnnnnnnnnnnnnnnnnnnnnnnnnnnnnnnnnnnnnnnnnnnnnnnnnnnnnnnnnnnnnnnnnnnnnnnnnnnnnnnnnnnnnnnnnnnnnnnnnnnnnnnnnntggtaactattgcattagatctaaattaaatgtgtgttttggaggctttacagaaggcgggggaggatgtttacagagggcagtgcctgcactggggaggagggctctgcctccatggtgctgggatgggctgggggctctggggtgcacaaagggagggcagtgtgagctgggagctgccgggkgggccsgggtgtgggacccatttatgttctgcgaggtggctgtccccacatctcctctctgtccccaccacctgcgaatctgggacaggcagagctgggctcgccgcaattatctgcggattaaggcagctaatttagtttgagttacagagagcagattgggtcgatatgttggggtgaagcacgggcaggaggaatcaataggctctcagcaaaacagacgacaggctgtgcatcccatcgctgcggctttggggccatggcagtgggagagggggagatgcagagctctgcggtgc

SEQ ID NO: 89873 - DNA, 599 bp, Chicken  19866894397084_2
  misc_feature (1)..(109): n is any nucleotide
nnnnnnnnnnnnnnnnnnnnnnnnnnnnnnnnnnnnnnnnnnnnnnnnnnnnnnnnnnnnnnnnnnnnnnnnnnnnnnnnnnnnnnnnnnnnnnnnnnnnnnnnnnnnntggtaactattgcattagatctaaattaaatgtgtgttttggaggctttacagaaggcgggggaggatgtttacagagggcagtgcctgcactggggaggagggctctgcctccatggtgctgggatgggctgggggctctggggtgcacaaagggagggcagtgtgagctgggagctgccgggkgggccsgggtgtgggacccatttatgttctgcgaggtggctgtccccacatctcctctctgtccccaccacctgcgaatctgggacaggcagagctgggctcgccgcaattatctgcggattaaggcagctaatttagtttgagttacagagagcagattgggtcgatatgttggggtgaagcacgggcaggaggaatcaataggctctcagcaaaacagacgacaggctgtgcatcccatcgctgcggctttggggccatggcagtgggagagggggagatgcagagctctgcggtgccggcgg

SEQ ID NO: 89874 - DNA, 600 bp, Chicken  19866894397084_3
tccccaccacctgcgaatctgggacaggcagagctgggctcgccgcaattatctgcggattaaggcagctaatttagtttgagttacagagagcagattgggtcgatatgttggggtgaagcacgggcaggaggaatcaataggctctcagcaaaacagacgacaggctgtgcatcccatcgctgcggctttggggccatggcagtgggagagggggagatgcagagctctgcggtgccggcggggctcggcccctgaccccctgctcccctccgacacagcattgcaatgggataaggrtcctttttcatggctgacagcccatcaatatttatagcagcccattaaaaacgtccaccgcatcccaaattagccccggagccctgcatggcgcccgagcgctgcttacggcggcagtgaagtcactgcggtgggctgtgggtgccattgcttcacggagccgagcagtgctcgggtgcaggaggtgctcctggccctgtgctgtgccccccccaggtatgtgtgtgggtgtgcagggctgcgggtccgcatgagctgctgtccctctctgggaggaaaatgggcaagaaaaggcatcgg

SEQ ID NO: 89875 - DNA, 600 bp, Chicken  19866894397087_1
aagcacagataactctgagatcagatcaagttgcttagagttttgtatgatctttcctgatagtagtcatagcagtataaaagttacttaggatgagaaacatttttttacaagaatgtattactcattaatgacaaagtgtgaagtctctgactccaaattcacatttgttggtccaagctggccaagcctctaaggatgctaagggtctgaagcatgcgacatgtaaggagaaactgagaaaaggacattgactggcttggagaatatacgtttaaggacagtacagtgtctagtggsagttttctatatctaggaggaggttacagagaagacagagccacatcttctcagacatgcgttgcaagacagaagccaactgccacaagatgcagctggggaaattcccactgaacagcaacaaaaatctctttaacataagagtatttaagtgctgtaataaattactcagagactacgtaatctccatccttggaagttttcagaactgaactggacacttttttatgcaaactggtattacttgcatctatccttggtttgagtggagctctaatccaaatgacttccaggggtccc

SEQ ID NO: 89876 - DNA, 600 bp, Chicken  19866894397093_1
aatgatttcaaaataggaaaagagatcaaagacctttgcttgctttgtgtcacttaaggttttgtcagaatgcctgacgtcttttcctctggatatatgcaatagatgtagttcatatagtacttagctatgctttccctaatttcaagtagttggcagagcagggcttgtgaggtaatcacgctcttgtttcctgtgggaaaacacttttgcctgtgtatgccaaaaccagtaaactccttccttcgcaccacctcatctctaaccaggatgtctggtatgcctgggaaggtcttgaartggagcctttggttgttccctgttgtgcttgcctcctgcatgttctttcatgggattgtggcccctccttgtatctacagtgcctgtctggttccagtaagctttttaccctgaaattttcagcartgaataggtctttgtatggttctgttagttggcttgcagaaatttagatccatgttgatttcttgtggcctcttttaaaaaatataccctctgtgaaagaaagaacccaatctgaatttcacctgtgtgtagtagttcacaaaattacctctttaaattagtagatctgtgtaa

SEQ ID NO: 89877 - DNA, 600 bp, Chicken  19866894397093_2
gctatgctttccctaatttcaagtagttggcagagcagggcttgtgaggtaatcacgctcttgtttcctgtgggaaaacacttttgcctgtgtatgccaaaaccagtaaactccttccttcgcaccacctcatctctaaccaggatgtctggtatgcctgggaaggtcttgaartggagcctttggttgttccctgttgtgcttgcctcctgcatgttctttcatgggattgtggcccctccttgtatctacagtgcctgtctggttccagtaagctttttaccctgaaattttcagcartgaataggtctttgtatggttctgttagttggcttgcagaaatttagatccatgttgatttcttgtggcctcttttaaaaaatataccctctgtgaaagaaagaacccaatctgaatttcacctgtgtgtagtagttcacaaaattacctctttaaattagtagatctgtgtaaattgattatacatacaaaagaaccasggaggcattgaagaggactggcaggttgcaagcataaaataaatgagaggaggtggttcttcagtgaagtctatctgtagaaccccttgatgcagaatat

SEQ ID NO: 89878 - DNA, 433 bp, Chicken  19866894397093_3
gcttgcctcctgcatgttctttcatgggattgtggcccctccttgtatctacagtgcctgtctggttccagtaagctttttaccctgaaattttcagcartgaataggtctttgtatggttctgttagttggcttgcagaaatttagatccatgttgatttcttgtggcctcttttaaaaaatataccctctgtgaaagaaagaacccaatctgaatttcacctgtgtgtagtagttcacaaaattacctctttaaattagtagatctgtgtaaattgattatacatacaaaagaaccasggaggcattgaagaggactggcaggttgcaagcataaaataaatgagaggaggtggttcttcagtgaagtctatctgtagaaccccttgatgcagaatattgtggttgctgtttcttgggataaaaactctca

SEQ ID NO: 89879 - DNA, 600 bp, Chicken  19866894397095_1
tttaaaaatacctctttaagaagctaaacactcatcatccgaggtgcaatgctcatagacatcagttcttggaagaggagtttgcaggcatagggcattcgaaccaaagatatctgggaagagatttcaaaagaggtgtgagtgattgataagcactcctaaagcatcaaataactacacaactaacttgttttttggctcagaactgcgtctgaataattctatcaaactccaggagggtaaatttaggttggatataaggaaaaagtcttttccagtgagggtggtgaggtgaggcastggcacaggttgcccagagaggtgctggaatccccatccctggagacatggggctctgagcaacctgatgtagccgtccccgttcattgcaagggacttgtaccagatggcctttaaaggtcacttgcaactctatggattctrtgattccgaatcatgcatgaaagcatttaacaaagattgcttaaagacagcaacaaagcaagagggaagcagagacaatgtgcagagtttacaaaacagctatccaraattaactttttcaacagaaaaaaagatggcagccaggggattatgact

SEQ ID NO: 89880 - DNA, 600 bp, Chicken  19866894397095_2
attgataagcactcctaaagcatcaaataactacacaactaacttgttttttggctcagaactgcgtctgaataattctatcaaactccaggagggtaaatttaggttggatataaggaaaaagtcttttccagtgagggtggtgaggtgaggcastggcacaggttgcccagagaggtgctggaatccccatccctggagacatggggctctgagcaacctgatgtagccgtccccgttcattgcaagggacttgtaccagatggcctttaaaggtcacttgcaactctatggattctrtgattccgaatcatgcatgaaagcatttaacaaagattgcttaaagacagcaacaaagcaagagggaagcagagacaatgtgcagagtttacaaaacagctatccaraattaactttttcaacagaaaaaaagatggcagccaggggattatgacttcagtagaagtaatttaaacaggggcacatttgcacagcaaagcatgcctcctatgcakcaactacagttaagatttccagcacacatccctacaagcagccccaacgtgagctgcagcggtcagttcctagcaaaccaacaaa

SEQ ID NO: 89881 - DNA, 600 bp, Chicken  19866894397095_3
tggatataaggaaaaagtcttttccagtgagggtggtgaggtgaggcastggcacaggttgcccagagaggtgctggaatccccatccctggagacatggggctctgagcaacctgatgtagccgtccccgttcattgcaagggacttgtaccagatggcctttaaaggtcacttgcaactctatggattctrtgattccgaatcatgcatgaaagcatttaacaaagattgcttaaagacagcaacaaagcaagagggaagcagagacaatgtgcagagtttacaaaacagctatccaraattaactttttcaacagaaaaaaagatggcagccaggggattatgacttcagtagaagtaatttaaacaggggcacatttgcacagcaaagcatgcctcctatgcakcaactacagttaagatttccagcacacatccctacaagcagccccaacgtgagctgcagcggtcagttcctagcaaaccaacaaacctatttaaagtgattctttttatctctgctgccaatctgtcttgacatagctctgtagctatgcacacactatagaacaaacactagtaagtaattaccgtacaaa

SEQ ID NO: 89882 - DNA, 554 bp, Chicken  19866894397095_4
gcaacctgatgtagccgtccccgttcattgcaagggacttgtaccagatggcctttaaaggtcacttgcaactctatggattctrtgattccgaatcatgcatgaaagcatttaacaaagattgcttaaagacagcaacaaagcaagagggaagcagagacaatgtgcagagtttacaaaacagctatccaraattaactttttcaacagaaaaaaagatggcagccaggggattatgacttcagtagaagtaatttaaacaggggcacatttgcacagcaaagcatgcctcctatgcakcaactacagttaagatttccagcacacatccctacaagcagccccaacgtgagctgcagcggtcagttcctagcaaaccaacaaacctatttaaagtgattctttttatctctgctgccaatctgtcttgacatagctctgtagctatgcacacactatagaacaaacactagtaagtaattaccgtacaaaaaaaagcacatgctataaataatcagaaaaaaaagtgctgcacaaaagaactctcatgggaa

SEQ ID NO: 89883 - DNA, 600 bp, Chicken  19866894397096_1
tcataaactaaaaagaaaaattaccctaatcaaagggagaacctcaaaggatatcttcaaattttgcttaactcactatccactgatgccaatgacagttattacatgagctgtcagtattgatttaaccttgaattgacagctatggtaaaaccaaaacacaaagcaggctgtctcacaaacccagcacagtaagcactctacctgttcacttctatagggtatttgaaataaaagccttttagtttgagttacaaacactttctggtgccatagtgttccatcgttcacaaactcacycatccacattcaccataaattcagagtagccttaccgtttcccaaacttaatcttatttctttcttttartgttaggaattgccatcgtacaaaggagtcatagtatgggttaacatctgtggtaatgaaagaacgcctccaatccacctggaaatgcataggagtctctattaagtacatacaatgaagacatttaaggaaccacaaaacagctaaactaattttaaaattaaaagtacatgcctgttaatggtgcatgcttaaaagggtacttaagcagtccgcatgcatagcctttg

SEQ ID NO: 89884 - DNA, 600 bp, Chicken  19866894397096_2
actcactatccactgatgccaatgacagttattacatgagctgtcagtattgatttaaccttgaattgacagctatggtaaaaccaaaacacaaagcaggctgtctcacaaacccagcacagtaagcactctacctgttcacttctatagggtatttgaaataaaagccttttagtttgagttacaaacactttctggtgccatagtgttccatcgttcacaaactcacycatccacattcaccataaattcagagtagccttaccgtttcccaaacttaatcttatttctttcttttartgttaggaattgccatcgtacaaaggagtcatagtatgggttaacatctgtggtaatgaaagaacgcctccaatccacctggaaatgcataggagtctctattaagtacatacaatgaagacatttaaggaaccacaaaacagctaaactaattttaaaattaaaagtacatgcctgttaatggtgcatgcttaaaagggtacttaagcagtccgcatgcatagcctttgagagctgacatgtatgactccaggccttgtgtgctgagtgtgcattttagaagtttggtagaagttttaa

SEQ ID NO: 89885 - DNA, 600 bp, Chicken  19866894397098_1
gatcagaataccgtgttcatttcctgtgtaggggaaggtacatagattgcacagttccacttacatcatgatttcaggtgttgtctaatctttacactgtgcgttatcaaactgcctcctgtgagctaatttcccgtgattggtaattaatcactagttagggctacaaccttcagaaacaattcaggtatccacaactcatctagctgtcatcccatagaatcatagaacagcttgggtcagaagggacctcaaagatcatcaagttccagtcccccagttgcaggcagggttgccagmcactagaatgcgtcttgctgttgcccagcttcatcctactgaagtagctgtgaaggtagatgcattacttattgcagaaagtacattcctgcatattgttttacaaagttactacatctgaggcctgctcagttcattagccagtacaaccaaataaaagttytctgaaaaacwatctccctccaatctgggacacaaagataatggcagagctctttttaatgcaattgcagcaggcatccaggaatagtgttatgtggtcattctgctggataacagaagtttcatttgaataccagc

SEQ ID NO: 89886 - DNA, 600 bp, Chicken  19866894397098_2
ctacaaccttcagaaacaattcaggtatccacaactcatctagctgtcatcccatagaatcatagaacagcttgggtcagaagggacctcaaagatcatcaagttccagtcccccagttgcaggcagggttgccagmcactagaatgcgtcttgctgttgcccagcttcatcctactgaagtagctgtgaaggtagatgcattacttattgcagaaagtacattcctgcatattgttttacaaagttactacatctgaggcctgctcagttcattagccagtacaaccaaataaaagttytctgaaaaacwatctccctccaatctgggacacaaagataatggcagagctctttttaatgcaattgcagcaggcatccaggaatagtgttatgtggtcattctgctggataacagaagtttcatttgaataccagctgcagaatttggccttataagtagcagttcagttgttaagatgcccacagaaatcccaagctggtgatataacaacagagccaaaggcttctttccttacgagaagaaaatctgcaaagttgatatgtgcttatggatgtttttatcaattaaacgctcatta

SEQ ID NO: 89887 - DNA, 600 bp, Chicken  19866894397098_3
agaaacaattcaggtatccacaactcatctagctgtcatcccatagaatcatagaacagcttgggtcagaagggacctcaaagatcatcaagttccagtcccccagttgcaggcagggttgccagmcactagaatgcgtcttgctgttgcccagcttcatcctactgaagtagctgtgaaggtagatgcattacttattgcagaaagtacattcctgcatattgttttacaaagttactacatctgaggcctgctcagttcattagccagtacaaccaaataaaagttytctgaaaaacwatctccctccaatctgggacacaaagataatggcagagctctttttaatgcaattgcagcaggcatccaggaatagtgttatgtggtcattctgctggataacagaagtttcatttgaataccagctgcagaatttggccttataagtagcagttcagttgttaagatgcccacagaaatcccaagctggtgatataacaacagagccaaaggcttctttccttacgagaagaaaatctgcaaagttgatatgtgcttatggatgtttttatcaattaaacgctcattatatttatatgc

SEQ ID NO: 89888 - DNA, 600 bp, Chicken  19866894397104_1
acaggaagcagaaaggaaaaggagtaggtaaatattaaatggagaggggggaaagggctccagagagatttgtgtagacctggcctctgtctctcactggtgggcttggagtacacccaattctccatctgaatcagctcgtggggtggctggggcttaactgcagctagtatgatgtgttgtgatatggcagagctctgcttgagcccctcaccattctgaagagttgggctgagatttccagaacgttggaaagctgaaaataaagcactgagcacctcccttaagctggatgaagarggaaaatgggaataaaccacactggtgcaggttttacagatgctcagttttaattcttctctacctcccaggccttgtgtcctctgataaggagagtgcgtaccatgtgctgcagaggccagagggggggaacctgttggccatcatcgttggtggggctcaggaggctctggatgcccggccaggatcctgcaccttgctgctgaagaataggaagggatttgtccgcgtggccatygagcaggggtgatgcaaaggatggggctacggggtgcttggggagggatgctttggtctgtg

SEQ ID NO: 89889 - DNA, 600 bp, Chicken  19866894397104_2
ttccagaacgttggaaagctgaaaataaagcactgagcacctcccttaagctggatgaagarggaaaatgggaataaaccacactggtgcaggttttacagatgctcagttttaattcttctctacctcccaggccttgtgtcctctgataaggagagtgcgtaccatgtgctgcagaggccagagggggggaacctgttggccatcatcgttggtggggctcaggaggctctggatgcccggccaggatcctgcaccttgctgctgaagaataggaagggatttgtccgcgtggccatygagcaggggtgatgcaaaggatggggctacggggtgcttggggagggatgctttggtctgtgggtggtcaattggatgttcctggtgaattacgggggatagcgggggtgttttggggttggcctcgctaatcttcgtggccacatgttgtgttcatctccctgcagcaccccactggtccctgccttttcctttggggagaacgagctcttcgaccaggtgagcaaccccaagggctcatggctgcggtggatccagcaccggctccagcagatcatgggcatctccctacccctcttc

SEQ ID NO: 89890 - DNA, 600 bp, Chicken  19866894397110_1
ttgcagtctcatccatgtggttcttacatggatgaagtcctgtctccagggaataacagcaactacaaaggcccaccagaggcctctaatttccttttatcattaactctgatactatccagatgggaatgctgtagctctgtatgatgtaacactgaatggcatattaataactttctagtgcctggatgtaagtctccaaccaggtattctagaagaactccaggctaacagaaagcaccagcaccttttattgtttgcatgattcatactacgatagccccaagaggccagtgatcraagatgactgagatcataggaataaagaggctgtcccttctccacagctttccttcctgcaagaaattaaatgtgattyggtcatcgcatgaagctgtccagccatgttctgtctgcaaggtcagcagcacagaggaggtggagaagctcttctggacagtcgcttgcttcccaggtgtgtgatggtagaccagatcatcctggtttggaaaaggtagcccaacttccagaactcaggtattttcttaacagctgattccttggagctggccatgcctgaagtgctctgtgggctggcat

SEQ ID NO: 89891 - DNA, 582 bp, Chicken  19866894397110_2
aggcctctaatttccttttatcattaactctgatactatccagatgggaatgctgtagctctgtatgatgtaacactgaatggcatattaataactttctagtgcctggatgtaagtctccaaccaggtattctagaagaactccaggctaacagaaagcaccagcaccttttattgtttgcatgattcatactacgatagccccaagaggccagtgatcraagatgactgagatcataggaataaagaggctgtcccttctccacagctttccttcctgcaagaaattaaatgtgattyggtcatcgcatgaagctgtccagccatgttctgtctgcaaggtcagcagcacagaggaggtggagaagctcttctggacagtcgcttgcttcccaggtgtgtgatggtagaccagatcatcctggtttggaaaaggtagcccaacttccagaactcaggtattttcttaacagctgattccttggagctggccatgcctgaagtgctctgtgggctggcatgggagaagaaataagactggactgatctctgtgggtttgctctgctttgctcatatgaaaa

SEQ ID NO: 89892 - DNA, 599 bp, Chicken  19866894397115_1
  misc_feature (1)..(115): n is any nucleotide
nnnnnnnnnnnnnnnnnnnnnnnnnnnnnnnnnnnnnnnnnnnnnnnnnnnnnnnnnnnnnnnnnnnnnnnnnnnnnnnnnnnnnnnnnnnnnnnnnnnnnnnnnnnnnnnnnnnaaggtccccccaaggatcatggagtccaactcctagtccacacagcaccacccaaaattcaaactatatttctgagagcactgtccaaatgctttttgaactccagcagatcagtgccacaaccactgccctgggcagtctgttccacatcccccaccctctggtaaataatcttttcctaacayccaaaatgaccttcccctgacacagctctatgcccttcctagggtccagttgctttcaccagagagaacattactcatgactccattttgtcaaggtcttgctaagactccagatgtaaggtttcctgaacttcctcagaaatcctgctttttttttttcttttttctcaaccgcatttcttgtatcttggaaaggtgttcttatacaccaccrtttctcccagtactgagaaatctgaaaatctaaatctgaaaacagctatctcagctaaaggtgaagccctgccccttttgagaag

SEQ ID NO: 89893 - DNA, 600 bp, Chicken  19866894397115_2
actccagcagatcagtgccacaaccactgccctgggcagtctgttccacatcccccaccctctggtaaataatcttttcctaacayccaaaatgaccttcccctgacacagctctatgcccttcctagggtccagttgctttcaccagagagaacattactcatgactccattttgtcaaggtcttgctaagactccagatgtaaggtttcctgaacttcctcagaaatcctgctttttttttttcttttttctcaaccgcatttcttgtatcttggaaaggtgttcttatacaccaccrtttctcccagtactgagaaatctgaaaatctaaatctgaaaacagctatctcagctaaaggtgaagccctgccccttttgagaagaccttggaaggctaacccatagtccttaaaagatcagcagactttgtaataaattaactcaggaccatcactggaatgtcatttctagattttctgcaaaaaattctcttagtgggacaccatccgatgaacctaaaagcatatgtcatatagtttgatgtaatcaaaaacaaaaagctggtacaacatcttcctaacaaaagcattttggaggt

SEQ ID NO: 89894 - DNA, 600 bp, Chicken  19866894397120_1
ccttcttttcccggtgccggtgtggcggtgaggaggaggagcggagcccaacctctgcccgggacacctcttggcggtgcgggagtgccacggggctgcgggcgggtgggcgggcgacaggcgctctgcagggccgcctcgtgctgcgacacggggagcgaggctggcggtggtgggtgagccccgagaggtgcccccggctcccttcgcccacgtgtgaacacggctctgggggcaccgaagtggtagcgcgatgggtcggcgcggttcagaagttgtacgcaccgccggggccgcgcrtggcggacgggcgacggtactcgttgtgcggtgcgagccctccgttctctgtgtgggaaacttcagcaaaattaacgaggtgtacttctcactccagtcaatctttttaaggctagttctgcacgactctagattctcacctgtcacgcttctgtctcaaagattaggtgtaagtatctagaggtgtgagtatctgctagagtacattcataagtaagacactagatcatatttctctaacctaactgtgatatcttggaagcaaccttttgcgtttttgtgtatgaccggcaggaagaa

SEQ ID NO: 89895 - DNA, 600 bp, Chicken  19866894397122_1
gagttcaacctgagcaagaaaacaaaatgcaccgtaacgccaatttgtcataatgaataccagttcaacgcaaagcattcagtatacataagggctatccaacatataagagaaatatggcggggcacaagcttaaggtcttctttacaaaccctgctgaaaaaccctgctgaaaaacattaaacagaggagctaggaagaatacaatgacgcactgtattacaagaacaggcattattaagaaacttctgaagagtaaatgggtaatagcagatgctttcattcaacatatagaaatamattaaaattgaaaaggaccttctaaaataaaacttatttttattttcaaagttaaaaaaaagattatgagaactctcaattttacttactttggatctggtggtccatctgataggggcttcatggagagtttacacagtgacctgaatacaaggaaggcatccttttgtaaaatgtgggaaaacttagcaccaggtgtaggtcctgaagaatttccagattcctaaagaagttaacatatttcagtattccattctgcattagcaggttgtgtagggaaatccccacctcctagcaaca

SEQ ID NO: 89896 - DNA, 600 bp, Chicken  19866894397122_2
cattagcaggttgtgtagggaaatccccacctcctagcaacaagaagttaagatattatacaaatataaccagttcactacagctttatggtgtcaagactaaactaaaataaacaaaaaaggtttctgcagtacagttaaaatgaatgaactctgtaatgatatatgctatctcagtaaaaagccagaattacattaaagactgtccctgaaattatagactagtgggagatgtggaggttgtgagctgtcttgggcagtgaccacaaaatggcagaattttctagtcttggcacaggrggagggccagcaaaactgttcccttggacttccagagggcagacttggaactattcaggacactagtagggaaggtcctctgggagtctgtcctgaagggtaaagaggtccaggaaggctggatgctcctcaagaaggaagtcttaaaggcacaggaaaaggctgttcccgtgctgtaagatgtgccagcggggaagaagactaaygtagatacgcagggaatttcttctgaggctccatcagtaaaagagagtctacctcctgtggaagaagggacaggcaactctaggagagtgcaaa

SEQ ID NO: 89897 - DNA, 600 bp, Chicken  19866894397122_3
ccctgaaattatagactagtgggagatgtggaggttgtgagctgtcttgggcagtgaccacaaaatggcagaattttctagtcttggcacaggrggagggccagcaaaactgttcccttggacttccagagggcagacttggaactattcaggacactagtagggaaggtcctctgggagtctgtcctgaagggtaaagaggtccaggaaggctggatgctcctcaagaaggaagtcttaaaggcacaggaaaaggctgttcccgtgctgtaagatgtgccagcggggaagaagactaaygtagatacgcagggaatttcttctgaggctccatcagtaaaagagagtctacctcctgtggaagaagggacaggcaactctaggagagtgcaaagaagttcttaggatatgtagggagaaaattacaaaaacaaaagcacagcttgaactcagcttggccactggggtaaaagagaactaaaaactttttacaaatatattaacagtaagaagagggctaatgactatctccatcctttactgaatgtggtgcagaacgtgaccactgaggataaggccaaggctgaggttctcaacgcc

SEQ ID NO: 89898 - DNA, 465 bp, Chicken  19866894397123_1
aattttgttttcaaaggatatggtgaagtataaatagacttgctaaaaacagctgaaattcagtgtttctttttcacctgcttttacttcaagctctcaatgctttatctgcctccctcttcccaactgatggactaaccctgaaatccctactgcatgctgatacaacctgaggggttattgtcatctgagaggagaagatatctgataaacaagaccaccaataaacttggcttccatctcattcagtgacagaaaggtgcttggcaaggtctcagggggaatgataataaattgccytgtacagtcctggagtctcaatgcccaactgaaacagctttgcatgctggtggctcagagggcacatttttaatcaatgcagttctttgctttttggacatatgcctacaccacagagaacatttcagagctctgctttctatttttaagaggaaaatagtagat

SEQ ID NO: 89899 - DNA, 600 bp, Chicken  19866894397135_1
gtgccttggtctccggaggtcaccctgagtgcaattaccttctccaagtgctatgtgaggagatctggcagagccacgtgtgactcacagtagtgcattataaccggtgtaacgctgccagctccaaggtgaccttgctgtggcacagcgtgctggcacctccatggagctcaggccttgaacagccagcaaggaccgtgcccaacccctcatccaagcccagcacatcactatcttcagccaaatgtctgggataggtgtggttaatagcagtctactgtatgctttgtgcaaagcacrtcttcctcttcagactcctccactggtgcccgtcactacttgggccttcctgagcaagacctgtctgacagctgcagcccattgcaggccaggtaggagctgagattaaaaacgagaccttggactgttccacgtgtcagttacttctgagtgatatcctcagaagctgcagccaacgagatgaacaggcagctggccagttatgcagacagaccaactgggaaggaaagaaagggagatcttgtctcaggactctgttgtgttacacatattaaaaaacaaaacaacaaacatacgtgt

SEQ ID NO: 89900 - DNA, 425 bp, Chicken  19866894397135_2
tgtctgacagctgcagcccattgcaggccaggtaggagctgagattaaaaacgagaccttggactgttccacgtgtcagttacttctgagtgatatcctcagaagctgcagccaacgagatgaacaggcagctggccagttatgcagacagaccaactgggaaggaaagaaagggagatcttgtctcaggactctgttgtgttacacatattaaaaaacaaaacaacaaacatacgtgttcctcctctgcctactgtgtttttttttatcatgaaacaggaaggagacaaatcagagctyagcaatctggtcccccactacacaaatagaataaggaaaaaaaaagcctgaccagatagtggtcaagtgattaatacaaccataaaattaaccacycaattaatacagtggggacacccacattg

SEQ ID NO: 89901 - DNA, 329 bp, Chicken  19866894397135_3
cctcagaagctgcagccaacgagatgaacaggcagctggccagttatgcagacagaccaactgggaaggaaagaaagggagatcttgtctcaggactctgttgtgttacacatattaaaaaacaaaacaacaaacatacgtgttcctcctctgcctactgtgtttttttttatcatgaaacaggaaggagacaaatcagagctyagcaatctggtcccccactacacaaatagaataaggaaaaaaaaagcctgaccagatagtggtcaagtgattaatacaaccataaaattaaccacycaattaatacagtggggacacccacattg

SEQ ID NO: 89902 - DNA, 600 bp, Chicken  19866894397143_1
ctggtaatctggagtcacagcttcctggcatagggacaccacactgcctgcagcccccagctcagcctgatgcagatataagagccctccctctatcagagctgtttgtcctgctaccaaacaagcccagcagtttgccttttataaccattgatacagcttttcccaacccctcattagcagtgtaattagagcagcctgcagataaattggagggttggcccgggcagtccccttggctctgtgaggtgggtgaggatgaagatgagccttctgagtcccttctgttgcgtggtgagrtgagccatagccctgcctgtgatctgaaggggttcctggtgttggggtggggggtccctgtgaaccagtagatgccctgagccaccctgyagggaatccctatagcatagagggggcacggagctgcaggctgagctggctgggaagagcaggacagctgggtgagcagtagggcagcagtgtcatggaatatgcctgacctttggaagtgtaagccaatataggggggtgctgcyatgctctccttygcccctccattacrctgcagccctccattttgtctgctttccttctagcttt

SEQ ID NO: 89903 - DNA, 600 bp, Chicken  19866894397143_2
ctctatcagagctgtttgtcctgctaccaaacaagcccagcagtttgccttttataaccattgatacagcttttcccaacccctcattagcagtgtaattagagcagcctgcagataaattggagggttggcccgggcagtccccttggctctgtgaggtgggtgaggatgaagatgagccttctgagtcccttctgttgcgtggtgagrtgagccatagccctgcctgtgatctgaaggggttcctggtgttggggtggggggtccctgtgaaccagtagatgccctgagccaccctgyagggaatccctatagcatagagggggcacggagctgcaggctgagctggctgggaagagcaggacagctgggtgagcagtagggcagcagtgtcatggaatatgcctgacctttggaagtgtaagccaatataggggggtgctgcyatgctctccttygcccctccattacrctgcagccctccattttgtctgctttccttctagctttgctccttgttggccccagcgaggggcaccctgctgtggccctgagcaaatgtcacctgtcccaagggaaccacagcaggcgccacgagcc

SEQ ID NO: 89904 - DNA, 600 bp, Chicken  19866894397143_3
tggctctgtgaggtgggtgaggatgaagatgagccttctgagtcccttctgttgcgtggtgagrtgagccatagccctgcctgtgatctgaaggggttcctggtgttggggtggggggtccctgtgaaccagtagatgccctgagccaccctgyagggaatccctatagcatagagggggcacggagctgcaggctgagctggctgggaagagcaggacagctgggtgagcagtagggcagcagtgtcatggaatatgcctgacctttggaagtgtaagccaatataggggggtgctgcyatgctctccttygcccctccattacrctgcagccctccattttgtctgctttccttctagctttgctccttgttggccccagcgaggggcaccctgctgtggccctgagcaaatgtcacctgtcccaagggaaccacagcaggcgccacgagcccggctgagacgtgctggggtctgagcacatcctggagcattcacccaccccgtgctcacagcagggacatcccatcccctgcccagtgcaggctgtctctgctccgccatcgcactcatgtgctggttctactcgtgtgcttggcg

SEQ ID NO: 89905 - DNA, 600 bp, Chicken  19866894397143_4
gtgggtgaggatgaagatgagccttctgagtcccttctgttgcgtggtgagrtgagccatagccctgcctgtgatctgaaggggttcctggtgttggggtggggggtccctgtgaaccagtagatgccctgagccaccctgyagggaatccctatagcatagagggggcacggagctgcaggctgagctggctgggaagagcaggacagctgggtgagcagtagggcagcagtgtcatggaatatgcctgacctttggaagtgtaagccaatataggggggtgctgcyatgctctccttygcccctccattacrctgcagccctccattttgtctgctttccttctagctttgctccttgttggccccagcgaggggcaccctgctgtggccctgagcaaatgtcacctgtcccaagggaaccacagcaggcgccacgagcccggctgagacgtgctggggtctgagcacatcctggagcattcacccaccccgtgctcacagcagggacatcccatcccctgcccagtgcaggctgtctctgctccgccatcgcactcatgtgctggttctactcgtgtgcttggcgacggctgggctg

SEQ ID NO: 89906 - DNA, 600 bp, Chicken  19866894397143_5
agatgagccttctgagtcccttctgttgcgtggtgagrtgagccatagccctgcctgtgatctgaaggggttcctggtgttggggtggggggtccctgtgaaccagtagatgccctgagccaccctgyagggaatccctatagcatagagggggcacggagctgcaggctgagctggctgggaagagcaggacagctgggtgagcagtagggcagcagtgtcatggaatatgcctgacctttggaagtgtaagccaatataggggggtgctgcyatgctctccttygcccctccattacrctgcagccctccattttgtctgctttccttctagctttgctccttgttggccccagcgaggggcaccctgctgtggccctgagcaaatgtcacctgtcccaagggaaccacagcaggcgccacgagcccggctgagacgtgctggggtctgagcacatcctggagcattcacccaccccgtgctcacagcagggacatcccatcccctgcccagtgcaggctgtctctgctccgccatcgcactcatgtgctggttctactcgtgtgcttggcgacggctgggctgctgtgccatgcctg

SEQ ID NO: 89907 - DNA, 600 bp, Chicken  19866894397143_6
gagcaaatgtcacctgtcccaagggaaccacagcaggcgccacgagcccggctgagacgtgctggggtctgagcacatcctggagcattcacccaccccgtgctcacagcagggacatcccatcccctgcccagtgcaggctgtctctgctccgccatcgcactcatgtgctggttctactcgtgtgcttggcgacggctgggctgctgtgccatgcctgaggttgcagcctggtgatgggcagcttgctgcagggccgtggtgcacaccgcagaccctaactgctgtgtgtgtgtgccragcagcacacctgcgtggggaatggcctgcagctgccatcgccggggatgggtgcacttgcgctgccacgtggttggggcacacgtctgagctgctggtcgtcctggtcgtggcttgtgcagctctgttggcttggtgagcgctgccagggaaggcagtagctgagtggggcaggactgggcgcagcatatcgctggtggcggcagtgctgcctgtgcacagggcaggctgggtttggaatctcatcccggtagctgcgggtctcgttgctcacaaactgtaactccttctttcctgctg

SEQ ID NO: 89908 - DNA, 600 bp, Chicken  19866894397144_1
tggtgttttccacttcttcccacagcggaaatgctgtagcccaacacaggagaaaccaaatcccctgtgctgagcccctgcagtgctactgtcaggtatcactccattgccacggtgttcaaccccagcacgtttcacattcagacttctacctgtacaagcaagaggccctcacttaaaaatctgcctacctgctcttggcttcatctgaattctgcacttctgaagagacacaacgtgctgagtggacagtgcacctgcctttgatgcacgctaacaacagcattttattgccaaatkcaataaaacgtgtcgacygctacaaaggtagaaaaggctttcgtttgaagagcctcaattccaactgctctgttcccttcaagttaaaaaaaaaaaaccaacaagaaaaaaaacccaactcctctgttgcaccaaaatcatctcctggcatttctgaccagcacacatgttgttacaattatgactggactgcttggctccggcatagggggaatgttaaaccggcacactggcacccatcaaaacatttgcaaatttccaaagtggaactgacaccacggtagtggtttatatcacacg

SEQ ID NO: 89909 - DNA, 600 bp, Chicken  19866894397144_2
cccacagcggaaatgctgtagcccaacacaggagaaaccaaatcccctgtgctgagcccctgcagtgctactgtcaggtatcactccattgccacggtgttcaaccccagcacgtttcacattcagacttctacctgtacaagcaagaggccctcacttaaaaatctgcctacctgctcttggcttcatctgaattctgcacttctgaagagacacaacgtgctgagtggacagtgcacctgcctttgatgcacgctaacaacagcattttattgccaaatkcaataaaacgtgtcgacygctacaaaggtagaaaaggctttcgtttgaagagcctcaattccaactgctctgttcccttcaagttaaaaaaaaaaaaccaacaagaaaaaaaacccaactcctctgttgcaccaaaatcatctcctggcatttctgaccagcacacatgttgttacaattatgactggactgcttggctccggcatagggggaatgttaaaccggcacactggcacccatcaaaacatttgcaaatttccaaagtggaactgacaccacggtagtggtttatatcacacgtcagagaaaggcttcata

SEQ ID NO: 89910 - DNA, 600 bp, Chicken  19866894397145_1
gttgccttctctttccttgagtgttaaatgaaatggtgagacagggaggctctgcacatgagaaaaaggtgcatttttcctgggaagccaatctattatttggtgcctgttttggaagattaagcaatagaaattacttaaactgattctgaagtcatgtctttctgctgctttggaccaaggacctgatgataattcttaattagttacctaaatacccattgatttcagagagagttaggacacaccaatatctttgtgatcaagctctacattctgtatcgagaagacacgcttatrtaggacagttgctggaaggggcacacaacattgcacaatgttactgcaggttacgttatgaggttaattaataagggctatgctctggagatacagtgtctcttgaattaccctctttccttctaaggaaaagagctaagggaaatttcacatgtttttaatagcatagaaaaaccgtagaaaatagggctgaaaagaagctcaggaggtcatttatccacgtttccacctcaaggtagaacaaactaaatctaaaccatgtcctgagaggtacttttctgacctcttctgaatttctgg

SEQ ID NO: 89911 - DNA, 600 bp, Chicken  19866894397154_1
tggaaacaacagtaaatcgccaccaacagattctgttctttagctgaagcctcctataacacagcatgcaaaccctaacgaaaggcatttgtacgccagtgcgggtcgataccatagtttaacacagagcagctttgtgaagggagaacaaggatcctgcagtgtgcttttagggcttgtgcttcctatggccagccccggatctctgttctgtgttaataagctgctgctgtaatctgcaccggggtggtccggcgagacggcagccgtgggacagctcggaggggaagcgccgcgcgygaagttcccccacttatctggcctctttgcatgaacaatgctggcaaaatcacccatgcgtatcacggagctctggaagtcatgctgcatctcttaggtttcacgctggttgctttaaagactcagcgggcaaraaaagggctctgcttctcaaagaaataagctcccttgtacccaagagacagctggcacaaaagctgcaccccgtcagcagcagctccagaagagctgtgggctgtcatgagggcttcttgtgcacaggaagccaccttgccatacaagctgatattccagtgattt

SEQ ID NO: 89912 - DNA, 600 bp, Chicken  19866894397154_2
ttgtgaagggagaacaaggatcctgcagtgtgcttttagggcttgtgcttcctatggccagccccggatctctgttctgtgttaataagctgctgctgtaatctgcaccggggtggtccggcgagacggcagccgtgggacagctcggaggggaagcgccgcgcgygaagttcccccacttatctggcctctttgcatgaacaatgctggcaaaatcacccatgcgtatcacggagctctggaagtcatgctgcatctcttaggtttcacgctggttgctttaaagactcagcgggcaaraaaagggctctgcttctcaaagaaataagctcccttgtacccaagagacagctggcacaaaagctgcaccccgtcagcagcagctccagaagagctgtgggctgtcatgagggcttcttgtgcacaggaagccaccttgccatacaagctgatattccagtgatttccctttggctttatcagtctcttagctacttcgcaatatacgcttctaaaatttgaactcagaaattcgaattcagatgtcacaaatttccatgccttcctttctaccttttccaacagagaagtgtgtttgtt

SEQ ID NO: 89913 - DNA, 600 bp, Chicken  19866894397162_1
cactaaaaatacttgggaacactgacattattataaagtctcctatttctgctctctatgggagctgctagctttcttgggtagcatccaaatctctagagaatcttttaagatgaagctcaaatttagtacaacaaagcccctggttagcatatgagaaagcagatctttgggtccagttgcacagctccctgccaccaaaggagtcagtagcatgggtgattccttgctgagacacttcagctagcagctggtcttgctaatgtgcaatgagtgaaaaagaagagactggggcctgtstgtgccactttcaggtcctgccttataagactggcagtggattggaggtgctgccctgctgcaataaatgtcgtttgatggctgattgattagcagtccagcagcagagtctaacaatcttttttattttttaaaagacccttaaatgtaactttgcctttttccccatcatggctaacaaatgatttgcaatgggcgaagtaacaaagcccgacagttctaccttctggtggaagtcccatgccaaattcaatcaacagcagtattgagaaattttgatggtttattctgtgcttttat

SEQ ID NO: 89914 - DNA, 600 bp, Chicken  19866894397162_2
aataatatttgcgtcctctctagtttctgcagagtgactgatagcctgattaaacaaggctgactccatttggttacagaagtgaggttttgttactgtgaaaaaaaatcctgttactgtgctttgcagttaaaatgaaatcacgtgggtttagacagaaatatctgcctccatggagacagggcaatgttcagagaggacaaatgttagttcttctcagtttgagtgttacttgctacttccagaagttcagtagagtaaggcccttacaatgcagaaaactacacccatatgcttcayggtgaatgtaaaggcaatacagcgtagggagttcagatctgcttctggtagatatgaaaaacattataactatcttcagttaagctacttgttagatttctgcttayaaaaggtctactgaaatttataatagctgcatatttggataatgaagtgattttattagtaagttcaggatttgaagttgtaggtctgtatttcaaggggatttacgtagagagatgggattaatcaaaagtaataattatacaataaacaaataataaataccactttgcttgagatttggatctcaatcat

SEQ ID NO: 89915 - DNA, 600 bp, Chicken  19866894397162_3
atcctgttactgtgctttgcagttaaaatgaaatcacgtgggtttagacagaaatatctgcctccatggagacagggcaatgttcagagaggacaaatgttagttcttctcagtttgagtgttacttgctacttccagaagttcagtagagtaaggcccttacaatgcagaaaactacacccatatgcttcayggtgaatgtaaaggcaatacagcgtagggagttcagatctgcttctggtagatatgaaaaacattataactatcttcagttaagctacttgttagatttctgcttayaaaaggtctactgaaatttataatagctgcatatttggataatgaagtgattttattagtaagttcaggatttgaagttgtaggtctgtatttcaaggggatttacgtagagagatgggattaatcaaaagtaataattatacaataaacaaataataaataccactttgcttgagatttggatctcaatcatgggagtgcaggtggcacacctctggacacactaaaaagaaacttgtgaaatttctaaaaccagttcaccttttcaacacatcactccctatatatcactcatgtata

SEQ ID NO: 89916 - DNA, 599 bp, Chicken  19866894397163_1
  misc_feature (1)..(130): n is any nucleotide
nnnnnnnnnnnnnnnnnnnnnnnnnnnnnnnnnnnnnnnnnnnnnnnnnnnnnnnnnnnnnnnnnnnnnnnnnnnnnnnnnnnnnnnnnnnnnnnnnnnnnnnnnnnnnnnnnnnnnnnnnnnnnnnnnnctgacagagctaggcatacagaaaattaaaaacaatgctgtaattttgatcttggttgtgaaattctcaccataatgtaatgtttatttccacaaacaatttgagaatgcaaatatgtcagtgaattttaaatttacccacctgaaaagcagtatttattacaaacacargctgatctctattcctatctatttctcacacatatgcattcagataaatgtgcaaacatataccctatatgcactcattctgtagacaatcagagaccgagataaaataaagcttctagagtgacagacattctgcagacagggttgttagtttatgtaggctatgggcagagttgactggaaaattttgatcactttaatttactatatccagcatgcctgctgtacttgtccagcacttttatcaagccctgtgaggtggtattgatttttttattttctatgtaggataagaagac

SEQ ID NO: 89917 - DNA, 599 bp, Chicken  19866894397165_1
  misc_feature (1)..(197): n is any nucleotide
nnnnnnnnnnnnnnnnnnnnnnnnnnnnnnnnnnnnnnnnnnnnnnnnnnnnnnnnnnnnnnnnnnnnnnnnnnnnnnnnnnnnnnnnnnnnnnnnnnnnnnnnnnnnnnnnnnnnnnnnnnnnnnnnnnnnnnnnnnnnnnnnnnnnnnnnnnnnnnnnnnnnnnnnnnnnnnnnnnnnnnnnnnnnnnnnnnnnnagaacagttgggcttccttttgttatgtagtccacaagggtgataacaaggataacagaaagtccagaggagaccttcacactacataaaatacttaaataasttgctgggaattaggttctgttgcagtcaggtcccttgaacattatgaaatatattttccagatgaattgtctagtatgagaagtgatgatgagatcaggtctgctgatggttattcaagtctcatacagttctcacctgaacattcaagtactggcaaagatttgggcttttttctctagaagtgtggagtgactgtgacataatatgtggtagaccaaatgtagaggcaagagcaagtacttcatgccatacgtacttcatccatgtatagtttgattccaatgagttatgtgggtg

SEQ ID NO: 89918 - DNA, 600 bp, Chicken  19866894397169_1
tctgctatacgtcaaaaggctgaacaagacctggtgatcccactgtgcagctgaacagaaagcacagggcacgtggccacgtaaatcagatggatgcgtggggctgtattccggcctcagcatcacaagcgcctttccagagcctctcctccagggtcagtgtgcctgcacagccggggcaccttggcttcgcttggagcacatatgagggcaggtgtctgtcttaataaaccagacgtttcccatccacacacaggttaactaaatgatcttccggaagacacatgtgctccaaggagyagactagctttctgtgcattcacatttgaggcagctggaattttccagctaactgctcagcacagtaaacatgagaggacagyctcagtctccttagtctgcagtcaatttcctttagcttacactgaaaggtctccctgttttttctcaggctttccttgtgaaatgggaagagagtttaasaggggttttggaacagatgtttgaggaatctgatattcagtctaagacaactgctttgtaaaaccagtccttatttttgcataagccactttatgaacccaaataaataaaactctg

SEQ ID NO: 89919 - DNA, 600 bp, Chicken  19866894397169_10
tgttgttgtaaatgtaggaagggcagacaraagacttccagaggttaacaccaagttaattccccaaagacctccttggggtcctcaaagtttcagaaataaacaacaaaagctttgagtgcagaagtctaaaatmggagtcataccaagagatataaagacttctggagcctattgagtagtctgccctactaaaattgagaggaatagctaaagtcaggtcaaatgagcccagtctttgtttccacagaatcacaaaatggtttgggttggaagggaacttaaagcccatccagtgayaactcttgccactggcagaacctcccagcccatcaggctgcccagccccatccaccttggctgtgaacgcctccagggatggggcatccacagcatctttgggcagcgatgccagggcctcaccacctttctgagtgaggaatttcctcactgtctaacctaagtagctttttcggtatctaaggggggcttgtatgaaagatggggacaagactctttagcgcagtctgctgtgacaggacaaaggaaaatggcttcaaacgaaatgaggggagatttaggttgaacgtaaggaagaag

SEQ ID NO: 89920 - DNA, 600 bp, Chicken  19866894397169_2
aatcagatggatgcgtggggctgtattccggcctcagcatcacaagcgcctttccagagcctctcctccagggtcagtgtgcctgcacagccggggcaccttggcttcgcttggagcacatatgagggcaggtgtctgtcttaataaaccagacgtttcccatccacacacaggttaactaaatgatcttccggaagacacatgtgctccaaggagyagactagctttctgtgcattcacatttgaggcagctggaattttccagctaactgctcagcacagtaaacatgagaggacagyctcagtctccttagtctgcagtcaatttcctttagcttacactgaaaggtctccctgttttttctcaggctttccttgtgaaatgggaagagagtttaasaggggttttggaacagatgtttgaggaatctgatattcagtctaagacaactgctttgtaaaaccagtccttatttttgcataagccactttatgaacccaaataaataaaactctgttccaaagttgcccttgctgactgctgctgygctgaacgctgcaacttgagcttgcatcgaaccaaaaaaagaaaagaacttt

SEQ ID NO: 89921 - DNA, 600 bp, Chicken  19866894397169_3
ttggcttcgcttggagcacatatgagggcaggtgtctgtcttaataaaccagacgtttcccatccacacacaggttaactaaatgatcttccggaagacacatgtgctccaaggagyagactagctttctgtgcattcacatttgaggcagctggaattttccagctaactgctcagcacagtaaacatgagaggacagyctcagtctccttagtctgcagtcaatttcctttagcttacactgaaaggtctccctgttttttctcaggctttccttgtgaaatgggaagagagtttaasaggggttttggaacagatgtttgaggaatctgatattcagtctaagacaactgctttgtaaaaccagtccttatttttgcataagccactttatgaacccaaataaataaaactctgttccaaagttgcccttgctgactgctgctgygctgaacgctgcaacttgagcttgcatcgaaccaaaaaaagaaaagaactttccacagcgttaccaagtggcaccatataattagatcaaaattatatccactgcgttatatgtcatcttgctacaaaggcactgaaggtcagctgttgaca

SEQ ID NO: 89922 - DNA, 600 bp, Chicken  19866894397169_4
cagctggaattttccagctaactgctcagcacagtaaacatgagaggacagyctcagtctccttagtctgcagtcaatttcctttagcttacactgaaaggtctccctgttttttctcaggctttccttgtgaaatgggaagagagtttaasaggggttttggaacagatgtttgaggaatctgatattcagtctaagacaactgctttgtaaaaccagtccttatttttgcataagccactttatgaacccaaataaataaaactctgttccaaagttgcccttgctgactgctgctgygctgaacgctgcaacttgagcttgcatcgaaccaaaaaaagaaaagaactttccacagcgttaccaagtggcaccatataattagatcaaaattatatccactgcgttatatgtcatcttgctacaaaggcactgaaggtcagctgttgacagaggaatgtggtacagatcaacatccattctttctgcagaaaatctcatactgatagtgagctgcttacagcaactagcaaatacatttgcttacctaccygatatcttaccaagcactgatctgcagagctacaagctgactgacrc

SEQ ID NO: 89923 - DNA, 600 bp, Chicken  19866894397169_5
aataaataaaactctgttccaaagttgcccttgctgactgctgctgygctgaacgctgcaacttgagcttgcatcgaaccaaaaaaagaaaagaactttccacagcgttaccaagtggcaccatataattagatcaaaattatatccactgcgttatatgtcatcttgctacaaaggcactgaaggtcagctgttgacagaggaatgtggtacagatcaacatccattctttctgcagaaaatctcatactgatagtgagctgcttacagcaactagcaaatacatttgcttacctaccygatatcttaccaagcactgatctgcagagctacaagctgactgacrcccagaatccgaacaaggagatttccttcagcagtaygaattcaaaattaacaccattcatattttggaacatgcttcaggggacagcttttctgccacaatgcaaagtcctgtgctatctctggagattttggaaatccaagcactgatacagagctccagtgtgagctcatgttgttgtaaatgtaggaagggcagacaraagacttccagaggttaacaccaagttaattccccaaagacctccttggggt

SEQ ID NO: 89924 - DNA, 600 bp, Chicken  19866894397169_6
ygctgaacgctgcaacttgagcttgcatcgaaccaaaaaaagaaaagaactttccacagcgttaccaagtggcaccatataattagatcaaaattatatccactgcgttatatgtcatcttgctacaaaggcactgaaggtcagctgttgacagaggaatgtggtacagatcaacatccattctttctgcagaaaatctcatactgatagtgagctgcttacagcaactagcaaatacatttgcttacctaccygatatcttaccaagcactgatctgcagagctacaagctgactgacrcccagaatccgaacaaggagatttccttcagcagtaygaattcaaaattaacaccattcatattttggaacatgcttcaggggacagcttttctgccacaatgcaaagtcctgtgctatctctggagattttggaaatccaagcactgatacagagctccagtgtgagctcatgttgttgtaaatgtaggaagggcagacaraagacttccagaggttaacaccaagttaattccccaaagacctccttggggtcctcaaagtttcagaaataaacaacaaaagctttgagtgcagaagt

SEQ ID NO: 89925 - DNA, 600 bp, Chicken  19866894397169_7
aaaagaaaagaactttccacagcgttaccaagtggcaccatataattagatcaaaattatatccactgcgttatatgtcatcttgctacaaaggcactgaaggtcagctgttgacagaggaatgtggtacagatcaacatccattctttctgcagaaaatctcatactgatagtgagctgcttacagcaactagcaaatacatttgcttacctaccygatatcttaccaagcactgatctgcagagctacaagctgactgacrcccagaatccgaacaaggagatttccttcagcagtaygaattcaaaattaacaccattcatattttggaacatgcttcaggggacagcttttctgccacaatgcaaagtcctgtgctatctctggagattttggaaatccaagcactgatacagagctccagtgtgagctcatgttgttgtaaatgtaggaagggcagacaraagacttccagaggttaacaccaagttaattccccaaagacctccttggggtcctcaaagtttcagaaataaacaacaaaagctttgagtgcagaagtctaaaatmggagtcataccaagagatataaagacttc

SEQ ID NO: 89926 - DNA, 600 bp, Chicken  19866894397169_8
actgatagtgagctgcttacagcaactagcaaatacatttgcttacctaccygatatcttaccaagcactgatctgcagagctacaagctgactgacrcccagaatccgaacaaggagatttccttcagcagtaygaattcaaaattaacaccattcatattttggaacatgcttcaggggacagcttttctgccacaatgcaaagtcctgtgctatctctggagattttggaaatccaagcactgatacagagctccagtgtgagctcatgttgttgtaaatgtaggaagggcagacaraagacttccagaggttaacaccaagttaattccccaaagacctccttggggtcctcaaagtttcagaaataaacaacaaaagctttgagtgcagaagtctaaaatmggagtcataccaagagatataaagacttctggagcctattgagtagtctgccctactaaaattgagaggaatagctaaagtcaggtcaaatgagcccagtctttgtttccacagaatcacaaaatggtttgggttggaagggaacttaaagcccatccagtgayaactcttgccactggcagaacctcccagcc

SEQ ID NO: 89927 - DNA, 600 bp, Chicken  19866894397169_9
ccgaacaaggagatttccttcagcagtaygaattcaaaattaacaccattcatattttggaacatgcttcaggggacagcttttctgccacaatgcaaagtcctgtgctatctctggagattttggaaatccaagcactgatacagagctccagtgtgagctcatgttgttgtaaatgtaggaagggcagacaraagacttccagaggttaacaccaagttaattccccaaagacctccttggggtcctcaaagtttcagaaataaacaacaaaagctttgagtgcagaagtctaaaatmggagtcataccaagagatataaagacttctggagcctattgagtagtctgccctactaaaattgagaggaatagctaaagtcaggtcaaatgagcccagtctttgtttccacagaatcacaaaatggtttgggttggaagggaacttaaagcccatccagtgayaactcttgccactggcagaacctcccagcccatcaggctgcccagccccatccaccttggctgtgaacgcctccagggatggggcatccacagcatctttgggcagcgatgccagggcctcaccacctttctgagt

SEQ ID NO: 89928 - DNA, 599 bp, Chicken  19866894397170_1
  misc_feature (1)..(28): n is any nucleotide
nnnnnnnnnnnnnnnnnnnnnnnnnnnnaaaagcaatgaagggatgagaattaactctgcagattctgaggagacttgcatgactttttgtgagcctgcagatggtaactgaggaaaggaagcttactgtcagttggtttaaattcattaaatatgtaagaatggagaattcatatagattcttgtaaaaaaaaaatgctgaaagctactgatagctggaaataggtcagcactgagtggaagaagtcaacaaagactcattcaaactttcatgtgagttcctttgtgactgtacacctrggggtattctagggataggtcagctcccaagagtaattctggcactgatgaattttaaggagctctgattttaattcatatagtttagtttctgtggtttacatcaaaaggcaccaaaatgctgggaaaacctctggagcagccacacctcagtttagagaagggcagttcattcacacctacctactaaagcactcttccttttaagctattttaattgttttaataaacaaaacagttttctttctggagcattctggtcttctagctgttagtcacttcagtggtgtccccataga

SEQ ID NO: 89929 - DNA, 600 bp, Chicken  19866894397173_1
accaaccaaaccatttaactaatatgtatgtgaggtctgaagtatcggtaatgaaattgcacctgtgctggcagagatagaaaagggttcaatgtccattaagtggaccagtgcaactgataagtgaacaggctcttccttatccatctcagactgttgttactgaaacgagccataatcagatgttttctagatggatcctgtatgtgatttttatgttatacatcataaaatggatggttccaaaagtataatgtcaaaactgaatgcatattattccattttcaagacgtgtaaaastaagtcagaacagaaaacgtatcttattacttgtaattgcaccacagtccatcctgccaatggcaaagatcaatggctggcctagtaatttctccactgagaatagatacagagacagacaactcctgcatgtctttctcattcatcaacacataacacaaaaaattgggtggattattcaaagcaaatttcagttcacaatattaatgtgactaacacaactaaaaactttttttcaggacagtaagcactgcaaaggaacaaaactactgtaaagaaattaaaaagaaattaataaaa

SEQ ID NO: 89930 - DNA, 599 bp, Chicken  19866894397178_1
  misc_feature (1)..(85): n is any nucleotide
nnnnnnnnnnnnnnnnnnnnnnnnnnnnnnnnnnnnnnnnnnnnnnnnnnnnnnnnnnnnnnnnnnnnnnnnnnnnnnnnnnnnntatgtagcctagtgcaggcaaaactgggatcctgctgcacagcctgtgcaagagaaaagcatgtggggtagtaaggggagaggaaaacgttcacctccctgctctggtgaggaggtgaaaggatgttgggggctcaccaagcaagggcaaaggctggatgtggatactgccggagaattgaatggttgagggggatctgctcatgtcaggctccytgtagtgcttccaaagactaygctgcactatcaagaatagtaattccctgggacagtgatgttctttactacatttgctctggcttcttgtgttgctgcacagctgaaaaatcatcctgcagcagccagagaggtggttctccaccagaggccctttaccctgaatgccaagcacctgtaaggctttgcactccacctgcagccttaaggttcctcctctcaataattcagcatgtgctctgcagaggcttggctgccttccctggggattttgcctcctggcatcaggcagagtgggt

SEQ ID NO: 89931 - DNA, 599 bp, Chicken  19866894397178_2
  misc_feature (1)..(64): n is any nucleotide
nnnnnnnnnnnnnnnnnnnnnnnnnnnnnnnnnnnnnnnnnnnnnnnnnnnnnnnnnnnnnnnntatgtagcctagtgcaggcaaaactgggatcctgctgcacagcctgtgcaagagaaaagcatgtggggtagtaaggggagaggaaaacgttcacctccctgctctggtgaggaggtgaaaggatgttgggggctcaccaagcaagggcaaaggctggatgtggatactgccggagaattgaatggttgagggggatctgctcatgtcaggctccytgtagtgcttccaaagactaygctgcactatcaagaatagtaattccctgggacagtgatgttctttactacatttgctctggcttcttgtgttgctgcacagctgaaaaatcatcctgcagcagccagagaggtggttctccaccagaggccctttaccctgaatgccaagcacctgtaaggctttgcactccacctgcagccttaaggttcctcctctcaataattcagcatgtgctctgcagaggcttggctgccttccctggggattttgcctcctggcatcaggcagagtgggtgctgccctttctttccytggg

SEQ ID NO: 89932 - DNA, 600 bp, Chicken  19866894397178_3
actaygctgcactatcaagaatagtaattccctgggacagtgatgttctttactacatttgctctggcttcttgtgttgctgcacagctgaaaaatcatcctgcagcagccagagaggtggttctccaccagaggccctttaccctgaatgccaagcacctgtaaggctttgcactccacctgcagccttaaggttcctcctctcaataattcagcatgtgctctgcagaggcttggctgccttccctggggattttgcctcctggcatcaggcagagtgggtgctgccctttctttccytgggaatgggctcacctcagcaaccaccagcagtactgccagccccatccaaatcccgctacccccatcttcctacaaatggaggtgctgagctgatttgccttctgttgtcctttctgtcctatgcctcctttgcaaagtgaaaggctctgttgttcctggtgctgggcattgctttccaggtgtacaaagcccgcattaagggagggctgcttatctcctgacctgtgatggagacggcagtgcgtccttggttgtgtctgggtctgtgcaccatgcctgaacatgattgtctgagga

SEQ ID NO: 89933 - DNA, 600 bp, Chicken  19866894397188_1
tgttgtctggaaaatttttgatgtattctttccacatattctaattagagaagatatattaatagttgacaactcaataatttttcaaggaacatggttcttgaattgatttgattaattcaattgaaaatacagaagcaattaaaaaaataataaatttactttctctaacagactcgtttctaccctcaagttaattttatgtgcaacaaacactcatgatttcaaaagaaataattttctgtacttcagtagaatgtaatcatctgaaaaaaaaaaaaaaagaggtatgtaaatgtyaaaaaaaacacaaaacaaaaccagtgtcagtattgcaagtaagtgtgcatgtcatctttctttatttcagcccgagaatccctaaaagcaccttagggtgattaatgtttttctccactgacctgtgttgagcttgctcaagatttctgattaagcaaagcatttttcagaatcaatagtttgctggtcagaaaatatttccttaagcatgataaggagttgcctgaaaatgctgaacactttcctgctctgcagcaaagggtcatgggagattttatcatgagattaattacttatgga

SEQ ID NO: 89934 - DNA, 600 bp, Chicken  19866894397189_1
aaaacccagatttcaccttgaacaaaactcttcaggctttttcttttacagccactctgcagtttgtaagtgcttgctgtatcagccactgaggtacattatcaggctaaatgttgtgcacagagggccagcaaatacagcagataccgcacagctcccacttcattcctctgttctgccccatctctgtctgcaggtacagcagagagcacaggagtgcatcaaagcgctcaacctcattcttaagatcagttcaggagaggaagtgatgaatgtgctgaactcagactttgactggarccacctgaaggtgagtgagggctcgtggcttccttctgttgaackcccagtaacacttctggtttccctctgccatttcagaactgcttcttgtaagctgttctgaacgcctcactgtagatctatgaacaygttctcaggtcatctatatagtaacggagctgaaactctgctcttccaacttcatttggatctgttgcctaaaaaaaacctcttcaggttgagaaacaaaggggtctcttacagcagctggctttcttttggcaggattctgttgatactagcagaatagctgtgatg

SEQ ID NO: 89935 - DNA, 600 bp, Chicken  19866894397189_2
ttacagccactctgcagtttgtaagtgcttgctgtatcagccactgaggtacattatcaggctaaatgttgtgcacagagggccagcaaatacagcagataccgcacagctcccacttcattcctctgttctgccccatctctgtctgcaggtacagcagagagcacaggagtgcatcaaagcgctcaacctcattcttaagatcagttcaggagaggaagtgatgaatgtgctgaactcagactttgactggarccacctgaaggtgagtgagggctcgtggcttccttctgttgaackcccagtaacacttctggtttccctctgccatttcagaactgcttcttgtaagctgttctgaacgcctcactgtagatctatgaacaygttctcaggtcatctatatagtaacggagctgaaactctgctcttccaacttcatttggatctgttgcctaaaaaaaacctcttcaggttgagaaacaaaggggtctcttacagcagctggctttcttttggcaggattctgttgatactagcagaatagctgtgatgggacactcttttggtggtgctacagttattgagagcctcagcaaa

SEQ ID NO: 89936 - DNA, 600 bp, Chicken  19866894397189_3
aaatacagcagataccgcacagctcccacttcattcctctgttctgccccatctctgtctgcaggtacagcagagagcacaggagtgcatcaaagcgctcaacctcattcttaagatcagttcaggagaggaagtgatgaatgtgctgaactcagactttgactggarccacctgaaggtgagtgagggctcgtggcttccttctgttgaackcccagtaacacttctggtttccctctgccatttcagaactgcttcttgtaagctgttctgaacgcctcactgtagatctatgaacaygttctcaggtcatctatatagtaacggagctgaaactctgctcttccaacttcatttggatctgttgcctaaaaaaaacctcttcaggttgagaaacaaaggggtctcttacagcagctggctttcttttggcaggattctgttgatactagcagaatagctgtgatgggacactcttttggtggtgctacagttattgagagcctcagcaaagaaattagatttaggtaagtatgtaaaacaaggaaagggatgtttggcacccgagcagggcaccttacctaaggttccactaattgg

SEQ ID NO: 89937 - DNA, 600 bp, Chicken  19866894397192_1
agtttgttttctacagattcgagttcatcctactatcactaaaccatccaaactatttttctgcaaaactgatagttccttcttgtggttgtgcaggtggtccttactgtcacacagatcagtgtgcttctccctgctggattgcaactaatgtttctccagattagatccccagatggaaaagattaatctatattctgtgctatagtccttgagttggtttacagtcttgcacagctttgtactatttgcatatttgttaagtatcctatatatctcatcagtcattattgaaaatastgagtggcgtgggctccaggaaagatccctggggaacgcagccaaatgcagtctcccaggttgatagtgaatgattgagaaacgttatctgactgtctttccttcctcttttttagggctatgggcagatgtcaaggccactgacttggccctggcctggttaaattaactgaacaggatgtggggaaactagtggagaggacatgagaaaatgctgaacgcgagagataacaaagtgagaagctgacaaaagtacagacagtgactagaaaggatggttggattttgcatgtgattaag

SEQ ID NO: 89938 - DNA, 600 bp, Chicken  19866894397196_1
gaggtataggtttcccctttcattttaaaatgagatctggaataaatgttgatttgtagtatgtatccaaaatagaaatctgctgctcactgaaagatggtggcattattcatcatttgtgtatgctgtaaacaaagagcattgcagaacaggcaggaagaattatctggtactgaagaattatctacttaaattaaattgagatcttaagcaggaaatatcaggcaaaggaaaagaaggagaaggggaacatgaggaggaaaaaatatttttacaggatcacgtgggaagttaattctsgtgctggatagtaatgaagacttacaatatatggaagaaraaaggcaaagcaaagcaaaggattatttatcagtagcctgtggtgcaggtatgactatttaagcctttggtttctgtaaatcacatctctggcacttctatctgtctattaatattacccacaaaactctgctggactaccaagctgagtcttgttgaaaacagtttgctttcttcttcaggaaagcccactgagtaagacttacagagtaacaacatcagtatttgaatcttgcagcgcacaaaagcaacatgagactt

SEQ ID NO: 89939 - DNA, 600 bp, Chicken  19866894397196_2
aataaatgttgatttgtagtatgtatccaaaatagaaatctgctgctcactgaaagatggtggcattattcatcatttgtgtatgctgtaaacaaagagcattgcagaacaggcaggaagaattatctggtactgaagaattatctacttaaattaaattgagatcttaagcaggaaatatcaggcaaaggaaaagaaggagaaggggaacatgaggaggaaaaaatatttttacaggatcacgtgggaagttaattctsgtgctggatagtaatgaagacttacaatatatggaagaaraaaggcaaagcaaagcaaaggattatttatcagtagcctgtggtgcaggtatgactatttaagcctttggtttctgtaaatcacatctctggcacttctatctgtctattaatattacccacaaaactctgctggactaccaagctgagtcttgttgaaaacagtttgctttcttcttcaggaaagcccactgagtaagacttacagagtaacaacatcagtatttgaatcttgcagcgcacaaaagcaacatgagacttcaccctgcttcatgcattagatttgtattggagcagaaaa

SEQ ID NO: 89940 - DNA, 600 bp, Chicken  19866894397198_1
atctaatctcactattcacttatgttctgatgtggaatttaaactttattctgtttctgattatcaaccactggaaggaagaatttcagaattgtgctttcaaaatgtatccgtggctccaaattagatcctgcgaagttgcaacttaaaacttattcttacaaatcaatccgtgagctctggttagtcctctttactttttccactgtgtgttttgtgattagataaaagactggactgacaaaaaaacaacaacaacaacaacaacaacaaaaaactgttttgagttgtgggtgtacrtacaactgggggaaaatgcacttatatgcatttgcctaaagtaagaaattaagttgctagttacaaatcacatttatgatcttcagataatttttttctcagcctttatctgtggctccagaagggtatggtcttccatgtgcctttgccagcatccagcagaagactgagatatatcaggtatcttaaaatgtcactaggtttatcctcttggatcagtcttggagcagccacagctcacttgtaaatagcagtttaagatgggagctagattaataaatgtcatcctgagttctctac

SEQ ID NO: 89941 - DNA, 600 bp, Chicken  19866894397200_1
cccccagtttcattgatgagcgtaatcttctatacatggaatagccttctggtcaattcccgtcagctgtatctccttcaaacctcttgctcaatgttgcttcaaacatatctccatgtcagatgccatttaatatttttgaccctatactacaatctgtcacatggcaacaaaatttaatggaatgtctgtgggaaggttcaacctctacctgccataacactaatatccacctgtgatgtggaccaacatagtaaaacagcatgtatttctttcagagcaacacttgagttacatatrtatgtgtatatatatatatatatattctttcttattttcatcagcctctctaattcttcccaaaggggagttacattaacaggataaagtctgaccttaaaaagttctatttcaattatgtaagttttgagctttgagttattcagatattgtaagcaacagttcttgaagcttacctagcctgaactgaatgcttgtcactaacaaataaaaagtgagtttgttatcagttaaaatctttcattttggaacttgctttcatacaaatacaggagagactccttattgagcttttagtta

SEQ ID NO: 89942 - DNA, 600 bp, Chicken  19866894397208_1
tctctctctctctcccctctgaagcacactgttattcatgaaatgcttggaagtacgagttttctttaaagtttattttaagcaccatggcaagcaggcaaaaaatcaaggtcacacatgactaagtttgcctgttgaaggtaaggaatgtgtattttcagaaatggggtatagcacgctgcaaagatcaaagacaggctgtaaaaaacaggtttctgaacctgaaaaagtgatcttgcaagggacagatgtgaaggaaagtaattattggaggcttgaacaagtaaaaagctaatcccrggaactataaaggatgtttacattagttttgttctctcaatatatcagcatttaagctcactamatagtatgtgcagcaatgacaagacagctcattactaagcgccttgttgaaaaagcatactatttaatagcaaaaatattctcatytatcaatttgtttattatacaagcgtaaatcttcctctcctttctcatcctacacatcagttacataggaacaaagaaacattttcagaaaagcacagcccttccatccctattctgcaagagggcactcggtactyaactgattcctac

SEQ ID NO: 89943 - DNA, 600 bp, Chicken  19866894397208_2
tttaaagtttattttaagcaccatggcaagcaggcaaaaaatcaaggtcacacatgactaagtttgcctgttgaaggtaaggaatgtgtattttcagaaatggggtatagcacgctgcaaagatcaaagacaggctgtaaaaaacaggtttctgaacctgaaaaagtgatcttgcaagggacagatgtgaaggaaagtaattattggaggcttgaacaagtaaaaagctaatcccrggaactataaaggatgtttacattagttttgttctctcaatatatcagcatttaagctcactamatagtatgtgcagcaatgacaagacagctcattactaagcgccttgttgaaaaagcatactatttaatagcaaaaatattctcatytatcaatttgtttattatacaagcgtaaatcttcctctcctttctcatcctacacatcagttacataggaacaaagaaacattttcagaaaagcacagcccttccatccctattctgcaagagggcactcggtactyaactgattcctacagccattacagatatttccaagacactaccacattggtatccaagcacccagacttgttaattt

SEQ ID NO: 89944 - DNA, 600 bp, Chicken  19866894397208_3
tgtattttcagaaatggggtatagcacgctgcaaagatcaaagacaggctgtaaaaaacaggtttctgaacctgaaaaagtgatcttgcaagggacagatgtgaaggaaagtaattattggaggcttgaacaagtaaaaagctaatcccrggaactataaaggatgtttacattagttttgttctctcaatatatcagcatttaagctcactamatagtatgtgcagcaatgacaagacagctcattactaagcgccttgttgaaaaagcatactatttaatagcaaaaatattctcatytatcaatttgtttattatacaagcgtaaatcttcctctcctttctcatcctacacatcagttacataggaacaaagaaacattttcagaaaagcacagcccttccatccctattctgcaagagggcactcggtactyaactgattcctacagccattacagatatttccaagacactaccacattggtatccaagcacccagacttgttaatttaactgcacacagaagaaagctacttaccaacactccttctccaaaacatgtatttggaaagaaaccattttattgaatggcttata

SEQ ID NO: 89945 - DNA, 600 bp, Chicken  19866894397208_4
aaagctaatcccrggaactataaaggatgtttacattagttttgttctctcaatatatcagcatttaagctcactamatagtatgtgcagcaatgacaagacagctcattactaagcgccttgttgaaaaagcatactatttaatagcaaaaatattctcatytatcaatttgtttattatacaagcgtaaatcttcctctcctttctcatcctacacatcagttacataggaacaaagaaacattttcagaaaagcacagcccttccatccctattctgcaagagggcactcggtactyaactgattcctacagccattacagatatttccaagacactaccacattggtatccaagcacccagacttgttaatttaactgcacacagaagaaagctacttaccaacactccttctccaaaacatgtatttggaaagaaaccattttattgaatggcttatagcaatatgcacatatatatatggttatcctacctcattatcaacagtgggagtgacagtcactctccatgcaaaatgcaagacattaactcattttgctattcaaccagtaagtaattaacatttcgtatgtataat

SEQ ID NO: 89946 - DNA, 600 bp, Chicken  19866894397226_1
cttgaagatgacaatgcccccaaatcaacaggaataaaaccgagctgacgagcaagctcagtaacttgatggcgagcctgaacattgttactgcatatatagacctgttggaaaagtcaggtgaattgtagacacagaaagactggcaggttaaaaaccaaactaactcaacaaaacagaaataaaaagctgaaacccaaaacaaacccaaaagacctcaactattaaacagcaacagccccctcatcccctgccccagctgaagaacctccagggcaaaactgcaacactactgctaaytgtacatcactttgacagatttatcgccattataagaaatatttaataaaaacaacactatacacaaatccagcaaaggtaaaaatacacaggcttatttagccacagagcaaccaaaataaaattggcattttcttgaagttgacagtgagctgactgtggcatatacaggtaatccacacactgaaacgtctcatactccccatactgaaatgcctataggaatggactgaacctgaaacaacagctaaaatcatttccaaacatgtctctcaaatgtacaattatcttaaatgatga

SEQ ID NO: 89947 - DNA, 600 bp, Chicken  19866894397229_1
ctttacagtggcagtcagtagtttgggaaatgctcagcttgataggacagcatgcacacacataagaacaaagaggagattctacctggatcttccctaaagaatgtactgggctgagatattgtctgctcagaaggagctcatgtctgatctgcaggatttattcatggactaaaattatattccacgcagttggatacaagaaaaaattggttcttttagaataaattagttaaatatattgcattaagatattgtttctagaaatatgttatatttatctaagtatatatacacacwtatctaatacaacacaagcaatagtattttctgaatgtctttaacttgtttaaattatcactcttctgatgttcactctaatttcctttgatgcattactttagctaaagctgagttataccattttccatgtaagcttgtcacagcaaataaaaaaaagagttgagcaagttaaatgttctctccaaaccaattttgagtcaccacatagcatacacaggtatttaacattattttaragcaagtattcacactattgacataataaacagaataactgtgwaacaggtgtcctagtta

SEQ ID NO: 89948 - DNA, 600 bp, Chicken  19866894397229_2
tattgcattaagatattgtttctagaaatatgttatatttatctaagtatatatacacacwtatctaatacaacacaagcaatagtattttctgaatgtctttaacttgtttaaattatcactcttctgatgttcactctaatttcctttgatgcattactttagctaaagctgagttataccattttccatgtaagcttgtcacagcaaataaaaaaaagagttgagcaagttaaatgttctctccaaaccaattttgagtcaccacatagcatacacaggtatttaacattattttaragcaagtattcacactattgacataataaacagaataactgtgwaacaggtgtcctagttatttctatacagtgttgctgggtgcctgcctcaccaagagactttattatacaattcggattactcaagagaagagaaaaagataatcaaggaagatgcagaatgcaagcaaaacaaatggtgcatctgttttttgtgagcttagtgaaaggactcatgtaaattcagatcttgatagtgcagcctctccattaggagaagaggcagatcttttcagacttgagcactacagaaaacaag

SEQ ID NO: 89949 - DNA, 600 bp, Chicken  19866894397229_3
aagtatatatacacacwtatctaatacaacacaagcaatagtattttctgaatgtctttaacttgtttaaattatcactcttctgatgttcactctaatttcctttgatgcattactttagctaaagctgagttataccattttccatgtaagcttgtcacagcaaataaaaaaaagagttgagcaagttaaatgttctctccaaaccaattttgagtcaccacatagcatacacaggtatttaacattattttaragcaagtattcacactattgacataataaacagaataactgtgwaacaggtgtcctagttatttctatacagtgttgctgggtgcctgcctcaccaagagactttattatacaattcggattactcaagagaagagaaaaagataatcaaggaagatgcagaatgcaagcaaaacaaatggtgcatctgttttttgtgagcttagtgaaaggactcatgtaaattcagatcttgatagtgcagcctctccattaggagaagaggcagatcttttcagacttgagcactacagaaaacaagaggagaacagtagtgatggatgtaaggctactagcttgaagagw

SEQ ID NO: 89950 - DNA, 586 bp, Chicken  19866894397229_4
aacaggtgtcctagttatttctatacagtgttgctgggtgcctgcctcaccaagagactttattatacaattcggattactcaagagaagagaaaaagataatcaaggaagatgcagaatgcaagcaaaacaaatggtgcatctgttttttgtgagcttagtgaaaggactcatgtaaattcagatcttgatagtgcagcctctccattaggagaagaggcagatcttttcagacttgagcactacagaaaacaagaggagaacagtagtgatggatgtaaggctactagcttgaagagwagagcaatggaaatatgtgcatgtgcctgtgaaaaagtgaatctccagatgaatttgctgtgtctgctctttaagtgtgtgtgtatatatgtatatatatagaaagagagagagattcatcactttacatcaaaaataggatgaaatcagctggatttatccagttatttactgttaaaataggcacaagaaagcagtgcttgttattagccaggttgttctgccctaaaagaaaaggcaagcagaaatatgcaaccattttctcctacgcataggtatgggaaaa

SEQ ID NO: 89951 - DNA, 599 bp, Chicken  19866894397233_1
  misc_feature (1)..(97): n is any nucleotide
nnnnnnnnnnnnnnnnnnnnnnnnnnnnnnnnnnnnnnnnnnnnnnnnnnnnnnnnnnnnnnnnnnnnnnnnnnnnnnnnnnnnnnnnnnnnnnnnngctgcagcacctcccctacaaagacaggctgagggagctgcgcttgttgagcctggagaagggaaggctgcggggtgacctcagtgcagcctttcagtacctattaaacaggaggggaggcaactctttgagagggtggataacagcaggacatggggaaatggtttgaagttgaaggagggaagactgaggttggatgtcakggggaagtgctttactgtgagagtggkgaggtgctgaacagctgcccagagaggctgtggatgccccgtccatccctggaggtgttcaaggccgggttggatggggccctgggcagcctgggctggtatgaaatggggaggttggtggccctgcatgcagcgggagggggcatttggggcttcacgatccctgaggtccctcccaggccgggccgttctgtgtttctgtgaccccaggcgccctggtaggttcccaatgggatttcacgtccccggtgggcactgtggggcaggggagg

SEQ ID NO: 89952 - DNA, 599 bp, Chicken  19866894397233_2
  misc_feature (1)..(70): n is any nucleotide
nnnnnnnnnnnnnnnnnnnnnnnnnnnnnnnnnnnnnnnnnnnnnnnnnnnnnnnnnnnnnnnnnnnnnngctgcagcacctcccctacaaagacaggctgagggagctgcgcttgttgagcctggagaagggaaggctgcggggtgacctcagtgcagcctttcagtacctattaaacaggaggggaggcaactctttgagagggtggataacagcaggacatggggaaatggtttgaagttgaaggagggaagactgaggttggatgtcakggggaagtgctttactgtgagagtggkgaggtgctgaacagctgcccagagaggctgtggatgccccgtccatccctggaggtgttcaaggccgggttggatggggccctgggcagcctgggctggtatgaaatggggaggttggtggccctgcatgcagcgggagggggcatttggggcttcacgatccctgaggtccctcccaggccgggccgttctgtgtttctgtgaccccaggcgccctggtaggttcccaatgggatttcacgtccccggtgggcactgtggggcaggggaggcctgcagtgccggcggggcggagctgt

SEQ ID NO: 89953 - DNA, 599 bp, Chicken  19866894397239_1
  misc_feature (1)..(244): n is any nucleotide
nnnnnnnnnnnnnnnnnnnnnnnnnnnnnnnnnnnnnnnnnnnnnnnnnnnnnnnnnnnnnnnnnnnnnnnnnnnnnnnnnnnnnnnnnnnnnnnnnnnnnnnnnnnnnnnnnnnnnnnnnnnnnnnnnnnnnnnnnnnnnnnnnnnnnnnnnnnnnnnnnnnnnnnnnnnnnnnnnnnnnnnnnnnnnnnnnnnnnnnnnnnnnnnnnnnnnnnnnnnnnnnnnnnnnnnnnnnnnnnnnnnncattatataaaagtctgacatcataaaagcatgggaaagtggttggagtggtgagrtattggggaaggatgcataaggaggtggtggagtcgccatccttggaggtttccaagcaaagggtgggtgttgtgctgagtgacatggcctagagtggtcaaaggcacgggttgatggctgggcttgatgatcttattggtccttccaactgtaatggttctgtgattctatgtatgtacatggagaaataaaactgaactcagaatgtcaggaaaaaggaggctgtccatcagccataattaatctgggcattaggggattttgcagagaggaaaaacatataattaaatgtgtaggg

SEQ ID NO: 89954 - DNA, 600 bp, Chicken  19866894397239_2
caggaaaaaggaggctgtccatcagccataattaatctgggcattaggggattttgcagagaggaaaaacatataattaaatgtgtagggaacagtcaaggagggtccatagcagcccccacccctcatctggttatgaaaatgcaaggcaacagtcagaaaatgtgcatgcaagaaagtgcaattgcagtggagtttctttcttggggacagaatagttgcataactcaaactgtgggaatacttgttctttttgccttgaacagacttaaactgaaatggagagggctgagtaagttrttattactcagaggggcagtggtgccccatccctgcagacagccaaaggtcaggggatgggctctgagcactgatggagctgtgggggtcttggctcattgctgggggtgggaccagatggcccttaagggcccccttccaactccagccattctatggttctgttaggctcatgtgtgtgacatcctgcaggatgaggtatctctggtgttgtgcccccatttgaatggggctattcagtcaatgtacctgattatttgggacatctcttcagcactactttcacttcagaagtgaaat

SEQ ID NO: 89955 - DNA, 600 bp, Chicken  19866894397241_1
gtagccaggtctcagtcaggctagtaacatgttgtaagggttccaactggagaaccttacactctatatagtaatgaaaaatttcgactatttgaaaggtgtcacgccagcaccatcctacataacccagatacagagttgccagagcaatcaagtcacatattagaggcttcaaagccgtatgtcacctaagcgccataagttagcaatcctattaagtctgtcttcaaatcaagggaatgtctttctcggaggaaggaaacccctaacacaactgataatgaaaaactggaggagcascaagatggctaaggactggagaacacggaaaataaggttaaactagggagctgaatttgtgtagcatgaaaattagactgctaaaagagaactaattctctcttcartaggcaaattggcatttataaagacaaaatccacagtcttcagagattcacagcacactgacaacagatagagcctgcaacagtggaaatcccagatagacacagagaatcattatttgcaacgagggtggtcaaacactgaaacagtttgtctggagaggctgcggaaccttcactctcgcagattttcaga

SEQ ID NO: 89956 - DNA, 600 bp, Chicken  19866894397241_2
cagcaccatcctacataacccagatacagagttgccagagcaatcaagtcacatattagaggcttcaaagccgtatgtcacctaagcgccataagttagcaatcctattaagtctgtcttcaaatcaagggaatgtctttctcggaggaaggaaacccctaacacaactgataatgaaaaactggaggagcascaagatggctaaggactggagaacacggaaaataaggttaaactagggagctgaatttgtgtagcatgaaaattagactgctaaaagagaactaattctctcttcartaggcaaattggcatttataaagacaaaatccacagtcttcagagattcacagcacactgacaacagatagagcctgcaacagtggaaatcccagatagacacagagaatcattatttgcaacgagggtggtcaaacactgaaacagtttgtctggagaggctgcggaaccttcactctcgcagattttcagaccttatattgacaaaccctgaagtaatctcatctaattttaagattaccatcctttgaagatgccagattagagattcactccaacctaaattattctagaattgct

SEQ ID NO: 89957 - DNA, 599 bp, Chicken  19866894397245_1
  misc_feature (1)..(136): n is any nucleotide
nnnnnnnnnnnnnnnnnnnnnnnnnnnnnnnnnnnnnnnnnnnnnnnnnnnnnnnnnnnnnnnnnnnnnnnnnnnnnnnnnnnnnnnnnnnnnnnnnnnnnnnnnnnnnnnnnnnnnnnnnnnnnnnnnnnnnnnncgggtgtggagtcctcactacaggagagatgtggacctgtcggagtgcaacacgaggagggccacaaaaatgaccgaaggaatgaaacacctctcctacagggacaggctgggagagctggggctgtgccgcctggagaagagaaggctccggggagagctgaragaaacctgtcagtatctacagggggctgtaagaaagaagggaacagactgtagcagagtctgctgtgacaggacgaggggagatggtttcaaacttaaagaggggagatttagactggatatmgggaaaaagttttttacagtgagggtggtgaggcactgacacagggtgcccagagaggtgttcagtgccctgtccatggagacactcaaggtcaggctggatggggctctgagcacctgatggaactgtaggtatccctgttcactgcaggggcrttggacctgatggtctttgg

SEQ ID NO: 89958 - DNA, 599 bp, Chicken  19866894397245_2
  misc_feature (1)..(12): n is any nucleotide
nnnnnnnnnnnncgggtgtggagtcctcactacaggagagatgtggacctgtcggagtgcaacacgaggagggccacaaaaatgaccgaaggaatgaaacacctctcctacagggacaggctgggagagctggggctgtgccgcctggagaagagaaggctccggggagagctgaragaaacctgtcagtatctacagggggctgtaagaaagaagggaacagactgtagcagagtctgctgtgacaggacgaggggagatggtttcaaacttaaagaggggagatttagactggatatmgggaaaaagttttttacagtgagggtggtgaggcactgacacagggtgcccagagaggtgttcagtgccctgtccatggagacactcaaggtcaggctggatggggctctgagcacctgatggaactgtaggtatccctgttcactgcaggggcrttggacctgatggtctttgggggtcccttccaacttgaatgattctacggttctatgcttgtactatttatttcttcttgtgtttcacttaggcaataaaataattcagcatgtttcaatttgtctccaggctttcttattttc

SEQ ID NO: 89959 - DNA, 600 bp, Chicken  19866894397245_3
aaggctccggggagagctgaragaaacctgtcagtatctacagggggctgtaagaaagaagggaacagactgtagcagagtctgctgtgacaggacgaggggagatggtttcaaacttaaagaggggagatttagactggatatmgggaaaaagttttttacagtgagggtggtgaggcactgacacagggtgcccagagaggtgttcagtgccctgtccatggagacactcaaggtcaggctggatggggctctgagcacctgatggaactgtaggtatccctgttcactgcaggggcrttggacctgatggtctttgggggtcccttccaacttgaatgattctacggttctatgcttgtactatttatttcttcttgtgtttcacttaggcaataaaataattcagcatgtttcaatttgtctccaggctttcttattttctttctcattattattattattactcctatcttgctacatttacaactccatgcttctggggaatgcttttatccaaacaaatttcattgaaagcgtttttcttagtaggatccctttaataagtgtttggtgcactgctaaatgtgagacctcagc

SEQ ID NO: 89960 - DNA, 600 bp, Chicken  19866894397264_1
ttcctagttttgaggcttaaattcatgcatctacctgatactctctgtgtcttacaatctgcccccaaaatcctgtgaggtattgggactccatcagcacaggagaggatacatacaggactctgatgaacctgttaggcactgtagggttggttggaacatattccaggtcagaatcacgttcagaactagttgcaatacagtagacagcaaatgtcgacctcagaggaaaatgagcttcacttcagcttacatccctggggaacaggaggtagcgaaggatttgttaaggaggaaatytctctccctccctcttctgctctcagctccagggagcattcaggaatgtgtttgtgaccctgggccaaacagagggcttcgggagggggtctgatggattaagagcattaatacggccataccacrcttatttgctctcaggcatggaaagcaactcctgcaccgctgggtaagacagaacttgtgtgtctacccccaagtttcatacctgaaaattcatttgctagagctattcagccattgaatgtctgaatggtggccaggaagaaaagactccacgtccatgtttcagtgctcagt

SEQ ID NO: 89961 - DNA, 600 bp, Chicken  19866894397264_2
tgaacctgttaggcactgtagggttggttggaacatattccaggtcagaatcacgttcagaactagttgcaatacagtagacagcaaatgtcgacctcagaggaaaatgagcttcacttcagcttacatccctggggaacaggaggtagcgaaggatttgttaaggaggaaatytctctccctccctcttctgctctcagctccagggagcattcaggaatgtgtttgtgaccctgggccaaacagagggcttcgggagggggtctgatggattaagagcattaatacggccataccacrcttatttgctctcaggcatggaaagcaactcctgcaccgctgggtaagacagaacttgtgtgtctacccccaagtttcatacctgaaaattcatttgctagagctattcagccattgaatgtctgaatggtggccaggaagaaaagactccacgtccatgtttcagtgctcagtcattgtgtgaagggcctgacccccacagcctgagtaaaatgcagtgttgttctacacgtgcttttggctatgcttagtatttccttctgggatatacattctgctgattgctgccagaacagaaat

SEQ ID NO: 89962 - DNA, 599 bp, Chicken  19866894397267_1
  misc_feature (1)..(15): n is any nucleotide
nnnnnnnnnnnnnnnctaattctagacattattcattgtgctcaagagatccagagtcagaaatgattgatgatggcactggcgtgggttcttatatacacactcttgctctaccttttccacacattatcatagtggaagagatatggctggaagttgtgtaggagtctatcagaacaagtgggatgcagttacagccttcagccctctggagattcttggcagaggtggagcccatttgaagccctgggcttgtttccatgaatcacagcaaccaaagattgcttcagtttgaccackatacagctgaatctcagctgctgccctgaaactgttgcgggaaaaagtgaagttctttgaatcctgtgtgtgcctggacacatcaccgggcctggggcgttaggattgcttttgtggaatctgtgaccttccaccacgggccagagctctgctctgatggtaactgatttatccctacgtttttgtatagcttaatcccaagaatggagagccccaggagagttgtacataaaccataaagtctgggactcaggaaacgcatattttgtcgtctggatgtaagttttcagttgttagta

SEQ ID NO: 89963 - DNA, 600 bp, Chicken  19866894397273_1
agcagtgaagtttgatccagttgcttcttcagggttaacacctctcacacagacagacatgactgcacagtgtatcaaggatagactcagaagtacctttccatcagccatcttcagccctggctccatcagaagggaaaagtcatccagctcagttttcagatgtacactgctgaattccaactacagatgcatgtcaaatttgcaccaaaataaactcctcttgagatataaattactaatctagatgcatccacagaaccctgctaccacacacattctcagagccacataaaacayggcattttgtgtcaattaacttttttcatattgataaccactagcaaagccttgtactttggctattaaaggcgttagttttttcttttttttatttttgtactggacaacacctcatcacggacaacacctgggactgatcacataacatgctagctgaagaagaatgcagacagccagatctcttttctgctatatagcattacattgtaaaattggagtaactccaatgacatcagtggagtagctctggtaatacataatttaaactaagattaaaggtgattaccagtaataata

SEQ ID NO: 89964 - DNA, 600 bp, Chicken  19866894397284_1
cagtaattccttttgacactattataagggctgaaatagctcccaagagaaaacagggaaccttagaccaagttttttagagctcactgcaaaacatttaagaaatcctatcaaaccactcatgttcgcggtaacatcactcttacagcatcaccacattcacaaagctaatggataaagtcctcactgggcagctttgcaaagtttctggccacactgcagcagtgagctgagcagcaggcaggacacacacagccagtcactatttgccctcactcccatcaaagcaggtgtcccacycatctcagtagcacccactcccagcaccacagcacacacatcctccagagccataagggctcgctgcactttactcttcctatccttaatattcsttcatagggaatagttgtggacttcggtttcccgctagctgtaattaatctgaagataaaagagatccgaaaaagcaatttcaggcaggtcagcagaaaacgtgatcaaactgatgcaagaggcgaagtaaatgaggtagacatggcaagatttcaaaaagattagagaggggaggaatgagaacacagctggtgcacagctgct

SEQ ID NO: 89965 - DNA, 600 bp, Chicken  19866894397284_2
atttaagaaatcctatcaaaccactcatgttcgcggtaacatcactcttacagcatcaccacattcacaaagctaatggataaagtcctcactgggcagctttgcaaagtttctggccacactgcagcagtgagctgagcagcaggcaggacacacacagccagtcactatttgccctcactcccatcaaagcaggtgtcccacycatctcagtagcacccactcccagcaccacagcacacacatcctccagagccataagggctcgctgcactttactcttcctatccttaatattcsttcatagggaatagttgtggacttcggtttcccgctagctgtaattaatctgaagataaaagagatccgaaaaagcaatttcaggcaggtcagcagaaaacgtgatcaaactgatgcaagaggcgaagtaaatgaggtagacatggcaagatttcaaaaagattagagaggggaggaatgagaacacagctggtgcacagctgctgcacaactcctgcaacttgcaactctgcagccagctgcaggatgccaacgctgacagcaggaaggcacacgtacagcctcacctgccacactgca

SEQ ID NO: 89966 - DNA, 600 bp, Chicken  19866894397300_1
actttaatttgaagtcttagcaacatgacagatgatcactgaagggaatgatactttgaaagacttaggagagagactcttgacttgttttgtgtcttgttttttattttgtttgtgaatttgggaggggttgggttctgttttatttgtaaaacatccaccagctttccacagtaaagagcattttatatagcattttatatgaatttagctacaggaaaggctttagaataataagaatgagaagtcacatcacagatagctgaaagttatgtgaaaattttcccacattatctgcgsaaaaaaaaaaaaagtatcagcattgtatatcaacaccaactgtcttgggaatttgagcaatttaagtggtagcattctttagtgggcactacaatcattatgccagtactattttgtgctcttgcagacatttattttcaaggcagagagaagctaccttacttttccctgtgcagactctctgatttaaaagacaacagaatcatcttaaattcctttacaggacatctaaacaacataagaaacaaaatatgcctctgagctgacagcataaccataacttacctgtccttgatccca

SEQ ID NO: 89967 - DNA, 600 bp, Chicken  19866894397302_1
cttcttcttctttaaactgacagtttttatctcctttattatttttttctttttactgatttacacatctcacaccactcctctccttacctacagcttctgttctctgtatgcttcgtgtccttcagctagtttttgcaagcatttatcataattatgtgtgttttcctactcagtatgttttctaacaacgtgttgacaataaaacagggcctggattacactgtacagctcagaacttgtcagctgaaggcgctggcattgctcactatgcatctcaagaatttggcacagccagtsctctcagtctgaggaaagtttagcagaagatatttgattaaggaaaccgagtacaacatagtcacacaggaggacaagcggttacactgaattgcagattttaccttccatcatatataaataaatatggctgcatattatgttttagaggcaataaaaatgaaaaattgaggtactaacacttgcttcctgccattgtcatccaccctctggtaaagcaccraacaactcaatgaaatacttaattatgcaaatagagaactccagaggtcaaaagagctagtctaagtagagggaaaa

SEQ ID NO: 89968 - DNA, 600 bp, Chicken  19866894397302_2
ctgtacagctcagaacttgtcagctgaaggcgctggcattgctcactatgcatctcaagaatttggcacagccagtsctctcagtctgaggaaagtttagcagaagatatttgattaaggaaaccgagtacaacatagtcacacaggaggacaagcggttacactgaattgcagattttaccttccatcatatataaataaatatggctgcatattatgttttagaggcaataaaaatgaaaaattgaggtactaacacttgcttcctgccattgtcatccaccctctggtaaagcaccraacaactcaatgaaatacttaattatgcaaatagagaactccagaggtcaaaagagctagtctaagtagagggaaaaatcacttcacaattwatttgggttacaaaacccagactctcaaaaaattgcacttggtcagagggcaccttttttttctttttttccccttcacctaatgtacctttttagacattctacagagcttgagagagattatgcctgcagtgggcagtgaagtctgttcaagactacttttcattcattctgttctctgaaaaatatttcaaatatgactgattat

SEQ ID NO: 89969 - DNA, 600 bp, Chicken  19866894397302_3
aagtttagcagaagatatttgattaaggaaaccgagtacaacatagtcacacaggaggacaagcggttacactgaattgcagattttaccttccatcatatataaataaatatggctgcatattatgttttagaggcaataaaaatgaaaaattgaggtactaacacttgcttcctgccattgtcatccaccctctggtaaagcaccraacaactcaatgaaatacttaattatgcaaatagagaactccagaggtcaaaagagctagtctaagtagagggaaaaatcacttcacaattwatttgggttacaaaacccagactctcaaaaaattgcacttggtcagagggcaccttttttttctttttttccccttcacctaatgtacctttttagacattctacagagcttgagagagattatgcctgcagtgggcagtgaagtctgttcaagactacttttcattcattctgttctctgaaaaatatttcaaatatgactgattatccagccagaagtccaaactaagttttgctaaagagacatgctattaaaattacataatgacaggaaaagaaaaacgtggctcatcaattctt

SEQ ID NO: 89970 - DNA, 600 bp, Chicken  19866894397302_4
ggttacactgaattgcagattttaccttccatcatatataaataaatatggctgcatattatgttttagaggcaataaaaatgaaaaattgaggtactaacacttgcttcctgccattgtcatccaccctctggtaaagcaccraacaactcaatgaaatacttaattatgcaaatagagaactccagaggtcaaaagagctagtctaagtagagggaaaaatcacttcacaattwatttgggttacaaaacccagactctcaaaaaattgcacttggtcagagggcaccttttttttcwttttttccccttcacctaatgtacctttttagacattctacagagcttgagagagattatgcctgcagtgggcagtgaagtctgttcaagactacttttcattcattctgttctctgaaaaatatttcaaatatgactgattatccagccagaagtccaaactaagttttgctaaagagacatgctattaaaattacataatgacaggaaaagaaaaacgtggctcatcaattctttatgacagaaagtatatgttttaatagggctcaatcaatatttgctgcttttggtggcacttaa

SEQ ID NO: 89971 - DNA, 600 bp, Chicken  19866894397306_1
cattacagcctgttcctcattactgtctctgcttagtacgtaaggaaaaatttaacatttgcaaaacaacttcaaatggtcagtgccttatggaagagatccagctgcattggaatgacttccattgacttcagcaggacttggatcatggccttcagccagtaattaatttaagttcagcaatccttcacggattgaaaagaagttcttgaggcatgttaaagtcccagcagctgccaatgtgttaagaaagttttctgggtgactctgtataagtacggaacctgaatgtatgatccyttcctggacaaaatccccagatttagtcacgtaggggtgaaaactagacaaagaaaaaaaggtaagtattgaaatagacartggaaaaagtaatattgctaactttaattttgttttgcttttttgcctaacacgtggtttctgaatttggtggaaaaaaatagaagtgtagaaattgttagcacccactgaagtatgattatctttactgtgtggttttagaaacaggaatgacgggagcaaaagttccatcactgaagaaagaaatgagagagaaacagtcatagttcatatctcctg

SEQ ID NO: 89972 - DNA, 600 bp, Chicken  19866894397306_2
agtgccttatggaagagatccagctgcattggaatgacttccattgacttcagcaggacttggatcatggccttcagccagtaattaatttaagttcagcaatccttcacggattgaaaagaagttcttgaggcatgttaaagtcccagcagctgccaatgtgttaagaaagttttctgggtgactctgtataagtacggaacctgaatgtatgatccyttcctggacaaaatccccagatttagtcacgtaggggtgaaaactagacaaagaaaaaaaggtaagtattgaaatagacartggaaaaagtaatattgctaactttaattttgttttgcttttttgcctaacacgtggtttctgaatttggtggaaaaaaatagaagtgtagaaattgttagcacccactgaagtatgattatctttactgtgtggttttagaaacaggaatgacgggagcaaaagttccatcactgaagaaagaaatgagagagaaacagtcatagttcatatctcctggggatcttacatacgcttttttcttcctctgcagaccatgcctttctccagttaatcctcttttctttttacttctttcta

SEQ ID NO: 89973 - DNA, 600 bp, Chicken  19866894397313_1
gaacacctggtctttcttgtcctttaccatgcccacagttctcttcagctgatctgatctctttcatcattcattacttctttacaagagttctcaggtcctttttccagcagcatttcagtacctaaaggagggctgtaagaaggaaggggacagactctgtagcaggggctgttgtgataggacaatggggaatggctgcaaactaaaagaggggagattttgattggatgtaagaaaaaaagtttttacaatgagggtgggaactggcacaagttgcccatggaggcagtaggtgcyttgtccttggagatactgaaggtgaggctggacaggctctgagcacctgatctagtgtaggtgtccctgttcgttacggggaagttggaccagatggctcttaagggtcccttccaactcaaacgattccatgatcctattcatccttagggtttgtcctctgctacaatagcccttcgtggctttgaactcccatgagctgctgctcattcccttgggagttcattacagcctgacagctctcactaacattttccagaactccctgctgattaacaaagctgcaaacactcaaagaaa

SEQ ID NO: 89974 - DNA, 600 bp, Chicken  19866894397315_1
gtggccaaaaattggaacataggaagttccacacaaatgtgtggaagaacttctttacagtgagggtgacagaaaactggaacagactgcccagaaagtttgtgaagtccccttctttggagatattcaagactcgtctgcatgcctacctttgaaacctactgcagggaacccaatttagcaggggaaattggactctatggtctctacaggttctttccaacccttgcaattctgtaattctgtaatacatttttttcaggtcactaatatttttctctgctttcccttacttatatmcaaatctttaaatttattttagaataaacttcccagagtgtttatgactagtagctattgaaaagaacattaaacacaatacattatcttatacataattgaatttgcttacttacagcaagcaactaggctgaaaatgcaacagcataattaaatagatggtctttctttttccccaagactgtttttaacatgatgcttttctttgctcctatgttttcttgggaaaaattagtaggacatgtacatttacccttatgaaaacaattctgcaracttcatgaagttattaggaattta

SEQ ID NO: 89975 - DNA, 600 bp, Chicken  19866894397315_2
ttctctgctttcccttacttatatmcaaatctttaaatttattttagaataaacttcccagagtgtttatgactagtagctattgaaaagaacattaaacacaatacattatcttatacataattgaatttgcttacttacagcaagcaactaggctgaaaatgcaacagcataattaaatagatggtctttctttttccccaagactgtttttaacatgatgcttttctttgctcctatgttttcttgggaaaaattagtaggacatgtacatttacccttatgaaaacaattctgcaracttcatgaagttattaggaatttatttttctttaaatatygtatgtttgtggcttaacattcttattctttttgtgctttcccaggacctaacacatagcaatcgtgttgttatttggttctggtttatcaaaaatatgcagcaccaaaaattctgtgtaacttagcactaaaaatatgtttattgtaaggagctgtactctgtaatacaagactcccaagaagcctacaatgtatttgctagagatctggctggtaagtaccatatctcacatcctggcattatcttcttgttctcca

SEQ ID NO: 89976 - DNA, 600 bp, Chicken  19866894397315_3
ttttagaataaacttcccagagtgtttatgactagtagctattgaaaagaacattaaacacaatacattatcttatacataattgaatttgcttacttacagcaagcaactaggctgaaaatgcaacagcataattaaatagatggtctttctttttccccaagactgtttttaacatgatgcttttctttgctcctatgttttcttgggaaaaattagtaggacatgtacatttacccttatgaaaacaattctgcaracttcatgaagttattaggaatttatttttctttaaatatygtatgtttgtggcttaacattcttattctttttgtgctttcccaggacctaacacatagcaatcgtgttgttatttggttctggtttatcaaaaatatgcagcaccaaaaattctgtgtaacttagcactaaaaatatgtttattgtaaggagctgtactctgtaatacaagactcccaagaagcctacaatgtatttgctagagatctggctggtaagtaccatatctcacatcctggcattatcttcttgttctccattgagaacaatagattctgaaggagtcaaaaataaggttaa

SEQ ID NO: 89977 - DNA, 600 bp, Chicken  19866894397319_1
tgccgctgtttttaattattttgggttcccctgtttcccttcctggaggcgcagattttgcgaaatccctccgccccactagtcgcggaaccgggccggaccagcccttaaaccgttgacagatccacatgatgcctttctagaaattctttcccatttagctttacttgaacaagtgagggggaaaaaaaagttgcttttgacttttgagtatagcaagtgtttgaagtgctccaatacttatttctgaggtatgtgttcagtttcctcatcagcctgggaggatctacatcctgagawmtgtttaaagccaatggcakaaatgaatacttgcattggaaacttttttttttttttgaaagtgtttttctgctctgctgtgtagggcgctcaaaggaatggacatttacaaataccagttcccagtttaaagcctggttatgtagttcagcaaattctactttttcttttctttttcttttttttccatacaaaacgcgtgggtagtcaatgaagcctagatacatttcatggctcttctcagaacagcagcaagctggtgatcagccctctcagttaatgggaaaagagaatattggt

SEQ ID NO: 89978 - DNA, 600 bp, Chicken  19866894397319_2
gccgctgtttttaattattttgggttcccctgtttcccttcctggaggcgcagattttgcgaaatccctccgccccactagtcgcggaaccgggccggaccagcccttaaaccgttgacagatccacatgatgcctttctagaaattctttcccatttagctttacttgaacaagtgagggggaaaaaaaagttgcttttgacttttgagtatagcaagtgtttgaagtgctccaatacttatttctgaggtatgtgttcagtttcctcatcagcctgggaggatctacatcctgagawmtgtttaaagccaatggcakaaatgaatacttgcattggaaacttttttttttttttgaaagtgtttttctgctctgctgtgtagggcgctcaaaggaatggacatttacaaataccagttcccagtttaaagcctggttatgtagttcagcaaattctactttttcttttctttttcttttttttccatacaaaacgcgtgggtagtcaatgaagcctagatacatttcatggctcttctcagaacagcagcaagctggtgatcagccctctcagttaatgggaaaagagaatattggtt

SEQ ID NO: 89979 - DNA, 600 bp, Chicken  19866894397319_3
ttgggttcccctgtttcccttcctggaggcgcagattttgcgaaatccctccgccccactagtcgcggaaccgggccggaccagcccttaaaccgttgacagatccacatgatgcctttctagaaattctttcccatttagctttacttgaacaagtgagggggaaaaaaaagttgcttttgacttttgagtatagcaagtgtttgaagtgctccaatacttatttctgaggtatgtgttcagtttcctcatcagcctgggaggatctacatcctgagawmtgtttaaagccaatggcakaaatgaatacttgcattggaaacttttttttttttttgaaagtgtttttctgctctgctgtgtagggcgctcaaaggaatggacatttacaaataccagttcccagtttaaagcctggttatgtagttcagcaaattctactttttcttttctttttcttttttttccatacaaaacgcgtgggtagtcaatgaagcctagatacatttcatggctcttctcagaacagcagcaagctggtgatcagccctctcagttaatgggaaaagagaatattggtttcatcctgtgtaagtaaat

SEQ ID NO: 89980 - DNA, 600 bp, Chicken  19866894397319_4
ggaggcgcagattttgcgaaatccctccgccccactagtcgcggaaccgggccggaccagcccttaaaccgttgacagatccacatgatgcctttctagaaattctttcccatttagctttacttgaacaagtgagggggaaaaaaaagttgcttttgacttttgagtatagcaagtgtttgaagtgctccaatacttatttctgaggtatgtgttcagtttcctcatcagcctgggaggatctacatcctgagawmtgtttaaagccaatggcakaaatgaatacttgcattggaaacktttttttttttttgaaagtgtttttctgctctgctgtgtagggcgctcaaaggaatggacatttacaaataccagttcccagtttaaagcctggttatgtagttcagcaaattctactttttcttttctttttcttttttttccatacaaaacgcgtgggtagtcaatgaagcctagatacatttcatggctcttctcagaacagcagcaagctggtgatcagccctctcagttaatgggaaaagagaatattggtttcatcctgtgtaagtaaatcctgtgaccattggaaaggacttt

SEQ ID NO: 89981 - DNA, 600 bp, Chicken  19866894397319_5
gaggcgcagattttgcgaaatccctccgccccactagtcgcggaaccgggccggaccagcccttaaaccgttgacagatccacatgatgcctttctagaaattctttcccatttagctttacttgaacaagtgagggggaaaaaaaagttgcttttgacttttgagtatagcaagtgtttgaagtgctccaatacttatttctgaggtatgtgttcagtttcctcatcagcctgggaggatctacatcctgagawmtgtttaaagccaatggcakaaatgaatacttgcattggaaactkttttttttttttgaaagtgtttttctgctctgctgtgtagggcgctcaaaggaatggacatttacaaataccagttcccagtttaaagcctggttatgtagttcagcaaattctactttttcttttctttttcttttttttccatacaaaacgcgtgggtagtcaatgaagcctagatacatttcatggctcttctcagaacagcagcaagctggtgatcagccctctcagttaatgggaaaagagaatattggtttcatcctgtgtaagtaaatcctgtgaccattggaaaggactttg

SEQ ID NO: 89982 - DNA, 600 bp, Chicken  19866894397319_6
aggcgcagattttgcgaaatccctccgccccactagtcgcggaaccgggccggaccagcccttaaaccgttgacagatccacatgatgcctttctagaaattctttcccatttagctttacttgaacaagtgagggggaaaaaaaagttgcttttgacttttgagtatagcaagtgtttgaagtgctccaatacttatttctgaggtatgtgttcagtttcctcatcagcctgggaggatctacatcctgagawmtgtttaaagccaatggcakaaatgaatacttgcattggaaacttktttttttttttgaaagtgtttttctgctctgctgtgtagggcgctcaaaggaatggacatttacaaataccagttcccagtttaaagcctggttatgtagttcagcaaattctactttttcttttctttttcttttttttccatacaaaacgcgtgggtagtcaatgaagcctagatacatttcatggctcttctcagaacagcagcaagctggtgatcagccctctcagttaatgggaaaagagaatattggtttcatcctgtgtaagtaaatcctgtgaccattggaaaggactttga

SEQ ID NO: 89983 - DNA, 600 bp, Chicken  19866894397327_1
cggattgtttcagatttcattttccacaaagaagctgcctttaaaagtgcttttaatttatcaaacttcaaaatcattctaccttcaataaaaaaagttctccaactgaaaaccctaaatgcatacagggtgcatgccaatgagctatgaactactggagatacagatgcagtgcaatttaataaagaaacaaaaacatgtatgttagcattcttgtgatctggctcaaatagtagttggtattcagctatagagattcatggactaattctggccaacttagtccattttcttatgcaktccttaaaagaaagagagagacagtacaatattgaaactacgtcttcagaatggaagtaacaaaacttaaacaggaaattctgggaaaaaaacaacatgcagttatctctttactgttggagtttctttaagactatcaattaatattttgggggggggatcaaacctaaagaaaaacaggttcattctgaaccctgatcagcaattmaatctcattttcattttggatcattgaaaaagaaaattgtttttaacacaaggagcagtcccaacaataactctggaacactgccagctgct

SEQ ID NO: 89984 - DNA, 600 bp, Chicken  19866894397327_2
cattcttgtgatctggctcaaatagtagttggtattcagctatagagattcatggactaattctggccaacttagtccattttcttatgcaktccttaaaagaaagagagagacagtacaatattgaaactacgtcttcagaatggaagtaacaaaacttaaacaggaaattctgggaaaaaaacaacatgcagttatctctttactgttggagtttctttaagactatcaattaatattttgggggggggatcaaacctaaagaaaaacaggttcattctgaaccctgatcagcaattmaatctcattttcattttggatcattgaaaaagaaaattgtttttaacacaaggagcagtcccaacaataactctggaacactgccagctgcttatcaatcgtttaataaaggctgcttccacttcatgacacagctgaacactctctgcatatcctggcaatgaggagagctgttgcttctggaacacctgggatcctacatacattcaagcaacttgtataaagcagatacatcctgaagcaccctacgctacaaggaggaggaaagcacaactcatcagccagaccgaagcgctccta

SEQ ID NO: 89985 - DNA, 600 bp, Chicken  19866894397327_3
actgccagctgcttatcaatcgtttaataaaggctgcttccacttcatgacacagctgaacactctctgcatatcctggcaatgaggagagctgttgcttctggaacacctgggatcctacatacattcaagcaacttgtataaagcagatacatcctgaagcaccctacgctacaaggaggaggaaagcacaactcatcagccagaccgaagcgctcctaatgctacacactgactgcacacttctctgcaaattgtagcctgttcttggaggaaggacagcttttctgactgctatcstgtatttaccacaaaggggtgccacaaagaactttttacgtggctttgctctcacctcttaaacaatatcaaaggaagaaaccagacttctctgactcagagaagtttgaacttaagacctgactagcttaactgaatttattttattatcatttaaaagggtagggttctcatcctctcttcaatttttctagttaaaaaaaacatacagcgaaacatacaagcgacatcaaacatgctgacattaaaagcaacagagaacaatcaggtcacctaacatacaggcacatcacacagatt

SEQ ID NO: 89986 - DNA, 600 bp, Chicken  19866894397341_1
tagacatgtattaaaacataataataattaagtcagtgatacaattcagtagagtcagaaggctcccttaaattgctttataatttagagtaggaactttgttaatcacagatatatcaatgtaagacccatcagagagaacattatgatgggagtagtaatttattgtgacataactttattccctgctagatactttgcctaaataaaacattgccacggtacttgatcagcataaaaagaaataatgcaggaaaacttggcagcaaactagttcacgtagaaattcacagatctgtwcccagattttggaggtccttgtacagaattcataccttcaacctcaaatacaacttaagtctacagtgaagtttaacaggttactgcacaactggttattattcacaaaggctaactttttatctgacatcaaatacctagttttttgggaatccaagattttgtctctgactcaggggttaactttcctgaaaggatcaccacagtttttatggcttcttaaccaggaatgtgctgaaagtctgtctaggatgtaaatgctttgcaattgtagagctctggctgcttaattttgtttaa

SEQ ID NO: 89987 - DNA, 600 bp, Chicken  19866894397350_1
tcagctgtgtttataaatatgaagtcaaacacttgattaaatatctttttctcccctttctaaaacagttggagaacttctgctaaatatccaaaggggcaagaaatggctgttgtgatgtacagagcagctagtaagcaggcagcagcagtgcagccttcctcatgcccacgggcttccgttctattctggggcaccacacctacgcctcagcaggttgcttcatttctagcccacccacttcttgacccatatccttagactaagggtgggttttttttctttctttcttttgggctytagtgctgtgaggtaacctgtctctttgatttgttggtggactgtggtggtgtcatccaggtacatttgatgaaagacccctctgcttgttctccctctatttcctccttcctcttgcaggtacgtatatgcaaaaggtgtggatgtacaactaattgtagacatttgatcctgacctagtgtatggactgctgccagcattatttttggtgtttcatcgagcaggaagcaccagagtttaaaaatctctcgatgcaatttccctagggggagtacagcagtttccatggcagcagaggc

SEQ ID NO: 89988 - DNA, 600 bp, Chicken  19866894397350_2
gtgtggatgtacaactaattgtagacatttgatcctgacctagtgtatggactgctgccagcattatttttggtgtttcatcgagcaggaagcaccagagtttaaaaatctctcgatgcaatttccctagggggagtacagcagtttccatggcagcagaggcaccctgtagcagagctccagtggcagctccatttcaggtcaggcagcttcaggttttaccccaaactagaacctatttttgagagtttaaaaaaaccaagtaaaaataaatataaaaattacaaggagcagtgtatraaggccagtgggaaaaatctgactgttatgattgaatccttttgactttatcctgctccaaaatgtttgtgagtcttcccagaatcttcatattttcttgcttcagattgttttctctaccttggctgcttttcctaaacttaaaatgctaagtgtactctatttattttgctttgtttttgtgatgccttttttaggccacataaggattcacatcatgtcaaacagaacaatatttttcaaacacttaaggtttttattaccttcctactattttttaccgtatgaacatcaaaccct

SEQ ID NO: 89989 - DNA, 600 bp, Chicken  19866894397364_1
tactttctcaaccattctccacaaataaagttcatttaaatatacaaccaagagttacttttactcactggcaactaaagaatggactaggctctttaagctctaaaaaggaatgagtacaatggatcattaattcaatatattacacggagaatcacaagcacagaataaaagcttaaagatataaaccatccaatttagaccagcagatgtttctataccagcacctcagagatggaggtttttgcaaaagggactcaagaactctcgttttcaagtaatccatccagttccagcacstatttctcattggttgcacctaattggaactactgttcatgtcccatagaacagcctggttttccagacatcaggtaaagcagcatgcagggaaatggtatgattttcagaggtactttgacaaacttgaaaggtgggcccctgtgaacctggtaaggttcaacatagcaaggggaagggttttgcacttgggttggggtaatcacagatacatttacagactgggagaaccccttgagagtcaccctgtgaataaggacatatgggtcctggtggatgcaaaactgaacatgagccagc

SEQ ID NO: 89990 - DNA, 600 bp, Chicken  19866894397378_1
cttctgttgttatgaaactgcagggctggattcccagctgaatgccctcttctcatgccgtaggtgacactttccagatgctgatgccttgaatttggaagccaggagtgcagagggccttgctatatgctcctgcagaccttggctggggatggccttggtatggtgggttacgttgacctggggtcaagagagccatgtaaagcaaatgtgagagagatgagaggagggaggattacagggtggaggtttctccctgtgagggcagagtgctctctcctaaaaaaataagaacagttktatgtaacttgctactgttagcggaactcggtgcactggcatcagaatcgcctctgcttcccaacagtgtgttgttctggctgttgtctgaactagggaagcacgtaatctaaggtctgtttatttataaaatactggctcaataactttgtttaagttctctgacattrtcttggcaaatagttatctgtaataacagtccataggtgcatatagatgctttgccttttcatgggagcattaacttaggtgaaatgcacaaagaatatgtgctcagaattaactatgtaaagctcagat

SEQ ID NO: 89991 - DNA, 600 bp, Chicken  19866894397378_2
ttacgttgacctggggtcaagagagccatgtaaagcaaatgtgagagagatgagaggagggaggattacagggtggaggtttctccctgtgagggcagagtgctctctcctaaaaaaataagaacagttktatgtaacttgctactgttagcggaactcggtgcactggcatcagaatcgcctctgcttcccaacagtgtgttgttctggctgttgtctgaactagggaagcacgtaatctaaggtctgtttatttataaaatactggctcaataactttgtttaagttctctgacattrtcttggcaaatagttatctgtaataacagtccataggtgcatatagatgctttgccttttcatgggagcattaacttaggtgaaatgcacaaagaatatgtgctcagaattaactatgtaaagctcagatgacttactgcctgagttgcagatgtggtgggcttcacatgcagtgttagcctgtgcttctgtctgagcacctcccctgttatcctttccttccccagacagaagtttcagcttgggtggcataagttcagcttaaattgaagtctgggttagaacygagatcacacttcc

SEQ ID NO: 89992 - DNA, 465 bp, Chicken  19866894397378_3
gttctctgacattrtcttggcaaatagttatctgtaataacagtccataggtgcatatagatgctttgccttttcatgggagcattaacttaggtgaaatgcacaaagaatatgtgctcagaattaactatgtaaagctcagatgacttactgcctgagttgcagatgtggtgggcttcacatgcagtgttagcctgtgcttctgtctgagcacctcccctgttatcctttccttccccagacagaagtttcagcttgggtggcataagttcagcttaaattgaagtctgggttagaacygagatcacacttccatttgggctgatcatcacttgtagagcagagatagacattactggaaatcttgcagtaattctgcatgtctccttccctgcttgctaaagggagtgaatccttcaaagtcttaaaggacaacaaccgtgcaccaatgtaattgggtttagg

SEQ ID NO: 89993 - DNA, 600 bp, Chicken  19866894397381_1
ctatgtggtatttatctgcctgcttaagcccaacagtggcttatggtcactggactttcaacataaagacctttccaaaaaagggatttatctgaaaaacttgaacactaccttcttgcttcagccaggaaattcagagataccatagcaatatggaatccgatcttttaagctaagattcaggcctacacttttcttaagcaaactactttactctgaacaaattaactactttactgtgaataaaataaggtagatttgttttaaccagatgcaaggtccaaaagcagcagtgactcygtaacctcttccctttaggtcttccaggcacaggactcattttaaaaagttagtttgtcacagcatatgcaggaaaaggagagtattctccactgcaatgcattggttttattgtagaagaggaaaacaagattaaacttcatttgtattaaatctgctagagtcataaagataatatcattttaatatagtggaatttttgagtcttttccctcagttttactcagcgtgccctgttccatttcttactgtcccagaattgttcatgagaaacaatattgcaggagtgaaggtaaggag

SEQ ID NO: 89994 - DNA, 600 bp, Chicken  19866894397381_2
gggaccttaaagattacattgttccaacccccctacactaggcagggacacctcccactagaccagattggtcaaagcccatcaagcctggccttgaatgcttccagggagcgggcatccacaacctttttgaccaacctgttccagtgtctcaccaccctcacaataaagaatttcttcctaatagctagtctaaatctaccttcttccagtttaaagcccctcactacctgcccttataaaaagtccctccccagttttcctgtagatcatgttagattcctcagaatgcacacttayaggcttcacttcagttctttaagcatccacttcaaaataagagtgctgaaaaaaaataggtgccaatcccaccagtattgtgtcaacatttcatcttttaaacaatgagaaagtgagagaaaaagaaataatccattcactttacttttttgaagaagtacggagagcaaacctcctataggaatctataaaaggattaaaaagtcttctcacactaaatattttgccaagatatctgtagcaaaaatcttaccaactaatagaggtaatccagtatgtcagtacataatgcaattgaac

SEQ ID NO: 89995 - DNA, 600 bp, Chicken  19866894397381_3
tatttcctaggtctgtaatgctgtttttgaggacaacaaaagtagtcattacttctaaggtcagaacaaagaaggttgagttatttcacatgatctgtaggcaatctaccataattgggacaagaatctagatacaaggaaaagtagaagcaaagtagaaactggaagatttggtgtagggaaaaagcagaaccaggctgatgtgagcagaaccagctcctctcttacacacactgtacactggcctggttaaaacttataagatttgataactaaagcttagtcaaaaagtaagcttcycgtgaaggtagctaacattgcccactattttcttcccttttcttccactacaaaataaaatttgaaaaatatcagtatgttaaaaaggaaaacaaaagacctttaaataataaggaaaggagaactgaaggaacctaatttcttggtactgtgtaaactatgttctttatcacctcacagcattcagacttgtcttgatatcttgaaattcacatcttaaagaaaatatgaaagtagtcagtttctaagatattccagaacttttgacttaaataaagagtccattccttggactccaag

SEQ ID NO: 89996 - DNA, 599 bp, Chicken  19866894397396_1
  misc_feature (1)..(58): n is any nucleotide
nnnnnnnnnnnnnnnnnnnnnnnnnnnnnnnnnnnnnnnnnnnnnnnnnnnnnnnnnngggaaaaaaagatttaaaaaaaatataaaagatttgtccccactattaattctatctgttctccatcaatatctgcatgtgataatttattaagtaccagactctacacttcagacacaaatcctacaaggaaaaatctatagacaggtttggaacgtatctagaatgtacctcctagttcttggtaagtaaaacccaggaatctacttgcttagtcttaaaaatgacagcttaggcaataygtagctcctctggcattcaatggatgtgattgygttatcatacaataatcacacattagcatgtctcaagcatgtccatcagtacatatgtacaaactgttgcagttttcaagagtctgtcttagcatctaggaagtattttgacaagcatgactgcaaagtctgtgcacagggtccacaatctgaacagccagacactacatcatactacatgctgccacactcacgaagcaaaacaagctttttagcaggagttattagcttagcacaaagcacacacacagactgacaggtacatc

SEQ ID NO: 89997 - DNA, 599 bp, Chicken  19866894397396_2
  misc_feature (1)..(25): n is any nucleotide
nnnnnnnnnnnnnnnnnnnnnnnnngggaaaaaaagatttaaaaaaaatataaaagatttgtccccactattaattctatctgttctccatcaatatctgcatgtgataatttattaagtaccagactctacacttcagacacaaatcctacaaggaaaaatctatagacaggtttggaacgtatctagaatgtacctcctagttcttggtaagtaaaacccaggaatctacttgcttagtcttaaaaatgacagcttaggcaataygtagctcctctggcattcaatggatgtgattgygttatcatacaataatcacacattagcatgtctcaagcatgtccatcagtacatatgtacaaactgttgcagttttcaagagtctgtcttagcatctaggaagtattttgacaagcatgactgcaaagtctgtgcacagggtccacaatctgaacagccagacactacatcatactacatgctgccacactcacgaagcaaaacaagctttttagcaggagttattagcttagcacaaagcacacacacagactgacaggtacatctataaaggcagctcatacaggaagcttgggtat

SEQ ID NO: 89998 - DNA, 600 bp, Chicken  19866894397398_1
tgagaaggttcagggaaaagctctgccgtgtctataaatacctgatagcagggagatgatggagtcaagctcttctctttgagactcagtgatagggcaggaggcaacaggcccaaggtgaaatacaggaaatcatactttcacaaaaactttttttactgtcagagtgatcaaacacagacataggttacctagagaggctgtggtgtctccattctaggatgaaatggaaaaggtcctaagcaaccttcttttcagcccacagctttgggcaggagcctggaccagacaatgagcagmggctctctctagcctcaagcatgctgtggtaagaaatcaaacrcatacatagacatcagtagtcattcagaatcagtggctttgctgtgtacctgtactgcagacttacagcaacttctgccctagaagaaaaattggaaaataattctatttatggaaacagcacagactttttccaaagggaaaaagtaaaattggtaaagcaagtaaagttaaacaaaaagtttatttgaataagaaactctggctcactatttaagtgcttgatccagatcatttttccaaagctacagggttgat

SEQ ID NO: 89999 - DNA, 600 bp, Chicken  19866894397398_2
gatagcagggagatgatggagtcaagctcttctctttgagactcagtgatagggcaggaggcaacaggcccaaggtgaaatacaggaaatcatactttcacaaaaactttttttactgtcagagtgatcaaacacagacataggttacctagagaggctgtggtgtctccattctaggatgaaatggaaaaggtcctaagcaaccttcttttcagcccacagctttgggcaggagcctggaccagacaatgagcagmggctctctctagcctcaagcatgctgtggtaagaaatcaaacrcatacatagacatcagtagtcattcagaatcagtggctttgctgtgtacctgtactgcagacttacagcaacttctgccctagaagaaaaattggaaaataattctatttatggaaacagcacagactttttccaaagggaaaaagtaaaattggtaaagcaagtaaagttaaacaaaaagtttatttgaataagaaactctggctcactatttaagtgcttgatccagatcatttttccaaagctacagggttgatgacaataaaacaataagaaacttacttttgtatctaatattaa

SEQ ID NO: 90000 - DNA, 423 bp, Chicken  19866894397401_1
ttaatctctgtgtagttttggtaggcaaaagctacttttatttcagatttcaacagacaaaatagaaactgtggaagtaaaatgccaacgacagtgaattcattttataaataaaagtgtgagcatgtataatatataaaatatatgagttcatatttggtgagctaatgttcttacacctgttcattcaggctttggaccaaagtactagcagacctagtgaatgatatctgaacagagctgggtaaaaatagatctgttcttgtaactttatcaaaaggatctgacctgacaagtgaygacatcttaggggataaattgtctaaattggatgtttcctcatgttttaggattggttagtattactcagtatgcataaaatagctgacctctattacaggacatgtattcacggaacttcac

SEQ ID NO: 90001 - DNA, 600 bp, Chicken  19866894397409_1
acaattcacagaaggtgatcacacaacactgaactgaaacatttccccttttaactgagggcattttgggtgttttcttaggttgaggcaacatcccacgaagtcaaccttcagtacctgaatcaagcagtgtctgtatatttcaagtgtcaaaaggccaacgtgtcagagcaggcacatcgcagcagcagtggagcagagcaagaaacaagagccccatgcaagaggaggaaaaggcaagttagctgtgagccacaggactgccagttactaaaccacgagttcagctcctcaacattyaaagcagaggagttacagaaaataccttttgggcctcatctcgttcaagttttacctcagtctcaagaaacaagctcactgggtgcaggtgcagttgcaagtgatgatagagatcttctccacgaaaatgaaggaggacattttggaaaattacactgcaccaggaagcaattggtaatgagtaatgactgcacaacgcctgcaaatcaaatggattccgacagtagtcccaatgccttgcaggcagccctttccaccaatgatttgctggactgcctggttaatccacatgtcatcagg

SEQ ID NO: 90002 - DNA, 600 bp, Chicken  19866894397414_1
gcttcgtttttccccttttctttttggagctcagaacacaaagttgagcaccgggtttttgtgtttccctcccatagctttgactgaggttggtgtcacttttccttccaagcggaactctggaggtgaatcacacacggccccggaatgaggaactcccccgaaagcctctttaatttttcacccagaaaatattctcgttttacactctgcttctcttactgaaaggagccataaatcagcaccgtcccctttggtgttggccgtcggcgggggagatttagtgctgccagcagcccygggactgtggtgggcagcagcagagggcagagagccgtgcagagccgcattccattcgcacacaccgtttgctttccttggctgtgggcccgctgggcttcgagctgctgcgaggggagcagggtgggcagatggagggttttccactctgtggctgctctgttgttttgcttttcctcacttttctccccctctctgggcagaaagatgcccgggaatttctagcgtgctgctgggagcccttgtgtgctgagagcaaggtttgctccaatcaacagcactgaggcaaagccagaaagc

SEQ ID NO: 90003 - DNA, 600 bp, Chicken  19866894397426_1
agtaacaacgtgtatagggcaatatgttctcaagtgtaagaagttgagtgtcccaccagatttgtgttcatatgttgtgtgtagatgggacttgtgagggttgaacatgcagcagtttaggttcccagcagacattctgagctcagcccttctccagtctgttgcagtgacgcagtgacccaagttcaggttggataaaacccagcatcctggctgagaagtgcccaggccataaaagcggcatgcttacatatatttctgaagctgtagtttgatttttatggtatatataactaagaytttctagcacatgttcactgtggttgggaattatctggggcaaacacaaaagcctggcaaackgtagcattgtggttagaggaatgtggaatcctcatctattttttcttgagttcttatattcaagtttatttaaataagagattgacatagtctctgtgtttatgcttgtgtgtgcatagcagtatatttggagatgctcagatagtagaaaatggtaggccagtaactcagtcactctattatagcaagaaagaatttaaaacatccctatgatattatagaaatagttgctagtca

SEQ ID NO: 90004 - DNA, 600 bp, Chicken  19866894397426_2
gtgttcatatgttgtgtgtagatgggacttgtgagggttgaacatgcagcagtttaggttcccagcagacattctgagctcagcccttctccagtctgttgcagtgacgcagtgacccaagttcaggttggataaaacccagcatcctggctgagaagtgcccaggccataaaagcggcatgcttacatatatttctgaagctgtagtttgatttttatggtatatataactaagaytttctagcacatgttcactgtggttgggaattatctggggcaaacacaaaagcctggcaaackgtagcattgtggttagaggaatgtggaatcctcatctattttttcttgagttcttatattcaagtttatttaaataagagattgacatagtctctgtgtttatgcttgtgtgtgcatagcagtatatttggagatgctcagatagtagaaaatggtaggccagtaactcagtcactctattatagcaagaaagaatttaaaacatccctatgatattatagaaatagttgctagtcaaaaaytgatttttttggttcccagtcctgtcaagtattcatctcaatatatgtatctgtgtgc

SEQ ID NO: 90005 - DNA, 516 bp, Chicken  19866894397426_3
agcacatgttcactgtggttgggaattatctggggcaaacacaaaagcctggcaaackgtagcattgtggttagaggaatgtggaatcctcatctattttttcttgagttcttatattcaagtttatttaaataagagattgacatagtctctgtgtttatgcttgtgtgtgcatagcagtatatttggagatgctcagatagtagaaaatggtaggccagtaactcagtcactctattatagcaagaaagaatttaaaacatccctatgatattatagaaatagttgctagtcaaaaaytgatttttttggttcccagtcctgtcaagtattcatctcaatatatgtatctgtgtgcatgtgtatgtaaatatagagatagttgccaatacttttgtcttagttcaggatcaaggactctatgtccataaggcttccaaaagtttaggcaagtgcatccttccttccctggcacctcagtgcctgctcttcctcaggtgtgcagcaccactccac

SEQ ID NO: 90006 - DNA, 599 bp, Chicken  19866894397431_1
  misc_feature (1)..(176): n is any nucleotide
nnnnnnnnnnnnnnnnnnnnnnnnnnnnnnnnnnnnnnnnnnnnnnnnnnnnnnnnnnnnnnnnnnnnnnnnnnnnnnnnnnnnnnnnnnnnnnnnnnnnnnnnnnnnnnnnnnnnnnnnnnnnnnnnnnnnnnnnnnnnnnnnnnnnnnnnnnnnnnnnnnnnnnnnnnnnnnnntttttatatttatttaggcatttatttattactgtgagagtggtcagccactagaacaggctgcctagagtggttctggagcctctacccttggaggtgctcaaaacctccaacaggacgtggycctgggcagcctgctgcagctggctctgcttgaggtgaggtgttggaactggatgatctcattgggtttctcccaaatgagtgactttccatttctgagctctactctgaagttcatgctgtttggaagcaatctgttcagttacaatattttcataaaacaggatgttgaagtcttagaaaattaacaacactgcatttaacagtgtgttttctttatctttaatggtgaatgggggaaatgcttttgaaatattgagactaaacatttggatgtatttacttcatacgaaatataca

SEQ ID NO: 90007 - DNA, 600 bp, Chicken  19866894397431_2
caatattttcataaaacaggatgttgaagtcttagaaaattaacaacactgcatttaacagtgtgttttctttatctttaatggtgaatgggggaaatgcttttgaaatattgagactaaacatttggatgtatttacttcatacgaaatatacatttagcaatggttgtgtgaagcagtttaggataccacaaaattctgtgcaagcacccttaggagcctgttctgctgctgacagacctttttacttcactcttttggcaacagcatttacaaatgtgcatccgcagaaaggaaggrcttggatcatttcttgttaccatgtgacctagcgtgtatcccarttagttctcagtctctctggctcctctctcatgcgttcgttctttctgattctctctgtctcatctcttgagatctcagattcacatatgttttaaaagactgttacactgtggtacaattgtgatatgctgatgttatctctgaagcatctcagatgttggttatgaatgatacgtactccttcttttctgaggagttgtcaacattgtcactttacccctgggaaggcaaaaatatcctcagctacttggaatt

SEQ ID NO: 90008 - DNA, 600 bp, Chicken  19866894397431_3
aacactgcatttaacagtgtgttttctttatctttaatggtgaatgggggaaatgcttttgaaatattgagactaaacatttggatgtatttacttcatacgaaatatacatttagcaatggttgtgtgaagcagtttaggataccacaaaattctgtgcaagcacccttaggagcctgttctgctgctgacagacctttttacttcactcttttggcaacagcatttacaaatgtgcatccgcagaaaggaaggrcttggatcatttcttgttaccatgtgacctagcgtgtatcccarttagttctcagtctctctggctcctctctcatgcgttcgttctttctgattctctctgtctcatctcttgagatctcagattcacatatgttttaaaagactgttacactgtggtacaattgtgatatgctgatgttatctctgaagcatctcagatgttggttatgaatgatacgtactccttcttttctgaggagttgtcaacattgtcactttacccctgggaaggcaaaaatatcctcagctacttggaattcatttaactcacattgcatcagttggtcagttttcagctttatg

SEQ ID NO: 90009 - DNA, 600 bp, Chicken  19866894397435_1
tgctgggatcagtcacctaatttttagacattactgtgtctgcgacagcagtaatgtaaatactctgggatttctttagattggcattgtaagtcttttatggcctgataagacagaactcctgatgcatatcaaagttaaacaggttggagcaagagcaggactggggattactgtaaaatttcccagcgccaaaggctgttttcagaagatgagagctgctctgtcttcctgaatataaactctctcacactgtggaatccattacacaaaacaaggtgctaagtcttaacagacatygtgtttgtgctgaaagcagttatcagatctccgatttagcctaaaggagaatgaaagagaatgttaaaatatttgcttgtctgtgtaaatacgatccccagtatgatacagcaagtggcaatccttgagtcactgggtatttctgtggttcctgtctgcttaccatttcaggctggtggccttaacctcagcacatgtaaattgccgtggtttcagaaacttataactaatcccctgctaatcaggaatgatatagattatatcagggaacatttcctgtgaggtcaacttttgttttgt

SEQ ID NO: 90010 - DNA, 599 bp, Chicken  19866894397439_1
  misc_feature (1)..(264): n is any nucleotide
nnnnnnnnnnnnnnnnnnnnnnnnnnnnnnnnnnnnnnnnnnnnnnnnnnnnnnnnnnnnnnnnnnnnnnnnnnnnnnnnnnnnnnnnnnnnnnnnnnnnnnnnnnnnnnnnnnnnnnnnnnnnnnnnnnnnnnnnnnnnnnnnnnnnnnnnnnnnnnnnnnnnnnnnnnnnnnnnnnnnnnnnnnnnnnnnnnnnnnnnnnnnnnnnnnnnnnnnnnnnnnnnnnnnnnnnnnnnnnnnnnnnnnnnnnnnnnnnnnnnnnnnaattaaacaagccaagaggatgaaacctctctgggrggaagggcaatggcaaaagtataaatatggggaggcctggcaggttgattacatcaccttgccacgatctcgcaatggtaagagttatgtgcttaccatggtggaagcaaccactgggcggcttgaaacatatgcagtaccccatgctaccacctgaaacaccataataggtttggagaagcaagtcctgtggcaacgtggcactccagaaagaactgaatcagataatgggagtcatttaaaaaattcacttgtggatgtttgggccaaagatcatggcactgagtggatttatcata

SEQ ID NO: 90011 - DNA, 600 bp, Chicken  19866894397446_1
tgctgactttaatagactctaactttggtaagttattagactcaaaacagctaagaaaacaagaccagaaaatgtggtacaaataagaactgagcagccacatacaccaaagcaacactcctgtgcctcccccactgcagagctctcagatccgaaaagctggggtctgaccagcagctttcactgagagctccttccaaagcttaataatactcgatgttcccatctgtacattcgagtccaaataattcacaggaggaaaggaaaaaaaagcagtagattgtgacaggagataggcaygcttccagaacagcatgatcttgaacagcaaccttcagaccagccctatgttttccttacaggctcagctataacgggggcaagaaaagctgccaccttcattgcactgcactgtaagtaaagagattaaaatcagaaacagaaatactgaaatataagatatctgaggttaataaagtaactggcattggaagactgtactgaaccaccagtgctgttaaggtacagggtggcaggaagctaaactaacacgtcacactgaatgtgtcgattcttggaacctcagggccagttagcagc

SEQ ID NO: 90012 - DNA, 481 bp, Chicken  19866894397450_1
gcagaaagacaaactacaacctcactcccttctcttacccagagagatcacagtaaatgggatcctaggtttatgagaatgatagctacatctggaagggaagatggctgtgaagtttacatacgctttttgctgcttgcacacaacagcataggaatgtattcacacacactagcatctcatggtcactcaggaatttatgatttacactagaaacacaggttcaagtagcaaaaagaaatccttagatgtggcatttaagacaacatagatatacacacaaacacaaagttatttcaraaatctaatcttacaacattgaaaaccaagaattgatgcagaaatcaggcaatattaattcacattagaaaagctgagagtcaaattcagatgccagaagtgtgggtttatccctgctattcagctgaaaggactgagcaatagtgggatcatagactttttcttttctacatttagaaat

SEQ ID NO: 90013 - DNA, 599 bp, Chicken  19866894397455_1
  misc_feature (1)..(61): n is any nucleotide
nnnnnnnnnnnnnnnnnnnnnnnnnnnnnnnnnnnnnnnnnnnnnnnnnnnnnnnnnnnnnaaactgtttgtttacttagcagagagaagaaggtatctaaggatgcgtatctttaatataaaaggcaaaggagcatgaggaatacaacatagtataacatatcattgttggattttattacttatctcaaatttcaaacgtattgctagaaggaattttggaaatactatacatacaagtttgccctcccagcaagatttctggagggtattcaagtagatacagtcaagataatgaaygagtgagtgagagagaaacacaccagtatgagttgatttccaggcagaagtttactaactagacaaataactttcaagaatatccacaaacatccagagatgaactccatgaaattcctaccattgtttttagcctagacatatctaagaaagcatgctgcattaccaatctcttagagcaagtagtttactttcacgtctgtaaacacacttgatgctcaggacatcatgcagtgctgcaaaagccaaaggttaccctttaaaagtcacagggctggtactgaagagcaaactggccc

SEQ ID NO: 90014 - DNA, 600 bp, Chicken  19866894397455_2
atctaagaaagcatgctgcattaccaatctcttagagcaagtagtttactttcacgtctgtaaacacacttgatgctcaggacatcatgcagtgctgcaaaagccaaaggttaccctttaaaagtcacagggctggtactgaagagcaaactggccccatcagacagttctgagctatgagaatgcttagatggttacaacttcagtgtatgtctcattgctgattgattacttgataaagaactattgagatgaacttgcagctctattttgcatttgaatacggtactaactcatttkycagcatctggagcaagagaatgaccagagtgcaatttagacaccatcatgacaaaactgtttctcattcaatgtattatttcaggaagtcttttgtaacgtgttggctctttgtcacaagaatgtgtactccgatgaacaattttgcaagaaaaaccaacacatgacatcagacctttcacatccctaacatgtttttggtgtaattatgtgaaggtaaaaactgcaaaacatatcaaaacaaacaacttagcttacattttcattgcaaacacagtgaaaaggaaaagaaaatgaatc

SEQ ID NO: 90015 - DNA, 600 bp, Chicken  19866894397455_3
tctaagaaagcatgctgcattaccaatctcttagagcaagtagtttactttcacgtctgtaaacacacttgatgctcaggacatcatgcagtgctgcaaaagccaaaggttaccctttaaaagtcacagggctggtactgaagagcaaactggccccatcagacagttctgagctatgagaatgcttagatggttacaacttcagtgtatgtctcattgctgattgattacttgataaagaactattgagatgaacttgcagctctattttgcatttgaatacggtactaactcatttkycagcatctggagcaagagaatgaccagagtgcaatttagacaccatcatgacaaaactgtttctcattcaatgtattatttcaggaagtcttttgtaacgtgttggctctttgtcacaagaatgtgtactccgatgaacaattttgcaagaaaaaccaacacatgacatcagacctttcacatccctaacatgtttttggtgtaattatgtgaaggtaaaaactgcaaaacatatcaaaacaaacaacttagcttacattttcattgcaaacacagtgaaaaggaaaagaaaatgaatca

SEQ ID NO: 90016 - DNA, 600 bp, Chicken  19866894397461_1
tgatttttttgtttaaataacttcgtcagaggaccatactaggtatatacttttcattccgtgtattgtcacatgcagataaaaatgagcttgccctgcacagactgactctgcagctagaaatgtaataccactcttttctgaggcatgcaagtatgctgcaacttggatctcagtccttctctgggccaaagaatagggcttattatctgccataactgtttctactacatctggaccaagatgattaagctcaagtgtcctgcattgtctttgtttggtggagtctgttctactccrgggagctctgcactatctcctgccctacagatacaccattaaagtgcactacaaattgatcaaggagctcatttcactacttgaamgattgtaagttttcttaaagatgggaaatgaaaaaataaacatggaaaaaacaacataaacaacttgtcaatataccaggaagttgaactgctrctagtgtcaaactccccttcactcccacttaacattctttagacaggagcgcagcccatgaatcagacctcctgaactcacgcagcacatcaactgcacttctttcatataaaactaaac

SEQ ID NO: 90017 - DNA, 600 bp, Chicken  19866894397461_2
gagcttgccctgcacagactgactctgcagctagaaatgtaataccactcttttctgaggcatgcaagtatgctgcaacttggatctcagtccttctctgggccaaagaatagggcttattatctgccataactgtttctactacatctggaccaagatgattaagctcaagtgtcctgcattgtctttgtttggtggagtctgttctactccrgggagctctgcactatctcctgccctacagatacaccattaaagtgcactacaaattgatcaaggagctcatttcactacttgaamgattgtaagttttcttaaagatgggaaatgaaaaaataaacatggaaaaaacaacataaacaacttgtcaatataccaggaagttgaactgctrctagtgtcaaactccccttcactcccacttaacattctttagacaggagcgcagcccatgaatcagacctcctgaactcacgcagcacatcaactgcacttctttcatataaaactaaaccagaagatgagctccaagtgcatactctgcagccaactgctagtgggacattcagtcttaacccatgtttacaaagccaaggataa

SEQ ID NO: 90018 - DNA, 600 bp, Chicken  19866894397461_3
tctctgggccaaagaatagggcttattatctgccataactgtttctactacatctggaccaagatgattaagctcaagtgtcctgcattgtctttgtttggtggagtctgttctactccrgggagctctgcactatctcctgccctacagatacaccattaaagtgcactacaaattgatcaaggagctcatttcactacttgaamgattgtaagttttcttaaagatgggaaatgaaaaaataaacatggaaaaaacaacataaacaacttgtcaatataccaggaagttgaactgctrctagtgtcaaactccccttcactcccacttaacattctttagacaggagcgcagcccatgaatcagacctcctgaactcacgcagcacatcaactgcacttctttcatataaaactaaaccagaagatgagctccaagtgcatactctgcagccaactgctagtgggacattcagtcttaacccatgtttacaaagccaaggataatgacagaaccttcagtataaggtattagggttgctctagcattgcatcagatgggcaatggcttttgttttttaatacttactgcctgggtttc

SEQ ID NO: 90019 - DNA, 600 bp, Chicken  19866894397481_1
tccttctgttttaaaccttctcccacagcactttactggctgctctcactagtactacctcctaactagtttttcatattggcaatttgagaacagaggcaatgaggtaaatattcactggcacagctgcctagagaagctggagaccctggaggcgctcaaggccaggttggatgaggccctgggcagcctgagctggtgaggggcagccctgcccatggcagggattggtactcaataatcattagtgacccttccaaaccaagccattctttgattctatgattctgtgattttatytggagaacaaattcacttcygttccctggrttgcctcaatttttctggttaacaaggccytgagttttaagttttcacatttctttgacragaaaggtttcttacaaatattttgtcattctctgtcacaaaatgtgcttacaatcaacataaatacattgtgtagttgcttgtgttatccatccaaacccagattttgatctaacacttgcttgaaattgatggactttttcttaccagctctgaagaatacagccaagaagtgttctttgttttttctccatttgcaggytgtttttg

SEQ ID NO: 90020 - DNA, 600 bp, Chicken  19866894397481_10
atgtataaccctaataagaaccttagagcataaaaatcaaggaactccttcttcactgaatagctttagcataacattttaatgtttgtatrtatatgctttgtatattagatttatttttaacagtgctcttaagagctgagaaaattctactgagcagctgaccagcaagaggctatggaatcccaggctgccatttcactgagaaaggaaatccttctctgcagcccttgatgtcttccaagcactgtgcayattcccagctatttttttycacccatgtctgtttttgttttccaygtacaaatgcttaaggaagctttcattttacactttgtatcctctctcttcacttttggacaaaaaatcttttgtttcgctttttagtttcaattatttctgcyattcagttttgttggtccatattaaattaattttctcctttctcttttttgttttttcctgattttagaatagcaaatttgatatgttattttatagtaatctcctctgagttttagagaattacaagcttctttactggaattaaataggaatgggctcattccagtaataatatcttacgttaatatctccagt

SEQ ID NO: 90021 - DNA, 600 bp, Chicken  19866894397481_11
atattagatttatttttaacagtgctcttaagagctgagaaaattctactgagcagctgaccagcaagaggctatggaatcccaggctgccatttcactgagaaaggaaatccttctctgcagcccttgatgtcttccaagcactgtgcayattcccagctatttttttycacccatgtctgtttttgttttccaygtacaaatgcttaaggaagctttcattttacactttgtatcctctctcttcacttttggacaaaaaatcttttgtttcgctttttagtttcaattatttctgcyattcagttttgttggtccatattaaattaattttctcctttctcttttttgttttttcctgattttagaatagcaaatttgatatgttattttatagtaatctcctctgagttttagagaattacaagcttctttactggaattaaataggaatgggctcattccagtaataatatcttacgttaatatctccagtatgttctagaagtgttctttactctttgttatttttgctctttaaacagaccagcttggacacaagcaagtgtttgaagtcaattagcttatatcatattaatt

SEQ ID NO: 90022 - DNA, 600 bp, Chicken  19866894397481_2
tcccacagcactttactggctgctctcactagtactacctcctaactagtttttcatattggcaatttgagaacagaggcaatgaggtaaatattcactggcacagctgcctagagaagctggagaccctggaggcgctcaaggccaggttggatgaggccctgggcagcctgagctggtgaggggcagccctgcccatggcagggattggtactcaataatcattagtgacccttccaaaccaagccattctttgattctatgattctgtgattttatytggagaacaaattcacttcygttccctggrttgcctcaatttttctggttaacaaggccytgagttttaagttttcacatttctttgacragaaaggtttcttacaaatattttgtcattctctgtcacaaaatgtgcttacaatcaacataaatacattgtgtagttgcttgtgttatccatccaaacccagattttgatctaacacttgcttgaaattgatggactttttcttaccagctctgaagaatacagccaagaagtgttctttgttttttctccatttgcaggytgtttttgatttccttttgttacaattc

SEQ ID NO: 90023 - DNA, 600 bp, Chicken  19866894397481_3
ctttactggctgctctcactagtactacctcctaactagtttttcatattggcaatttgagaacagaggcaatgaggtaaatattcactggcacagctgcctagagaagctggagaccctggaggcgctcaaggccaggttggatgaggccctgggcagcctgagctggtgaggggcagccctgcccatggcagggattggtactcaataatcattagtgacccttccaaaccaagccattctttgattctatgattctgtgattttatytggagaacaaattcacttcygttccctggrttgcctcaatttttctggttaacaaggccytgagttttaagttttcacatttctttgacragaaaggtttcttacaaatattttgtcattctctgtcacaaaatgtgcttacaatcaacataaatacattgtgtagttgcttgtgttatccatccaaacccagattttgatctaacacttgcttgaaattgatggactttttcttaccagctctgaagaatacagccaagaagtgttctttgttttttctccatttgcaggytgtttttgatttccttttgttacaattcattgtctgca

SEQ ID NO: 90024 - DNA, 600 bp, Chicken  19866894397481_4
cctaactagtttttcatattggcaatttgagaacagaggcaatgaggtaaatattcactggcacagctgcctagagaagctggagaccctggaggcgctcaaggccaggttggatgaggccctgggcagcctgagctggtgaggggcagccctgcccatggcagggattggtactcaataatcattagtgacccttccaaaccaagccattctttgattctatgattctgtgattttatytggagaacaaattcacttcygttccctggrttgcctcaatttttctggttaacaaggccytgagttttaagttttcacatttctttgacragaaaggtttcttacaaatattttgtcattctctgtcacaaaatgtgcttacaatcaacataaatacattgtgtagttgcttgtgttatccatccaaacccagattttgatctaacacttgcttgaaattgatggactttttcttaccagctctgaagaatacagccaagaagtgttctttgttttttctccatttgcaggytgtttttgatttccttttgttacaattcattgtctgcatgtctagaagttagctaatgtataacccta

SEQ ID NO: 90025 - DNA, 600 bp, Chicken  19866894397481_5
gaacagaggcaatgaggtaaatattcactggcacagctgcctagagaagctggagaccctggaggcgctcaaggccaggttggatgaggccctgggcagcctgagctggtgaggggcagccctgcccatggcagggattggtactcaataatcattagtgacccttccaaaccaagccattctttgattctatgattctgtgattttatytggagaacaaattcacttcygttccctggrttgcctcaatttttctggttaacaaggccytgagttttaagttttcacatttctttgacragaaaggtttcttacaaatattttgtcattctctgtcacaaaatgtgcttacaatcaacataaatacattgtgtagttgcttgtgttatccatccaaacccagattttgatctaacacttgcttgaaattgatggactttttcttaccagctctgaagaatacagccaagaagtgttctttgttttttctccatttgcaggytgtttttgatttccttttgttacaattcattgtctgcatgtctagaagttagctaatgtataaccctaataagaaccttagagcataaaaatcaagga

SEQ ID NO: 90026 - DNA, 600 bp, Chicken  19866894397481_6
attttatytggagaacaaattcacttcygttccctggrttgcctcaatttttctggttaacaaggccytgagttttaagttttcacatttctttgacragaaaggtttcttacaaatattttgtcattctctgtcacaaaatgtgcttacaatcaacataaatacattgtgtagttgcttgtgttatccatccaaacccagattttgatctaacacttgcttgaaattgatggactttttcttaccagctctgaagaatacagccaagaagtgttctttgttttttctccatttgcaggytgtttttgatttccttttgttacaattcattgtctgcatgtctagaagttagctaatgtataaccctaataagaaccttagagcataaaaatcaaggaactccttcttcactgaatagctttagcataacattttaatgtttgtatrtatatgctttgtatattagatttatttttaacagtgctcttaagagctgagaaaattctactgagcagctgaccagcaagaggctatggaatcccaggctgccatttcactgagaaaggaaatccttctctgcagcccttgatgtcttccaag

SEQ ID NO: 90027 - DNA, 600 bp, Chicken  19866894397481_7
tacaatcaacataaatacattgtgtagttgcttgtgttatccatccaaacccagattttgatctaacacttgcttgaaattgatggactttttcttaccagctctgaagaatacagccaagaagtgttctttgttttttctccatttgcaggytgtttttgatttccttttgttacaattcattgtctgcatgtctagaagttagctaatgtataaccctaataagaaccttagagcataaaaatcaaggaactccttcttcactgaatagctttagcataacattttaatgtttgtatrtatatgctttgtatattagatttatttttaacagtgctcttaagagctgagaaaattctactgagcagctgaccagcaagaggctatggaatcccaggctgccatttcactgagaaaggaaatccttctctgcagcccttgatgtcttccaagcactgtgcayattcccagctatttttttycacccatgtctgtttttgttttccaygtacaaatgcttaaggaagctttcattttacactttgtatcctctctcttcacttttggacaaaaaatcttttgtttcgctttttagtttca

SEQ ID NO: 90028 - DNA, 600 bp, Chicken  19866894397481_8
ttccttttgttacaattcattgtctgcatgtctagaagttagctaatgtataaccctaataagaaccttagagcataaaaatcaaggaactccttcttcactgaatagctttagcataacattttaatgtttgtatrtatatgctttgtatattagatttatttttaacagtgctcttaagagctgagaaaattctactgagcagctgaccagcaagaggctatggaatcccaggctgccatttcactgagaaaggaaatccttctctgcagcccttgatgtcttccaagcactgtgcayattcccagctatttttttycacccatgtctgtttttgttttccaygtacaaatgcttaaggaagctttcattttacactttgtatcctctctcttcacttttggacaaaaaatcttttgtttcgctttttagtttcaattatttctgcyattcagttttgttggtccatattaaattaattttctcctttctcttttttgttttttcctgattttagaatagcaaatttgatatgttattttatagtaatctcctctgagttttagagaattacaagcttctttactggaattaaatagg

SEQ ID NO: 90029 - DNA, 600 bp, Chicken  19866894397481_9
ttgtctgcatgtctagaagttagctaatgtataaccctaataagaaccttagagcataaaaatcaaggaactccttcttcactgaatagctttagcataacattttaatgtttgtatrtatatgctttgtatattagatttatttttaacagtgctcttaagagctgagaaaattctactgagcagctgaccagcaagaggctatggaatcccaggctgccatttcactgagaaaggaaatccttctctgcagcccttgatgtcttccaagcactgtgcayattcccagctatttttttycacccatgtctgtttttgttttccaygtacaaatgcttaaggaagctttcattttacactttgtatcctctctcttcacttttggacaaaaaatcttttgtttcgctttttagtttcaattatttctgcyattcagttttgttggtccatattaaattaattttctcctttctcttttttgttttttcctgattttagaatagcaaatttgatatgttattttatagtaatctcctctgagttttagagaattacaagcttctttactggaattaaataggaatgggctcattccagtaa

SEQ ID NO: 90030 - DNA, 600 bp, Chicken  19866894397491_1
ggggctgatgatggggtccagttctgctcattcgcctggaaggtttccaagtcctccgtggcctccaggcagacacgtatcccagcgcccagagctttggcagtagaaattactcaggactccatactcttaaatctggacaccgcagaaagcagtgagtgctttcccacacatacaagaagcctgcgaggctgtgagcatcactgccctctccccaggctgtgggtgcagccaccggccctcctcacagggacaagatgtcctgagccacctctgcccctccgcctcccctggaggaayggctggaagtcagggatttctccggctcgtaacacatctccccatttatgtctgacctgacacaatgaaaataacgagggcacggtcgcatcctagttttattacaactgacctgcaggcaaaaggatagaactattacataaacactctgatccatgtataatatcttaaatagagaaggaagtccaaccaggataccagataaaatactctgaagctctctgaagcagttacgttcctgagctccattttacagacaataaggcaacatccctgcacatcggctttgtgatcattttt

SEQ ID NO: 90031 - DNA, 577 bp, Chicken  19866894397494_1
tgctgctgtggctcccagcctggatttccccatctcagcctgtggagcacattttgaaatcgtgagaaacgtcctctcttcccttacccatatttctccttccccttttctttctgagcagcacagtgacagcttttgagcgatggagatgctgcaggcagcggggctccgcttggcgtgttggggggcagcagggtgctgctgtggggctgcagctttgggcagcagtgggactgagttcagggtactccacaccctccggtgctgcccatgccatcgctgtcccttggccgtgccccrgtgccacytgcgtggccgttcctgggagctggctgtggggcagtgatgggacctctccacagcaccatggttgtgggtccagcyggcacgtkctgtgtccccctgccccagtccctgtgccacaagtgccctgtgttgctgggtagcgctggcaatggggttgacgtggggaacagtgtcagaggggccggacccacctcatggcaccgggaaccccagagctcaagaagggtgagggcagcagggtgggtgcaaaggtcagatttggggcagggaa

SEQ ID NO: 90032 - DNA, 569 bp, Chicken  19866894397494_2
tggctcccagcctggatttccccatctcagcctgtggagcacattttgaaatcgtgagaaacgtcctctcttcccttacccatatttctccttccccttttctttctgagcagcacagtgacagcttttgagcgatggagatgctgcaggcagcggggctccgcttggcgtgttggggggcagcagggtgctgctgtggggctgcagctttgggcagcagtgggactgagttcagggtactccacaccctccggtgctgcccatgccatcgctgtcccttggccgtgccccrgtgccacytgcgtggccgttcctgggagctggctgtggggcagtgatgggacctctccacagcaccatggttgtgggtccagcyggcacgtkctgtgtccccctgccccagtccctgtgccacaagtgccctgtgttgctgggtagcgctggcaatggggttgacgtggggaacagtgtcagaggggccggacccacctcatggcaccgggaaccccagagctcaagaagggtgagggcagcagggtgggtgcaaaggtcagatttggggcagggaa

SEQ ID NO: 90033 - DNA, 493 bp, Chicken  19866894397494_3
tacccatatttctccttccccttttctttctgagcagcacagtgacagcttttgagcgatggagatgctgcaggcagcggggctccgcttggcgtgttggggggcagcagggtgctgctgtggggctgcagctttgggcagcagtgggactgagttcagggtactccacaccctccggtgctgcccatgccatcgctgtcccttggccgtgccccrgtgccacytgcgtggccgttcctgggagctggctgtggggcagtgatgggacctctccacagcaccatggttgtgggtccagcyggcacgtkctgtgtccccctgccccagtccctgtgccacaagtgccctgtgttgctgggtagcgctggcaatggggttgacgtggggaacagtgtcagaggggccggacccacctcatggcaccgggaaccccagagctcaagaagggtgagggcagcagggtgggtgcaaaggtcagatttggggcagggaa

SEQ ID NO: 90034 - DNA, 485 bp, Chicken  19866894397494_4
tttctccttccccttttctttctgagcagcacagtgacagcttttgagcgatggagatgctgcaggcagcggggctccgcttggcgtgttggggggcagcagggtgctgctgtggggctgcagctttgggcagcagtgggactgagttcagggtactccacaccctccggtgctgcccatgccatcgctgtcccttggccgtgccccrgtgccacytgcgtggccgttcctgggagctggctgtggggcagtgatgggacctctccacagcaccatggttgtgggtccagcyggcacgtkctgtgtccccctgccccagtccctgtgccacaagtgccctgtgttgctgggtagcgctggcaatggggttgacgtggggaacagtgtcagaggggccggacccacctcatggcaccgggaaccccagagctcaagaagggtgagggcagcagggtgggtgcaaaggtcagatttggggcagggaa

SEQ ID NO: 90035 - DNA, 599 bp, Chicken  19866894397500_1
  misc_feature (1)..(127): n is any nucleotide
nnnnnnnnnnnnnnnnnnnnnnnnnnnnnnnnnnnnnnnnnnnnnnnnnnnnnnnnnnnnnnnnnnnnnnnnnnnnnnnnnnnnnnnnnnnnnnnnnnnnnnnnnnnnnnnnnnnnnnnnnnnnnnnccctgcagtcttatgctatttccgcattgttgctggatcagctcagtgtccgatcctcactgggtcacaggacacagggccttcctctatataagcctcttttttttttccaatacacattacatgcacattcagtggcctgttgtttctctgcattcaggtacactgctgaygtgctttaccagccagctcgggctctgcttctgggagaagcacatttgcagagttgcatcaagctttcaatttcatttcttgttgactggtgtacaagaataaatatctcattttgattttcattgttttaaggcaatttaaatgcactttaaatgttactactgcatgcatcaatttacagcagcataaaacaacactttgtaagtttcagatatacaactcgtgcttctccattgctgacatgaaaattacaaataaatttccacatagaaaattttgaaaatttccatcttctata

SEQ ID NO: 90036 - DNA, 599 bp, Chicken  19866894397503_1
  misc_feature (1)..(16): n is any nucleotide
nnnnnnnnnnnnnnnnagttaggttcaccatacaccctgaggggcatgtgcacagccacgccctggtgaagaagagaactgacaagaaaagccaacaagttatttgcagcaatagggcaagatgctgcctggccaccgacactcctctacagtaccgtagagaagctctgcctctctgctcccccagtctgttggagggtgaacgcctttcaagggatcatctacctggggagaggagatgggagcgaagcttcagcaccagggacagcggtccgacccgaagctgcatctacccaaagytaccctgataatgagtgatgggcaggaacaagacaaaaaactgatacctggtgtactgtagtgactacattgccattttcacatgctgttttcatggggcaacgagttcagttaayatttttcatgtagaaaaggaaaaagcccagaatacaaacaccattccaggcattcttggttgtttatataaactaataaaatcaattttccaattaattaattatcccattagcagcaatctgccctggagctttgaaagctctttatactaaaggtttatctggagggctgtcatgtggttt

SEQ ID NO: 90037 - DNA, 564 bp, Chicken  19866894397503_2
gcaagatgctgcctggccaccgacactcctctacagtaccgtagagaagctctgcctctctgctcccccagtctgttggagggtgaacgcctttcaagggatcatctacctggggagaggagatgggagcgaagcttcagcaccagggacagcggtccgacccgaagctgcatctacccaaagytaccctgataatgagtgatgggcaggaacaagacaaaaaactgatacctggtgtactgtagtgactacattgccattttcacatgctgttttcatggggcaacgagttcagttaayatttttcatgtagaaaaggaaaaagcccagaatacaaacaccattccaggcattcttggttgtttatataaactaataaaatcaattttccaattaattaattatcccattagcagcaatctgccctggagctttgaaagctctttatactaaaggtttatctggagggctgtcatgtggtttgattatggttgcatagtaacaccgtaccaagagaatacaatttggcaatacaccttcctgctcttttacacaagctcaagt

SEQ ID NO: 90038 - DNA, 600 bp, Chicken  19866894397509_1
acattttttcctatctcattcagctgactgagcaaatcctagcacaacagaccatgttatagcattgcatgacttcactcaaaagcaagttcattgtttttctgctgtagttctccctttattagtcctaccttacttgtactgatgggtgttcctgccaaagaatgaaacgctctcttttttttttggaattttaaaccaacaagctatcatcagacccaggagtctcccaattaagctgtgcttttgtgcctcagcaaacagattggaatcaaatctttatgatatacataggttgtkctgaaaataatgcctctaatttatttccatggaaactgaaacagatacaaagagcaaattcacagctacaaaacactatttttcaacataatcaccaccgataacgacgcatttttaccagcaacaagagcctgcttgcctcactcataagaatctgccccagaagaagcaacccactgtttcacagctgctatgagatatcactgctaggaaaatgttgcccatacagctttcactgtgtttgcacrctgcttggtctccagaaacattcagcaagcatcagtgaatgtcagtatgtgc

SEQ ID NO: 90039 - DNA, 592 bp, Chicken  19866894397509_2
gtgcctcagcaaacagattggaatcaaatctttatgatatacataggttgtkctgaaaataatgcctctaatttatttccatggaaactgaaacagatacaaagagcaaattcacagctacaaaacactatttttcaacataatcaccaccgataacgacgcatttttaccagcaacaagagcctgcttgcctcactcataagaatctgccccagaagaagcaacccactgtttcacagctgctatgagatatcactgctaggaaaatgttgcccatacagctttcactgtgtttgcacrctgcttggtctccagaaacattcagcaagcatcagtgaatgtcagtatgtgctattttttccttcatgaaggaattcaatggtacaccttagtttcatacacagttccatcacagatgctattttgtcagactgttgcatggcaataagatgtaatggaatatggttggaaaggttcagcctctactgtcataccaccagcatctctctataaaaatgtgggccaatgtaaaataggaagcattaatttcatagcggccctcacacttccatttcccttaaatcccttagtt

SEQ ID NO: 90040 - DNA, 517 bp, Chicken  19866894397510_1
aggtggagattcagcacagatgtttcctaacacagtggagctggctgtacgtttctagtcagcattcacctttcccactgagctgaacacctcctctgcctgctgtcaatgccaggtacctccttcccagcgcatcactctctcatgttacaaagacacgccagttctaatttacagcatttgcaaaagagctcttctgcctgcctgtgggcagcagtgctgatgtgttaggctcttattaggaaggtgtcagcttgtcaccctccctgagatgacagttttcactgtgttgctgagacraagaccccttgaagaaatcttcctccaattttgtaaaatctgtgtgcatgaaaatagaatcaatgctgaaatcctatctgctcagccatgttacacgcgctcgaggcttgagtatcctcagcaggatgttaggtaattattttgttttaggaaagtgttgagagactcactgtagatgtatgcaacctttccttgggggacttccgatacacgtaaa

SEQ ID NO: 90041 - DNA, 600 bp, Chicken  19866894397511_1
atgtattttttgagggtcagacttacctgagattaattcatgcagttccattgcattagttgtaaccagatgaagtttcatgagctgtggcctaatatcaacaggaaacatgctaaacataaatgcaccgcacaaagtgacaataacaaatgactttttcctctatgttatagagtgctattacaacttgaggtaaaattgttcagaaagaaggaataaggaaggataacaaatattcaatctattaacgatcctacatggaatatgatattgccaattaaaagcagatggtaaaaaaawttctaagtaaaatacttactttcactgaataaaataaacctgtattaaatgttacactagaagttatgttaaatcaacacaaaatagacttttcagtgctatttactaacaagtatacaatttaggtgtttraggaaccacaggaggttactactgattagtaatcawgggttgttatctcagaaagagaattattgtgacaaaaatgtttgtgcttacactgaactgtcattatttaaaagaaaagattacttaatatgctgattttaaatatcttgagaaaaaacatcagtgtcctaa

SEQ ID NO: 90042 - DNA, 600 bp, Chicken  19866894397511_2
caaagtgacaataacaaatgactttttcctctatgttatagagtgctattacaacttgaggtaaaattgttcagaaagaaggaataaggaaggataacaaatattcaatctattaacgatcctacatggaatatgatattgccaattaaaagcagatggtaaaaaaawttctaagtaaaatacttactttcactgaataaaataaacctgtattaaatgttacactagaagttatgttaaatcaacacaaaatagacttttcagtgctatttactaacaagtatacaatttaggtgtttraggaaccacaggaggttactactgattagtaatcawgggttgttatctcagaaagagaattattgtgacaaaaatgtttgtgcttacactgaactgtcattatttaaaagaaaagattacttaatatgctgattttaaatatcttgagaaaaaacatcagtgtcctaagtgctgactactggttcatatcatctgatgatgcacatgcacattttaacagtagtaaagacagacaaaaatatgttatatattttccacgtcataggaaggcaagcaggcaaaatcacttcattttgccac

SEQ ID NO: 90043 - DNA, 600 bp, Chicken  19866894397511_3
tatagagtgctattacaacttgaggtaaaattgttcagaaagaaggaataaggaaggataacaaatattcaatctattaacgatcctacatggaatatgatattgccaattaaaagcagatggtaaaaaaawttctaagtaaaatacttactttcactgaataaaataaacctgtattaaatgttacactagaagttatgttaaatcaacacaaaatagacttttcagtgctatttactaacaagtatacaatttaggtgtttraggaaccacaggaggttactactgattagtaatcawgggttgttatctcagaaagagaattattgtgacaaaaatgtttgtgcttacactgaactgtcattatttaaaagaaaagattacttaatatgctgattttaaatatcttgagaaaaaacatcagtgtcctaagtgctgactactggttcatatcatctgatgatgcacatgcacattttaacagtagtaaagacagacaaaaatatgttatatattttccacgtcataggaaggcaagcaggcaaaatcacttcattttgccacaaagggctgaatttcctaaccctttatatttcatca

SEQ ID NO: 90044 - DNA, 600 bp, Chicken  19866894397517_1
catggtactatctctgaactgtaaaaatatttttcccattttatagatgagactggaatgaagccagatttaccatctattcattcatattacaggatacaatgaaacctcagggctaaataaaagcagtacatcttgaaaagcaatattaccacaagttcagacagcagacaaaaatactgttcacatttgtctgaggagaattttgagcatgacaatattgtaaagaactgaactcaacagcagcctaaatctagcaaaaaatcagatcaacactaggtaacctcttactgcaatttycagtgtcggtatgctggtaaggaaatttcacaaatgtgttcaacattttgctaagtttctcaggataaaccagcaaggcagttcgtttcagctgcaagaggaagttgtcgtatctttaggccataaccttcactcttgtagactacacaaaagatttcctacaacagaccttacctaaccttctttgatgtagccagaagacatacgtcactagacgatgcacagcacttcttgtttctactactccaaggttacttagtccatggcttatgcgatcaaagagatgaataagccacacat

SEQ ID NO: 90045 - DNA, 560 bp, Chicken  19866894397517_2
cagctgcaagaggaagttgtcgtatctttaggccataaccttcactcttgtagactacacaaaagatttcctacaacagaccttacctaaccttctttgatgtagccagaagacatacgtcactagacgatgcacagcacttcttgtttctactactccaaggttacttagtccatggcttatgcgatcaaagagatgaataagccacacattataacaaaggaaagaaatgttaagcttctaaaactgctgcctatttccctttctaagggttgcacctgccacatcaagactagtttytagacttggagatcaatatgaaaactgaagatttttttattcagtctccccttggacacaaagcagcaaatagccataaaaaaaaacagactaattatgatatatcggtgtgctaatacacaaagtcaaaataatgataatgaacgctattgataatacttatatattaccatctgcttaagacaaagagctcagcagtacttattacacagtaaagtaggagaacagcaatgagcatcaataaaatcatctcaaaagca

SEQ ID NO: 90046 - DNA, 600 bp, Chicken  19866894397521_1
aaccactccactcttggccagggactattttcatgtgattatccttacaccctgcagaacctctattgaccaagtgttctaggcagatgctcagataaatactctccagctcagtccggcaatgtgtgaacaagtgacacaagcatgacattccttggtttctgtgtctgccagcaggatcccaggacatcaccaccaagttataaaattaaccagattaaaatacctgtgcataattatggaatcacagcagtccattcatggagaatgttataaggactgttgattgatggacaagaygctctacaggcaatcaggcaaagtaagaggagaagtcatatagcctcatttcccatgcaaattsagtttcagagatttcagttttctaaatgaaaagactgatttcaacaacaayagcaaaagatgttgcactccatgaaataccatgcgttagatagagagatggcattctacccgaagaacactgaattttcaccagcctttgcaggcatactgctttcaacatgccgaagagttaaatgcagaatgacactatccttttcttgtgtctcaggccatcttacctcactggccccctgt

SEQ ID NO: 90047 - DNA, 600 bp, Chicken  19866894397521_2
attgaccaagtgttctaggcagatgctcagataaatactctccagctcagtccggcaatgtgtgaacaagtgacacaagcatgacattccttggtttctgtgtctgccagcaggatcccaggacatcaccaccaagttataaaattaaccagattaaaatacctgtgcataattatggaatcacagcagtccattcatggagaatgttataaggactgttgattgatggacaagaygctctacaggcaatcaggcaaagtaagaggagaagtcatatagcctcatttcccatgcaaattsagtttcagagatttcagttttctaaatgaaaagactgatttcaacaacaayagcaaaagatgttgcactccatgaaataccatgcgttagatagagagatggcattctacccgaagaacactgaattttcaccagcctttgcaggcatactgctttcaacatgccgaagagttaaatgcagaatgacactatccttttcttgtgtctcaggccatcttacctcactggccccctgtctctggaaatacactgaaaacctaccttaagttaaactgaaggagtttggctgggctctatggg

SEQ ID NO: 90048 - DNA, 600 bp, Chicken  19866894397521_3
ccggcaatgtgtgaacaagtgacacaagcatgacattccttggtttctgtgtctgccagcaggatcccaggacatcaccaccaagttataaaattaaccagattaaaatacctgtgcataattatggaatcacagcagtccattcatggagaatgttataaggactgttgattgatggacaagaygctctacaggcaatcaggcaaagtaagaggagaagtcatatagcctcatttcccatgcaaattsagtttcagagatttcagttttctaaatgaaaagactgatttcaacaacaayagcaaaagatgttgcactccatgaaataccatgcgttagatagagagatggcattctacccgaagaacactgaattttcaccagcctttgcaggcatactgctttcaacatgccgaagagttaaatgcagaatgacactatccttttcttgtgtctcaggccatcttacctcactggccccctgtctctggaaatacactgaaaacctaccttaagttaaactgaaggagtttggctgggctctatgggtcctaaaagttgagagcttaggtagtacacagagggatgaaatagtacagt

SEQ ID NO: 90049 - DNA, 599 bp, Chicken  19866894397535_1
  misc_feature (1)..(21): n is any nucleotide
nnnnnnnnnnnnnnnnnnnnnatgatatttaaagagcaaacgcaaccggaaaagaatttgcacaaattacttctaggaaatcccagtcctcaaactccaatactcagtgtgacacatttacctggtttacaaataaaaagactactctttatcatcaccataaatggtaggcctttaaatttagtgtggtatccataaatgagtccaggtcctttagtttttgtcagcaataatatataataaaggatacccacagttactatcacttccaatgaaaaaacacgctgaatatgaatatayatctaaagataacacactaacacatgcagcccttgaaatggaaaacagttaacagtactttctatgaagcatgagacagaacagcatctagttaattcaactatgcgcaacataaacatatatatattatatatacatacatgcatatatataaaataccattagaaggagtgtattattaaaagagtgtattagaaagagtgtatccccctgcataatatttctcctttataaagttcacrttgcattacaacaaatctttgtttattccaggctattccatgacgctacaatgactt

SEQ ID NO: 90050 - DNA, 600 bp, Chicken  19866894397535_2
aaggatacccacagttactatcacttccaatgaaaaaacacgctgaatatgaatatayatctaaagataacacactaacacatgcagcccttgaaatggaaaacagttaacagtactttctatgaagcatgagacagaacagcatctagttaattcaactatgcgcaacataaacatatatatattatatatacatacatgcatatatataaaataccattagaaggagtgtattattaaaagagtgtattagaaagagtgtatccccctgcataatatttctcctttataaagttcacrttgcattacaacaaatctttgtttattccaggctattccatgacgctacaatgacttagcccaataagccagtagtagagttctgaattaaactctgatgagttacagttcattattctatccattggactcccaataaaatatatttttttatttgtatgcactgctttccagaatacacttacaattgcaatttgttagcttacaagcaccaaggaagtgagaaccaccagcaattacagggattatctggaggctatctgctatgagagaggtggacagaaatgtgaaggaatatta

SEQ ID NO: 90051 - DNA, 599 bp, Chicken  19866894397545_1
  misc_feature (1)..(58): n is any nucleotide
nnnnnnnnnnnnnnnnnnnnnnnnnnnnnnnnnnnnnnnnnnnnnnnnnnnnnnnnnntggaaaaatgggaagaacacaggaccacattctcttcttctgtatcaaactaagggaggtcgctgaatgactattttgttctttcctgtctcattccctttttgaacagcattttaacctactattcttgaacagtaagttgtagacagtgttgatctatcctttctccctagtcctttacagtttttttaattgcccagttggcattccctttcctctctcagcttctaacttagaattcstttccatctcaaaaatatgcgtaaggtaggtttttttttttttcattgacaatcaataactcagtctgtccacatgacttatgtactaagaactgaatttaccatagagataatctgcttctagattaaccttccactttcctggtagttcccattcctctcttttagtaagtgcaactcccagattgtagatctggaagaagaagatgaaaagccggtattacatatattattatatactgtcatttttcacgagaacttctttccaattacattagttaccatcttttttttgctac

SEQ ID NO: 90052 - DNA, 600 bp, Chicken  19866894397554_1
actaacagattaaaatagtttaagagaccaggatccaataagcgactgcttatctctgcttatacattcgttcagccttttcccaggtatatgcagtcacagaggaaaagagtgtttacttgttgctatgtattttgatacagtattcgtagggaacatgcctctgatttatctccttgttcctcgatcacctcttgtgaggagaggttttagtaacttgtgccccctctgctggctggctttctaattgccgagtaagaatactagataacatagatgagatacttaatctctaacagrctattttggccaaacatcaatttatagggaagtcactgtatgggagtagaagtacaataaaaactaatgtagtcctaatgtgtgggaatcgggagtggtgttggaagttggtgttttcttcttagtgtgcgtttgttatgtgggcaatcaaaactcctttggcaaaccttttgctttccyacatccctctgtcagacacgttgatgctttcagctactgtatgtctgctactattaattatgtttctgatatacttttacatcaggatgtggaactctttttttkggggggtgtattaaa

SEQ ID NO: 90053 - DNA, 600 bp, Chicken  19866894397554_2
tcctcgatcacctcttgtgaggagaggttttagtaacttgtgccccctctgctggctggctttctaattgccgagtaagaatactagataacatagatgagatacttaatctctaacagrctattttggccaaacatcaatttatagggaagtcactgtatgggagtagaagtacaataaaaactaatgtagtcctaatgtgtgggaatcgggagtggtgttggaagttggtgttttcttcttagtgtgcgtttgttatgtgggcaatcaaaactcctttggcaaaccttttgctttccyacatccctctgtcagacacgttgatgctttcagctactgtatgtctgctactattaattatgtttctgatatacttttacatcaggatgtggaactctttttttkggggggtgtattaaagagtctctaaaatgaccttcaaggatctgattattttacttgtattcttcctgaaccctgtacttaagggtgaggtggtctgcccagctgcctagcttcagggcaaggtagagcataaatcctcctgtcttggatactgtaggaataagaaagattttaatgttttaacagaagatggat

SEQ ID NO: 90054 - DNA, 600 bp, Chicken  19866894397554_3
ttaatctctaacagrctattttggccaaacatcaatttatagggaagtcactgtatgggagtagaagtacaataaaaactaatgtagtcctaatgtgtgggaatcgggagtggtgttggaagttggtgttttcttcttagtgtgcgtttgttatgtgggcaatcaaaactcctttggcaaaccttttgctttccyacatccctctgtcagacacgttgatgctttcagctactgtatgtctgctactattaattatgtttctgatatacttttacatcaggatgtggaactctttttttkggggggtgtattaaagagtctctaaaatgaccttcaaggatctgattattttacttgtattcttcctgaaccctgtacttaagggtgaggtggtctgcccagctgcctagcttcagggcaaggtagagcataaatcctcctgtcttggatactgtaggaataagaaagattttaatgttttaacagaagatggatgtccatactgcagatgcttatgtagactataaactagagttaatggtaagaatttatcctcttctttgtgtccctttcagaaaaacgctgagcacttttctggtg

SEQ ID NO: 90055 - DNA, 599 bp, Chicken  19866894397567_1
  misc_feature (1)..(5): n is any nucleotide
nnnnnttttcttatggtatgcacagtcttacactcactgtgtaatatcagtgtcctcaggctagcaaagttcttgtgactgagcaaagtcacctcccacagccacttctgtgtcccataagaaaacaggtccttccttccctgcaaaaaggcagggaacgtaagttacaggatttattttgttggagattcttagggctgcctacacagttattttgaaaatgtggtatagcagcctaactatgagaagcagcgactttccacctttagctgctaagttaactgaagtgttcctgcaagraaacgtgtacttcatgccacaggaataaacatacgtattgtagacttcatgggaacgtagactcagtgcatgtatttgagcattagtcttagaatcatagaatagtttgagttggaagagacctttaaaggtcatctagtctgtctcccctgcaatgaacagggatatgcatctatagctaaatcagggtgctctgagccctgtccatcctgtccttggatgtctctggggatggggcatccaccacctctctgggtggactgttaaggacaagctgctgataccattttaaaaagcct

SEQ ID NO: 90056 - DNA, 600 bp, Chicken  19866894397570_1
aaacgccatctggtcaaactctctgcagtcaatagggacacccacagctagatcaggtgctcagagccccaaccagcctgaccttgagtgtctccagggactccatcatctctttgggcaacctgttcctcaccacccttattgtaaaaaccttttttcctatattcagtctaaatctcccctgttttatttcaaaatgtttctccttgtcttatcacaacctatcacacaaagaaaagggggacagaccctgctaaagagtctgtccccttctttcttacagcctgcttctcacacctrtgtctttatgtttcagttgacaatgacccacatttcatcatatacctgcccaagagccagaggaacatctgctttaatatcaactcagatcctggacatatcctaaacttggtttctgatcctagtactggtaagggaatataaagtacagtttacattacagcatgattttccttccctcaggcctgagaggtgttgaaagaaagaagatgaagtgtctgaaaggaggatgcatgatgacctgaatgtggcagcaggtggagggaagtggttatttccctccacatctggagtactatg

SEQ ID NO: 90057 - DNA, 511 bp, Chicken  19866894397583_1
  misc_feature (1)..(162): n is any nucleotide
nnnnnnnnnnnnnnnnnnnnnnnnnnnnnnnnnnnnnnnnnnnnnnnnnnnnnnnnnnnnnnnnnnnnnnnnnnnnnnnnnnnnnnnnnnnnnnnnnnnnnnnnnnnnnnnnnnnnnnnnnnnnnnnnnnnnnnnnnnnnnnnnnnnnnnnnnnnnnnnnnncccgtctcgccctgccctgccatgccttgccccgtctcgcctagcctagcccctccccgccccgccccagcttgcctagcttcgccttgccccgcctcgccccgccttgcctcactttgcctggccgcgccaggcccygccaggccccgcctcacttcccctcgccctgccccacctcacctcgccctgccttgccccgacccgccttgcttccccttgcctcaccccgcttcgccagccataactcgcctcgccccacctcgccccgcctcaccctgcaacgcctagcctcgccccaccttgccccgccccgccccacctcgcctcgccccgcctcgcctcgccttgc

SEQ ID NO: 90058 - DNA, 600 bp, Chicken  19866894397584_1
aattatcattcttgtttctaaagaaagatttcatggatcaactcttgcatgctgtttgtatgcaagtttcctacattttgcattgctgaataattgagaacattagctcccaaaccatgaaaaattcagttcaacatgatgtattattaatcaatttaatttaaagtgatctgaaaagctccactttcagttatggtgcttggagatacctttagacagtggtttggtttgtgttttagcactttgtgtaactctttcccatctgatacacttaaactaggtcatactgcacaaacatgstaatggataaaatggataaaagaaccacttgacataatttatttggatttcaaaatccttttgacagagtcctacatagaaaatcacttcaaatttaagtagatggggaacaaattatttgaaatgataaaaaawttctcagcagacagagaataytgcatattattattattatactatwggaatacattactgtgccacaaagtttcagctagtctttyagttaatgtttactaataatttaccaaaaaataaactgtaaaaaatcaattttgaaaatccaattactattctagttaa

SEQ ID NO: 90059 - DNA, 557 bp, Chicken  19866894397584_2
atgatgtattattaatcaatttaatttaaagtgatctgaaaagctccactttcagttatggtgcttggagatacctttagacagtggtttggtttgtgttttagcactttgtgtaactctttcccatctgatacacttaaactaggtcatactgcacaaacatgstaatggataaaatggataaaagaaccacttgacataatttatttggatttcaaaatccttttgacagagtcctacatagaaaatcacttcaaatttaagtagatggggaacaaattatttgaaatgataaaaaawttctcagcagacagagaataytgcatattattattattatactatwggaatacattactgtgccacaaagtttcagctagtctttyagttaatgtttactaataatttaccaaaaaataaactgtaaaaaatcaattttgaaaatccaattactattctagttaaaaaaataattatctgggaaataaaagggcttatttatatcatttaaatatttatttaccttgttttaactcactatgcttttatggacattt

SEQ ID NO: 90060 - DNA, 536 bp, Chicken  19866894397584_3
taatttaaagtgatctgaaaagctccactttcagttatggtgcttggagatacctttagacagtggtttggtttgtgttttagcactttgtgtaactctttcccatctgatacacttaaactaggtcatactgcacaaacatgstaatggataaaatggataaaagaaccacttgacataatttatttggatttcaaaatccttttgacagagtcctacatagaaaatcacttcaaatttaagtagatggggaacaaattatttgaaatgataaaaaawttctcagcagacagagaataytgcatattattattattatactatwggaatacattactgtgccacaaagtttcagctagtctttyagttaatgtttactaataatttaccaaaaaataaactgtaaaaaatcaattttgaaaatccaattactattctagttaaaaaaataattatctgggaaataaaagggcttatttatatcatttaaatatttatttaccttgttttaactcactatgcttttatggacattt

SEQ ID NO: 90061 - DNA, 511 bp, Chicken  19866894397584_4
cactttcagttatggtgcttggagatacctttagacagtggtttggtttgtgttttagcactttgtgtaactctttcccatctgatacacttaaactaggtcatactgcacaaacatgstaatggataaaatggataaaagaaccacttgacataatttatttggatttcaaaatccttttgacagagtcctacatagaaaatcacttcaaatttaagtagatggggaacaaattatttgaaatgataaaaaawttctcagcagacagagaataytgcatattattattattatactatwggaatacattactgtgccacaaagtttcagctagtctttyagttaatgtttactaataatttaccaaaaaataaactgtaaaaaatcaattttgaaaatccaattactattctagttaaaaaaataattatctgggaaataaaagggcttatttatatcatttaaatatttatttaccttgttttaactcactatgcttttatggacattt

SEQ ID NO: 90062 - DNA, 471 bp, Chicken  19866894397584_5
gtttggtttgtgttttagcactttgtgtaactctttcccatctgatacacttaaactaggtcatactgcacaaacatgstaatggataaaatggataaaagaaccacttgacataatttatttggatttcaaaatccttttgacagagtcctacatagaaaatcacttcaaatttaagtagatggggaacaaattatttgaaatgataaaaaawttctcagcagacagagaataytgcatattattattattatactatwggaatacattactgtgccacaaagtttcagctagtctttyagttaatgtttactaataatttaccaaaaaataaactgtaaaaaatcaattttgaaaatccaattactattctagttaaaaaaataattatctgggaaataaaagggcttatttatatcatttaaatatttatttaccttgttttaactcactatgcttttatggacattt

SEQ ID NO: 90063 - DNA, 599 bp, Chicken  19866894397601_1
  misc_feature (1)..(199): n is any nucleotide
nnnnnnnnnnnnnnnnnnnnnnnnnnnnnnnnnnnnnnnnnnnnnnnnnnnnnnnnnnnnnnnnnnnnnnnnnnnnnnnnnnnnnnnnnnnnnnnnnnnnnnnnnnnnnnnnnnnnnnnnnnnnnnnnnnnnnnnnnnnnnnnnnnnnnnnnnnnnnnnnnnnnnnnnnnnnnnnnnnnnnnnnnnnnnnnnnnnnnnnactgttgctaagtgttgcatttaaatctgataaggatgtgtttgagcctagcaaagggaagctttgcttgatagtcctcatataagaagtcacaaaactgrgttgtggaaggaaagcaagccttaccagtgctccttattttctttagatactttatgagtttgcctcatagtgcaaatgttggctgttactctgcaagagaagaaataaaagcaaaacgagttaacggctgaacggcacttgaaagaataacacaacaaaagaacagaaaaaaaagatgaagaaacaacaacagaacatgaaatacaggagaaaaaaaaaatcaaaagccaaagtgtaccacacctagcaaaaaatctctccttcaagtgcaatgctaaaatgcagtgagctcgtcagg

SEQ ID NO: 90064 - DNA, 600 bp, Chicken  19866894397607_1
ctttgataactttgcaaagcagctccagaatctcattcctttggttgacaggaaattcccagctccctgccttgccttatgcagggctatttcctattttgttctgtgcccaaatcaattttcccatttcttatagtgttattttccttctcctatagatttgcagagattttctgtttgcatctgtccttcagacaaagaactgacgtgcctctgcacataattccacagttcattttcttgaaaatggggattatttcagataaggtcttatgaaagtctgtctgcattaatacttcygtctctaaaaaggcatcctaaaagaatgcttttycaagctgcattcaacagtggcttatttatattacagaccaagacaccacaaacttcctcctctggctgcccatatagttgtggatgcctggagacacccaaggtcaggctggatggggctctgagcacctggtggagctgtggatgctcctgttcattgcaggagaatgggaccagatggcctttaagggacccttccaactcaaaccattctatggttttgaatctcaaagagccaggcactggcactgccgccagctcacatag

SEQ ID NO: 90065 - DNA, 600 bp, Chicken  19866894397607_2
attcctttggttgacaggaaattcccagctccctgccttgccttatgcagggctatttcctattttgttctgtgcccaaatcaattttcccatttcttatagtgttattttccttctcctatagatttgcagagattttctgtttgcatctgtccttcagacaaagaactgacgtgcctctgcacataattccacagttcattttcttgaaaatggggattatttcagataaggtcttatgaaagtctgtctgcattaatacttcygtctctaaaaaggcatcctaaaagaatgcttttycaagctgcattcaacagtggcttatttatattacagaccaagacaccacaaacttcctcctctggctgcccatatagttgtggatgcctggagacacccaaggtcaggctggatggggctctgagcacctggtggagctgtggatgctcctgttcattgcaggagaatgggaccagatggcctttaagggacccttccaactcaaaccattctatggttttgaatctcaaagagccaggcactggcactgccgccagctcacatagctggaagccaacagagtactgtttgcacaggcag

SEQ ID NO: 90066 - DNA, 600 bp, Chicken  19866894397612_1
ttcttgtatttttccatgtattaccaaaagatgagcttcagatgttgcagtggtgaaatggcatttgcctgagtcaccaaacagcctgaatcagtaaagctgaaacttaaaatagttactttattaactacaaagcattgattacagcactcatgaatgaaactaggagaaagaagcagttgtttatacatggagaacaaagaacactattttccctcccaagtattacttgggtatcacagcacataatctaatgcttttatctaggactgaagagaaccacagcaatgcagagacacrcacaccagtgtagtatttgaagttggcagtcagtggatatcagtcaacaacattgtcatcatttcacatggttgtgcatccttctgcaacagattttttttagtgtttcagaaaaactgagtttgttgctgctgtgctaattcactttatcatagaactctgctagttgtacaatgtgctggatgtcaaaacgtttgtcagtatagtaagagccacatcttaagtctagtttcaatctatacgcaaggacaatctcacctttaactagtcttttccttcaaagcatatgaaaaaaaaaaa

SEQ ID NO: 90067 - DNA, 600 bp, Chicken  19866894397613_1
gagtccagtggaaggccacaaaggtgattaagggcctgtagcatctcccttatgaggaaaggctgagagacctggagaacgctgaggagggggatctcatcactttttataaacatctaaagtagacaaggctcttgtcgatagtgtgcagtaacagaagaaggggcaaagagcagaaactggaacacaggaaattccatactaacataaggaagatttccttttttttactgagactgtcagagcactgaatcaggctacccagagaggctgtggagtctccttctctagagatattcraagtctatctggacactttcctatataacctactctatggaaccttctttagcaggagtattggacttgacgatttgcaggggttccttccaacccctacaattctgtgattctgtgatttgtaggtgcttataaatagtactggtaatggtaaccattgtgtctgcaactgggagaacttccatgtagaggaagcatcaaccagttacacactaaagatgcatatgaaaacatggttgcatttttcacttgcagtaaaagacctttttttcctaaagtagtattaattataatacaaac

SEQ ID NO: 90068 - DNA, 600 bp, Chicken  19866894397615_1
gttccagttaaactttttaaacaatcttgatttttcactgttgtgttcatgctacttgagtgtttctcgtatgaaaccagaaggtcctttcttccttgcatccctgccccccttctctgctcttagaacgttttaatttctttctgaaaaagaagagaaaggaaaacataattctacctttccccaggtgccccctcctcatactgaacgatttgtgaataaagaggaaagaacggtcctgagttttgttttggctgtttcagagtctctggttggaagttgggctcacatgaacagagstttttttctggtgggtaatttttgtgtattagtcactgtggtgaggagcttcctgttcttttttgtcctttcccagaggtacacgtttatgtggggacgcttcccactcctgcctgtcctttgtgatgctttcatctgcatttctctgctaaccagtgttctctgactcaggatggagccrggctgggccacgtggagctgccagggctgctctcagctccaacaggaggagtccctggggctgtccttgtgggctgcatgcctggctgcgtctgccccggcaggtttggaggatccttc

SEQ ID NO: 90069 - DNA, 600 bp, Chicken  19866894397615_2
ccccaggtgccccctcctcatactgaacgatttgtgaataaagaggaaagaacggtcctgagttttgttttggctgtttcagagtctctggttggaagttgggctcacatgaacagagstttttttctggtgggtaatttttgtgtattagtcactgtggtgaggagcttcctgttcttttttgtcctttcccagaggtacacgtttatgtggggacgcttcccactcctgcctgtcctttgtgatgctttcatctgcatttctctgctaaccagtgttctctgactcaggatggagccrggctgggccacgtggagctgccagggctgctctcagctccaacaggaggagtccctggggctgtccttgtgggctgcatgcctggctgcgtctgccccggcaggtttggaggatccttctcactcaacgtttattgtaacactgaacttttgaagttgtattcagtaattttgtatcgtcatcaaattaacgatctgggaagtggaggatgaggacgctggggaatggtgcagatttctggagagttctcctgacgaacagtttccacatggaaaacttagcagttgctcctggctgcct

SEQ ID NO: 90070 - DNA, 600 bp, Chicken  19866894397615_3
aatctgctgttgtggatggggtttttttgtctttttttttttccccacattcctttccttggagtgaggtgtaatagcttcaggcccgttggctggtgtgacagagcagccttacaagcactctttgaaccaggacttccttctgttgcaggtcattctccagctgtactgtgaagcaggaggatgtggtgtctcaccgtgaccgttccctgcctgcataagggttacagatgacccattagagcgcttgctgctgtcacagcttcactgatgtacagcttcccctcattgctttccaayctrctgggcagttggtaatttttttatagtgctagaattgtaatcggaacggggagaacataatctgtagggcttcggtgcaagtaggagttcatttccacgtatgctggagcctactatacaagaacacggtcgcttcagggaagagatgatacatactgcagatgagcgaggaattgttccagtgcagggaggatgctttaagaggccgtggtgtgtttgtgtgcaggtgtatttccagcctggtcctgagcggttggcactggccctgctgcctctgcgagcacagctctgagtcgt

SEQ ID NO: 90071 - DNA, 600 bp, Chicken  19866894397615_4
ctgctgttgtggatggggtttttttgtctttttttttttccccacattcctttccttggagtgaggtgtaatagcttcaggcccgttggctggtgtgacagagcagccttacaagcactctttgaaccaggacttccttctgttgcaggtcattctccagctgtactgtgaagcaggaggatgtggtgtctcaccgtgaccgttccctgcctgcataagggttacagatgacccattagagcgcttgctgctgtcacagcttcactgatgtacagcttcccctcattgctttccaayctrctgggcagttggtaatttttttatagtgctagaattgtaatcggaacggggagaacataatctgtagggcttcggtgcaagtaggagttcatttccacgtatgctggagcctactatacaagaacacggtcgcttcagggaagagatgatacatactgcagatgagcgaggaattgttccagtgcagggaggatgctttaagaggccgtggtgtgtttgtgtgcaggtgtatttccagcctggtcctgagcggttggcactggccctgctgcctctgcgagcacagctctgagtcgtgtt

SEQ ID NO: 90072 - DNA, 600 bp, Chicken  19866894397627_1
gacacaaacctggtagagaagcagcaagctgcaataagcttcctgtgtaggcaccacagtttgagttcagctcctttcaagccaggggagcagaatggaaccagggacacacatcaaggtcccagggcacagctgccatggctgtgtggtggcagttctgctttctgtgaatcttccagaagcttcttcacacacgggctgctgagggacctttatacatagagcatgctgcccacatatctccattttggtggtgcaacagctgtctatttgtcagtcatgctctaatctgatccttcygattactgctatttgctttacggataggtctgcaagctgctggctgtgatgataacgtgttaccctgtgctgtcctgcggacaaagcagtgagggcagggtgatgaaggggccctctgccctctgcttgttctccctgctcccacctccatcccttccttccccatctgacctacaaagattggtcagacacaaaggataggaatgcacttttccactgctgctatacaggctccctttacagacatacaaagcagaaaaagtcctttaaatacatcaccatggaagtggggagaagaaa

SEQ ID NO: 90073 - DNA, 600 bp, Chicken  19866894397628_1
acaactatcctttttttaaaaaacttcagggatggtgactccatcacctccctgggtagcctgttccaatgcctcagatgtggtactggatacctccaattcctgaaatgacaagatttccgctcttaaagactgttccatggcctgagaaatgcaacagtacaaagtgtgacctaatattcaaactaggcttcccaccccctcaattttatcccattacttctaattaatcccctttacagcaactgctctttcttcctggcatatataattgctgattgttgccacagggctaattcycttccacatacggttggtgtaaatctgttctataggagtgtcagagcattgggaagtttaagttttgtcttacttaattccacggagaaaagattgcaaaactacctagaagttgtccaattagcagtgagagaacaaagaagccctggatggagcactggcatcatggtgtaatatagatggcaactcccatctacttataagcatggcaccactttggtatatcggcattttctccttccagaccctccacagtacactgacccctactatttgcaggtcgtttcagtcccataaatg

SEQ ID NO: 90074 - DNA, 600 bp, Chicken  19866894397629_1
tgaacgattaatgaaaaggtcaataagattcctctacagaagcatcgttcattacaaggcccattgcttatgcaatcttgctgcattcatcttccctaacaagcaaaagggccagagattgtagcttcttaaaccttcttgtgagctcctaatgagaaatcttaattgtatgaaagccattatgatgttactcttccactccgctggcttttggatgcattgagttgcacctgggttgttgtgtggcatcagagctcatggcccaatattggtgcgtactaaatcaagggtggcaggagstggtggtaggctgggattgctgttcgtggtgcttgcmtgcagccagtctgaaacctgctgtcyrtcacccttgcatccacgttgccccaagggaaatgcatccaagctgatgggagccactcatatggctcctgtggcacgtggaagagatggaaaagattcaaagttatgaacgtcccagggtgggagagggcactgtcccatctaatgctcccacctgagcagacctctgatgtgtcagctttgctcaccaagtgctggggaagagtgtacagccctcactgccctgctgtgaccatc

SEQ ID NO: 90075 - DNA, 600 bp, Chicken  19866894397629_2
agaagcatcgttcattacaaggcccattgcttatgcaatcttgctgcattcatcttccctaacaagcaaaagggccagagattgtagcttcttaaaccttcttgtgagctcctaatgagaaatcttaattgtatgaaagccattatgatgttactcttccactccgctggcttttggatgcattgagttgcacctgggttgttgtgtggcatcagagctcatggcccaatattggtgcgtactaaatcaagggtggcaggagstggtggtaggctgggattgctgttcgtggtgcttgcmtgcagccagtctgaaacctgctgtcyrtcacccttgcatccacgttgccccaagggaaatgcatccaagctgatgggagccactcatatggctcctgtggcacgtggaagagatggaaaagattcaaagttatgaacgtcccagggtgggagagggcactgtcccatctaatgctcccacctgagcagacctctgatgtgtcagctttgctcaccaagtgctggggaagagtgtacagccctcactgccctgctgtgaccatcaagctgaagctgtgggtgatctgttctacagcagttt

SEQ ID NO: 90076 - DNA, 600 bp, Chicken  19866894397629_3
ttgcttatgcaatcttgctgcattcatcttccctaacaagcaaaagggccagagattgtagcttcttaaaccttcttgtgagctcctaatgagaaatcttaattgtatgaaagccattatgatgttactcttccactccgctggcttttggatgcattgagttgcacctgggttgttgtgtggcatcagagctcatggcccaatattggtgcgtactaaatcaagggtggcaggagstggtggtaggctgggattgctgttcgtggtgcttgcmtgcagccagtctgaaacctgctgtcyrtcacccttgcatccacgttgccccaagggaaatgcatccaagctgatgggagccactcatatggctcctgtggcacgtggaagagatggaaaagattcaaagttatgaacgtcccagggtgggagagggcactgtcccatctaatgctcccacctgagcagacctctgatgtgtcagctttgctcaccaagtgctggggaagagtgtacagccctcactgccctgctgtgaccatcaagctgaagctgtgggtgatctgttctacagcagtttccaaggcaggcagttagctccagtga

SEQ ID NO: 90077 - DNA, 599 bp, Chicken  19866894397629_4
tgcttatgcaatcttgctgcattcatcttccctaacaagcaaaagggccagagattgtagcttcttaaaccttcttgtgagctcctaatgagaaatcttaattgtatgaaagccattatgatgttactcttccactccgctggcttttggatgcattgagttgcacctgggttgttgtgtggcatcagagctcatggcccaatattggtgcgtactaaatcaagggtggcaggagstggtggtaggctgggattgctgttcgtggtgcttgcmtgcagccagtctgaaacctgctgtcyrtcacccttgcatccacgttgccccaagggaaatgcatccaagctgatgggagccactcatatggctcctgtggcacgtggaagagatggaaaagattcaaagttatgaacgtcccagggtgggagagggcactgtcccatctaatgctcccacctgagcagacctctgatgtgtcagctttgctcaccaagtgctggggaagagtgtacagccctcactgccctgctgtgaccatcaagctgaagctgtgggtgatctgttctacagcagtttccaaggcaggcagttagctccagtga

SEQ ID NO: 90078 - DNA, 600 bp, Chicken  19866894397643_1
gcagcaaaacgctgttccgaaccggcgctgcttttccccggccgggatcgcagtcccggctcccatctcccgcccagcacaacagtttgctgggccagaggggctgcaacggggggagcggctgttcccaggcgtgttgcagcccgggttgggcaccgcgggacacgggaaggggtttggagttgggaacgggaggaatggagcagaggaggtcaagcgcagtgccgacctgccggctctctcgtacagcatggccgggactgcatttctcccccggtcctcacagatgagacgaccttkctccatagctctgcacgtatggatctctgwacgcagtaatcattcccctgcctccttttgattctcccagtcaaagacctccgtgcgggtaattctcttccatctcttttataccccagcaggtgggtgcagcccggtctcctcgtgcaaagggcacacgcagccgaggaagcgccatggaagggaatgcggtccgggtgctcactgtgatgtgagaaaggaaaggaaggccacggtgggggggaggtgggaaatgtaaatgccaaagcgtttctgaagcaggtgagtgccttcaggccc

SEQ ID NO: 90079 - DNA, 600 bp, Chicken  19866894397643_2
cttttccccggccgggatcgcagtcccggctcccatctcccgcccagcacaacagtttgctgggccagaggggctgcaacggggggagcggctgttcccaggcgtgttgcagcccgggttgggcaccgcgggacacgggaaggggtttggagttgggaacgggaggaatggagcagaggaggtcaagcgcagtgccgacctgccggctctctcgtacagcatggccgggactgcatttctcccccggtcctcacagatgagacgaccttkctccatagctctgcacgtatggatctctgwacgcagtaatcattcccctgcctccttttgattctcccagtcaaagacctccgtgcgggtaattctcttccatctcttttataccccagcaggtgggtgcagcccggtctcctcgtgcaaagggcacacgcagccgaggaagcgccatggaagggaatgcggtccgggtgctcactgtgatgtgagaaaggaaaggaaggccacggtgggggggaggtgggaaatgtaaatgccaaagcgtttctgaagcaggtgagtgccttcaggccctgtgctgtaggtgggggtgggcagagggtg

SEQ ID NO: 90080 - DNA, 599 bp, Chicken  19866894397646_1
  misc_feature (1)..(188): n is any nucleotide
nnnnnnnnnnnnnnnnnnnnnnnnnnnnnnnnnnnnnnnnnnnnnnnnnnnnnnnnnnnnnnnnnnnnnnnnnnnnnnnnnnnnnnnnnnnnnnnnnnnnnnnnnnnnnnnnnnnnnnnnnnnnnnnnnnnnnnnnnnnnnnnnnnnnnnnnnnnnnnnnnnnnnnnnnnnnnnnnnnnnnnnnnnnnttctgatttgtatctgatacctctaccctgaggcttagaaaattcctttcatacctcctcagcctcctgacacccactctgattgcctcttctttgctttagcctctttccmtttcaagcaaaatgtgaaataatatttttccttcaatgtttatcctctcttttttcagctaatactgttactattgcaaactcccacactcgcttgcagcttagaacctcctattttcctatcaagacatttcagaacggtatttttgttcttatttaaaaaaatttagaakatcagaagtcctatgttcaaacattctacactttagaaaactcagaacaccaaggtcctatcactattctgaaacaaggcctttgattatagaggaaacctgaggagcacacaccttcgtgcattac

SEQ ID NO: 90081 - DNA, 599 bp, Chicken  19866894397646_2
  misc_feature (1)..(16): n is any nucleotide
nnnnnnnnnnnnnnnnttctgatttgtatctgatacctctaccctgaggcttagaaaattcctttcatacctcctcagcctcctgacacccactctgattgcctcttctttgctttagcctctttccmtttcaagcaaaatgtgaaataatatttttccttcaatgtttatcctctcttttttcagctaatactgttactattgcaaactcccacactcgcttgcagcttagaacctcctattttcctatcaagacatttcagaacggtatttttgttcttatttaaaaaaatttagaakatcagaagtcctatgttcaaacattctacactttagaaaactcagaacaccaaggtcctatcactattctgaaacaaggcctttgattatagaggaaacctgaggagcacacaccttcgtgcattacagtgcagagatctttgacctactgatgacagaacatacagactccmttttggctctctaaggagwcctaataatttcagatgcaatagtccacagttcaatttcttgctggagtggattattcacaagtagaaacaaaccttgatttaatgtttactaacttggatacatat

SEQ ID NO: 90082 - DNA, 597 bp, Chicken  19866894397646_3
tctcttttttcagctaatactgttactattgcaaactcccacactcgcttgcagcttagaacctcctattttcctatcaagacatttcagaacggtatttttgttcttatttaaaaaaatttagaakatcagaagtcctatgttcaaacattctacactttagaaaactcagaacaccaaggtcctatcactattctgaaacaaggcctttgattatagaggaaacctgaggagcacacaccttcgtgcattacagtgcagagatctttgacctactgatgacagaacatacagactccmttttggctctctaaggagwcctaataatttcagatgcaatagtccacagttcaatttcttgctggagtggattattcacaagtagaaacaaaccttgatttaatgtttactaacttggatacatatctgcattccatactggctatatcaagcttagaaattatttattcttgccagaatgcacttctatgttagcagatactactgttatatgaagcactttcattgtatgaccttcttttcattagcttaaaaaacctttccaaaacaattatatcgaggctagtatttctcatg

SEQ ID NO: 90083 - DNA, 578 bp, Chicken  19866894397646_4
ctgttactattgcaaactcccacactcgcttgcagcttagaacctcctattttcctatcaagacatttcagaacggtatttttgttcttatttaaaaaaatttagaakatcagaagtcctatgttcaaacattctacactttagaaaactcagaacaccaaggtcctatcactattctgaaacaaggcctttgattatagaggaaacctgaggagcacacaccttcgtgcattacagtgcagagatctttgacctactgatgacagaacatacagactccmttttggctctctaaggagwcctaataatttcagatgcaatagtccacagttcaatttcttgctggagtggattattcacaagtagaaacaaaccttgatttaatgtttactaacttggatacatatctgcattccatactggctatatcaagcttagaaattatttattcttgccagaatgcacttctatgttagcagatactactgttatatgaagcactttcattgtatgaccttcttttcattagcttaaaaaacctttccaaaacaattatatcgaggctagtatttctcatg

SEQ ID NO: 90084 - DNA, 599 bp, Chicken  19866894397651_1
  misc_feature (1)..(116): n is any nucleotide
nnnnnnnnnnnnnnnnnnnnnnnnnnnnnnnnnnnnnnnnnnnnnnnnnnnnnnnnnnnnnnnnnnnnnnnnnnnnnnnnnnnnnnnnnnnnnnnnnnnnnnnnnnnnnnnnnnnngatgcacgggccttgtcagtatttcctttctgatctttggatagtttggatgtgcttcaaggacctgtcaaaagacaaaacaaaaaaacgaacctccacagtagagagttctgcgtctgaaagaacactcaggtggttactgcctcattgctgagcttacacattctagaactttgaataccaygctaagttccttgcaagaatgcagaaatatctgtaattagagactacagagttggtcaagatcaacttcagacattgcttccctttcctaccacactgtaaccttactggcaaaaatgcaagggtcgagggctaaagcctctaggtggtttgagatgtgcacattcagaacagcagcttctaaagacattcccaaggtttcaagtgtactttctctgcaacaataaactgctcttatgtcttcagtacttcagggtcttccttactatccctatcttcttgccctgcaattccctcctc

SEQ ID NO: 90085 - DNA, 374 bp, Chicken  19866894397665_1
gaattaggaaattgctttataatctgtcttttgtctgctgtacttagagctagtaaaaatttctggacaaattatctcagggaaaaaaatctcttgcttgaaaaatacggaatttagcaaaacatactgctgaaattttcattttctcctctccctctttctaactggcaaaatgtgtgcaaaagtagatgagtaggaaattaataaccatgtcttctaaatcaaactaatcaagtttaatcaatctttgtatagaacaaaactgatctttaaatataagaaaaagtagccattaaatcyatgtcctacttttgagttttttttaaccaattgtggagtggctgccattgagaacatggcatgactctgttctg

SEQ ID NO: 90086 - DNA, 600 bp, Chicken  19866894397667_1
tctgaaggatcagagccatcctgactcttctttctgactcctttatgtagttaatggttgacttcacacttgctcccattatcttacagcttctttttcctgaaagtttagtcataatgggtaaaaatcaaaccaaaggaaaaacctcacaccctacagcttctgtgtcattgccataattcatttgatgttgtcatctttgtcgtcttttcattagagcttcaccagtagagtgacagcgaatagctgtcattttttggtggctatttggatatggcatatgaattccttctttcagcycagttcatggaactgttaacaggargcttttgtgatcttacccaaaacaatgtcattttgtgtggcagcatatagaatctcccttcccccatcccctggtgggttaagtcacaagctagcaaaaagtcatagaggctatgaattcccctcttcttctccagggttccctttttcagatgcagcttagatctggtatcacagaagcattcagtgccctttttccaccttttaaaaaaggacttcagcagaagtgtcttttttgagaccagctcatgtagctgatgtgtgcaaaaggtaaac

SEQ ID NO: 90087 - DNA, 600 bp, Chicken  19866894397667_2
tcttctttctgactcctttatgtagttaatggttgacttcacacttgctcccattatcttacagcttctttttcctgaaagtttagtcataatgggtaaaaatcaaaccaaaggaaaaacctcacaccctacagcttctgtgtcattgccataattcatttgatgttgtcatctttgtcgtcttttcattagagcttcaccagtagagtgacagcgaatagctgtcattttttggtggctatttggatatggcatatgaattccttctttcagcycagttcatggaactgttaacaggargcttttgtgatcttacccaaaacaatgtcattttgtgtggcagcatatagaatctcccttcccccatcccctggtgggttaagtcacaagctagcaaaaagtcatagaggctatgaattcccctcttcttctccagggttccctttttcagatgcagcttagatctggtatcacagaagcattcagtgccctttttccaccttttaaaaaaggacttcagcagaagtgtcttttttgagaccagctcatgtagctgatgtgtgcaaaaggtaaacttgaagctgagccctttcatcaagt

SEQ ID NO: 90088 - DNA, 600 bp, Chicken  19866894397669_1
gttggcaaacccagaggtgactacgttgcatttttactcttataactcttatagaaacacatgggaaaagacagaggtaaagttcaggagtaggagagggagcgctgcttgaggtactgctgctgtgcttacagggatgaggaaatggaaggagcaaggattttctgtcctaagaaagaaaatgccacataaaaatgacatcccagctcttgtttgtcctgtctgcctacccggggagagcaaacacagcctgggagtgccaaagaacaggattactacatctacagcatcaccgtttcyaatggaagtggtggtgttatgacatccagccatgacacactgctaacagctttcttcatgcgccttgtagaacaaagctccagagcttccttcagtggcacacatgcagcatctgtttgctgtctttgatagaggtgaaactcaatgctgtgcatacctgatgtgyaatagtaccctgcccacgctctcatttcagaggaggaatactcttgccctcctctgacacttctttgggattgcagctgggagatgtgccacttgcacttccctttgtttccttatgaactagatgctagtggc

SEQ ID NO: 90089 - DNA, 570 bp, Chicken  19866894397669_2
gtcctaagaaagaaaatgccacataaaaatgacatcccagctcttgtttgtcctgtctgcctacccggggagagcaaacacagcctgggagtgccaaagaacaggattactacatctacagcatcaccgtttcyaatggaagtggtggtgttatgacatccagccatgacacactgctaacagctttcttcatgcgccttgtagaacaaagctccagagcttccttcagtggcacacatgcagcatctgtttgctgtctttgatagaggtgaaactcaatgctgtgcatacctgatgtgyaatagtaccctgcccacgctctcatttcagaggaggaatactcttgccctcctctgacacttctttgggattgcagctgggagatgtgccacttgcacttccctttgtttccttatgaactagatgctagtggcagatgctggattggcagccccacagaaacagatactccaggccaccagtctgcacaagaggtggcagttcaagtgtctgcttctggatggcacctatcacctggctgctggaccacacaggttaagcagcagctgc

SEQ ID NO: 90090 - DNA, 600 bp, Chicken  19866894397673_1
taaattatcaactgagaaacctttctctctccattgactattaaagcagtaaatgaagatcagcctctttaagcacaaattaatccttaagaggagttttcgcttaattgaatcatgcttctatatgatgtcacataacagagtatttattcaatggtttgttaatgcaggcatccttatgaaactgttggctctgcaaaggtgtgctagttttggttaggatatagttaatcttcttcacagtagcttttatgggtgcagttttggatttgagacaaaagcaacactgatagcaccccrgcgttttagctgttgctgagaagtgcttgcacagtcttcttctcatactgccctgccagtgaggaagctggggattcacaaggagcttggacaggacacagttgggacagctggcacaaagtgaccaaaggaatattgmataayatatgttgttctcaatagtaaaagatggaagaaagaaggagaagagcaaagagtgatgtttgaattcccaagcaaatctgaaatacgttgggccctgctttcttggaaatggctgaacaaccacctgcaggtgggaaataaatgaatttcttggtt

SEQ ID NO: 90091 - DNA, 600 bp, Chicken  19866894397673_2
agagtatttattcaatggtttgttaatgcaggcatccttatgaaactgttggctctgcaaaggtgtgctagttttggttaggatatagttaatcttcttcacagtagcttttatgggtgcagttttggatttgagacaaaagcaacactgatagcaccccrgcgttttagctgttgctgagaagtgcttgcacagtcttcttctcatactgccctgccagtgaggaagctggggattcacaaggagcttggacaggacacagttgggacagctggcacaaagtgaccaaaggaatattgmataayatatgttgttctcaatagtaaaagatggaagaaagaaggagaagagcaaagagtgatgtttgaattcccaagcaaatctgaaatacgttgggccctgctttcttggaaatggctgaacaaccacctgcaggtgggaaataaatgaatttcttggtttaccttattcacacagcttttgctttccctagtaagttaggtatctcaaccagcaagttttctcacttttatctttcttatttttttccccatccccctggcagggagggagcaagtggctgtgtggagttgagctgtc

SEQ ID NO: 90092 - DNA, 600 bp, Chicken  19866894397673_3
atttattcaatggtttgttaatgcaggcatccttatgaaactgttggctctgcaaaggtgtgctagttttggttaggatatagttaatcttcttcacagtagcttttatgggtgcagttttggatttgagacaaaagcaacactgatagcaccccrgcgttttagctgttgctgagaagtgcttgcacagtcttcttctcatactgccctgccagtgaggaagctggggattcacaaggagcttggacaggacacagttgggacagctggcacaaagtgaccaaaggaatattgmataayatatgttgttctcaatagtaaaagatggaagaaagaaggagaagagcaaagagtgatgtttgaattcccaagcaaatctgaaatacgttgggccctgctttcttggaaatggctgaacaaccacctgcaggtgggaaataaatgaatttcttggtttaccttattcacacagcttttgctttccctagtaagttaggtatctcaaccagcaagttttctcacttttatctttcttatttttttccccatccccctggcagggagggagcaagtggctgtgtggagttgagctgtctactg

SEQ ID NO: 90093 - DNA, 600 bp, Chicken  19866894397680_1
ggtatggaggctataggggctgtggggggctatggggtgctaccgggggttgtggggaagttttaaggtcctataggggctatgaggagttataagggctgtggggggttatggggtgctatagaggctgtatggggctatggggtgctataggggccattgggtgctgtaggggctataacgggctataggggttgtggggggctatggggtgctatagggcctgttggggtggctgtagggtgctaccggggctataggggctatgaggggctgtggggggctataaggtgccatagrggctatagggcctgttggggcagctgtagggtggtacccaggctataaggggctataggggctgtggggggttataaggtgctataggggctatgagtggctatagggcctgttggggtggctgtagggtgctacaggggctataaggggctatagggagctataaggtgctataggggctatggaggggytgtggggggctatggggtgctatagggactgttggggtggctatggggggctataaggcgctataggggctatgagtggttatagggcctgctggggtggctgtagggt

SEQ ID NO: 90094 - DNA, 507 bp, Chicken  19866894397680_2
gggttgtggggggctatggggtgctatagggcctgttggggtggctgtagggtgctaccggggctataggggctatgaggggctgtggggggctataaggtgccatagrggctatagggcctgttggggcagctgtagggtggtacccaggctataaggggctataggggctgtggggggttataaggtgctataggggctatgagtggctatagggcctgttggggtggctgtagggtgctacaggggctataaggggctatagggagctataaggtgctataggggctatggaggggytgtggggggctatggggtgctatagggactgttggggtggctatggggggctataaggcgctataggggctatgagtggttatagggcctgctggggtggctgtagggtgctatacaggggctataggggctgtggggactataaggtgctataggggctatagggcctgttggggcagctgtagggggtacccaggctataagggg

SEQ ID NO: 90095 - DNA, 599 bp, Chicken  19866894397682_1
  misc_feature (1)..(23): n is any nucleotide
nnnnnnnnnnnnnnnnnnnnnnnacattaaatatgcgttaaataaacacgaatgttgctgtgtatttttccctattaattttttccacatgcattttatggctcatgacattctgaacttttaagtggaaggtgatgcaaataactttgattatattggataataaagcatttaaagccatttgccaatattctgtgggttgtgttccatttccagcatttttactgtcttcctgagtactctgtattcttttttcactggtgtctgagtcaggagacctataactgaatgtttatgcaycctaatgtgagtgttgtcaaaagttaaatttatgataactgaagcctgaaatttatcactgtcacatggggaaaggtgccttctctagatttatagggttgtgttgctctgtctcaccaatatttgaagatttctaaaagtacaatacttaccctgacagctagagagaggttactgcctggctcagtttgtagcttaaatgtactccattattgcctgtcatagtttgtatttcgagtatgtttagtttaatactacgaaccagtgaattacagcagagagagatcctgagctcagct

SEQ ID NO: 90096 - DNA, 600 bp, Chicken  19866894397685_1
ctccccacgctaatagccaagttgtgcacatagaataaaagcaacattaagtaattactaagtaattctaatattaaaggttttccagatgcaacactgagcaatattcctttcctcaatttcagtattaccatcttatttataagcaattattcttctccactgtgctcggatgcatatagtttagttgttaacgtagcttcaagtttgttgcttgcaataacacaaactccttagagcttctgaaattctctctgatgacagtatattacaacaacaacagggtgtctgattagaaaygaacctcagacttttctgattacataaatcctattgtgctactttagttrcaagctcaaataaaatctgtttatttcaaaagacagtggtaaggaagaattatgaggcattgtctacccaaggtaagtctctagcaactttcatatgttcttcatctttgaaagctaaatgcaaccttctgtagcaaaccgcctcctccattgagagtcacctcctcactttcggaacactgcttcagacaaaaacaacacacctggtcaagtatgtttgtacagtgctctgggtgctgctggacaatac

SEQ ID NO: 90097 - DNA, 600 bp, Chicken  19866894397685_2
gtaattactaagtaattctaatattaaaggttttccagatgcaacactgagcaatattcctttcctcaatttcagtattaccatcttatttataagcaattattcttctccactgtgctcggatgcatatagtttagttgttaacgtagcttcaagtttgttgcttgcaataacacaaactccttagagcttctgaaattctctctgatgacagtatattacaacaacaacagggtgtctgattagaaaygaacctcagacttttctgattacataaatcctattgtgctactttagttrcaagctcaaataaaatctgtttatttcaaaagacagtggtaaggaagaattatgaggcattgtctacccaaggtaagtctctagcaactttcatatgttcttcatctttgaaagctaaatgcaaccttctgtagcaaaccgcctcctccattgagagtcacctcctcactttcggaacactgcttcagacaaaaacaacacacctggtcaagtatgtttgtacagtgctctgggtgctgctggacaatacaggttttccttctccagtccattaccccattttgctcagagtgctgtatg

SEQ ID NO: 90098 - DNA, 600 bp, Chicken  19866894397692_1
gagattcagactgaagatttttacaaaagagtaaggcaggttgcctggagatgtggtagatgccccatccctggagaccttgaaggtttgaatggggtgctgagcaacctgatataactgtaagtatccctgttcattgcaggggagttggactagatggcttctaaaggttccttccagctcgaatgattctatgattctagtggccatagaaatggaactcagaactcacccagggtgtcatcaacttctgtacagggctatgctgacaagaaaaatgcatagctttttctttgtaartcatttgagttacagaaaaaaaawtttaaaaaatcacccactattattacttgaaggaatgactgaagactgtggagtggatgaagtttasggagaccagagatgttgctggggcctgcaagcattaaaggtatcatgaggaatagcagatggtcttacaggtcttatatctttgtctgatgttggacaaagagtggaagaaagacaatgaaaatcttaaaaggccccatatcctggtttctggatgtagctatgctaactcttttgagggttaccacccactggcttggctgctgtaag

SEQ ID NO: 90099 - DNA, 600 bp, Chicken  19866894397692_2
aaaagagtaaggcaggttgcctggagatgtggtagatgccccatccctggagaccttgaaggtttgaatggggtgctgagcaacctgatataactgtaagtatccctgttcattgcaggggagttggactagatggcttctaaaggttccttccagctcgaatgattctatgattctagtggccatagaaatggaactcagaactcacccagggtgtcatcaacttctgtacagggctatgctgacaagaaaaatgcatagctttttctttgtaartcatttgagttacagaaaaaaaawtttaaaaaatcacccactattattacttgaaggaatgactgaagactgtggagtggatgaagtttasggagaccagagatgttgctggggcctgcaagcattaaaggtatcatgaggaatagcagatggtcttacaggtcttatatctttgtctgatgttggacaaagagtggaagaaagacaatgaaaatcttaaaaggccccatatcctggtttctggatgtagctatgctaactcttttgagggttaccacccactggcttggctgctgtaaggcataccagtcacaaattagagaa

SEQ ID NO: 90100 - DNA, 600 bp, Chicken  19866894397692_3
atggggtgctgagcaacctgatataactgtaagtatccctgttcattgcaggggagttggactagatggcttctaaaggttccttccagctcgaatgattctatgattctagtggccatagaaatggaactcagaactcacccagggtgtcatcaacttctgtacagggctatgctgacaagaaaaatgcatagctttttctttgtaartcatttgagttacagaaaaaaaawtttaaaaaatcacccactattattacttgaaggaatgactgaagactgtggagtggatgaagtttasggagaccagagatgttgctggggcctgcaagcattaaaggtatcatgaggaatagcagatggtcttacaggtcttatatctttgtctgatgttggacaaagagtggaagaaagacaatgaaaatcttaaaaggccccatatcctggtttctggatgtagctatgctaactcttttgagggttaccacccactggcttggctgctgtaaggcataccagtcacaaattagagaacagtagtgcaataataaacagaacatgctgtaaatattcagcacaggataccttttaactattgctt

SEQ ID NO: 90101 - DNA, 600 bp, Chicken  19866894397692_4
gagatgttgctggggcctgcaagcattaaaggtatcatgaggaatagcagatggtcttacaggtcttatatctttgtctgatgttggacaaagagtggaagaaagacaatgaaaatcttaaaaggccccatatcctggtttctggatgtagctatgctaactcttttgagggttaccacccactggcttggctgctgtaaggcataccagtcacaaattagagaacagtagtgcaataataaacagaacatgctgtaaatattcagcacaggataccttttaactattgctttttccgaygtctgcagaagttctaatgaaagcagattttaaaatagtatttgggttttggtaacttgctagtgataagaaagtatgcattaagtcaatctacttagtcatttttagcaaaaattcccccagtgtcattcctcactattttagtgaataagattgctgtaacatctgaatttgtgaatgtatccctaatgaaacacatgaatttaccttggattgttgtaatctattttacatctagagccaatttatgaactgagactgtaacattatctgtttggccacggttacgtaggatttagg

SEQ ID NO: 90102 - DNA, 599 bp, Chicken  19866894397693_1
  misc_feature (1)..(212): n is any nucleotide
nnnnnnnnnnnnnnnnnnnnnnnnnnnnnnnnnnnnnnnnnnnnnnnnnnnnnnnnnnnnnnnnnnnnnnnnnnnnnnnnnnnnnnnnnnnnnnnnnnnnnnnnnnnnnnnnnnnnnnnnnnnnnnnnnnnnnnnnnnnnnnnnnnnnnnnnnnnnnnnnnnnnnnnnnnnnnnnnnnnnnnnnnnnnnnnnnnnnnnnnnnnnnnnnnnnnctgcaggatcctaaaaaaccctatgttctaactaaaaattagaaaccaaacccagagtaagaacactgaagtgcccatttatcaagtrctcgctattacccaaaactcgtgctgctgacagctagacttcgtttccatcatttcttacctttgtggttaaagatcccctccatctccatactactgcgagagtgagcaatgcagagggacccacaggggaccaggccttctgcagctggggagcgatctgtagttcgaaccagacaccagtcaggtttgtcatggggtcgctccaggacctccacagtctgcccacggcggattgtcagctcattactgttgcaggcggtgaaatcatggattaccaccgtcagctcgcacccacca

SEQ ID NO: 90103 - DNA, 600 bp, Chicken  19866894397693_2
accaaccgtcacgcaccattacctatttaggattcctggcagggttcgcattttggatgagatagcaagcttctggggctttccacatcaagaacggatcatttcaaaatcaagcagttatgatgcttttagtacagatttttaactctgcttgtctctgcctatgttcaaaacacagtggttgtgacagggttgggtggaggagttaagcagtttttcttgctagactgctccttaccctcaaagttgaagtagcagccacttaagaatatgtcttatggctgataactcacagcaaaygccagatattagtaaatgcaatcactatgagatttaacatcttgcaaacccaaggcagaaagagaggtctgtttcaaatgagcttactaacccattcccatgccatttacagttctttctcaggtcacaaaataacatggtatactccatatatgaatacaaaaatcagcataaacttcttcacataatattcccaaatacctaactacgtgatacaaaacccacattagcttacaacttccgccttcttgctgattccccaattaaactacacaaacttgaattaaaagcatgcaaggg

SEQ ID NO: 90104 - DNA, 458 bp, Chicken  19866894397693_3
cccaaatacctaactacgtgatacaaaacccacattagcttacaacttccgccttcttgctgattccccaattaaactacacaaacttgaattaaaagcatgcaagggtttcccccctacttccaaaacacttcattagaactttttccttttccctaaggttatgtttcctctttgtttcatctgctttgatgagaaatgaaagttattatataaactttgcaaagttcccaagattgctcagtgccagaacactcatccaacttaactaaacagcctgggaatgccttctccttccaygtagcaatggtgttccaggctacttcagacttcagtgtctgaatgcttcgatagcccagtgtgcttcagtgccacattcccattagaaaacccatctggtacagctttctacagattcagtagttggaccaagctagacaacccctccagctcaggga

SEQ ID NO: 90105 - DNA, 583 bp, Chicken  19866894397698_1
ccctgcaatttcacaagaaataggaaaggtctgagcacagccaagggcagcagcagctgctgtggtggccagctggctgcagcagccagtaatctcatagaagcacagcagctcttcaggggaagctagtgctaactgcgcatttcctacctggtgcttaagtacaaggccaagctctacatccaaaaaagactcatcctacacagggcacgggttgtctgttatagaccagcttgagcttggttcatttggctgccgcacacaaagcaacgctgacccaggcaaggaaagggctgtagsaaggaaagtggtgggaaagaaaggaagggcagcaactttctgaccttgctttkccacccrgcccagccaatgctgtgaatacagctctgctgcagttgcatctaaaaaggaaaggcacagcccgtgcccccttttccagcctttcttttgcagattatctttaagytgtggcatttcccagaacgtcagcttggtgctgagagcacaggcaatactagcaggtctagaaagagaagcttggctcaccacaaagggggttgtttggatggagcaagggttgggc

SEQ ID NO: 90106 - DNA, 530 bp, Chicken  19866894397698_2
cagctgctgtggtggccagctggctgcagcagccagtaatctcatagaagcacagcagctcttcaggggaagctagtgctaactgcgcatttcctacctggtgcttaagtacaaggccaagctctacatccaaaaaagactcatcctacacagggcacgggttgtctgttatagaccagcttgagcttggttcatttggctgccgcacacaaagcaacgctgacccaggcaaggaaagggctgtagsaaggaaagtggtgggaaagaaaggaagggcagcaactttctgaccttgctttkccacccrgcccagccaatgctgtgaatacagctctgctgcagttgcatctaaaaaggaaaggcacagcccgtgcccccttttccagcctttcttttgcagattatctttaagytgtggcatttcccagaacgtcagcttggtgctgagagcacaggcaatactagcaggtctagaaagagaagcttggctcaccacaaagggggttgtttggatggagcaagggttgggc

SEQ ID NO: 90107 - DNA, 523 bp, Chicken  19866894397698_3
tgtggtggccagctggctgcagcagccagtaatctcatagaagcacagcagctcttcaggggaagctagtgctaactgcgcatttcctacctggtgcttaagtacaaggccaagctctacatccaaaaaagactcatcctacacagggcacgggttgtctgttatagaccagcttgagcttggttcatttggctgccgcacacaaagcaacgctgacccaggcaaggaaagggctgtagsaaggaaagtggtgggaaagaaaggaagggcagcaactttctgaccttgctttkccacccrgcccagccaatgctgtgaatacagctctgctgcagttgcatctaaaaaggaaaggcacagcccgtgcccccttttccagcctttcttttgcagattatctttaagytgtggcatttcccagaacgtcagcttggtgctgagagcacaggcaatactagcaggtctagaaagagaagcttggctcaccacaaagggggttgtttggatggagcaagggttgggc

SEQ ID NO: 90108 - DNA, 417 bp, Chicken  19866894397698_4
aggccaagctctacatccaaaaaagactcatcctacacagggcacgggttgtctgttatagaccagcttgagcttggttcatttggctgccgcacacaaagcaacgctgacccaggcaaggaaagggctgtagsaaggaaagtggtgggaaagaaaggaagggcagcaactttctgaccttgctttkccacccrgcccagccaatgctgtgaatacagctctgctgcagttgcatctaaaaaggaaaggcacagcccgtgcccccttttccagcctttcttttgcagattatctttaagytgtggcatttcccagaacgtcagcttggtgctgagagcacaggcaatactagcaggtctagaaagagaagcttggctcaccacaaagggggttgtttggatggagcaagggttgggc

SEQ ID NO: 90109 - DNA, 600 bp, Chicken  19866894397704_1
attcaatgtatccaatctttagcaccagctcttctcaatcagcttgagttgtattgcttcccaaggacagagcacacagaattcaaggcacaacatgactcaactaagttctgcacgctccacttttggacggtcacacatactcagagatgcagaaacagaagaggagccaagccgactgccaaaccgacttcccaattcaggggcaactgctgcaacatcatgactgcatgcacaaatgcttgcatgcttaagagtcagctttaggacccttgattcatttcctcataaacagcttcrcagaaggctttctatcaaccacctgtgtcagttgtgagcatctaaatagcatcactgaagtaacacctctcttcttaggcctcaaaatctgcttcttgtctcaacttcaacatagaaaaagaatgctttagtacaaatctgcagacaatgacagaattgttctgattcacattgttacttctagttttgatacacgtgaagcttgagaaaaggtatgtgcaactcaaccagaagcagagattyttatagctgatggtatcaaggtctgcaaggcagaaattctacttatctaatattggt

SEQ ID NO: 90110 - DNA, 452 bp, Chicken  19866894397704_2
tgcatgcttaagagtcagctttaggacccttgattcatttcctcataaacagcttcrcagaaggctttctatcaaccacctgtgtcagttgtgagcatctaaatagcatcactgaagtaacacctctcttcttaggcctcaaaatctgcttcttgtctcaacttcaacatagaaaaagaatgctttagtacaaatctgcagacaatgacagaattgttctgattcacattgttacttctagttttgatacacgtgaagcttgagaaaaggtatgtgcaactcaaccagaagcagagattyttatagctgatggtatcaaggtctgcaaggcagaaattctacttatctaatattggtcttgccaccaaatttaaggatttggttgtagtgaagtcactaaaactattatgtaagtagttggtgatattaagctgtaatatgaaacaaaagaa

SEQ ID NO: 90111 - DNA, 600 bp, Chicken  19866894397706_1
tgatctctaccaacacgactggaactcctattcaaagcatcactaatcttgaactctaaattttagatttgtaacaaaatcagatgaatacaattgctgaattgtaccttaagttaataatgcattgaatactagtcttagaaatgaaaatgtcattttcttaagtactgtaaaacagcagaagccccttcatgtcagcatgcctgtgtcatattatattatttgaggatctgcctcaatgagtacaaacagcctcaatgactgaatgagaagggctttaaactatgatatgctggagawagcttatcaacccatatacagtagcaacgaggaagagaccaagggacaacatgatgagggatgctatgcacttgcccttttgaaagcagcatccatctcaagtgccttcatataaatatattttgcacggggaaaatacaagaatggctgtttacaagggtgcatagtgataagacaaggggaaatggttttaaactaagatgggacatttagcttagatattaggcagaagtttttcactcagagggtggtgacacactggaactggttgcccaaggaggttgtggatgccccatccct

SEQ ID NO: 90112 - DNA, 600 bp, Chicken  19866894397706_2
gccttcatataaatatattttgcacggggaaaatacaagaatggctgtttacaagggtgcatagtgataagacaaggggaaatggttttaaactaagatgggacatttagcttagatattaggcagaagtttttcactcagagggtggtgacacactggaactggttgcccaaggaggttgtggatgccccatccctggaggcattcaaggccaggctggatgtggctctgggcagcctggtctagtgggcggcgaccctgcatgtaacagcagggttgaaactagatgatcattgtggyccttttcaacccaggccattccaaaattctatgataagaaggatgagaaatctgtgcctagttatacatttatgattccgttggaattagacgtggaggaatagcttgtatgaatgcagtactgacgtagacgtattacgagctcttcaggaaagatatgctgggaatttaatgatgcgggactgccatcagcacgagactaaacagttgagatcaagttgtggcaagcaatcaatatgctgcagggccaggctgctggacctcaagaaatggactgacatgaacatctgggatggaaaa

SEQ ID NO: 90113 - DNA, 600 bp, Chicken  19866894397708_1
aaccagaatggtagatatttttccctactatctaaacatgggcttgctaccatgcctttccatgcctgtcctgcggatttctgaaagctgcctaaaatgaaaagacagagctgagccgcatacagttaaatgcttttagtctgagagttgaatgagctgctaatctcaggctgtgtatttttattcttttgtctgcaggattctttttcttcccctctccacctcctttgttttcaagttgtttgttcagttccttagattccacttctgcctgttagcactttgagaacaatgtagaakggttctatacaacactagcattttttgttatgaacagcttaaaaaatggtctaagagcttaattaagatggactagtttagggatggtgctgaagytgccactgtagaatgttaagaacaagttacacatgcatccttcagcaatgagattagactccgcccttaggttctggggctgggttagatgacctcccttgattccttccagctcagtggtgatactaaacatagattgttgtaaaatgaacctaatgaaaacacaagttggtaacctacaactgcagaaaattgctgaataaa

SEQ ID NO: 90114 - DNA, 600 bp, Chicken  19866894397708_2
atgaaaagacagagctgagccgcatacagttaaatgcttttagtctgagagttgaatgagctgctaatctcaggctgtgtatttttattcttttgtctgcaggattctttttcttcccctctccacctcctttgttttcaagttgtttgttcagttccttagattccacttctgcctgttagcactttgagaacaatgtagaakggttctatacaacactagcattttttgttatgaacagcttaaaaaatggtctaagagcttaattaagatggactagtttagggatggtgctgaagytgccactgtagaatgttaagaacaagttacacatgcatccttcagcaatgagattagactccgcccttaggttctggggctgggttagatgacctcccttgattccttccagctcagtggtgatactaaacatagattgttgtaaaatgaacctaatgaaaacacaagttggtaacctacaactgcagaaaattgctgaataaactgagtaaaaatatcttccaccttgaarcttttcttgaaggctatggaagagcagtacttcacacagtgaaaaattaagaaaaaatgaaaatttat

SEQ ID NO: 90115 - DNA, 430 bp, Chicken  19866894397708_3
tatgaacagcttaaaaaatggtctaagagcttaattaagatggactagtttagggatggtgctgaagytgccactgtagaatgttaagaacaagttacacatgcatccttcagcaatgagattagactccgcccttaggttctggggctgggttagatgacctcccttgattccttccagctcagtggtgatactaaacatagattgttgtaaaatgaacctaatgaaaacacaagttggtaacctacaactgcagaaaattgctgaataaactgagtaaaaatatcttccaccttgaarcttttcttgaaggctatggaagagcagtacttcacacagtgaaaaattaagaaaaaatgaaaatttatgtggacaacaataaaattattccctgtcttcaaaggcaaaacataaagattcctgtctgttg

SEQ ID NO: 90116 - DNA, 599 bp, Chicken  19866894397709_1
  misc_feature (1)..(35): n is any nucleotide
nnnnnnnnnnnnnnnnnnnnnnnnnnnnnnnnnnntggactgagaaagttgactcgagtgaaattagatgggctatctgtggttaccttgctggcctctggcacaatgggctgtggtacttatgttctctgtgctccccttgaagttgcattgtgatgccaggcaatggaattgcaaacgttcattgcagtctcagagcgtccctcttcctatctccaatattgagaatgtgtggttagttttcaggtttgtaagaggacgcatgagcatcacagggaacttcctgcaaaacaacctgtrtctgtacagatgcttgaattaccyacaggatattcctctgtagggtgtttttgaaattgtaaagtaattaaaaagggagaaaattaatccacagatgatggtagagtgtaarggtcagaagtatgtgccatgccagccttgatggctaacaggagcgtgcgacgtgatttagaactaataggaaactccccagtgttgttcattgtttgtgtgccagcagccacatgtcatttgacagcaaccactctgtgaacaggaaaagcatagaagattgtccctcctgacagtgtgcctgctct

SEQ ID NO: 90117 - DNA, 599 bp, Chicken  19866894397709_2
  misc_feature (1)..(11): n is any nucleotide
nnnnnnnnnnntggactgagaaagttgactcgagtgaaattagatgggctatctgtggttaccttgctggcctctggcacaatgggctgtggtacttatgttctctgtgctccccttgaagttgcattgtgatgccaggcaatggaattgcaaacgttcattgcagtctcagagcgtccctcttcctatctccaatattgagaatgtgtggttagttttcaggtttgtaagaggacgcatgagcatcacagggaacttcctgcaaaacaacctgtrtctgtacagatgcttgaattaccyacaggatattcctctgtagggtgtttttgaaattgtaaagtaattaaaaagggagaaaattaatccacagatgatggtagagtgtaarggtcagaagtatgtgccatgccagccttgatggctaacaggagcgtgcgacgtgatttagaactaataggaaactccccagtgttgttcattgtttgtgtgccagcagccacatgtcatttgacagcaaccactctgtgaacaggaaaagcatagaagattgtccctcctgacagtgtgcctgctctccctgtatctggcagcatgcccta

SEQ ID NO: 90118 - DNA, 600 bp, Chicken  19866894397709_3
gtggtacttatgttctctgtgctccccttgaagttgcattgtgatgccaggcaatggaattgcaaacgttcattgcagtctcagagcgtccctcttcctatctccaatattgagaatgtgtggttagttttcaggtttgtaagaggacgcatgagcatcacagggaacttcctgcaaaacaacctgtrtctgtacagatgcttgaattaccyacaggatattcctctgtagggtgtttttgaaattgtaaagtaattaaaaagggagaaaattaatccacagatgatggtagagtgtaarggtcagaagtatgtgccatgccagccttgatggctaacaggagcgtgcgacgtgatttagaactaataggaaactccccagtgttgttcattgtttgtgtgccagcagccacatgtcatttgacagcaaccactctgtgaacaggaaaagcatagaagattgtccctcctgacagtgtgcctgctctccctgtatctggcagcatgccctagcaatgcttccaaggcagaactttaatgggaagctgaaaactttccagaatttggtttatgctcatttctagcatttagcattcaataa

SEQ ID NO: 90119 - DNA, 599 bp, Chicken  19866894397713_1
  misc_feature (1)..(46): n is any nucleotide
nnnnnnnnnnnnnnnnnnnnnnnnnnnnnnnnnnnnnnnnnnnnnncctgctcacacctcacatgggtggaactcctgccaccccttcccctggcagcagcaggctcaggcactccctgcagccagagatctgaccagccacatttctggggaggccctctgtctgggtcaccaagatcttcctggggcaagcccgctgtctggtggagaccatgtttaaacctgctgtctcagagactaccaagaggagaactggtctcctgagcaaagagggacagtacttacgtgtgttgccacttkactcacctcccacatccactgctgcagtaccgtacgggcagtgcgggctgtgctcatgcaccgatttctcctccctgttctcagtgggcagcaacactgtttgtttgccctgtgtgctctgtggaagctagcttctgccctccctgaggctatttatagcctggtagccamgggtcagagtcaagggtgtgcagtgccagctccayctgtgctagctcagcatcccacccacaggctgctagacccccagcagaagcacagcacttttgctggcttcataacagatctaatagttttaa

SEQ ID NO: 90120 - DNA, 600 bp, Chicken  19866894397713_2
ccaagatcttcctggggcaagcccgctgtctggtggagaccatgtttaaacctgctgtctcagagactaccaagaggagaactggtctcctgagcaaagagggacagtacttacgtgtgttgccacttkactcacctcccacatccactgctgcagtaccgtacgggcagtgcgggctgtgctcatgcaccgatttctcctccctgttctcagtgggcagcaacactgtttgtttgccctgtgtgctctgtggaagctagcttctgccctccctgaggctatttatagcctggtagccamgggtcagagtcaagggtgtgcagtgccagctccayctgtgctagctcagcatcccacccacaggctgctagacccccagcagaagcacagcacttttgctggcttcataacagatctaatagttttaaatggatgagctatatataaagccagaaatatttacatattagtaagtaaaaatcttttaaagtctttctgcaatcaaactaagactaaactattttttgtggtcatgaacctggctgtacttaaacttacaaaaaattcttttcaaataccctttcaacgtctctgcatatt

SEQ ID NO: 90121 - DNA, 600 bp, Chicken  19866894397713_3
gagaccatgtttaaacctgctgtctcagagactaccaagaggagaactggtctcctgagcaaagagggacagtacttacgtgtgttgccacttkactcacctcccacatccactgctgcagtaccgtacgggcagtgcgggctgtgctcatgcaccgatttctcctccctgttctcagtgggcagcaacactgtttgtttgccctgtgtgctctgtggaagctagcttctgccctccctgaggctatttatagcctggtagccamgggtcagagtcaagggtgtgcagtgccagctccayctgtgctagctcagcatcccacccacaggctgctagacccccagcagaagcacagcacttttgctggcttcataacagatctaatagttttaaatggatgagctatatataaagccagaaatatttacatattagtaagtaaaaatcttttaaagtctttctgcaatcaaactaagactaaactattttttgtggtcatgaacctggctgtacttaaacttacaaaaaattcttttcaaataccctttcaacgtctctgcatatttaaataagcttaaaaaaaaaaagccaccaacacat

SEQ ID NO: 90122 - DNA, 600 bp, Chicken  19866894397715_1
ttttcctattgtactagtgtcatgtccttagcatcaaccccgtttttaagtaattacatgaaaacagtaatctaacaaaagcttgaatttggaaagctaatcatcagaaatgctgtgggcacactcttgccgtacttaaaatttctgggttttttttgtactgagggtattgacactttccacctcctcttcaaaaaataaataaaataaaaaatttttaaaaaatctcacatgaccaaagaatagttatcattatccttgtttgtaggaagggctgaaacggtttggctggaataatasaatctgaaaagccagccaaccatcccagtgaaaagaacgtggactgaggaagatatttgaaaatcaaaccaggtggtgaaagttcaggaaagctttaaacttgttcaaattagaagcgtagggcaggcacattgatgagtggagctctcagtctcacctattatgaatgtgcattggctgtagtgtcctaatcatgctatataggttttgttcattgtttgtcatgttatttttctaacacctgaaaaactcaatcagccagctaatcatattcagtcatccagaacctaaacgctggaa

SEQ ID NO: 90123 - DNA, 600 bp, Chicken  19866894397723_1
atttcttctgcgtaaaagtgctccaggtgggttccttgcattcattctaaattattttatgaatgcagtttgaccatggtgagccagccctttgtacatgagcggtaggggcacatccccggccgtggtggcagagcactctgcgaggctttgagaagcttccctgagcaatctgtgacaatggcagctcatggaatcaatgcttctgacctctaaatgtgatacccagagaaagcactgtatagggtggattgctgcaggagcaatgagaaagaaatttacctttgggctgtctggaamtgcagcgatttgtttcaaccccgatttctgtaagtgaggttagtgtctgtctgtgactgtccaataacacatggacttgctggctttcatgcgctctcatgtgttattgaagcttgtggctcttaggctcttcattttttccctgcaagactaagctagacttgttctcaattggcagcttgaaacagatttgctcattttgtagcaatgtgatttatttgatcattttcagggggaaaaatgctcctcttccaggagctgtgagcaagttaattgttgtgaaaacccaacagaatgggc

SEQ ID NO: 90124 - DNA, 600 bp, Chicken  19866894397726_1
aaactgaataatgaagcagtggtagaagtagtgacccatttttagcagaaagaaatatttttttcattacttaaaacaagcttaaattaacaactgcagataatgattccctagagctcgataagggttaaggatcgttgctctcagcaatgacaggctactcactaaatttggtgagttacatttccaggatgaggtttatggctcaaatatattgcctccaagagagggaaacttggttgactggcaaggcgaatgcctccaaacggacctgaggagcagtgtccccactgcagcccycattgtgtaagtgatgtttggaaacttgcattactagctgtaagatccatcctatttgaaggacaagtggaaaagatgagtgtaagctggagctgaagaatcctacgtccccagatttcagcccaggaactgagctgctgatgccaattaatggcttctgccccttgttgcagctttgggaagcgatggggccatgcacctgtgggacagcacagcgaggggcggcacgagaacagaaggggatggccgtggtgcaggcagctgcaattgccccagaaaatttcatgtagtgaaacctca

SEQ ID NO: 90125 - DNA, 600 bp, Chicken  19866894397728_1
tattgctcctactcaaatgtcagcatttagttgtttcacctggtttctttttttttttagctatgcagcaaactgaaatcagcctcttgtcaaattgcacagcttggcacagctgtgtgaaaatttttactacaggtgggaacttatttatgtgattacaggcacttccatcttctacactgatcactgtttttcaagacagtaatgaaatactctacatggcaagaaaataacaaaggtgggcttttttacacatacaaaacaggatgcatttaatattccgtccatgcctgtatgtcyttctttagagaaatcaggcaataaacactgcgtgcttctcaaaggactacactataaagtaattgacagcatgtggtcctgggaagccaaaggaatgtgtgcttctratgtgtcttaacatgcatgaattgcaattaaggaaagcactgaacactatcttctgattatgaaggaacgtactcatttacacaccacaaatcagatccacaaatacattatcacagagttatgctagattaagggcagtatcccccttccaccatacatatgactaaaatttgaaataacaggttttcagaa

SEQ ID NO: 90126 - DNA, 600 bp, Chicken  19866894397728_2
cacagctgtgtgaaaatttttactacaggtgggaacttatttatgtgattacaggcacttccatcttctacactgatcactgtttttcaagacagtaatgaaatactctacatggcaagaaaataacaaaggtgggcttttttacacatacaaaacaggatgcatttaatattccgtccatgcctgtatgtcyttctttagagaaatcaggcaataaacactgcgtgcttctcaaaggactacactataaagtaattgacagcatgtggtcctgggaagccaaaggaatgtgtgcttctratgtgtcttaacatgcatgaattgcaattaaggaaagcactgaacactatcttctgattatgaaggaacgtactcatttacacaccacaaatcagatccacaaatacattatcacagagttatgctagattaagggcagtatcccccttccaccatacatatgactaaaatttgaaataacaggttttcagaactcatctggcagaaaccagctagtgtgatcccgtatgttcctctgtgcagccctacagccatggagacaaaatacagcccccaacaacaccaaaatccatagtactt

SEQ ID NO: 90127 - DNA, 600 bp, Chicken  19866894397734_1
ttacagagaggatgatgaggttgctaagtgcagcagcgctgcactgaagatgaattcagcctggggtgttttcttgcaaatgtgtcaccatcaatccctgcatattgctctgaaacactcaagcttttcttgacacataagctgtgagaaccccagaagaggcagggcgcagggaacaacaaggtacgtctagacattggaaaagtaaactgatccctcaaaaaaaaaatcaccccgagcgttagcaagacaccaacacatacaacagcaggctggagctgcagagcatccctggaagakgagaagatcaagcctggaagctgctgtcagggaaaccagcaggactgaagtctccaatggcctgggactaattcagcccctgtctgtaacaggcgagtgatgtggtggatgcactggctgaggaggtggatttgcctggcagaatgtgcattttaattgctcattttctttctttttttttttttttttgaatgtgatttgattgctaattatggtttctgcatttgtaattagaatgtatagcagatggtggaggctttggctgaagtgatgcggccattaaaataattcatgttaccc

SEQ ID NO: 90128 - DNA, 600 bp, Chicken  19866894397748_1
catgctgctccctttaaaagagtctgaaatacccaattagctacttcttaaaattttactgaacatatatgtagaacaatgaaatgtgcatatttattactctaccacacaacagaagcatcttcctcatatgttatgattatagattcatcttcttagaagtgcaatcatagtattactaagaatgaatcaatcaaatagcaatccatccaaacagaaaaaagtcaggcaaaaatgccagggccttctgtgttgatgaacaaagagctgctggataaaatcaaacataagaagggactrtacagaaggtagaatcaagacaggtaacctaggaagaatacagaggcactgtctgcctgtgaagaggtgggattagaaaaggtaaagctcaagtggaattgaatctggtgagggatgtcaaaggcaataagaagggattctgtaagtacatgcatgacaaaaggaagatgaggaaaaaatataggtccattgttgaatgacatggagcatctggtgacacrgggcatggagaaagatgatgtactgaatgccttcttcagttcttactgacaraagtggtcttcagaaatgccaggtctc

SEQ ID NO: 90129 - DNA, 600 bp, Chicken  19866894397748_2
aagtcaggcaaaaatgccagggccttctgtgttgatgaacaaagagctgctggataaaatcaaacataagaagggactrtacagaaggtagaatcaagacaggtaacctaggaagaatacagaggcactgtctgcctgtgaagaggtgggattagaaaaggtaaagctcaagtggaattgaatctggtgagggatgtcaaaggcaataagaagggattctgtaagtacatgcatgacaaaaggaagatgaggaaaaaatataggtccattgttgaatgacatggagcatctggtgacacrgggcatggagaaagatgatgtactgaatgccttcttcagttcttactgacaraagtggtcttcagaaatgccaggtctcagaggccaagaagaaagtctgaarcaaggaagttgtatacgtggtgaaagaggatcaggtcaaggaatacttaaactggacatatataggtccatagaccctggtgaaacatacccccgagtactaacagagcaggcagtctcactgagagggcagtcttggtaatctttggatcaaagtgactgagagagacgcctaaagagtggaaggagacaattgcc

SEQ ID NO: 90130 - DNA, 600 bp, Chicken  19866894397748_3
gataaaatcaaacataagaagggactrtacagaaggtagaatcaagacaggtaacctaggaagaatacagaggcactgtctgcctgtgaagaggtgggattagaaaaggtaaagctcaagtggaattgaatctggtgagggatgtcaaaggcaataagaagggattctgtaagtacatgcatgacaaaaggaagatgaggaaaaaatataggtccattgttgaatgacatggagcatctggtgacacrgggcatggagaaagatgatgtactgaatgccttcttcagttcttactgacaraagtggtcttcagaaatgccaggtctcagaggccaagaagaaagtctgaarcaaggaagttgtatacgtggtgaaagaggatcaggtcaaggaatacttaaactggacatatataggtccatagaccctggtgaaacatacccccgagtactaacagagcaggcagtctcactgagagggcagtcttggtaatctttggatcaaagtgactgagagagacgcctaaagagtggaaggagacaattgccatttctatctttaaaaaagcaagttgaacttagggaaccacatgttgatcat

SEQ ID NO: 90131 - DNA, 600 bp, Chicken  19866894397748_4
taacctaggaagaatacagaggcactgtctgcctgtgaagaggtgggattagaaaaggtaaagctcaagtggaattgaatctggtgagggatgtcaaaggcaataagaagggattctgtaagtacatgcatgacaaaaggaagatgaggaaaaaatataggtccattgttgaatgacatggagcatctggtgacacrgggcatggagaaagatgatgtactgaatgccttcttcagttcttactgacaraagtggtcttcagaaatgccaggtctcagaggccaagaagaaagtctgaarcaaggaagttgtatacgtggtgaaagaggatcaggtcaaggaatacttaaactggacatatataggtccatagaccctggtgaaacatacccccgagtactaacagagcaggcagtctcactgagagggcagtcttggtaatctttggatcaaagtgactgagagagacgcctaaagagtggaaggagacaattgccatttctatctttaaaaaagcaagttgaacttagggaaccacatgttgatcatccctgagaaggtgatggaattacaggactcatttccaggcacatgaacaaa

SEQ ID NO: 90132 - DNA, 600 bp, Chicken  19866894397748_5
gaagtgtgagctgcatgaaccaacagtgaagtggattgaaaacttgttgaatatctgagcgcaaaagatgctgatctgtgaggcaaagtctagctggaggagaaaaagttgtggtgaaccccaggtgtcagtactgggtatagttctgcttaatatcttcattaatgatctggataatggggcagagtgtgcgctcagcaagtttgcagataacactaaactgggaggagtggctgacatgccagtgggttgtgctgccactcagagggactctttaagtctggtgaaccttatgaaatwcaaaagagaaaagtaaagtctgtaccttgagaaggaacaaccccatgaactagtatcagctaggaaagaaaagaaactcagggtcctcgtggacaccaattagaccatgatctggcaaagcgcccttgcttccaagaaggctaatgatattctagactgcattagtattggcagcaggtcaaaggagaaattcttcatctctactcagcactgataaggccacacatggagtgcacaagagagacatgaatgtactggagagagtctagtgaagggccacaaagataatttaggcaatgg

SEQ ID NO: 90133 - DNA, 599 bp, Chicken  19866894397754_1
  misc_feature (1)..(94): n is any nucleotide
nnnnnnnnnnnnnnnnnnnnnnnnnnnnnnnnnnnnnnnnnnnnnnnnnnnnnnnnnnnnnnnnnnnnnnnnnnnnnnnnnnnnnnnnnnnnnntctcccattcacctttcctcccgcacccagccctgcatgtgcaggtcagctgtgctgtgctggatgttgctgtgttcagatctgtccctgacccagctgtgctggagctgtcccattctggtgctgctcaccagcctgtcgctgccgcatgagaaatgctcaatggctttctcactgctgcaggagaacatgctgggattcattgstttgttactgcccttattaagattaacggtccataaaggttcgcaaccttccatgatccccatataagtgatatctgggagggagaagaaaggaagtcaaaatgcaaaatggactctgggacaataagacagcactgatgccatcctcagagctgagctgttatccacaaaacctaacaatggtgaaggcattgaagattcagattaactgcgtaatgcttggttaattgccttgcacttgtctgaaatgtgcctctgcctcttctctgtggctcccctcaagcgtttctcccctcttc

SEQ ID NO: 90134 - DNA, 600 bp, Chicken  19866894397757_1
ggacagcctgaaagtgatactagcagagtaaattctatccgtattcataacattaatagaaaataccaatgaaagaatgtatttaaagatatgaaatacaaagtaggataagcttcacagagcttttactttccatatccgacaaaaggtgcaaatgcagaataattggcatcaatttctgaggatcttgggaaagtgcactaaaaactactgatatgagaggctaaataattggtttgagaactcaaagcaaaaaagttgaattttctttattatttttcttcgttactatttcattayatgtatctgtcaaaatcttttccatttcaaccaatctcttgaaaatggcaattcattgaattcatccagtcttggcaaagtgctactctatacgcgagcagtggaacaagacaacttataataaactattcagaatgctggtggggtgaacaacaaggtacctccatttggtaagaaatgacgctgtgtataccaattctgcagtgatttgatgtgagttttcttcagtattttttgcttttgtgacattcagttttcagtcaagatttaaacaggccaaaaaaactactcagtcttcaa

SEQ ID NO: 90135 - DNA, 600 bp, Chicken  19866894397759_1
cttttgtgacattcagttttcagtcaagatttaaacaggccaaaaaaactactcagtcttcaaacttccatagcaacccgcaacataaatgtaagttcgagatgtcctgtgaatctttgggtttgatctcagctattatcatttgattattcattagttggtcaaattgcagaaatgtgactgaaagcacctggtaagtgtctctgttctgtcaagctgaaggtccagctgatagctgaaatcgtgacgttactaaaatgtcatatgagggtattttggttgtaattacaattgttcctkttcactgagatggctgcttctcagtggtgcatcagtttagaacagaacaggaagaatggctttttctttaaggctgcagaggaaatggttttatgaatctcagtatgaagatgctgtstagaacgtcttcagcatttcaagcygcacacttaraaatacttactgcatacgtagtttaatatatgttyctcacttttcatgaaatgggatcaatatatatattccaaactcagcgtttctttttatacttcagtacaatccctaatttgrgggcatgggagttaattctgccctaattac

SEQ ID NO: 90136 - DNA, 600 bp, Chicken  19866894397759_2
gggtttgatctcagctattatcatttgattattcattagttggtcaaattgcagaaatgtgactgaaagcacctggtaagtgtctctgttctgtcaagctgaaggtccagctgatagctgaaatcgtgacgttactaaaatgtcatatgagggtattttggttgtaattacaattgttcctkttcactgagatggctgcttctcagtggtgcatcagtttagaacagaacaggaagaatggctttttctttaaggctgcagaggaaatggttttatgaatctcagtatgaagatgctgtstagaacgtcttcagcatttcaagcygcacacttaraaatacttactgcatacgtagtttaatatatgttyctcacttttcatgaaatgggatcaatatatatattccaaactcagcgtttctttttatacttcagtacaatccctaatttgrgggcatgggagttaattctgccctaattacctaattgtccacctgtgctgaaatgagcaaagcagcagcgctgctcttgaccgtaaagtggtggactttttgactttgctggcacataggaaggcttttggaccctcgtgcaaattac

SEQ ID NO: 90137 - DNA, 600 bp, Chicken  19866894397759_3
tgattattcattagttggtcaaattgcagaaatgtgactgaaagcacctggtaagtgtctctgttctgtcaagctgaaggtccagctgatagctgaaatcgtgacgttactaaaatgtcatatgagggtattttggttgtaattacaattgttcctkttcactgagatggctgcttctcagtggtgcatcagtttagaacagaacaggaagaatggctttttctttaaggctgcagaggaaatggttttatgaatctcagtatgaagatgctgtstagaacgtcttcagcatttcaagcygcacacttaraaatacttactgcatacgtagtttaatatatgttyctcacttttcatgaaatgggatcaatatatatattccaaactcagcgtttctttttatacttcagtacaatccctaatttgrgggcatgggagttaattctgccctaattacctaattgtccacctgtgctgaaatgagcaaagcagcagcgctgctcttgaccgtaaagtggtggactttttgactttgctggcacataggaaggcttttggaccctcgtgcaaattacagtataatagcaatactccagaaga

SEQ ID NO: 90138 - DNA, 600 bp, Chicken  19866894397759_4
ttagttggtcaaattgcagaaatgtgactgaaagcacctggtaagtgtctctgttctgtcaagctgaaggtccagctgatagctgaaatcgtgacgttactaaaatgtcatatgagggtattttggttgtaattacaattgttcctkttcactgagatggctgcttctcagtggtgcatcagtttagaacagaacaggaagaatggctttttctttaaggctgcagaggaaatggttttatgaatctcagtatgaagatgctgtstagaacgtcttcagcatttcaagcygcacacttaraaatacttactgcatacgtagtttaatatatgttyctcacttttcatgaaatgggatcaatatatatattccaaactcagcgtttctttttatacttcagtacaatccctaatttgrgggcatgggagttaattctgccctaattacctaattgtccacctgtgctgaaatgagcaaagcagcagcgctgctcttgaccgtaaagtggtggactttttgactttgctggcacataggaaggcttttggaccctcgtgcaaattacagtataatagcaatactccagaagaagtaattata

SEQ ID NO: 90139 - DNA, 600 bp, Chicken  19866894397759_5
acctggtaagtgtctctgttctgtcaagctgaaggtccagctgatagctgaaatcgtgacgttactaaaatgtcatatgagggtattttggttgtaattacaattgttcctkttcactgagatggctgcttctcagtggtgcatcagtttagaacagaacaggaagaatggctttttctttaaggctgcagaggaaatggttttatgaatctcagtatgaagatgctgtstagaacgtcttcagcatttcaagcygcacacttaraaatacttactgcatacgtagtttaatatatgttyctcacttttcatgaaatgggatcaatatatatattccaaactcagcgtttctttttatacttcagtacaatccctaatttgrgggcatgggagttaattctgccctaattacctaattgtccacctgtgctgaaatgagcaaagcagcagcgctgctcttgaccgtaaagtggtggactttttgactttgctggcacataggaaggcttttggaccctcgtgcaaattacagtataatagcaatactccagaagaagtaattatacccagcctctataggtcaggaactgcacacaaaaa

SEQ ID NO: 90140 - DNA, 600 bp, Chicken  19866894397759_6
gtattttggttgtaattacaattgttcctkttcactgagatggctgcttctcagtggtgcatcagtttagaacagaacaggaagaatggctttttctttaaggctgcagaggaaatggttttatgaatctcagtatgaagatgctgtstagaacgtcttcagcatttcaagcygcacacttaraaatacttactgcatacgtagtttaatatatgttyctcacttttcatgaaatgggatcaatatatatattccaaactcagcgtttctttttatacttcagtacaatccctaatttgrgggcatgggagttaattctgccctaattacctaattgtccacctgtgctgaaatgagcaaagcagcagcgctgctcttgaccgtaaagtggtggactttttgactttgctggcacataggaaggcttttggaccctcgtgcaaattacagtataatagcaatactccagaagaagtaattatacccagcctctataggtcaggaactgcacacaaaaaacgtgggccttttaatttggtcacgtataatgtataaaacgcagttcttctgaagctaatggaaccagagggagcattatga

SEQ ID NO: 90141 - DNA, 600 bp, Chicken  19866894397760_1
ccaaaaaacaaccaattaaaaatgcactgctgacaggtaaaagactattagggagacctcattagcttcatatgcaatttcaggaagttggttagagaaaaataaagttactactaaaacgctgtctgcaggtgtgaaagcagccacaggtgccattctacaggagcagacctctaatagaaatacgtgcatctagcatgagtcaaggtaagatttccacatcacagattcatatgcatcactgatgtttcctaattccaaaggctgtctcaattaaaaaaaaaagtgaccagtctataytgaaggtttttgcagttgttgtagatgcaatggcttttgctcgccaataactctgttttgagctgttaattgtctgtgaagcagcttagcattctcaggtggaggatgtactctaactgcaaactgttactgatggaaccaaatgattattagcatttcttttgtaagatgaaacgtgaaataaacattgatttaatagctgtatcatacattacgatgactattttgagtaaatcttgactaatcttttgttttcagttacagtttaatccctaatcttccactttccttgctagatca

SEQ ID NO: 90142 - DNA, 599 bp, Chicken  19866894397762_1
  misc_feature (1)..(91): n is any nucleotide
nnnnnnnnnnnnnnnnnnnnnnnnnnnnnnnnnnnnnnnnnnnnnnnnnnnnnnnnnnnnnnnnnnnnnnnnnnnnnnnnnnnnnnnnnnngaatagaaaccaaaccagccaaaacaaacaaataaataaaacaaaaaacctcatagaatcacagaacagtctggattggaaagaactttaaatatatagttccaagcctgctgccataggtagggatacattccactggaccaggttacccagggcctcatccaacctggttttgaaacactgccagggatgggatatccacagcttcyctgggcaacttgtttcagtgcctcaccaccctcaccctgcataaagaatyccttscttttctagtttaaaaccattatcctttgtcctatcactacactccctgagttcctctccagctttcctgtagtccctgttaaacgctgggagtatagcatcaaaatatcaagaatagggcatccaattaagacagcccattcgattctmcacatggattttgcttctcccattttctttcccctgctgctgcatattgtggattttgaatatggtatgcaagtatttagattggatccttact

SEQ ID NO: 90143 - DNA, 599 bp, Chicken  19866894397762_2
  misc_feature (1)..(41): n is any nucleotide
nnnnnnnnnnnnnnnnnnnnnnnnnnnnnnnnnnnnnnnnngaatagaaaccaaaccagccaaaacaaacaaataaataaaacaaaaaacctcatagaatcacagaacagtctggattggaaagaactttaaatatatagttccaagcctgctgccataggtagggatacattccactggaccaggttacccagggcctcatccaacctggttttgaaacactgccagggatgggatatccacagcttcyctgggcaacttgtttcagtgcctcaccaccctcaccctgcataaagaatyccttscttttctagtttaaaaccattatcctttgtcctatcactacactccctgagttcctctccagctttcctgtagtccctgttaaacgctgggagtatagcatcaaaatatcaagaatagggcatccaattaagacagcccattcgattctmcacatggattttgcttctcccattttctttcccctgctgctgcatattgtggattttgaatatggtatgcaagtatttagattggatccttactgaaaaatgtaagactgcattaccgaaaactgtaagcttttccatcaaaat

SEQ ID NO: 90144 - DNA, 599 bp, Chicken  19866894397762_3
  misc_feature (1)..(36): n is any nucleotide
nnnnnnnnnnnnnnnnnnnnnnnnnnnnnnnnnnnngaatagaaaccaaaccagccaaaacaaacaaataaataaaacaaaaaacctcatagaatcacagaacagtctggattggaaagaactttaaatatatagttccaagcctgctgccataggtagggatacattccactggaccaggttacccagggcctcatccaacctggttttgaaacactgccagggatgggatatccacagcttcyctgggcaacttgtttcagtgcctcaccaccctcaccctgcataaagaatyccttscttttctagtttaaaaccattatcctttgtcctatcactacactccctgagttcctctccagctttcctgtagtccctgttaaacgctgggagtatagcatcaaaatatcaagaatagggcatccaattaagacagcccattcgattctmcacatggattttgcttctcccattttctttcccctgctgctgcatattgtggattttgaatatggtatgcaagtatttagattggatccttactgaaaaatgtaagactgcattaccgaaaactgtaagcttttccatcaaaattgctt

SEQ ID NO: 90145 - DNA, 600 bp, Chicken  19866894397762_4
cataggtagggatacattccactggaccaggttacccagggcctcatccaacctggttttgaaacactgccagggatgggatatccacagcttcyctgggcaacttgtttcagtgcctcaccaccctcaccctgcataaagaatyccttscttttctagtttaaaaccattatcctttgtcctatcactacactccctgagttcctctccagctttcctgtagtccctgttaaacgctgggagtatagcatcaaaatatcaagaatagggcatccaattaagacagcccattcgattctmcacatggattttgcttctcccattttctttcccctgctgctgcatattgtggattttgaatatggtatgcaagtatttagattggatccttactgaaaaatgtaagactgcattaccgaaaactgtaagcttttccatcaaaattgcttgaaagaaatttcttccagttctctcagacaaggtaactgttaaaggttatggttattctacatcaaggctactaaggccagagtcaaattaatttacatcagaggctagtttagggtattatgctctagcaagcctttaaatgaacattgg

SEQ ID NO: 90146 - DNA, 600 bp, Chicken  19866894397766_1
tgccaggagagttggtagaagtggtttagtcacaattgtaggaacttcttcctccttgcctgctggtctgcatgtgctctgtggcatgtgtggtcctagagagctgagacctgaggggtataattgaccctagtgttggtaccaagtcagtcaaggaatctcatctgttgtggagaaggcctgctttcagggtcactaacctaagagagacattggtcttggctgagcagagtgtgaaatcatcctcagcagaaatcctcccactgtttttctcagctgtctggtttctggatgctcagmaattggcttcttggttgctgtttgcaccctgactctctgtgcttatggtggtctaattcccaatctcgggtttttcagaatgagcctggggaggagaggttcttcacagaagatgtcttcaaaaagccattaccaccctctgtgaaaaaggacgaaactgcaggcctggtaagatgttgcctagagcttcactttctccagtcaaggcatgtgtagctaacgaaccactaaactagatcgtgtctggggactcaggtcagtgttctgtaaagctggtagacatgaagcatcaccccagcc

SEQ ID NO: 90147 - DNA, 600 bp, Chicken  19866894397766_2
gtgtagctaacgaaccactaaactagatcgtgtctggggactcaggtcagtgttctgtaaagctggtagacatgaagcatcaccccagcctcctgtttgtgctgctgaatgcacgagtgagcatcacaggttcatcctgttgcagtgctggatgactagtttttggtgttctctgtccagaagaaaatcctgaagccacggagctgcactgagcctggccatatattatgccatagatacagcagggaaaattagtgtcatcattactcctccccacctatagtacttttgcttgatggyttttctcccagggaarcaagactgtagctcttcctgcagcactgtgtttctgttcccatgctgactggctgcgggggttactttgcacctcctgtccacatcttttgagcagatggaggtgtctaaatgtgaactggctctgtgccctctccactgctggtctaaggccactgggagcatggtcagcatcacagtccagcagaaagtgggagtgaaacagyttggcaagctgctttagctgtctctgaaaccaagaatgtaactccaggagaaatgcttctggtgatgcctgcaattgga

SEQ ID NO: 90148 - DNA, 600 bp, Chicken  19866894397766_3
actaaactagatcgtgtctggggactcaggtcagtgttctgtaaagctggtagacatgaagcatcaccccagcctcctgtttgtgctgctgaatgcacgagtgagcatcacaggttcatcctgttgcagtgctggatgactagtttttggtgttctctgtccagaagaaaatcctgaagccacggagctgcactgagcctggccatatattatgccatagatacagcagggaaaattagtgtcatcattactcctccccacctatagtacttttgcttgatggyttttctcccagggaarcaagactgtagctcttcctgcagcactgtgtttctgttcccatgctgactggctgcgggggttactttgcacctcctgtccacatcttttgagcagatggaggtgtctaaatgtgaactggctctgtgccctctccactgctggtctaaggccactgggagcatggtcagcatcacagtccagcagaaagtgggagtgaaacagyttggcaagctgctttagctgtctctgaaaccaagaatgtaactccaggagaaatgcttctggtgatgcctgcaattggagtgtctcccaccaaaa

SEQ ID NO: 90149 - DNA, 600 bp, Chicken  19866894397766_4
tatattatgccatagatacagcagggaaaattagtgtcatcattactcctccccacctatagtacttttgcttgatggyttttctcccagggaarcaagactgtagctcttcctgcagcactgtgtttctgttcccatgctgactggctgcgggggttactttgcacctcctgtccacatcttttgagcagatggaggtgtctaaatgtgaactggctctgtgccctctccactgctggtctaaggccactgggagcatggtcagcatcacagtccagcagaaagtgggagtgaaacagyttggcaagctgctttagctgtctctgaaaccaagaatgtaactccaggagaaatgcttctggtgatgcctgcaattggagtgtctcccaccaaaaccacttctttcaaccgcctggtttccctggaggttttttacatgggtgattagtttgctgcgtgcactgagttcatgctgtggcagtcttaacacctgatcttgactgtttcagaatgactgtggaagggagaagttctttgcagaagatgtctttaaaaaaccattacctccctctgtgaaaaaggacgagagtgcagcccggg

SEQ ID NO: 90150 - DNA, 599 bp, Chicken  19866894397769_1
  misc_feature (1)..(33): n is any nucleotide
nnnnnnnnnnnnnnnnnnnnnnnnnnnnnnnnnacttctatattgtctgggtagagtaaagttaaaaaaaaaaaaattgccatatttctattatttttgttttcaattgaggaaaacctttggctgtattaaactatgcatgaatgattgactgcatgttaatacacagtcacacaagcaaataccattggcatgcagaactgacgaatttatgtaaagaaacactgaaaatatttattgttacatttattactaaatgtgtaagagatatagagtaataccaactattttaaccccttytataattagttacacctgctaaggtattaaaatctattactactgatggatattgacaatcataaatatggttgaattcagcctatataaatattttcattattgtccttagtttaaatagaggctgtgagttaaacttttatatggggaaggtgtctcaatatttaggttaaatgcaaaacatcgaagcatgtgatataagtcagtaactttctaatgcgatccttagtactatacaacaaatgctagtcatgtctaatgttttcagctttccactgtttcatcctttattgaaaaca

SEQ ID NO: 90151 - DNA, 599 bp, Chicken  19866894397772_1
  misc_feature (1)..(15): n is any nucleotide
nnnnnnnnnnnnnnntgctttgcaaagaagccagcgtcaacgttgactcacctgggatggctcagtggggctctgggaatggctgccccatgtccgctgctcccagagggctatgggacgcagtggggctgttggcagccctgcagctataatggcagctcccacctgggcactcctggagctttggcaagaccagcaagaggagatccctggaaccaatgtgtttgcattgcagggtaattctcctcctgcgctgccttcagtactgagatgggaatcctgctgattttgggggagtastgaggaccgagcctggaatatgtacttaacctgttctccgcacagctctttcttttcagacttgtttaaaaataatatttttctcctttttttttttaatctttttctttgcactgggaaagctgccagaggagaactgagctgcttctgtctgcgtggacccagctcatttccaggcaggagctgggcagggagcaggagattagcccaggtacaatccgtgcaygcacctcacrgccagatcctgggctcctggccccacatctgcactgtgcctctgcaaggagggggtttgcaaa

SEQ ID NO: 90152 - DNA, 600 bp, Chicken  19866894397772_2
gcattgcagggtaattctcctcctgcgctgccttcagtactgagatgggaatcctgctgattttgggggagtastgaggaccgagcctggaatatgtacttaacctgttctccgcacagctctttcttttcagacttgtttaaaaataatatttttctcctttttttttttaatctttttctttgcactgggaaagctgccagaggagaactgagctgcttctgtctgcgtggacccagctcatttccaggcaggagctgggcagggagcaggagattagcccaggtacaatccgtgcaygcacctcacrgccagatcctgggctcctggccccacatctgcactgtgcctctgcaaggagggggtttgcaaatggagggatggatctgcctgggcatagagtcatagaattgggttggaagggacccatatagaccatctgatccaactccatgcattgaataggggcgcctacagctcagccagggagatctggcatcttggagagcccctccaggttcacatcccagagcatggctggctgctaagaggtgtgagttggcagactggggagcagaagagccaggatgtgaggtttaa

SEQ ID NO: 90153 - DNA, 600 bp, Chicken  19866894397772_3
gtaattctcctcctgcgctgccttcagtactgagatgggaatcctgctgattttgggggagtastgaggaccgagcctggaatatgtacttaacctgttctccgcacagctctttcttttcagacttgtttaaaaataatatttttctcctttttttttttaatctttttctttgcactgggaaagctgccagaggagaactgagctgcttctgtctgcgtggacccagctcatttccaggcaggagctgggcagggagcaggagattagcccaggtacaatccgtgcaygcacctcacrgccagatcctgggctcctggccccacatctgcactgtgcctctgcaaggagggggtttgcaaatggagggatggatctgcctgggcatagagtcatagaattgggttggaagggacccatatagaccatctgatccaactccatgcattgaataggggcgcctacagctcagccagggagatctggcatcttggagagcccctccaggttcacatcccagagcatggctggctgctaagaggtgtgagttggcagactggggagcagaagagccaggatgtgaggtttaaaataaaaccc

SEQ ID NO: 90154 - DNA, 578 bp, Chicken  19866894397775_1
atcagagatgaaggagatgataataagggcagggaccctagcttgtaactgacaggtaagagctaacatcacgtttcacagaatcctactgtcccacttctgtacacaaagctaggtccctggtatagtcagccccagatgattctgctaggtcaccaaccagcccgagatttaaatgactgccactctgctggacacagactgagttcagaaactgcttaagaaaaagcagcagattggccattactactactgaagatttcaactctgaacacaggagtaaacctccacaagttgaawatactacgccagttcatagaaaccaaacatttacctgaaggtttaaatattcattttggagtactagcaatgcagacagcagaagcaagtgtttagatctaagtttctctgattagcttatcagttcccaaacaaatgaaagtgaatactgaaaaagttcatttagttacttgaagattcaactgactaactggcctttgtgagttactctaatgcaagactgagcactcgtgacaacagcaacaattttttctaacttgatcattctgcacatctca

SEQ ID NO: 90155 - DNA, 600 bp, Chicken  19866894397781_1
acaatacaagggtttcttttttgttttgttctgttttatttttttaagacttaaaagtttttatgtgcagggaaatcaaagaaacatcactgatgctaaacccaccactgaaagaccctgtcttccttcagatgtatattagtgaaataaggtctgaaagatcatttatatgtatagattcaattaaactgtcatactttttttttttttttttttttcccactaacagagaatgaacaagaaaggaccaggctgcaaagaatgtgtacagtgtaatgtgcagtcagtaattatgaattstctaatcattcctagtgaaaagattcaagtctggcattctctataaataaagaagccatagagttcatcagagatggaaacgttattaagtcatcaatggcaaattgtgaaatgatctttttcagtagcttttctacaactttgtcctattacattttaccatttagccactggacatctaccattcttctcaagacacagttccagattcatttctgttcaaaaagcaagtaacttctactaacattgtaaatgaaaaaataaggcaaacaaccttctctgatttttttaaatgattat

SEQ ID NO: 90156 - DNA, 600 bp, Chicken  19866894397783_1
gatacagttgaatatccagagggaacctatacggcagtaaaaagcttctctgggaaatcagaggatcggtccgtgaggaaataaaggataaatgtaaattttaaaacacctctaaatttcactgtgcagggaagtcagctgaaacaatgaatatgtccagttttgaaatttcatattttgtttcagcaacagacatttacttatttattcaaaaagattgtaaaagattgtccatgggtacttgaaatacaacctgaaaatgtgtcctggtaccaacaatgtggacttctgtaagttttrtgcgacaytgtgccaggcccagccaagaagagaatccttttaggcatggtacaatggggaagagaagatgacctctatttggaagagcttgctctgatgagctgtgttgaggaatcatttttctttgcagtttggcttaatgatgtctataaatgcatagaacagctacgctgttaccactgtcatagtggcatcatagtttattacttgctctaccactttcttcactgcttctccaggaaatgacactacagtgaggagggttgagtctttcacagaatatttcctccctggagcaag

SEQ ID NO: 90157 - DNA, 600 bp, Chicken  19866894397783_2
tgaatatccagagggaacctatacggcagtaaaaagcttctctgggaaatcagaggatcggtccgtgaggaaataaaggataaatgtaaattttaaaacacctctaaatttcactgtgcagggaagtcagctgaaacaatgaatatgtccagttttgaaatttcatattttgtttcagcaacagacatttacttatttattcaaaaagattgtaaaagattgtccatgggtacttgaaatacaacctgaaaatgtgtcctggtaccaacaatgtggacttctgtaagttttrtgcgacaytgtgccaggcccagccaagaagagaatccttttaggcatggtacaatggggaagagaagatgacctctatttggaagagcttgctctgatgagctgtgttgaggaatcatttttctttgcagtttggcttaatgatgtctataaatgcatagaacagctacgctgttaccactgtcatagtggcatcatagtttattacttgctctaccactttcttcactgcttctccaggaaatgacactacagtgaggagggttgagtctttcacagaatatttcctccctggagcaagggaaaggc

SEQ ID NO: 90158 - DNA, 600 bp, Chicken  19866894397786_1
tcattcttcagttctgccttatctctttgactttcagtagcttggacttcattatcccttaattaattttccagaaacaagtctttttcgctcgtttcggtacgtcactatatgcagtactttccctgtcttccattccatttatatagtaggtttcagttttcagttactcatctaaaacctgtgtaaatttgaaagttgggctaaatatttcagtggcctattttacctacaaccaccattaccacttctagtattctgatgctgacaagacggatagttttagtttctccattttartcctcttagctttactctcttccaaatgctcattttgagtacttcatctcaaattgtacctcctcttccttttctaacagctttgatcaaaatcaagtttgggatcaagacaataaaaatactctttaggattaaacacaggctcttacctttggttttttgatctgtgacctgcaaagtaagagtaagaatgtaaacacagttgtaagaacctcaaaacaaacattcagcaggccttactaattcatgaatttataagcccaagattggtatatgctgaaagaaaataatcagctgatg

SEQ ID NO: 90159 - DNA, 422 bp, Chicken  19866894397788_1
tttagagatccctgttgaatcttgcagacattgtgaaagcagcatagacaaattcattccctgttatggccctgttgataggtctgttactcccattcccttgatatttctgcaaaaagaacagctatgaatgtttatgacagagcacacagcagaacatttctgcttttatagggcagatcctggttctgaaacagaaaggataggctgaaaatgccaagaatgccaagccttgtcacgacaggtcagactaataacccagaactgatggcagtttgatacctggatatgttcattatrtkaaataagtaaatctcgggtccaagcgtttctcaatttaatgaggtgacagtaaatgatttgcagactccggtgctacgttgagctagctaactaatgtgaaaagccagtccttctgtaaa

SEQ ID NO: 90160 - DNA, 420 bp, Chicken  19866894397788_2
tagagatccctgttgaatcttgcagacattgtgaaagcagcatagacaaattcattccctgttatggccctgttgataggtctgttactcccattcccttgatatttctgcaaaaagaacagctatgaatgtttatgacagagcacacagcagaacatttctgcttttatagggcagatcctggttctgaaacagaaaggataggctgaaaatgccaagaatgccaagccttgtcacgacaggtcagactaataacccagaactgatggcagtttgatacctggatatgttcattatrtkaaataagtaaatctcgggtccaagcgtttctcaatttaatgaggtgacagtaaatgatttgcagactccggtgctacgttgagctagctaactaatgtgaaaagccagtccttctgtaaa

SEQ ID NO: 90161 - DNA, 600 bp, Chicken  19866894397793_1
tttccacaaaaccacgtatttcttcaagatacccctgattctggggtgaatatttctcactatgcagtttggataaaattgaaaagttaaactttctgttcaagagcaaaacttggctgaaggggaaaataaaggatgtttgttctgtgagttaatgattaacttaaaagattgaattataaagttaaatctccttggagaaccttaatgaatctcagctgcttctaaagttgaaataaaacacccatgtggactgacccagagtcccagtatcaattcactgtttggaggttaattttycagttcattttaacttgtttgttgttttagttttactgagcttacctgaaggtagacatctatgatacaaaaagtagaattatcactctatttcacttctgtttgtgtctgttttctctgttgctagacagcatattattttttagttgattcccatagtttytaaaataccgcaatagtagataatgccagagaaagccaaataacatactgtctcttttgtcctaataacgggaaggtatttgtctggctaaggtcacggttgcttctaagtataaattacttaattgttttcagtgg

SEQ ID NO: 90162 - DNA, 600 bp, Chicken  19866894397793_2
ttaaaagattgaattataaagttaaatctccttggagaaccttaatgaatctcagctgcttctaaagttgaaataaaacacccatgtggactgacccagagtcccagtatcaattcactgtttggaggttaattttycagttcattttaacttgtttgttgttttagttttactgagcttacctgaaggtagacatctatgatacaaaaagtagaattatcactctatttcacttctgtttgtgtctgttttctctgttgctagacagcatattattttttagttgattcccatagtttytaaaataccgcaatagtagataatgccagagaaagccaaataacatactgtctcttttgtcctaataacgggaaggtatttgtctggctaaggtcacggttgcttctaagtataaattacttaattgttttcagtggggctctctgtgagctccaaggctgggcgatctaatctaaagcagagctctgcgtatctgaaggagcgtttccagggatcatccttgaaggacacagggactgctgggtctccagctgctggacaattgggttgtgttagcgcttatatactgtttttgaggag

SEQ ID NO: 90163 - DNA, 600 bp, Chicken  19866894397797_1
gacaaacattaaaacagaaatagggaggtttggggtttttttgttttgttttctggttgatttttggttttgtttttgaaagtttatagcagattctctgtgaaaaaccttttccctgctccacatcttctcactgaatggatgtctacctaaaaccagtattgtgcaatggttccatgagatgtttggagtgttctgaggactctcaatgcttcctttttttcaaagtttttatgtatagcttaaatataagaaaagcttaacatatcttttccacctctaaagtgctgtttcttcttytgtaccaaactttgttttctgctgcctgtaataaaagagatattcttgctacagtctctggtagagcttttatttcttttttcttgtttcttttcttaattaaaattaaagaagtcatagcctgcaagaatatgatttgttcctggtgcaacaaaacataatgctcttctagattatctcagtggggagcactatgactgcaatgcaccaaaaacattctgaaagtaaaagtaaataaaccagctggtttcgcgttaaacaaaacaatggaaaattcccattaatataaaatagagagct

SEQ ID NO: 90164 - DNA, 543 bp, Chicken  19866894397798_1
ccacagacatccacccaaccttgctccctgttggctctcgtcaaactcctgcccgtcaagcacttgcagactttctgccttcacaatctcagtatcgcgggctgcaagagtttgtatacaaagctgtcaccaccctcatgagtgggcggattttccagctcatctgtaacctgagtggcacttcagccctgggatctttcttcctagtgtcaacagcacgcagcgccacgctatcccgttacacattatcttcgatcaagttgatgggcaggagggaacagggccaggagtaattgtgayaggctgggtgtttttacaggcacaatggttaatgggctggttaatgtaaaggattagcctcttcatccccaagacatatgagaggggaggcatgggggcagcgctactcagtaagccccagtaggaaacaccacaatcagcttgtaatcagagagaagcaaatcagaaaaatcctcattaatatcttcttgttggcacaagggctggttttccagggccctgatgttcacagagaatacacgg

SEQ ID NO: 90165 - DNA, 600 bp, Chicken  19866894397801_1
cagctgtcttcttctatgaagcatttatatctatcccagatgtatcttaacaagtctttctacaactgtagaaatctgatgactttattagcatgctgaagactcttgtaattttgacacatgacaatgttttcattgtcttgacttaacagctcattgtaaccaataaatgaatgttgacacattgacatttatgagaattagttaagtgcctgataaaactgtaggtcgtcacgatgacctgtaacgatttaactgacatgaaccctagagaaaactaaatttatggttatattttcmtctctaattttctctgacgaagtagttcactaacagtctcttacactgtcaaatggtattgcttctgcttcttggtacagaaattgaaggaagggtataagtaaaattaaactcagtttaatgtgcattgatctaaaattaattcagtcctttgttcaaatacatattttaataaacwtaagstctctgtatttacacagtaaaataatttatttataattctgaataaaaaataataaatgatctctctgatactgcctatttgcacgaataaaagtgccttagacataactctagttc

SEQ ID NO: 90166 - DNA, 600 bp, Chicken  19866894397801_2
gacacattgacatttatgagaattagttaagtgcctgataaaactgtaggtcgtcacgatgacctgtaacgatttaactgacatgaaccctagagaaaactaaatttatggttatattttcmtctctaattttctctgacgaagtagttcactaacagtctcttacactgtcaaatggtattgcttctgcttcttggtacagaaattgaaggaagggtataagtaaaattaaactcagtttaatgtgcattgatctaaaattaattcagtcctttgttcaaatacatattttaataaacwtaagstctctgtatttacacagtaaaataatttatttataattctgaataaaaaataataaatgatctctctgatactgcctatttgcacgaataaaagtgccttagacataactctagttctgcattatttgtgttgtaaggttgctgtggctctaggcaattttaataacttcactgagttcataggaccattcatacaggcactcatgtggaaatgcaatatgaaatctgacaagcaggagctgcttatattggtctacaattattcaaagtccattgatttcagcagttacctctg

SEQ ID NO: 90167 - DNA, 600 bp, Chicken  19866894397801_3
attgacatttatgagaattagttaagtgcctgataaaactgtaggtcgtcacgatgacctgtaacgatttaactgacatgaaccctagagaaaactaaatttatggttatattttcmtctctaattttctctgacgaagtagttcactaacagtctcttacactgtcaaatggtattgcttctgcttcttggtacagaaattgaaggaagggtataagtaaaattaaactcagtttaatgtgcattgatctaaaattaattcagtcctttgttcaaatacatattttaataaacwtaagstctctgtatttacacagtaaaataatttatttataattctgaataaaaaataataaatgatctctctgatactgcctatttgcacgaataaaagtgccttagacataactctagttctgcattatttgtgttgtaaggttgctgtggctctaggcaattttaataacttcactgagttcataggaccattcatacaggcactcatgtggaaatgcaatatgaaatctgacaagcaggagctgcttatattggtctacaattattcaaagtccattgatttcagcagttacctctgattca

SEQ ID NO: 90168 - DNA, 599 bp, Chicken  19866894397814_1
  misc_feature (1)..(262): n is any nucleotide
nnnnnnnnnnnnnnnnnnnnnnnnnnnnnnnnnnnnnnnnnnnnnnnnnnnnnnnnnnnnnnnnnnnnnnnnnnnnnnnnnnnnnnnnnnnnnnnnnnnnnnnnnnnnnnnnnnnnnnnnnnnnnnnnnnnnnnnnnnnnnnnnnnnnnnnnnnnnnnnnnnnnnnnnnnnnnnnnnnnnnnnnnnnnnnnnnnnnnnnnnnnnnnnnnnnnnnnnnnnnnnnnnnnnnnnnnnnnnnnnnnnnnnnnnnnnnnnnnnnnnntccaagtcctgacacactactgcagcagtcacatgaayttatcgaaaagagttcttactgaactcaaatcacatactgcagcatttgcaggatcaaggtttaaagtctgttaagatttcagcgtagtgacaggttttcagatattctctgtcacagaggacaaatgcagaacagtttgaaagatgcaagaatgaaactgtaaattgagactatgtaaactgaagacaagttcagacatcattctctagatatttaaagttcctctgacctggtggggagtttgagctgaaaaaaaaaaaagattagctgagtacagtgtccaaggttgtgacagagt

SEQ ID NO: 90169 - DNA, 600 bp, Chicken  19866894397814_2
tagtgacaggttttcagatattctctgtcacagaggacaaatgcagaacagtttgaaagatgcaagaatgaaactgtaaattgagactatgtaaactgaagacaagttcagacatcattctctagatatttaaagttcctctgacctggtggggagtttgagctgaaaaaaaaaaaagattagctgagtacagtgtccaaggttgtgacagagtgtgacatttgggccctcttttctctgttaaggtccgcaaagccactaataaccatgagataggaatgtaaaattatacaatatagygtctccttgcagactgtgttttgatatagggagatatgtgagatacacattagttgagcatcacaatttctgctttgttgcttgtccccatgatcacatgtgattcagtaaccagagctcagcaaaatgaaggtaacaaaagtaactcctaacctgccagtaatatagatggacataaatgcaaatctgttaaaatgacttaaactgagatgaaacaaatgtcagagatgacactagaatattttgaggaaaaacctcagacttacatttggtctattttctcatttttctgcatttaaa

SEQ ID NO: 90170 - DNA, 599 bp, Chicken  19866894397816_1
  misc_feature (1)..(80): n is any nucleotide
nnnnnnnnnnnnnnnnnnnnnnnnnnnnnnnnnnnnnnnnnnnnnnnnnnnnnnnnnnnnnnnnnnnnnnnnnnnnnnnngcacacttgtgatagagacattgagatcaggggagattttgagacaaccaaaaccacacacagatgaaattgctgttgtgttaaacgaggaacacaggaaaacatggacgcattgagcgtgcagaaccacagccaggaataagcatccatccaccactgacaaactccacctctgaggtttccagctactgggatgtatctccatttggaaggacaggayagtgctragagcccatcagcatctggaacagcccacgtctgaagggcagtgatgtcctgctgarctgcaaaggctcgtttccaccagcagtcatgagagctggaaagcttactaagacatagagctcactccttgctctcactgtgcctgagaatggggctgaatgagagactcccaccgcagacaggggaagcacctaacgtgcaacagtggtttcagagaccttttaatattcaagggcaccttcagaaggtagctaagcagatctggtatggagaggcaaatcayagacccggaca

SEQ ID NO: 90171 - DNA, 599 bp, Chicken  19866894397816_2
  misc_feature (1)..(73): n is any nucleotide
nnnnnnnnnnnnnnnnnnnnnnnnnnnnnnnnnnnnnnnnnnnnnnnnnnnnnnnnnnnnnnnnnnnnnnnnngcacacttgtgatagagacattgagatcaggggagattttgagacaaccaaaaccacacacagatgaaattgctgttgtgttaaacgaggaacacaggaaaacatggacgcattgagcgtgcagaaccacagccaggaataagcatccatccaccactgacaaactccacctctgaggtttccagctactgggatgtatctccatttggaaggacaggayagtgctragagcccatcagcatctggaacagcccacgtctgaagggcagtgatgtcctgctgarctgcaaaggctcgtttccaccagcagtcatgagagctggaaagcttactaagacatagagctcactccttgctctcactgtgcctgagaatggggctgaatgagagactcccaccgcagacaggggaagcacctaacgtgcaacagtggtttcagagaccttttaatattcaagggcaccttcagaaggtagctaagcagatctggtatggagaggcaaatcayagacccggacattaagtg

SEQ ID NO: 90172 - DNA, 599 bp, Chicken  19866894397816_3
  misc_feature (1)..(16): n is any nucleotide
nnnnnnnnnnnnnnnngcacacttgtgatagagacattgagatcaggggagattttgagacaaccaaaaccacacacagatgaaattgctgttgtgttaaacgaggaacacaggaaaacatggacgcattgagcgtgcagaaccacagccaggaataagcatccatccaccactgacaaactccacctctgaggtttccagctactgggatgtatctccatttggaaggacaggayagtgctragagcccatcagcatctggaacagcccacgtctgaagggcagtgatgtcctgctgarctgcaaaggctcgtttccaccagcagtcatgagagctggaaagcttactaagacatagagctcactccttgctctcactgtgcctgagaatggggctgaatgagagactcccaccgcagacaggggaagcacctaacgtgcaacagtggtttcagagaccttttaatattcaagggcaccttcagaaggtagctaagcagatctggtatggagaggcaaatcayagacccggacattaagtgtctgcagaacactttggcttctttacagaaagaagcccagaccacttcatgatacga

SEQ ID NO: 90173 - DNA, 600 bp, Chicken  19866894397816_4
gaaggacaggayagtgctragagcccatcagcatctggaacagcccacgtctgaagggcagtgatgtcctgctgarctgcaaaggctcgtttccaccagcagtcatgagagctggaaagcttactaagacatagagctcactccttgctctcactgtgcctgagaatggggctgaatgagagactcccaccgcagacaggggaagcacctaacgtgcaacagtggtttcagagaccttttaatattcaagggcaccttcagaaggtagctaagcagatctggtatggagaggcaaatcayagacccggacattaagtgtctgcagaacactttggcttctttacagaaagaagcccagaccacttcatgatacgaatttgcaaaaggaaatggctcygtggcaaggcacagtyggggtatctcagaagcccacagctgggacacagcatccctaagcagcaaactgcaggatggtttgagtgctaagcagctcccagcagytgcatggccatcacttctgctgctctcctggcccaggggcacagcacaccagtgtgcagcaaaaggaaacatctctggtcagagggggcggtcctcagc

SEQ ID NO: 90174 - DNA, 600 bp, Chicken  19866894397816_5
agcagtcatgagagctggaaagcttactaagacatagagctcactccttgctctcactgtgcctgagaatggggctgaatgagagactcccaccgcagacaggggaagcacctaacgtgcaacagtggtttcagagaccttttaatattcaagggcaccttcagaaggtagctaagcagatctggtatggagaggcaaatcayagacccggacattaagtgtctgcagaacactttggcttctttacagaaagaagcccagaccacttcatgatacgaatttgcaaaaggaaatggctcygtggcaaggcacagtyggggtatctcagaagcccacagctgggacacagcatccctaagcagcaaactgcaggatggtttgagtgctaagcagctcccagcagytgcatggccatcacttctgctgctctcctggcccaggggcacagcacaccagtgtgcagcaaaaggaaacatctctggtcagagggggcggtcctcagcctagaaaggagataggaagagcaaggcagccaaagagcatcatcctcactgggggtgagaaaaagtcgtccaggaggggcaaaatgaaggcaaagag

SEQ ID NO: 90175 - DNA, 600 bp, Chicken  19866894397816_6
ggaaagcttactaagacatagagctcactccttgctctcactgtgcctgagaatggggctgaatgagagactcccaccgcagacaggggaagcacctaacgtgcaacagtggtttcagagaccttttaatattcaagggcaccttcagaaggtagctaagcagatctggtatggagaggcaaatcayagacccggacattaagtgtctgcagaacactttggcttctttacagaaagaagcccagaccacttcatgatacgaatttgcaaaaggaaatggctcygtggcaaggcacagtyggggtatctcagaagcccacagctgggacacagcatccctaagcagcaaactgcaggatggtttgagtgctaagcagctcccagcagytgcatggccatcacttctgctgctctcctggcccaggggcacagcacaccagtgtgcagcaaaaggaaacatctctggtcagagggggcggtcctcagcctagaaaggagataggaagagcaaggcagccaaagagcatcatcctcactgggggtgagaaaaagtcgtccaggaggggcaaaatgaaggcaaagagccactttcccatcaca

SEQ ID NO: 90176 - DNA, 600 bp, Chicken  19866894397816_7
gaagcacctaacgtgcaacagtggtttcagagaccttttaatattcaagggcaccttcagaaggtagctaagcagatctggtatggagaggcaaatcayagacccggacattaagtgtctgcagaacactttggcttctttacagaaagaagcccagaccacttcatgatacgaatttgcaaaaggaaatggctcygtggcaaggcacagtyggggtatctcagaagcccacagctgggacacagcatccctaagcagcaaactgcaggatggtttgagtgctaagcagctcccagcagytgcatggccatcacttctgctgctctcctggcccaggggcacagcacaccagtgtgcagcaaaaggaaacatctctggtcagagggggcggtcctcagcctagaaaggagataggaagagcaaggcagccaaagagcatcatcctcactgggggtgagaaaaagtcgtccaggaggggcaaaatgaaggcaaagagccactttcccatcacaagcagtttcttgttttgcatccagtctcctgtctgcaacagcaagcccatcaagaaagcatccctgatatcataaaacagccaaaacc

SEQ ID NO: 90177 - DNA, 600 bp, Chicken  19866894397819_1
gctgggatgcagaggctggtattcatattctgctgggctcttatgtcctctgtgagtgctgatttattgaataaaatctcatcactactattcttccagtactttctgcattttttgaacctagataaaagattattctccctctctctcaccccatggaaattaaatacatcacttcccttcagactttttacaaaaaatgtgttgaaagtaattcctctaaacacaaacattaccagagagggttgtatgggcaaaatcctcagctagcacaaacctctgggctccattgctttttayggaactgcactcaagctgaaggtctcatatgaaacatgaatctggcaactggtctggcagtccaataagtgggcatcctcccactcataccaagagcgccagcacctaacatctacagtgataaagttcacactaaaaatcacatgcacaaccccagtgcatgatgtacccagacrtctggagccaaacactgggacatctgttttcatcaagcaacctttcatacttagtggatgtatttggctgccttgtgttgtattcaggtgcagtactccaaatatatgcagacactaatgtatt

SEQ ID NO: 90178 - DNA, 600 bp, Chicken  19866894397819_2
tcccttcagactttttacaaaaaatgtgttgaaagtaattcctctaaacacaaacattaccagagagggttgtatgggcaaaatcctcagctagcacaaacctctgggctccattgctttttayggaactgcactcaagctgaaggtctcatatgaaacatgaatctggcaactggtctggcagtccaataagtgggcatcctcccactcataccaagagcgccagcacctaacatctacagtgataaagttcacactaaaaatcacatgcacaaccccagtgcatgatgtacccagacrtctggagccaaacactgggacatctgttttcatcaagcaacctttcatacttagtggatgtatttggctgccttgtgttgtattcaggtgcagtactccaaatatatgcagacactaatgtatttatttcaatgcacaattatttaacttcaggcagctgtgacatccaagaactggcatgcagtcctccggagtgccacatctgcatttattaaaagattccatgtcaatatacacaagatagtgtttgtgtacatttggaaatctgcacctgtatgtgtactgagatgtcctccaaga

SEQ ID NO: 90179 - DNA, 600 bp, Chicken  19866894397822_1
ttagtacccatttgctaaaagcaaaatgctcttccatctccatgctgagctttctggggaagggagagccaaggtgagcagtgaaaggtaggaacagcagtgctaagtgttgtgaaaatataaccgaaaagaaaatgacctcttgaactatttcatgttagaaccttcattgttttagtgactcctatgattcctgagtttttgactgagactgaactccatgctgtttgtaacacatggatgtgatgggcagccacctccaggacaggacagctggggccatcagcgccctcctgttcycttccttggggtgatgtccaacttggactgccagctgggtatggtgtctgcttcccagcctggtgctccaggatcctgcagcgtatggggctgtttgggctgggaaattgtggtggkgggggggataattcatctaaatgtgtcttatcgtcatcgtttgtactttgaaatgaaatttcccttgtcttttaaacaaataatacaccgcccactactatgtgactacgcaaaggggacagatgttatattacaatgcaagtcagaaaggatttaaataatgcagcagaaagggagcagcag

SEQ ID NO: 90180 - DNA, 600 bp, Chicken  19866894397822_2
atataaccgaaaagaaaatgacctcttgaactatttcatgttagaaccttcattgttttagtgactcctatgattcctgagtttttgactgagactgaactccatgctgtttgtaacacatggatgtgatgggcagccacctccaggacaggacagctggggccatcagcgccctcctgttcycttccttggggtgatgtccaacttggactgccagctgggtatggtgtctgcttcccagcctggtgctccaggatcctgcagcgtatggggctgtttgggctgggaaattgtggtggkgggggggataattcatctaaatgtgtcttatcgtcatcgtttgtactttgaaatgaaatttcccttgtcttttaaacaaataatacaccgcccactactatgtgactacgcaaaggggacagatgttatattacaatgcaagtcagaaaggatttaaataatgcagcagaaagggagcagcagcacaggaatgcatcacggctatcaggcatatgtatattgtacccataaaactgtggaaaatgacttatttcacaccttctgaggactacaaaggaggccaaaagagcaataattgta

SEQ ID NO: 90181 - DNA, 600 bp, Chicken  19866894397830_1
aaacaattccacctacttgcaagatatgctgctctcaagaggacagacatgcaagtaaccctgttttttccctgccttctgaaaccgctgtgttgccaagtttacatttgaaagaacatgagaactttattttgcagtatagttttctacagctttttagttttcatttatttcacagcagacataccttgcatagcgcgttgagcattttctgctccatcaactgcactagtaaatttttctttctgaaaaatggacaaaaacctgaggtaagatttgatgttagtagtataatttggycactgaatttgtattaggcaytctacatgtagaaaacaaaccgtatctatttatgataggagtgaaaactgaagtttttgaattacagcttagcactgatatattcagcaacataatgcaagactgatcccttgccttggttgcaagcaagcccctaagcyttcraaataagctctccatcagcttgcatagcaacagaactgcagacacaacccagcrtaagaaacatgagttctgggcttctcaaagtaagaagctatccacattattcaaaggctgcacagtggacatctgcaatcc

SEQ ID NO: 90182 - DNA, 600 bp, Chicken  19866894397830_2
agatatgctgctctcaagaggacagacatgcaagtaaccctgttttttccctgccttctgaaaccgctgtgttgccaagtttacatttgaaagaacatgagaactttattttgcagtatagttttctacagctttttagttttcatttatttcacagcagacataccttgcatagcgcgttgagcattttctgctccatcaactgcactagtaaatttttctttctgaaaaatggacaaaaacctgaggtaagatttgatgttagtagtataatttggycactgaatttgtattaggcaytctacatgtagaaaacaaaccgtatctatttatgataggagtgaaaactgaagtttttgaattacagcttagcactgatatattcagcaacataatgcaagactgatcccttgccttggttgcaagcaagcccctaagcyttcraaataagctctccatcagcttgcatagcaacagaactgcagacacaacccagcrtaagaaacatgagttctgggcttctcaaagtaagaagctatccacattattcaaaggctgcacagtggacatctgcaatcctgtgatcaatcttataccagt

SEQ ID NO: 90183 - DNA, 600 bp, Chicken  19866894397830_3
tttcatttatttcacagcagacataccttgcatagcgcgttgagcattttctgctccatcaactgcactagtaaatttttctttctgaaaaatggacaaaaacctgaggtaagatttgatgttagtagtataatttggycactgaatttgtattaggcaytctacatgtagaaaacaaaccgtatctatttatgataggagtgaaaactgaagtttttgaattacagcttagcactgatatattcagcaacataatgcaagactgatcccttgccttggttgcaagcaagcccctaagcyttcraaataagctctccatcagcttgcatagcaacagaactgcagacacaacccagcrtaagaaacatgagttctgggcttctcaaagtaagaagctatccacattattcaaaggctgcacagtggacatctgcaatcctgtgatcaatcttataccagtgttttccagctcagccagcaggaagagatgctggacggtggaaaacaagggaggatactgaagaagacattaagtgagactctgacatcaacttcaaatactatggccatgaaagattttacgacaaggacagtaaaact

SEQ ID NO: 90184 - DNA, 600 bp, Chicken  19866894397830_4
atttatttcacagcagacataccttgcatagcgcgttgagcattttctgctccatcaactgcactagtaaatttttctttctgaaaaatggacaaaaacctgaggtaagatttgatgttagtagtataatttggycactgaatttgtattaggcaytctacatgtagaaaacaaaccgtatctatttatgataggagtgaaaactgaagtttttgaattacagcttagcactgatatattcagcaacataatgcaagactgatcccttgccttggttgcaagcaagcccctaagcyttcraaataagctctccatcagcttgcatagcaacagaactgcagacacaacccagcrtaagaaacatgagttctgggcttctcaaagtaagaagctatccacattattcaaaggctgcacagtggacatctgcaatcctgtgatcaatcttataccagtgttttccagctcagccagcaggaagagatgctggacggtggaaaacaagggaggatactgaagaagacattaagtgagactctgacatcaacttcaaatactatggccatgaaagattttacgacaaggacagtaaaactaaag

SEQ ID NO: 90185 - DNA, 600 bp, Chicken  19866894397830_5
tcaactgcactagtaaatttttctttctgaaaaatggacaaaaacctgaggtaagatttgatgttagtagtataatttggycactgaatttgtattaggcaytctacatgtagaaaacaaaccgtatctatttatgataggagtgaaaactgaagtttttgaattacagcttagcactgatatattcagcaacataatgcaagactgatcccttgccttggttgcaagcaagcccctaagcyttcraaataagctctccatcagcttgcatagcaacagaactgcagacacaacccagcrtaagaaacatgagttctgggcttctcaaagtaagaagctatccacattattcaaaggctgcacagtggacatctgcaatcctgtgatcaatcttataccagtgttttccagctcagccagcaggaagagatgctggacggtggaaaacaagggaggatactgaagaagacattaagtgagactctgacatcaacttcaaatactatggccatgaaagattttacgacaaggacagtaaaactaaaggagcatggcttttgttgctaactacggtgtaggctttcaggagaactgcaccca

SEQ ID NO: 90186 - DNA, 600 bp, Chicken  19866894397831_1
agaaagcagtaaatgttttgattgctttcattacttgtaataattatgcttccttcctctttctcattgtgcaactgtagtcaggattccaccaaaacagtattttttaaaaattgggttatattttatatgacttcttttcttttgcactacagacaccatgtggtgcttctgataactacatggtctctggctgcacttcactattaggaatactatacaataggattaaaggttgcgaagttgtgcatgcacattttctgtacatctctgcatgtaaggaaagggattccttccatyctttcagcaaccatgtaagctttgaaagagaattaaaggtagaaagcgttgcacttgccaagagcatacaattacagtacttttgaggttactctaagtttcacaagttatctggtctgtaaaagggctacaaattcagacgtgctcagtcagtcatgaactgcagagtatcacccagtgattaccatagaatctttacacaaagcagctgactttatatttcctacaacatggagagaccatatatgtgcaagtcagttggtctgctacataaaactccatgtagaacttcttggtttt

SEQ ID NO: 90187 - DNA, 599 bp, Chicken  19866894397838_1
  misc_feature (1)..(31): n is any nucleotide
nnnnnnnnnnnnnnnnnnnnnnnnnnnnnnnttaacatcaaaagtgtgtaaatcatcttgtcatagtgtatatatttcctgtgcaattaagagtttaaattgggataaacgtctcctaaacagctatgattgcgatttactttgtgagagtttattctcttggcacaaaattaccttgttaatagagctgagcagaaatgaatactaaaaacaatttaagatgtcaaaatgcagctttgttcccagtcaggaggaagctcacttctgagtagtgaggagtaagagatgatggaggtcccygagacaaaataggatccacaggtgctgctcacttgacatttagcttctatttttcccagagcaggtggctacgagtgctaggttgagccactgggagatgtgactacaacctggttattttgggcatgtgtttggcaagtgaaattgtccaaatcttatcaggaacggtgcagctccatagaacwwcttggttggagaatcagagacacaatgatctaatgaatttgttttactctatagtttacctacagtaacacttattaactaaatatgggtaatttgatgcgtgtgatcttgct

SEQ ID NO: 90188 - DNA, 600 bp, Chicken  19866894397838_2
agctgagcagaaatgaatactaaaaacaatttaagatgtcaaaatgcagctttgttcccagtcaggaggaagctcacttctgagtagtgaggagtaagagatgatggaggtcccygagacaaaataggatccacaggtgctgctcacttgacatttagcttctatttttcccagagcaggtggctacgagtgctaggttgagccactgggagatgtgactacaacctggttattttgggcatgtgtttggcaagtgaaattgtccaaatcttatcaggaacggtgcagctccatagaacwwcttggttggagaatcagagacacaatgatctaatgaatttgttttactctatagtttacctacagtaacacttattaactaaatatgggtaatttgatgcgtgtgatcttgctattggggaaatgcttattttctgaaagtaaatgattagtgagttgacaagatatatttgcagagaaaaacatatataaaaagctttgtatgtcagagatgcataagtaaggagactggttgttgacatgaagcactcacagtgcattttagtatttatggactagggacagtaatagactaccact

SEQ ID NO: 90189 - DNA, 600 bp, Chicken  19866894397838_3
gctgagcagaaatgaatactaaaaacaatttaagatgtcaaaatgcagctttgttcccagtcaggaggaagctcacttctgagtagtgaggagtaagagatgatggaggtcccygagacaaaataggatccacaggtgctgctcacttgacatttagcttctatttttcccagagcaggtggctacgagtgctaggttgagccactgggagatgtgactacaacctggttattttgggcatgtgtttggcaagtgaaattgtccaaatcttatcaggaacggtgcagctccatagaacwwcttggttggagaatcagagacacaatgatctaatgaatttgttttactctatagtttacctacagtaacacttattaactaaatatgggtaatttgatgcgtgtgatcttgctattggggaaatgcttattttctgaaagtaaatgattagtgagttgacaagatatatttgcagagaaaaacatatataaaaagctttgtatgtcagagatgcataagtaaggagactggttgttgacatgaagcactcacagtgcattttagtatttatggactagggacagtaatagactaccactg

SEQ ID NO: 90190 - DNA, 600 bp, Chicken  19866894397838_4
agagacacaatgatctaatgaatttgttttactctatagtttacctacagtaacacttattaactaaatatgggtaatttgatgcgtgtgatcttgctattggggaaatgcttattttctgaaagtaaatgattagtgagttgacaagatatatttgcagagaaaaacatatataaaaagctttgtatgtcagagatgcataagtaaggagactggttgttgacatgaagcactcacagtgcattttagtatttatggactagggacagtaatagactaccactggtgaaaattatttcygtctaagaacagctttaacctctctgagcagctggtggcacgttcatttcatttccaaatgtctaaaacaaaccacaaatgcttctgaatccaggtgtctcagaagaaaacattgtccaaaacagagatttctacacttttcaaacatgtaaaaacaaaacctattaccatactgttccatgtccataaaatataattgaaggcaaatgtaagattatcagctatcttagacaacaggccttttttttttttattgtatccactggaaatggaaactgagcacatcttcagtgcaatact

SEQ ID NO: 90191 - DNA, 600 bp, Chicken  19866894397838_5
gtccataaaatataattgaaggcaaatgtaagattatcagctatcttagacaacaggccttttttttttttattgtatccactggaaatggaaactgagcacatcttcagtgcaatactgtttatttagaaatacactatgctcatagttctgctttctctatatatcaaaaataaaattgcaaacaacaaaattcctatatttctaaatgaatcctttgttccaaatcaaagaatcacacagaatcacagaatggcctgggttggaagggacctcaaggatcatgaatctccaaccccyctgccaggcagggccaccaacctccccatttactagaccaggttgcccagggccccatccaacctggccttgaacacctccagggacagagcatctacaacttctctgggcagcccattccagcacctcaccactctcctggcaaagaatttccccctaacatccaacctaaatctttcctcttacaacttaaaaccgttcccccttgtcctgctgttatctaccctttcaaagagtttactcccttcctgtttataggctcccttcaggtactgaaaggctgcaatgaggtcaccccac

SEQ ID NO: 90192 - DNA, 599 bp, Chicken  19866894397847_1
  misc_feature (1)..(104): n is any nucleotide
nnnnnnnnnnnnnnnnnnnnnnnnnnnnnnnnnnnnnnnnnnnnnnnnnnnnnnnnnnnnnnnnnnnnnnnnnnnnnnnnnnnnnnnnnnnnnnnnnnnnnnnnttgtcttttaacttgcattttgtgatgagaaagtgtggccgtggtaagacagagtttcgctaagaagagggtgggggcaagtgtgcgtctctccttttgatgtatctctggacttatacctttctcttccatgtcacagtaagataaatgaaactggagaggtcatattcctgctgaaaaggactgaactccttcsctgaaggacagtagagctggagcatatactttgtgtctctgcatatagaaaaaaaggtagaagagattgtctgaggagtgctggcataaggcatcctctgtcttcttctagaggaagacaaaacagtgggcatactttttttttatctactactgaaaagcagccatcagtgcagaataacatgagaacagtttgggaggaaacatggaacactgcattcaagtgaaactaattacccgattagagtttggcctggctgtggtggttgacatccaatggtcttggcgacaatacctgtg

SEQ ID NO: 90193 - DNA, 600 bp, Chicken  19866894397847_2
aaacagtgggcatactttttttttatctactactgaaaagcagccatcagtgcagaataacatgagaacagtttgggaggaaacatggaacactgcattcaagtgaaactaattacccgattagagtttggcctggctgtggtggttgacatccaatggtcttggcgacaatacctgtgatgaagtccaagtctagtcttgattcatttgaaggatctggacaaaccttctggacctgcgtgctgaatgctaagcagtgcaaaaataggccactgatttaaagaacccatggctaccacrgatgtcagtgggcacttggcatacttacaggtgaatttgcttatttgggtttcggaaacaattgtttccatttcaagcatgcagtctgatgatatttgatgtttgcatcagagcatcttccactcacagctctaggataagcactttccgttccttcagcacttccaacttcaccccttaaaatttactccaagtatgaccttgagatcttacaaacttagaaaattaccttaaagatgtcccacttagtctgctactgttccttctctttatctctccagagcttaaaggcatgttatc

SEQ ID NO: 90194 - DNA, 600 bp, Chicken  19866894397850_1
aggatgtcaggagaaattccttctctgaaagagtgatcaagcattgaaacaggctgcccagagaagtgatggagtcaccatccctaaaggtgttcaaaaaacatggcagtgtggcatttagggacgtggtttactgggcatagtggggatgatctgacagttggacttggcgatctttttccaaccttgctaattctagattgtaggagaggagagtccgtgctctgccaattcatggcagagctgatctcatggtgaggccgtgtctgtgcaggttgcatgcagtgctggggaagagayggccactcagccaccccccagttgtggcagctctgcttccccctggcctcccgctgttcagtgcctctctgcattcgggtgggtttcttggctcccagccttgggtgcaatgtgcctggggcagccaggcaggtcctgactttgggggaaccccatggtggggtagccctgctgtgagccccaaggccaggcagggtgctcgtgccgtagagaaagtgcaggcagaaggaaacgggggcaggattctgcacggcagcactgcctttggaacactgcatggcagagcatttactttggcaa

SEQ ID NO: 90195 - DNA, 600 bp, Chicken  19866894397852_1
ccagctttgtttataaatctaattttaggacaggcattggtgtgatgcagtataagaatgaagcttctctcaaagctgaaattctcctatttgtagatggacattgcaagcaggaggtaaaaaggaaaataacctccaagacaagtccaaatctggtggcaaccaacgagtgggcaatatcggccaagttcttaaaatatcagccctcagactgaagtgccacctgagttatttgtgaccacagctactgcatgaactgatatcttcattcctccgatctgaggaggctaagccaaatarctctccaactctgaggccataaaataactagattgggattacaactgtaatatcattatgaggaaatcatggaagagaggattaatttacagatttcctaaagaatctgccattagtgagtgctgtgaattaagagccatgattatgtgtaattattaaaatcactgtaatgccacgcagattcaaacaagacagatcataccgtgctaaatcctattatgtacagtaaatgacttgctgttctgtaaaggtcttactgtttatataaatgagaaatgaaaaacctggtaaggaaagcac

SEQ ID NO: 90196 - DNA, 599 bp, Chicken  19866894397857_1
  misc_feature (1)..(167): n is any nucleotide
nnnnnnnnnnnnnnnnnnnnnnnnnnnnnnnnnnnnnnnnnnnnnnnnnnnnnnnnnnnnnnnnnnnnnnnnnnnnnnnnnnnnnnnnnnnnnnnnnnnnnnnnnnnnnnnnnnnnnnnnnnnnnnnnnnnnnnnnnnnnnnnnnnnnnnnnnnnnnnnnnnnnnnnccctgcctacaaagccctgccgctccatgagctgctcgctgccctgcaggcgcaccgctcagtgtgcagcacacgcactgacccccggagcagcccaggctcagcaccacgaccctccagcagacacacgagytgacstggggcggatggggaggtacctgggaggagtgccgcgtggcacctgatgaagccaagctggcccggccggtcacattcttttccaaagaatctactttctcaaaagtcctcttctgccgcactgtgtcctgcggagcagccatatcgctggggaagctgcccctgctctccaggccctgtctgtacagagacctgttactggccgagacgtcatccctcgagctccggccgacgcacttcttcaggtggtcggactggaatcggactttgccgctctctgcggggatgccgccc

SEQ ID NO: 90197 - DNA, 599 bp, Chicken  19866894397857_2
  misc_feature (1)..(162): n is any nucleotide
nnnnnnnnnnnnnnnnnnnnnnnnnnnnnnnnnnnnnnnnnnnnnnnnnnnnnnnnnnnnnnnnnnnnnnnnnnnnnnnnnnnnnnnnnnnnnnnnnnnnnnnnnnnnnnnnnnnnnnnnnnnnnnnnnnnnnnnnnnnnnnnnnnnnnnnnnnnnnnnnnnccctgcctacaaagccctgccgctccatgagctgctcgctgccctgcaggcgcaccgctcagtgtgcagcacacgcactgacccccggagcagcccaggctcagcaccacgaccctccagcagacacacgagytgacstggggcggatggggaggtacctgggaggagtgccgcgtggcacctgatgaagccaagctggcccggccggtcacattcttttccaaagaatctactttctcaaaagtcctcttctgccgcactgtgtcctgcggagcagccatatcgctggggaagctgcccctgctctccaggccctgtctgtacagagacctgttactggccgagacgtcatccctcgagctccggccgacgcacttcttcaggtggtcggactggaatcggactttgccgctctctgcggggatgccgccctccag

SEQ ID NO: 90198 - DNA, 599 bp, Chicken  19866894397866_1
  misc_feature (1)..(85): n is any nucleotide
nnnnnnnnnnnnnnnnnnnnnnnnnnnnnnnnnnnnnnnnnnnnnnnnnnnnnnnnnnnnnnnnnnnnnnnnnnnnnnnnnnnnnatttttgtctttcttgtagtgaggggcccaaaactgaacacagtactcgaggtgtggcctcaccagtgctgagtacagagggacgatcacctccctgctcctgttggtttcactatttctgatacgagccaggatgccattggccttcttggccacctggccaccctgctggctcatgttcatggcccatcaagtttcccaagtccaaccatccycctctgcgaataatgtgcagcaggagtgtgagaaagaacacgtaaaacttcttagctccttctccacctaagagaaactgtttctgcttccattcccagtcacgcacagaatctcctccaggatctcctcctggagcagctctcaggtcagcctttctcagacataataaaggaggagaggagcagatgagaaaagaagattcatgtcaaggagcagagatgaggagtgatggttttgggcagtgagctgtgacagggaaatgtatttttcacgggttaactcattccctactcaaaaa

SEQ ID NO: 90199 - DNA, 600 bp, Chicken  19866894397868_1
actgtttcctaaatgcaatgcttgtggcgcctgctgaaagcccactgaaacagctttccaagtccacttaaggggaagtgattcagttattttttttctggaattaggtcttgaaaaaccattcgtgaaattgtttatggaaacaaaaatatgagctgtcaactaccgcctgataaagcaacgttgaaactgtgacatttgatcagaccagagaatgaactgcaagacttccagattcatatattataatgcaaatgagttttgtaaattgtgacctagttcccatgttagaagcagttrggaccaacagcaggaactatgccgtgaatgcaagtgggggggaagcaaggaaattaacrtttgttcttaatttgaaatggatttttaatcaccttcaggtgccacaaaaaaaagaggcccacaggcttgtttgctataatcactctgacacaagaatgcacgtaggaggctttggtttgctaattgaaatgtttgactggtgtcaaatgaagcaccagaatasagcttgctgtgactgagcgcacagtggaggttggtgaactcraagctttccaatctgatgctcagaaccttcactcc

SEQ ID NO: 90200 - DNA, 600 bp, Chicken  19866894397868_2
aagtccacttaaggggaagtgattcagttattttttttctggaattaggtcttgaaaaaccattcgtgaaattgtttatggaaacaaaaatatgagctgtcaactaccgcctgataaagcaacgttgaaactgtgacatttgatcagaccagagaatgaactgcaagacttccagattcatatattataatgcaaatgagttttgtaaattgtgacctagttcccatgttagaagcagttrggaccaacagcaggaactatgccgtgaatgcaagtgggggggaagcaaggaaattaacrtttgttcttaatttgaaatggatttttaatcaccttcaggtgccacaaaaaaaagaggcccacaggcttgtttgctataatcactctgacacaagaatgcacgtaggaggctttggtttgctaattgaaatgtttgactggtgtcaaatgaagcaccagaatasagcttgctgtgactgagcgcacagtggaggttggtgaactcraagctttccaatctgatgctcagaaccttcactccaagtatcttagatgatgactattagacgatggcaatctctcagttcagttgctgtttct

SEQ ID NO: 90201 - DNA, 600 bp, Chicken  19866894397868_3
aagacttccagattcatatattataatgcaaatgagttttgtaaattgtgacctagttcccatgttagaagcagttrggaccaacagcaggaactatgccgtgaatgcaagtgggggggaagcaaggaaattaacrtttgttcttaatttgaaatggatttttaatcaccttcaggtgccacaaaaaaaagaggcccacaggcttgtttgctataatcactctgacacaagaatgcacgtaggaggctttggtttgctaattgaaatgtttgactggtgtcaaatgaagcaccagaatasagcttgctgtgactgagcgcacagtggaggttggtgaactcraagctttccaatctgatgctcagaaccttcactccaagtatcttagatgatgactattagacgatggcaatctctcagttcagttgctgtttcttcctcctgaaaaagtagctcttgggtcttctccagggttttagctgtgtaaatatcggacacctacttggtgcaattcagcacaattagtgagaaatactcacagaaccctgctggtgctccagcagtgacccctccaccccacacagtgctgaggcagctgcc

SEQ ID NO: 90202 - DNA, 600 bp, Chicken  19866894397868_4
aaattgtgacctagttcccatgttagaagcagttrggaccaacagcaggaactatgccgtgaatgcaagtgggggggaagcaaggaaattaacrtttgttcttaatttgaaatggatttttaatcaccttcaggtgccacaaaaaaaagaggcccacaggcttgtttgctataatcactctgacacaagaatgcacgtaggaggctttggtttgctaattgaaatgtttgactggtgtcaaatgaagcaccagaatasagcttgctgtgactgagcgcacagtggaggttggtgaactcraagctttccaatctgatgctcagaaccttcactccaagtatcttagatgatgactattagacgatggcaatctctcagttcagttgctgtttcttcctcctgaaaaagtagctcttgggtcttctccagggttttagctgtgtaaatatcggacacctacttggtgcaattcagcacaattagtgagaaatactcacagaaccctgctggtgctccagcagtgacccctccaccccacacagtgctgaggcagctgcctattgaaccctagtgttcagttgtggcttcaggcaagagaaa

SEQ ID NO: 90203 - DNA, 599 bp, Chicken  19866894397870_1
  misc_feature (1)..(38): n is any nucleotide
nnnnnnnnnnnnnnnnnnnnnnnnnnnnnnnnnnnnnnggaggaggaggaggagaagggcagcccgatggccaccccctgcacctgggccggcatgttggcgcctcacagagtcgattgcaggtcgggatccaccatggtctcacggtccggagactcgatgtagttggcggcttcctggagcttcagcagcatggccatctgcggggagcagtgcatggcacacagcccagatctcctcgccctcccaaactgcccaccccagaaagctcttctacagagtaaagcaaagcctggagaygttgcaaaccatttcccatcgtgagctggccttggtgcacccacccaggaagacccaacgtttctgcatcacccactccgtgtttttacaccaaaaactaactgggaaagcaatgctcagctccatgctgctctccccccaccagcaccacccctccccttcccagcacccggcacaccacggccataccagggggtctgcatccagggagctgggcgttgtgtctttgacggtgcgctcctcrgggggggagacagtgctgtggggtccgatggtgggcgggggcaggtggtacagct

SEQ ID NO: 90204 - DNA, 600 bp, Chicken  19866894397870_2
tcccaaactgcccaccccagaaagctcttctacagagtaaagcaaagcctggagaygttgcaaaccatttcccatcgtgagctggccttggtgcacccacccaggaagacccaacgtttctgcatcacccactccgtgtttttacaccaaaaactaactgggaaagcaatgctcagctccatgctgctctccccccaccagcaccacccctccccttcccagcacccggcacaccacggccataccagggggtctgcatccagggagctgggcgttgtgtctttgacggtgcgctcctcrgggggggagacagtgctgtggggtccgatggtgggcgggggcaggtggtacagcttggactggtcttgctgtgctgatggccagggcagggtgtcccgcacccactccacggggtcctcccaggccgccttttgcccatggacctgcaggcagggggcaagagaggtggcacctgcacaccaaacctccgctccaccccatggggcccgctgtgccagcacaccccaggtgccaccagctccgagctgggccctggtttgcgtccccacgtgccagcatgcactgggtaccttgagccca

SEQ ID NO: 90205 - DNA, 600 bp, Chicken  19866894397878_1
agctaggtactcaatttacaataatttgtgacattactgctgcgtttactgtctcccaatatgtggttctatctccaagaaattgaaagctttgtttgttattttccttgctgtagctctaataggaataaatgcattgcctgtaggtaatgagttttcaaacagtttaggaatatttgatttcgttaaatcctgctctgaaaagatagaattaatgcagcaatcaggtagacgttttaaaactacttcccaaagttcttaactttcttcaaccatgtttggatattttcttgttttgaygtaactgtgataaataatcaataaaatgttaatttcttggccttattcacatcactgcctgcattgacaattacctctaggaggtgaggagaaacgaaaggcatcacagtctcttcaggagtagatgcagtcttggtgtggctgtcaccatcataagtgattcgtgtggagctaatcagcaaaactagttttctcttccttcctagcaaatccagacctgatcctgataaaatatccactcgataaagtaaagctttttgttttttcatgaaaarctgtgccaaaatacggctggcagct

SEQ ID NO: 90206 - DNA, 600 bp, Chicken  19866894397878_2
tgtttggatattttcttgttttgaygtaactgtgataaataatcaataaaatgttaatttcttggccttattcacatcactgcctgcattgacaattacctctaggaggtgaggagaaacgaaaggcatcacagtctcttcaggagtagatgcagtcttggtgtggctgtcaccatcataagtgattcgtgtggagctaatcagcaaaactagttttctcttccttcctagcaaatccagacctgatcctgataaaatatccactcgataaagtaaagctttttgttttttcatgaaaarctgtgccaaaatacggctggcagcttagcttcttccttagcagaaacttatgggagatattcctgtgtaatgcaattcatgctgtgtggtactggggatggcaggtaagctgccaccactttgaggaggttactcggtatttttggttcagtgtacgggcaggagattccgtggcaattatacatttgttcttacatttaattcctcccttaacaactacagaagtttcctcctgctgcttttctcatctgtttacatacgtggggtttggttcattttattttctcaacagtagtgctg

SEQ ID NO: 90207 - DNA, 600 bp, Chicken  19866894397880_1
aagtccccccattatatgacacaactgtgcattaaaaatgggctatgacatggcttggttgaagtgttatgcctggcatttctggcagcacactgaaataggagatgtctagcaatttggcagtacagtacgcaaatagatgagcttttcaggctgttgggatcttataccagtgccactggtttcagtaagtgccgaatggaagcacctcttcaacctgagccagtttgtcattatttcatacctctgaacatcaccacacagttaagtaaaatcacagtcaccatctgtacagtcttrcttttctgtagtgtaatcactgwgcttttaagttaaatgaatagattaattgctgctgcttgttctcttgagctgacctcactgcttctacaataaagtcagtctgctttctttacctcttgcacacaaatgcacatacaagggaggttttgcacttaaggatgttatttttaattcatgtgcagctgaccctatatggagaatgaagaggcctgttatacaactgcttgtctgagcagtctgaaaggctcagtctcaaagacagcaggtcttcagataaaagataaatgaagtgtatat

SEQ ID NO: 90208 - DNA, 600 bp, Chicken  19866894397880_2
actgtgcattaaaaatgggctatgacatggcttggttgaagtgttatgcctggcatttctggcagcacactgaaataggagatgtctagcaatttggcagtacagtacgcaaatagatgagcttttcaggctgttgggatcttataccagtgccactggtttcagtaagtgccgaatggaagcacctcttcaacctgagccagtttgtcattatttcatacctctgaacatcaccacacagttaagtaaaatcacagtcaccatctgtacagtcttrcttttctgtagtgtaatcactgwgcttttaagttaaatgaatagattaattgctgctgcttgttctcttgagctgacctcactgcttctacaataaagtcagtctgctttctttacctcttgcacacaaatgcacatacaagggaggttttgcacttaaggatgttatttttaattcatgtgcagctgaccctatatggagaatgaagaggcctgttatacaactgcttgtctgagcagtctgaaaggctcagtctcaaagacagcaggtcttcagataaaagataaatgaagtgtatatcttcatgtgaatagacaaatagg

SEQ ID NO: 90209 - DNA, 600 bp, Chicken  19866894397892_1
gagatgattgcctcttagagaaggggaaaatgacagttaccttcctggtaatgtattgcttctaccagacagaagtttctgttttagaatgcgtacagccaacagctgagtaccacaaactcttggaaatatctctgtcaagctgatatatttccattccacttttgcagacataacagttcctataattacatgaataagcaagagatcaggaacatggctgcagttcctatatttttttctttaatgcaatttatataacttatatatttatataatttgctaaacatatacacgcaraaartaaaggagtaggagtacccggaatggcaatgctatttaggattaatttgtaacatatatcacttttcctgtgttcttcctagaaagtggagaatattccattacagagagaatgtgcccagtcacacagtcaccctaagctcattcccaagccccttaggctaactcaccttagagtagtaaagaatttgtttaaaagcccaatcgccagttagagraattgtaaacaaaagcaatactgagataaaaagacaagtatcaagtgacccatgcaaagggattaggaggtggcagccc

SEQ ID NO: 90210 - DNA, 600 bp, Chicken  19866894397892_2
tgattgcctcttagagaaggggaaaatgacagttaccttcctggtaatgtattgcttctaccagacagaagtttctgttttagaatgcgtacagccaacagctgagtaccacaaactcttggaaatatctctgtcaagctgatatatttccattccacttttgcagacataacagttcctataattacatgaataagcaagagatcaggaacatggctgcagttcctatatttttttctttaatgcaatttatataacttatatatttatataatttgctaaacatatacacgcaraaartaaaggagtaggagtacccggaatggcaatgctatttaggattaatttgtaacatatatcacttttcctgtgttcttcctagaaagtggagaatattccattacagagagaatgtgcccagtcacacagtcaccctaagctcattcccaagccccttaggctaactcaccttagagtagtaaagaatttgtttaaaagcccaatcgccagttagagraattgtaaacaaaagcaatactgagataaaaagacaagtatcaagtgacccatgcaaagggattaggaggtggcagccctccc

SEQ ID NO: 90211 - DNA, 600 bp, Chicken  19866894397892_3
tgcagttcctatatttttttctttaatgcaatttatataacttatatatttatataatttgctaaacatatacacgcaraaartaaaggagtaggagtacccggaatggcaatgctatttaggattaatttgtaacatatatcacttttcctgtgttcttcctagaaagtggagaatattccattacagagagaatgtgcccagtcacacagtcaccctaagctcattcccaagccccttaggctaactcaccttagagtagtaaagaatttgtttaaaagcccaatcgccagttagagraattgtaaacaaaagcaatactgagataaaaagacaagtatcaagtgacccatgcaaagggattaggaggtggcagccctccctgctgcagaacttaatgtagctgagtttaagacacttgttataaagaggcctcaagggacaaattataagtgaaataacagccttcattgtgaagcaccttgcttgtcaaacataagttattttcacactatttacattggcaccattctgggaacagacagtaacagcctttgctttttaatagcttagaaaatgctttatagaagtttactctca

SEQ ID NO: 90212 - DNA, 600 bp, Chicken  19866894397892_4
gatgctcaggaagccttgctgagtaaacagtaaatgtgcaacaccataatgaggctgagaaagtgaaagcatgtggcttgttaagtaggagatttttctgctctttagagcagcaaagagatttctggaagatgctgtctgcggagagtagtggatgaaaattcaaaagctggattaagaaaatctgaggataaaggagcataatatgtttattaagaaagagaagttgtgatctgtaatgagtgatgttttgagtttggccctcagagctcagccatctccttgtgatatggagttctyttggctgccgagcagcttctgatttgtgacagcaaggacaggtgctacgtgctcagtaaatcaaaggataaaacactttttaacaatkttataacagaattttatcctgtgctgtggcttacaaaacacactcttggaaagttacaagaaacacctaattctactgcactcacctctttgcaaatctgccttgatcccatggctatcctctgayttctctcttcatacggtgctgctggactctrctattattagtgtacggttaagaagtaatataagtactgtatttattacatcaag

SEQ ID NO: 90213 - DNA, 600 bp, Chicken  19866894397892_5
gagatttttctgctctttagagcagcaaagagatttctggaagatgctgtctgcggagagtagtggatgaaaattcaaaagctggattaagaaaatctgaggataaaggagcataatatgtttattaagaaagagaagttgtgatctgtaatgagtgatgttttgagtttggccctcagagctcagccatctccttgtgatatggagttctyttggctgccgagcagcttctgatttgtgacagcaaggacaggtgctacgtgctcagtaaatcaaaggataaaacactttttaacaatkttataacagaattttatcctgtgctgtggcttacaaaacacactcttggaaagttacaagaaacacctaattctactgcactcacctctttgcaaatctgccttgatcccatggctatcctctgayttctctcttcatacggtgctgctggactctrctattattagtgtacggttaagaagtaatataagtactgtatttattacatcaagagttcctaataattattaacagttttsaaaataaattgtgtctgcttagctgaacaagatataacagagctaacattttgtactccta

SEQ ID NO: 90214 - DNA, 600 bp, Chicken  19866894397892_6
aagaaagagaagttgtgatctgtaatgagtgatgttttgagtttggccctcagagctcagccatctccttgtgatatggagttctyttggctgccgagcagcttctgatttgtgacagcaaggacaggtgctacgtgctcagtaaatcaaaggataaaacactttttaacaatkttataacagaattttatcctgtgctgtggcttacaaaacacactcttggaaagttacaagaaacacctaattctactgcactcacctctttgcaaatctgccttgatcccatggctatcctctgayttctctcttcatacggtgctgctggactctrctattattagtgtacggttaagaagtaatataagtactgtatttattacatcaagagttcctaataattattaacagttttsaaaataaattgtgtctgcttagctgaacaagatataacagagctaacattttgtactcctaacaagttctgcatatagtatggtgtatatttatttcacacaaaatgctaggttgttatttgaaacccaaactcaaaaaaatggaccgactttctgaatacttggtttctggcattcaatttcagta

SEQ ID NO: 90215 - DNA, 600 bp, Chicken  19866894397892_7
atgttttgagtttggccctcagagctcagccatctccttgtgatatggagttctyttggctgccgagcagcttctgatttgtgacagcaaggacaggtgctacgtgctcagtaaatcaaaggataaaacactttttaacaatkttataacagaattttatcctgtgctgtggcttacaaaacacactcttggaaagttacaagaaacacctaattctactgcactcacctctttgcaaatctgccttgatcccatggctatcctctgayttctctcttcatacggtgctgctggactctrctattattagtgtacggttaagaagtaatataagtactgtatttattacatcaagagttcctaataattattaacagttttsaaaataaattgtgtctgcttagctgaacaagatataacagagctaacattttgtactcctaacaagttctgcatatagtatggtgtatatttatttcacacaaaatgctaggttgttatttgaaacccaaactcaaaaaaatggaccgactttctgaatacttggtttctggcattcaatttcagtagtaaaagcatatatgatgtattgtattaact

SEQ ID NO: 90216 - DNA, 600 bp, Chicken  19866894397892_8
gacagcaaggacaggtgctacgtgctcagtaaatcaaaggataaaacactttttaacaatkttataacagaattttatcctgtgctgtggcttacaaaacacactcttggaaagttacaagaaacacctaattctactgcactcacctctttgcaaatctgccttgatcccatggctatcctctgayttctctcttcatacggtgctgctggactctrctattattagtgtacggttaagaagtaatataagtactgtatttattacatcaagagttcctaataattattaacagttttsaaaataaattgtgtctgcttagctgaacaagatataacagagctaacattttgtactcctaacaagttctgcatatagtatggtgtatatttatttcacacaaaatgctaggttgttatttgaaacccaaactcaaaaaaatggaccgactttctgaatacttggtttctggcattcaatttcagtagtaaaagcatatatgatgtattgtattaacttaattatatattagagatgctgctgtactttgtgttgaaatggatctggagttcttggcacctttgctattttacataataa

SEQ ID NO: 90217 - DNA, 600 bp, Chicken  19866894397892_9
gtatatttatttcacacaaaatgctaggttgttatttgaaacccaaactcaaaaaaatggaccgactttctgaatacttggtttctggcattcaatttcagtagtaaaagcatatatgatgtattgtattaacttaattatatattagagatgctgctgtactttgtgttgaaatggatctggagttcttggcacctttgctattttacataataaacacatggggatgatctgacaaagtcacgtgtgaagagtggtccttttcaagggaagcctaaatgtatgacagaggggcaattrggagacaagggaataagagctgccaggttccctaagatggagagatcattttattattacagactgcagggagaacataaaaatgattaagactgattctggcatttgttcatttagccttagacaagccaaaaaattaacatttatcttaatgatacttcaaagatctgcatcttgcattagaatgagacacatgttagaaaattgaagttaaggaaatggaaattcctttataatttcaggaataagcagaaggttcaaacttggagtttcggagtttcttttttctgatggaaaatg

SEQ ID NO: 90218 - DNA, 600 bp, Chicken  19866894397898_1
gtctttcttacacaaactgtgctcctaggcagagaccatcttcccacactttgccttaataggccttagagttcagcatttgaactgtagttgtcaatggggtaataactttcataatatcctttggcatctcttgcaagtaataaaactgggaagtgtccaactttcaagtcataataatgtgctttgaaaccgaatagatcttacttcctatcagttacagaatggcatataattatggtagtaattatgtcagttttccaggtgaacagagtgaggttcgagctgtgacattcagarccacattgtaggtctgaagargttccaggaagagaaagcacycctattcaaatactttatggactgtgtacttcaacatataaagcaactccaaatttcagttttttgggggtttaagtcaacttctagaaaaaaatatttcttttctggagacaacaattcacaacgttgacaaaaatgtcactgccattttaagcatttttgacagttcttttcatctgtgttttctactcatctttagcctaatgcagttcttcttggcagagtttcctcctatctttttgtaaattaaacttgaaa

SEQ ID NO: 90219 - DNA, 600 bp, Chicken  19866894397898_2
ctcctaggcagagaccatcttcccacactttgccttaataggccttagagttcagcatttgaactgtagttgtcaatggggtaataactttcataatatcctttggcatctcttgcaagtaataaaactgggaagtgtccaactttcaagtcataataatgtgctttgaaaccgaatagatcttacttcctatcagttacagaatggcatataattatggtagtaattatgtcagttttccaggtgaacagagtgaggttcgagctgtgacattcagarccacattgtaggtctgaagargttccaggaagagaaagcacycctattcaaatactttatggactgtgtacttcaacatataaagcaactccaaatttcagttttttgggggtttaagtcaacttctagaaaaaaatatttcttttctggagacaacaattcacaacgttgacaaaaatgtcactgccattttaagcatttttgacagttcttttcatctgtgttttctactcatctttagcctaatgcagttcttcttggcagagtttcctcctatctttttgtaaattaaacttgaaaatatcaaggctgtgctgaggt

SEQ ID NO: 90220 - DNA, 600 bp, Chicken  19866894397898_3
cccacactttgccttaataggccttagagttcagcatttgaactgtagttgtcaatggggtaataactttcataatatcctttggcatctcttgcaagtaataaaactgggaagtgtccaactttcaagtcataataatgtgctttgaaaccgaatagatcttacttcctatcagttacagaatggcatataattatggtagtaattatgtcagttttccaggtgaacagagtgaggttcgagctgtgacattcagarccacattgtaggtctgaagargttccaggaagagaaagcacycctattcaaatactttatggactgtgtacttcaacatataaagcaactccaaatttcagttttttgggggtttaagtcaacttctagaaaaaaatatttcttttctggagacaacaattcacaacgttgacaaaaatgtcactgccattttaagcatttttgacagttcttttcatctgtgttttctactcatctttagcctaatgcagttcttcttggcagagtttcctcctatctttttgtaaattaaacttgaaaatatcaaggctgtgctgaggttgagcacaatgaaagactgtg

SEQ ID NO: 90221 - DNA, 569 bp, Chicken  19866894397899_1
tacatagagatgaagccacttgtttttcctttacatgttgcatacatgagaagaaagtaaagtaagattaaaaacttaataaaatatgaagtaacatctaaaaataaggaattcacatctgattattactacggaataggctgtacacaaatgttttcactcttcaggtcagattctctcaaatattttgttcaagtattctgagagtactgactacacattaagcagatattacagctcccaaagtaacactatttactgtctatgtataactgagtgtacatttgaaaccattacacygtggagtayggacaattgaaagtggataacttgagataaaatctaaatcatgactgaagtagtgatgctcatttttccaaggtaaaagttagaaagagcaattatttcagagatgttgcaggtcacaaccatcgcgccatccccccycctccaaaaacaaaacaaactcaaggaggtatcatcctatcttctccttcctaacagacagcatgggttcctaggcaagaatagcaattcaagagacttcctggtcattttttcctctgctc

SEQ ID NO: 90222 - DNA, 560 bp, Chicken  19866894397899_2
atgaagccacttgtttttcctttacatgttgcatacatgagaagaaagtaaagtaagattaaaaacttaataaaatatgaagtaacatctaaaaataaggaattcacatctgattattactacggaataggctgtacacaaatgttttcactcttcaggtcagattctctcaaatattttgttcaagtattctgagagtactgactacacattaagcagatattacagctcccaaagtaacactatttactgtctatgtataactgagtgtacatttgaaaccattacacygtggagtayggacaattgaaagtggataacttgagataaaatctaaatcatgactgaagtagtgatgctcatttttccaaggtaaaagttagaaagagcaattatttcagagatgttgcaggtcacaaccatcgcgccatccccccycctccaaaaacaaaacaaactcaaggaggtatcatcctatcttctccttcctaacagacagcatgggttcctaggcaagaatagcaattcaagagacttcctggtcattttttcctctgctc

SEQ ID NO: 90223 - DNA, 422 bp, Chicken  19866894397899_3
caaatgttttcactcttcaggtcagattctctcaaatattttgttcaagtattctgagagtactgactacacattaagcagatattacagctcccaaagtaacactatttactgtctatgtataactgagtgtacatttgaaaccattacacygtggagtayggacaattgaaagtggataacttgagataaaatctaaatcatgactgaagtagtgatgctcatttttccaaggtaaaagttagaaagagcaattatttcagagatgttgcaggtcacaaccatcgcgccatccccccycctccaaaaacaaaacaaactcaaggaggtatcatcctatcttctccttcctaacagacagcatgggttcctaggcaagaatagcaattcaagagacttcctggtcattttttcctctgctc

SEQ ID NO: 90224 - DNA, 599 bp, Chicken  19866894397904_1
  misc_feature (1)..(152): n is any nucleotide
nnnnnnnnnnnnnnnnnnnnnnnnnnnnnnnnnnnnnnnnnnnnnnnnnnnnnnnnnnnnnnnnnnnnnnnnnnnnnnnnnnnnnnnnnnnnnnnnnnnnnnnnnnnnnnnnnnnnnnnnnnnnnnnnnnnnnnnnnnnnnnnnnnnnnnnnatgcctccatatcactgacttggtatagaaagtcagtgatatggaggctgacccacttggtatagaaacgctccccctgtgccaatccaactcatgggtatggagagcttgaagtagaagtgctttgcagaaggctctgctcaagcarggaaatctgggtatgtagatctcctcttgcaaaggggcttttggggagaggagcaggacagataatagagccagcaggccttcatccttcctggctgagaaagagcactgcggcatccatttgctgtacttacatattaagacaaaatactcatattaaatyggatttttcaccttgggattctgcaaaattcctcaaaaagcagcaatgaaaaaaaaaatcagataactgaaattatctgctaaatgcagaacaaaaccagaagccatagagtcaccagtcaagaaacctrcaggact

SEQ ID NO: 90225 - DNA, 600 bp, Chicken  19866894397904_2
atcactgacttggtatagaaagtcagtgatatggaggctgacccacttggtatagaaacgctccccctgtgccaatccaactcatgggtatggagagcttgaagtagaagtgctttgcagaaggctctgctcaagcarggaaatctgggtatgtagatctcctcttgcaaaggggcttttggggagaggagcaggacagataatagagccagcaggccttcatccttcctggctgagaaagagcactgcggcatccatttgctgtacttacatattaagacaaaatactcatattaaatyggatttttcaccttgggattctgcaaaattcctcaaaaagcagcaatgaaaaaaaaaatcagataactgaaattatctgctaaatgcagaacaaaaccagaagccatagagtcaccagtcaagaaacctrcaggactccactgaatacagcagatcgtatacatggtactctggcaccaaaagcagctacataaaaagcagcccagactttgtgtatgctagcaaataggcctgtttgtttggtctggcaaatgctattagcacagtgcaggagttttggagggagacgcagaagcaaac

SEQ ID NO: 90226 - DNA, 571 bp, Chicken  19866894397904_3
tcaagcarggaaatctgggtatgtagatctcctcttgcaaaggggcttttggggagaggagcaggacagataatagagccagcaggccttcatccttcctggctgagaaagagcactgcggcatccatttgctgtacttacatattaagacaaaatactcatattaaatyggatttttcaccttgggattctgcaaaattcctcaaaaagcagcaatgaaaaaaaaaatcagataactgaaattatctgctaaatgcagaacaaaaccagaagccatagagtcaccagtcaagaaacctrcaggactccactgaatacagcagatcgtatacatggtactctggcaccaaaagcagctacataaaaagcagcccagactttgtgtatgctagcaaataggcctgtttgtttggtctggcaaatgctattagcacagtgcaggagttttggagggagacgcagaagcaaacaacatgaccttgtcacattactgtacatgaaagacgtgggtaaaatagaaaagactctgagagggaggaaaagaggtgcaggtacgtaccatgaattacag

SEQ ID NO: 90227 - DNA, 600 bp, Chicken  19866894397908_1
tgcagaagagtcatgagtttaatcttctcactgtgcagaaatatgatcatcaagcaaacctgaccagcagccaccacaggacagacaagtacttcacagaagtcaagcaaaggctcagatctcctctaagaccaggaaaaaaagctactgcaaccatagcttcccatggcaagctgcaggctacattcaaagtaagattttattggtccctactctgagaggacaaagtgcagaactgcttaaatcatttctgcatgcgggaaatcctaccaagtttctaaaactcctattgaatgtgtrgtgcctctggctgagatgttctaagtgatttgttccctgcacatgctgagagggcatggagagttcaactgaaagccttggttctctctttgccaaaaaggagattctggacttgaactgccctgcagacatggtgagactcctctctctccttcagtctatcagagagatgtggtggagaaggtggatgtgggtatcttctgccacgtccctctttggacactgaggcatgttgtgcacccttcctcctattccagtactgtcactcctcctcctgcatcctcctcctgacaaggatgc

SEQ ID NO: 90228 - DNA, 600 bp, Chicken  19866894397908_2
gttcaactgaaagccttggttctctctttgccaaaaaggagattctggacttgaactgccctgcagacatggtgagactcctctctctccttcagtctatcagagagatgtggtggagaaggtggatgtgggtatcttctgccacgtccctctttggacactgaggcatgttgtgcacccttcctcctattccagtactgtcactcctcctcctgcatcctcctcctgacaaggatgcaagcacagatctagcaggtttccagagaggaaaccagagttcatgttcaccatggcaccaaygagaaagggggggaagrtttgttcttcacccctttgctyagacctgtctttcrctacytcctcatgtcccactgagcaccagaaaatccctctaagcgggtgcctagctacgtaacatacatttggtacaaaattatttctaaattctattttttcccactcctttctacagcataggaattttcataacttaacagggcctccttattttgcaggagagcccagctacctaactagcaaaatatagggccattataaaacaggagaataactgcttgactgcttatctcaaagataatt

SEQ ID NO: 90229 - DNA, 600 bp, Chicken  19866894397908_3
ggttctctctttgccaaaaaggagattctggacttgaactgccctgcagacatggtgagactcctctctctccttcagtctatcagagagatgtggtggagaaggtggatgtgggtatcttctgccacgtccctctttggacactgaggcatgttgtgcacccttcctcctattccagtactgtcactcctcctcctgcatcctcctcctgacaaggatgcaagcacagatctagcaggtttccagagaggaaaccagagttcatgttcaccatggcaccaaygagaaagggggggaagrtttgttcttcacccctttgctyagacctgtctttcrctacytcctcatgtcccactgagcaccagaaaatccctctaagcgggtgcctagctacgtaacatacatttggtacaaaattatttctaaattctattttttcccactcctttctacagcataggaattttcataacttaacagggcctccttattttgcaggagagcccagctacctaactagcaaaatatagggccattataaaacaggagaataactgcttgactgcttatctcaaagataatttactctctaactacaga

SEQ ID NO: 90230 - DNA, 600 bp, Chicken  19866894397908_4
agattctggacttgaactgccctgcagacatggtgagactcctctctctccttcagtctatcagagagatgtggtggagaaggtggatgtgggtatcttctgccacgtccctctttggacactgaggcatgttgtgcacccttcctcctattccagtactgtcactcctcctcctgcatcctcctcctgacaaggatgcaagcacagatctagcaggtttccagagaggaaaccagagttcatgttcaccatggcaccaaygagaaagggggggaagrtttgttcttcacccctttgctyagacctgtctttcrctacytcctcatgtcccactgagcaccagaaaatccctctaagcgggtgcctagctacgtaacatacatttggtacaaaattatttctaaattctattttttcccactcctttctacagcataggaattttcataacttaacagggcctccttattttgcaggagagcccagctacctaactagcaaaatatagggccattataaaacaggagaataactgcttgactgcttatctcaaagataatttactctctaactacagaggcatatagctgcaagatggga

SEQ ID NO: 90231 - DNA, 600 bp, Chicken  19866894397908_5
aactgccctgcagacatggtgagactcctctctctccttcagtctatcagagagatgtggtggagaaggtggatgtgggtatcttctgccacgtccctctttggacactgaggcatgttgtgcacccttcctcctattccagtactgtcactcctcctcctgcatcctcctcctgacaaggatgcaagcacagatctagcaggtttccagagaggaaaccagagttcatgttcaccatggcaccaaygagaaagggggggaagrtttgttcttcacccctttgctyagacctgtctttcrctacytcctcatgtcccactgagcaccagaaaatccctctaagcgggtgcctagctacgtaacatacatttggtacaaaattatttctaaattctattttttcccactcctttctacagcataggaattttcataacttaacagggcctccttattttgcaggagagcccagctacctaactagcaaaatatagggccattataaaacaggagaataactgcttgactgcttatctcaaagataatttactctctaactacagaggcatatagctgcaagatgggaatttatttacagtt

SEQ ID NO: 90232 - DNA, 600 bp, Chicken  19866894397908_6
ccctgcagacatggtgagactcctctctctccttcagtctatcagagagatgtggtggagaaggtggatgtgggtatcttctgccacgtccctctttggacactgaggcatgttgtgcacccttcctcctattccagtactgtcactcctcctcctgcatcctcctcctgacaaggatgcaagcacagatctagcaggtttccagagaggaaaccagagttcatgttcaccatggcaccaaygagaaagggggggaagrtttgttcttcacccctttgctyagacctgtctttcrctacytcctcatgtcccactgagcaccagaaaatccctctaagcgggtgcctagctacgtaacatacatttggtacaaaattatttctaaattctattttttcccactcctttctacagcataggaattttcataacttaacagggcctccttattttgcaggagagcccagctacctaactagcaaaatatagggccattataaaacaggagaataactgcttgactgcttatctcaaagataatttactctctaactacagaggcatatagctgcaagatgggaatttatttacagttcatgc

SEQ ID NO: 90233 - DNA, 600 bp, Chicken  19866894397913_1
tctaaaaaaaatatcaaaaatgaatatattttacatggagagatttttttttccctttaatctctaaatgaagttacaggcctgtagcagaatacataatgttggtttagggtcgctgcagcattttttatgtgtacagctgttcttccactggtgtaagtagacacatctgctcattagcaatacaatgtcatttctagtgtctaattttaattatttgcagatgatagattccttatgtgatgtctaaaaaaagtgcagtccttcaaaactggtgagaaataaatataccctctgcarctaaaacaggtcagcacaacgaaaaccagatattaatctggagaattcatgtatcagcactaaggctaaatgccaaactgtttggaaggtcacagggaggagaaacagctcatacatctcttctttatcatggatacacaagacttatggacttagaggtgttctgaatgaatctggcaggtgatgagtttgctgtagtacagatggtccttaactgctggaaaaatatcagttctgcttacatttcctggacaaacacaggcaagataaggacttcttcatgacagaaaggacaaatga

SEQ ID NO: 90234 - DNA, 599 bp, Chicken  19866894397923_1
  misc_feature (1)..(125): n is any nucleotide
nnnnnnnnnnnnnnnnnnnnnnnnnnnnnnnnnnnnnnnnnnnnnnnnnnnnnnnnnnnnnnnnnnnnnnnnnnnnnnnnnnnnnnnnnnnnnnnnnnnnnnnnnnnnnnnnnnnnnnnnnnnnnatgtacaggatggcctcatctagacttcctcatctggtgcttctgcagttcttggaaaagttacactatattctctttttaagtgaagtgcagaggatactgacaaatacttgggtcatacatgagacatcataattcttgtgcccagacaaatgctatctttgtgctttctggkgatggctaatccaaaagacaccaaagcctgcatcyagatttggaagttcaattctaaacaagcagaagagcagtagcatcaayacagtaaccacaaatcatgaagttcaaaaaggttcctttttagatgagcatcttaatgtgacctgygatacgccctgttggtgactttctgtgtggataaataactcagaaaaatcagtgagatattccaaaaagtaccccaatatagcaaattacacactggaatacaatattttgttgtgtttcttacctccatcctgaaacttgcttaacctt

SEQ ID NO: 90235 - DNA, 599 bp, Chicken  19866894397923_2
  misc_feature (1)..(90): n is any nucleotide
nnnnnnnnnnnnnnnnnnnnnnnnnnnnnnnnnnnnnnnnnnnnnnnnnnnnnnnnnnnnnnnnnnnnnnnnnnnnnnnnnnnnnnnnnnatgtacaggatggcctcatctagacttcctcatctggtgcttctgcagttcttggaaaagttacactatattctctttttaagtgaagtgcagaggatactgacaaatacttgggtcatacatgagacatcataattcttgtgcccagacaaatgctatctttgtgctttctggkgatggctaatccaaaagacaccaaagcctgcatcyagatttggaagttcaattctaaacaagcagaagagcagtagcatcaayacagtaaccacaaatcatgaagttcaaaaaggttcctttttagatgagcatcttaatgtgacctgygatacgccctgttggtgactttctgtgtggataaataactcagaaaaatcagtgagatattccaaaaagtaccccaatatagcaaattacacactggaatacaatattttgttgtgtttcttacctccatcctgaaacttgcttaacctttcaaagtatgatgacataggaacttgaacaatatc

SEQ ID NO: 90236 - DNA, 599 bp, Chicken  19866894397923_3
  misc_feature (1)..(42): n is any nucleotide
nnnnnnnnnnnnnnnnnnnnnnnnnnnnnnnnnnnnnnnnnnatgtacaggatggcctcatctagacttcctcatctggtgcttctgcagttcttggaaaagttacactatattctctttttaagtgaagtgcagaggatactgacaaatacttgggtcatacatgagacatcataattcttgtgcccagacaaatgctatctttgtgctttctggkgatggctaatccaaaagacaccaaagcctgcatcyagatttggaagttcaattctaaacaagcagaagagcagtagcatcaayacagtaaccacaaatcatgaagttcaaaaaggttcctttttagatgagcatcttaatgtgacctgygatacgccctgttggtgactttctgtgtggataaataactcagaaaaatcagtgagatattccaaaaagtaccccaatatagcaaattacacactggaatacaatattttgttgtgtttcttacctccatcctgaaacttgcttaacctttcaaagtatgatgacataggaacttgaacaatatctagaattgccagaagtgtccgggtsagtctgagaagctcactaaaact

SEQ ID NO: 90237 - DNA, 600 bp, Chicken  19866894397923_4
cttcctcatctggtgcttctgcagttcttggaaaagttacactatattctctttttaagtgaagtgcagaggatactgacaaatacttgggtcatacatgagacatcataattcttgtgcccagacaaatgctatctttgtgctttctggkgatggctaatccaaaagacaccaaagcctgcatcyagatttggaagttcaattctaaacaagcagaagagcagtagcatcaayacagtaaccacaaatcatgaagttcaaaaaggttcctttttagatgagcatcttaatgtgacctgygatacgccctgttggtgactttctgtgtggataaataactcagaaaaatcagtgagatattccaaaaagtaccccaatatagcaaattacacactggaatacaatattttgttgtgtttcttacctccatcctgaaacttgcttaacctttcaaagtatgatgacataggaacttgaacaatatctagaattgccagaagtgtccgggtsagtctgagaagctcactaaaactataaaagccaaagtatatgagatttcgagctagatgtaccacctgtgacaaaaacaaaaatgaagga

SEQ ID NO: 90238 - DNA, 600 bp, Chicken  19866894397923_5
aagcagaagagcagtagcatcaayacagtaaccacaaatcatgaagttcaaaaaggttcctttttagatgagcatcttaatgtgacctgygatacgccctgttggtgactttctgtgtggataaataactcagaaaaatcagtgagatattccaaaaagtaccccaatatagcaaattacacactggaatacaatattttgttgtgtttcttacctccatcctgaaacttgcttaacctttcaaagtatgatgacataggaacttgaacaatatctagaattgccagaagtgtccgggtsagtctgagaagctcactaaaactataaaagccaaagtatatgagatttcgagctagatgtaccacctgtgacaaaaacaaaaatgaaggaagtattgtcaatctttgtgttattcatctgcgagatgaagttgcattttacacagcatcttgcacagcaatcgagatctagagtgcattcacattagtacaagtgtttccactcatttaaattcgctttggaccacggtcattgacatgaaatgtttttcagagtcagacaaaaagagtgaaaataacctgaggcttaagatggactgaa

SEQ ID NO: 90239 - DNA, 567 bp, Chicken  19866894397930_1
atcagccgctggattctctggatcgatgtgctttgagccatgatatccagcactgctggtgggccatcgctctcccagccctggaggacagcattgaagagagaatttaaagcgtgtttcagtggagaagggcaagtgtttcacaagaactacctacacaccttgtgcaatgcctccacttgcagatcttgaaagagggatgacagcaatttgatggcatgatttgcaagcaccactgacagaacaccaaacccttgatgtctacagaaaaataaaagatacagtataattgcagggggsaaaaaaaagcagactgagtgaggtgactgaggaactgctttgctaaattgaaaaagaaaaggtgactcattttcttttcaagaatcaagacctgaatttcttgaagacttgaacaagactctatagtaattgtctgctctgcacaggttacatggacaatgattactccaatggggtctttacatacccttttccaggtcccagtttgggagacccaacgccctccttcgtccgagcaataatgtctccgacacgaagagcagccaa

SEQ ID NO: 90240 - DNA, 599 bp, Chicken  19866894397937_1
  misc_feature (1)..(138): n is any nucleotide
nnnnnnnnnnnnnnnnnnnnnnnnnnnnnnnnnnnnnnnnnnnnnnnnnnnnnnnnnnnnnnnnnnnnnnnnnnnnnnnnnnnnnnnnnnnnnnnnnnnnnnnnnnnnnnnnnnnnnnnnnnnnnnnnnnnnnnnnnnctttccacttcaccaggtattctactttaccctggaggagagaaaaaggaagaagaaaacaggtgaagtctgcaaccaaatatgggctatggtaagaggagcaaccaatcaacaggactgagcaaagagctcatttcccaccacttcattttcaaaacaacrccacttcctctttcaactatacttgtggtatctccttccccatgggcayggagggccatttaaaaggatgcaaactccccccagcttgggaccatcgctctgcagaatcacagaggctggaagggacctctggagatcatcgagtccaacgctgctgctaaaagcaggttccctactgtaggttgaagcaggtaggcttcaggcagaaccctaaatgccagactgcagccatccctgcgttcacagggagccctgcaagaagtcagcatgcataaaagcaagagggagacgcacgccgg

SEQ ID NO: 90241 - DNA, 599 bp, Chicken  19866894397937_2
  misc_feature (1)..(89): n is any nucleotide
nnnnnnnnnnnnnnnnnnnnnnnnnnnnnnnnnnnnnnnnnnnnnnnnnnnnnnnnnnnnnnnnnnnnnnnnnnnnnnnnnnnnnnnnnctttccacttcaccaggtattctactttaccctggaggagagaaaaaggaagaagaaaacaggtgaagtctgcaaccaaatatgggctatggtaagaggagcaaccaatcaacaggactgagcaaagagctcatttcccaccacttcattttcaaaacaacrccacttcctctttcaactatacttgtggtatctccttccccatgggcayggagggccatttaaaaggatgcaaactccccccagcttgggaccatcgctctgcagaatcacagaggctggaagggacctctggagatcatcgagtccaacgctgctgctaaaagcaggttccctactgtaggttgaagcaggtaggcttcaggcagaaccctaaatgccagactgcagccatccctgcgttcacagggagccctgcaagaagtcagcatgcataaaagcaagagggagacgcacgccgggagcaggtgtcagaggaatctgttcaagcagagaagatrtacaagactg

SEQ ID NO: 90242 - DNA, 600 bp, Chicken  19866894397937_3
cccatgggcayggagggccatttaaaaggatgcaaactccccccagcttgggaccatcgctctgcagaatcacagaggctggaagggacctctggagatcatcgagtccaacgctgctgctaaaagcaggttccctactgtaggttgaagcaggtaggcttcaggcagaaccctaaatgccagactgcagccatccctgcgttcacagggagccctgcaagaagtcagcatgcataaaagcaagagggagacgcacgccgggagcaggtgtcagaggaatctgttcaagcagagaagatrtacaagactgagatcctatgaagcgtcactttggcatgttcccttccagctgctgtgccggagcaccgctccatccatcacaatcacttcacctttcaacccaaacaaacagctcaagttcggtgttaaccgcttatttgctcaccccaagcacmaaaccaaacaacaaacgtgcagcaatcggaaaccacacgcagaggcccagaagtcttttaatattataccgcaggacttagtaaacacttcccagagcactgcaggaggatggaagcaccgctgctgctggcgcagaaagtgaca

SEQ ID NO: 90243 - DNA, 600 bp, Chicken  19866894397937_4
aggcttcaggcagaaccctaaatgccagactgcagccatccctgcgttcacagggagccctgcaagaagtcagcatgcataaaagcaagagggagacgcacgccgggagcaggtgtcagaggaatctgttcaagcagagaagatrtacaagactgagatcctatgaagcgtcactttggcatgttcccttccagctgctgtgccggagcaccgctccatccatcacaatcacttcacctttcaacccaaacaaacagctcaagttcggtgttaaccgcttatttgctcaccccaagcacmaaaccaaacaacaaacgtgcagcaatcggaaaccacacgcagaggcccagaagtcttttaatattataccgcaggacttagtaaacacttcccagagcactgcaggaggatggaagcaccgctgctgctggcgcagaaagtgacagcacagaaagggcagctctgcagcccggcttttcctacaggggggctccccagcttccagatgcccgcacacaccaccctataaggcgcttcccaactcccagtgcacaggattagccctcccccctagggagggggttcctccagtcagggaaa

SEQ ID NO: 90244 - DNA, 600 bp, Chicken  19866894397960_1
aaaacactgagtactttacaaaatacagaaggtagtatcacctgtcctgtgcagcataggtgcaccagaggttgctttaagatcgtgagaaatatccttctgaaaagcaggctgagttgcatgagtgctactgaaaataagctggaccattcaatggtgcaggcatcggagcttcagcacaaaaatcttcatctgtgaactctgtattcagactgagcttttgttttgacgttttcaatggaagttccttaatcactgttactatccttccaaaatcaaatcaagtatctattcaataamgtaaggtacttcaggtttggatacttaattgtatttttactgaaatctaccttccaaatattaataaaaagggagatctcaactacattgttaaactccatttagctccactgaagaaactgtaatctgattacaaagtgaagttgcatcctttaatctagctgcaagcaacagaaaaagataaaggagctcttacagtagcatattcttagtgatgatattgctttgcattaggtccattattagcaatttctgatttaaactgaaagttgaaaaatgccatcagcttacttaataagt

SEQ ID NO: 90245 - DNA, 600 bp, Chicken  19866894397960_2
ggtttggatacttaattgtatttttactgaaatctaccttccaaatattaataaaaagggagatctcaactacattgttaaactccatttagctccactgaagaaactgtaatctgattacaaagtgaagttgcatcctttaatctagctgcaagcaacagaaaaagataaaggagctcttacagtagcatattcttagtgatgatattgctttgcattaggtccattattagcaatttctgatttaaactgaaagttgaaaaatgccatcagcttacttaataagttattaacagtacrtgtaagaccttctccaaatcatactttaatgcaagatctttaatatatggtctacgactcctcactccttcaagttctggtcagttcttggtctctgatgcctggaaacatcacagttacattgtaggacagtaaagaaagaagaacaacacaggggttctccataactttctttcactattcacaaggwcttgacagtgtagtgtttctcatgtgtcatccaggaaatgagtgaggtccctaaaaataattgggaatatcccaaggtgaataagtgcaaatctatggaaaaaaaaaatc

SEQ ID NO: 90246 - DNA, 600 bp, Chicken  19866894397960_3
tattcttagtgatgatattgctttgcattaggtccattattagcaatttctgatttaaactgaaagttgaaaaatgccatcagcttacttaataagttattaacagtacrtgtaagaccttctccaaatcatactttaatgcaagatctttaatatatggtctacgactcctcactccttcaagttctggtcagttcttggtctctgatgcctggaaacatcacagttacattgtaggacagtaaagaaagaagaacaacacaggggttctccataactttctttcactattcacaaggwcttgacagtgtagtgtttctcatgtgtcatccaggaaatgagtgaggtccctaaaaataattgggaatatcccaaggtgaataagtgcaaatctatggaaaaaaaaaatccatatagtgttacaagtttctttatcttggcatttattcatctctgtctcattcttgtgatgaattctcttatctttcccatctgcatcatcacctcatttctacaagctcctcaaagaggctggataaatttttcattacttcctattactacatgcttgtttaaagctgaaatataagaagagagcca

SEQ ID NO: 90247 - DNA, 600 bp, Chicken  19866894397960_4
gtgaggtccctaaaaataattgggaatatcccaaggtgaataagtgcaaatctatggaaaaaaaaaatccatatagtgttacaagtttctttatcttggcatttattcatctctgtctcattcttgtgatgaattctcttatctttcccatctgcatcatcacctcatttctacaagctcctcaaagaggctggataaatttttcattacttcctattactacatgcttgtttaaagctgaaatataagaagagagccaaattttaacagagctaaatgtatacaggatttctcaagcakatcaaaagtggaacatgataatgtctataagaagaaaatgtctgtctgacatgatacatatccctctttctagatagtttcctccagaaatataataaaatatttaagatgctctgttttatgtataaaataaatttaaaagcaaacaaacaaaaagatataactagaaacctccgtactgaactctcttctctgacccatctcctctctgcttcaagttctaaaactatctggaagatgagagaaatgagtacatgcagtgtaactgcattatctagattcagctctgtattaatctgg

SEQ ID NO: 90248 - DNA, 600 bp, Chicken  19866894397961_1
agaaggattaacttttagcaaatttctcacagtactgttatggacagtatctggacatcatggagtttgccccttcttccaggtaactagtgatatcttccaggtaactagtgataggatgagtaaaaatggcctcaaattttgccaggggaggttcaggttagatatggtgaaaaaatttctctcaggaagattggtcaggcattggaacaggctgcccaggaaggtggtggagtcaccaaccctggagatgttcaagaaacacatagatgtgatactgagggacatggtttagtgtgyttagtggtgatgggttgatgggtggactagatggtcttagtgatttttttcaaccttaatgattctgtcatctctgacctttcctttacagcagctgagctttttctcttcttttagaacaatgtatatgtggatggtgttgcacaaaagcccatgaaggaaatacaataggcataaaaaagttcagttagcaagtcatcgtgcagatttcccaggtgctgccatatttttttaacccaaaattgcagtgaagaaagactatgtctctctgtatttatcaaaagagagttttgctgttct

SEQ ID NO: 90249 - DNA, 600 bp, Chicken  19866894397965_1
ccaagtacacaggcagaaaacacagcctctgcctagtgctgcagcccacgcagcaatgagaagcaccttggtgtcttcacactggccagggaaggtgactgggaaatgcagctgcagcacccagagcttgggagacagcttctgcctttctacctctgcttctccctaaacctcagaaacaagagaagacaaagaggacagaccttcctaaggactatcacgtgggatctgctatcccttcagcctgcacacctatggaagagtgggaaggactcagcatcaccaaggccaaccaggacktgctgggacctgctctatcttgtagaaagagagaactgaaaacaaaaacctaagggaatctctctcctggttgttttcttttttactaaaagcagagccttgttgcagctgtcagtgctcactgcacaaacaaacccactaacagccctagggctgcacttgtgccccatccagcctggacaggctgcaccactccagtcccacatccccaggctttgcatcatggcagctgcagttggcaacagacggccaaaagcctcaggtgcagaagagatggatttgggaaacatgcagtgctgg

SEQ ID NO: 90250 - DNA, 600 bp, Chicken  19866894397966_1
tgtacagggtttgcacttgcagcacatgccaattaacagcatgtcaccatcagcaccgcagctgggtccccggagctgacaacagcatcccctgccaccgtggcatcccctgcatcctctgcatccaccgcatccacagcatccaccacatcataccctgcatccacagcattcacagccccctcagagatgatctgtgggcaccatgagtggaacaaacccacaccttgcacgatgtctaccttccaaacctcacttcatctgcagaacctgcacttggtttcagagcaaagagacccyagctgcccaggttctcygtggtcctggtacgtccccatgtgcttataagggctctggtctgtatgcaaaccatgagagagcagaggttttccagagatgcaaagccaccatcagaacttgtggtttgcattcaggactcagcgctccccttggttaattcttagcacacataaaagggtgactgtcattcagtttacagagtgatcacaaccaggaaagaaaacttggagctggaatattcatgaccaaagccatatggttgaagcagtcaagaaaggttttttgaatacattcaaacaa

SEQ ID NO: 90251 - DNA, 600 bp, Chicken  19866894397966_2
tgcagcacatgccaattaacagcatgtcaccatcagcaccgcagctgggtccccggagctgacaacagcatcccctgccaccgtggcatcccctgcatcctctgcatccaccgcatccacagcatccaccacatcataccctgcatccacagcattcacagccccctcagagatgatctgtgggcaccatgagtggaacaaacccacaccttgcacgatgtctaccttccaaacctcacttcatctgcagaacctgcacttggtttcagagcaaagagacccyagctgcccaggttctcygtggtcctggtacgtccccatgtgcttataagggctctggtctgtatgcaaaccatgagagagcagaggttttccagagatgcaaagccaccatcagaacttgtggtttgcattcaggactcagcgctccccttggttaattcttagcacacataaaagggtgactgtcattcagtttacagagtgatcacaaccaggaaagaaaacttggagctggaatattcatgaccaaagccatatggttgaagcagtcaagaaaggttttttgaatacattcaaacaattactgcatgtgagaac

SEQ ID NO: 90252 - DNA, 600 bp, Chicken  19866894397968_1
ctggcctccttaattgagagatcagaggaaataacacctggcagcaaacccggaggccacagagatctttgcaccaccacaacctgcagccaccgccatccctctgccccaggagcgctgagcagcagcggcatcgccgtggtaaccgctggagggaggtgggattggtggcagtgggctgcaggcttcccttctttctgctgggtgtggggaattctgtgcaatccagaggggacggagaggagaggaatcccacctgcaaccccctggactgtgtgggctgttgtaaatcttgtcccygaatccactacatcgtcccagagagccctcccaccttgcaggggattaaaacatgagttgaacagcagttcgttgggctcacagatttaactttccattcagagatttcaagccagacctggagccgtgtcagatgcacagctccatctgagcacagcagcagggctgcggtactgtcctgcacagccatccccagagccacgccagggctggctccccttccccacatggagtattttctccaggcaaaacaaacagaagcccaaacaaagcctccagtcctttgtgccccctctgtaa

SEQ ID NO: 90253 - DNA, 600 bp, Chicken  19866894397970_1
ccttcttcagccacagcattcttcacagcaggcaacttcaaccaagtctgatttaagctttcattccagttgatttttcatccttctttaaccttgtcaaagctgaagcaaagtgcttgacatagtgcacaggttgttgcctgctggagaagagcatcacagatgcattccaagcttggacaaagcattgctctttgagaagagacctaaaaaatgaaaatatagtttaaagaatcctaaagaaaattttaggaaccacagtttaaaaatatttacattattgtcttccttatggaggarttgttccttttagcattctcaggatatgtaagaatggtccctggttgtatgtggtatgagaactggtacgagagcctactaggggtggtgccctgttagacctgctcttcactaacagagaaggactagggggagaygtgaaagctggggactgtcttaggcagagcgaccatgaaattgtagaattctctattcttggagatatcaaaagggtgactagcaaaactgctatattgaacttccagagcgcggactttgacctgttaaggatgcttgttgcaggggtcccttgggagtcgc

SEQ ID NO: 90254 - DNA, 600 bp, Chicken  19866894397970_2
tgcctgctggagaagagcatcacagatgcattccaagcttggacaaagcattgctctttgagaagagacctaaaaaatgaaaatatagtttaaagaatcctaaagaaaattttaggaaccacagtttaaaaatatttacattattgtcttccttatggaggarttgttccttttagcattctcaggatatgtaagaatggtccctggttgtatgtggtatgagaactggtacgagagcctactaggggtggtgccctgttagacctgctcttcactaacagagaaggactagggggagaygtgaaagctggggactgtcttaggcagagcgaccatgaaattgtagaattctctattcttggagatatcaaaagggtgactagcaaaactgctatattgaacttccagagcgcggactttgacctgttaaggatgcttgttgcaggggtcccttgggagtcgcttgttaagggtaaaggggtccaggaagcttggacactcctcaagatggaaatcttaaaggcacaagaacaggctgttcctgaatgttgtaaggtgagccataggggaagaagaccagtgtggatgaaccaagaacta

SEQ ID NO: 90255 - DNA, 600 bp, Chicken  19866894397971_1
tgagattaaaaaataaaatattatttgtacagcagcctacaaggatgcatagtagtctacagaagtctgttgtgaacttctcaagagttttgaattcttcagcaatttacaggtataggtattttataagccagtagaagcctgtagttcaagaccgtgatgtggataaatcagtataagaagaatgtgaatagaagcttgcataattttcccattggtatggtaaaacatagttactccacctaaagaatttgatgtgatatgttggagagcataatgaaagagacatattaacagagyaaaaaaaaaagtctcaaagtttacattataaacaaaagattcaagaaattttctgaataagtcagttgaaaatatcttggctgtagtctagagatacctatacctaaccaaaaaggtgcaattaaaagtctgaagacctatctaacattgttacacaaaaatccagtgacaagaaatataagctagccagctaatgtacagcagaggacattttttagtattttagcatgtttttactgtttacagacataaaataattatcttaacagagagcacaacaacactatcagtgttttactt

SEQ ID NO: 90256 - DNA, 600 bp, Chicken  19866894397974_1
cagacaaacagcgatcactgatatgggcagtgtcaaagcctcagtctttgcctgatctgtggcccttttggaagagcatatcagagctttgtttcacaccttgcactgctgagcataccagcaacactctgacatccatgaatgatcatattagaaaatactttcctgctttgctatgcattcagggtttcctggattctgatgcctgggggctgggaagagccagactgtctgcatggctctgggcagaggtaggaagcaccatctgtggtgtgggcacagggtgaaggtaactgtggygtgctgtgctcaggtttgctcactgaatgctgcagtcacaggggatgagctctggctgtgccagcacataaacagggaagtgacacgttgtcaacatggccctgaagcatcttaggatgttcaggcaaacagatcagcttgtgctggtggaatgagcaggactgtgagatggcagctggagcctttcaaaagaaaaaaaaatcacatacttgataggtatgcccacttctatattgctacacagaaagtcacggagcagggatttactgctgcttcacaactgagcacaaagcaggagaa

SEQ ID NO: 90257 - DNA, 600 bp, Chicken  19866894397980_1
tgtggatctgcatcagtttaggaagagctgctgtagcaaagtaattgcatacagagaatctttgcagtcctgtgctgccagcgaggctgaccatcacccaatgccaagcagcagcaagttgggatggggtaaagcaccacattcctgcacacatctactttcacggctgtcctcaggctccagagcaggcctgtatgcagtccacttcgtttcagcacatcttaagcctttttcatttttatctttaatcattaaggactcctttcagagctgtctgtggtttttaataagcatcgggcrtaagcttggagagaggtcttcaaaaagagagaaacgccctgcagttagccaggtaaatggacaagtgwgtttggcactctgagtgcaaatggaaggctgcaggccttacaaaggatgtcccctgaagcaatgggatgctgcagcaggaattttccattggggaaaattgtactcaaaggaacgggttactttggagaggtaaaattaaaccctctctcatccaaacacctcaactgacggcttgacaaaacagttaccgtagcaactggagggaaaaagtcaccaaaaactatctttttt

SEQ ID NO: 90258 - DNA, 600 bp, Chicken  19866894397980_2
cctgtgctgccagcgaggctgaccatcacccaatgccaagcagcagcaagttgggatggggtaaagcaccacattcctgcacacatctactttcacggctgtcctcaggctccagagcaggcctgtatgcagtccacttcgtttcagcacatcttaagcctttttcatttttatctttaatcattaaggactcctttcagagctgtctgtggtttttaataagcatcgggcrtaagcttggagagaggtcttcaaaaagagagaaacgccctgcagttagccaggtaaatggacaagtgwgtttggcactctgagtgcaaatggaaggctgcaggccttacaaaggatgtcccctgaagcaatgggatgctgcagcaggaattttccattggggaaaattgtactcaaaggaacgggttactttggagaggtaaaattaaaccctctctcatccaaacacctcaactgacggcttgacaaaacagttaccgtagcaactggagggaaaaagtcaccaaaaactatcttttttttcccgttgaatagagaaaatcaacttttgattgcagcacgcatcgctgcagtgctggcgataaggtg

SEQ ID NO: 90259 - DNA, 600 bp, Chicken  19866894397980_3
aaattaaaccctctctcatccaaacacctcaactgacggcttgacaaaacagttaccgtagcaactggagggaaaaagtcaccaaaaactatcttttttttcccgttgaatagagaaaatcaacttttgattgcagcacgcatcgctgcagtgctggcgataaggtggctgcagtggggctggctgtggctcacaccatgggacagcacagctccctgtggtgcctggctcaagttgctcctgcaaacccttcctcctccagacccagaaacactggaaagccccagtggacttgggaargaattggtttccctgctttctaggagaagaacaaaaccccgggggaagtcacagtgcaggaaggaaagggaaaaagaggctcaaaactcaactggtggtttacaagagggacgtggcccacaaastgaaacagctcaggcatgcatgctcccatccaggctgacaaccagcagtttacttccaatgagttttccccagacactatttaccactctatttgtcatctctcctgcagtgtgatgctgatgccaatcacacagtggccaaaaaccagaagtaccccaaaaacccatgaacttc

SEQ ID NO: 90260 - DNA, 600 bp, Chicken  19866894397980_4
tttgattgcagcacgcatcgctgcagtgctggcgataaggtggctgcagtggggctggctgtggctcacaccatgggacagcacagctccctgtggtgcctggctcaagttgctcctgcaaacccttcctcctccagacccagaaacactggaaagccccagtggacttgggaargaattggtttccctgctttctaggagaagaacaaaaccccgggggaagtcacagtgcaggaaggaaagggaaaaagaggctcaaaactcaactggtggtttacaagagggacgtggcccacaaastgaaacagctcaggcatgcatgctcccatccaggctgacaaccagcagtttacttccaatgagttttccccagacactatttaccactctatttgtcatctctcctgcagtgtgatgctgatgccaatcacacagtggccaaaaaccagaagtaccccaaaaacccatgaacttcaacatccccagcataaccttaagctctttgctgctgaatctgagcacaacccatgcatcctccagccagagcatcacccctccttggcgctccgagccccagggagacgggctgcaataccagca

SEQ ID NO: 90261 - DNA, 600 bp, Chicken  19866894397981_1
tcactacagctttgcctccaactgtgtcagatctgcataaatccgagtcacatggctgttggtctctaagatttgttaacaacactgtttagaagctggtgttttgttgagataaaactgggtgccatctgcaagggaagcaatattttgcttctttatagactgtgacgtcctctgcctcttgacaacctcttgatagttcctgcaagtgcttcagtggataagcagatgagatatctaatgctggctctaagaagaatgagcctaatgtgcaactgtgcaaaagctcacaagaaaatytgtagaagggtttgattatgtcctaactctagtctgaatgggagctcagaagaatcctgtttatctaataccagaagattgcttttattcattttgttaatgtgttgaataatgattagtgtttgcaaaggattatgatttgctgatatcgcttgaattaagccagacagaacaggataatatagtggtcgaatttggctggcttgctaatagtctttttccaaattaatgaaccatacagtctggtataatgagtgctcaatggaaactgtggtggcttttttttcaggtatatgtgta

SEQ ID NO: 90262 - DNA, 600 bp, Chicken  19866894397985_1
ctctgggatgcagcccccgagggtcagtggctgagacacgatgtaggtgagtctgctgaaggcccattgaatacacaggtgaatctgccccagacagggtctacgcatcactccagccccgtcagcagcagttacctctgagcaaccatcaacacacaccgtccaagggacacagctttagatttcatgatcgctggctccaggagatcagcaacaggagagcctccatcctatcagccatggcccttgggtcccagcactggctgatgtgaagctatccccagctcagctgtcacctgktgcagcgggagcccmggagacctccagagcttcctgtgaatggatggtccttaggaactcatccgctgcagctgggattaacagccctggctgtagggtgatggcttgagatcctcagctgctggaaatgtcccacagatgtgtgctgggagctttcacaggcacctgctggcagtgcattgcagaaaacccatgaaagaagagtgatcacacgattaactgaaggacgcaaagtacagattttatttggaaacattacattttgccattttaaaagcaatttatgtccagattgtggca

SEQ ID NO: 90263 - DNA, 600 bp, Chicken  19866894397985_2
cccgagggtcagtggctgagacacgatgtaggtgagtctgctgaaggcccattgaatacacaggtgaatctgccccagacagggtctacgcatcactccagccccgtcagcagcagttacctctgagcaaccatcaacacacaccgtccaagggacacagctttagatttcatgatcgctggctccaggagatcagcaacaggagagcctccatcctatcagccatggcccttgggtcccagcactggctgatgtgaagctatccccagctcagctgtcacctgktgcagcgggagcccmggagacctccagagcttcctgtgaatggatggtccttaggaactcatccgctgcagctgggattaacagccctggctgtagggtgatggcttgagatcctcagctgctggaaatgtcccacagatgtgtgctgggagctttcacaggcacctgctggcagtgcattgcagaaaacccatgaaagaagagtgatcacacgattaactgaaggacgcaaagtacagattttatttggaaacattacattttgccattttaaaagcaatttatgtccagattgtggcaaaacatttttgcctg

SEQ ID NO: 90264 - DNA, 599 bp, Chicken  19866894397990_1
  misc_feature (1)..(154): n is any nucleotide
nnnnnnnnnnnnnnnnnnnnnnnnnnnnnnnnnnnnnnnnnnnnnnnnnnnnnnnnnnnnnnnnnnnnnnnnnnnnnnnnnnnnnnnnnnnnnnnnnnnnnnnnnnnnnnnnnnnnnnnnnnnnnnnnnnnnnnnnnnnnnnnnnnnnnnnnnnctgacttgtggaattaacctctaattcttattagcagcagccttttatgcagtttttgcatacatgggctttcagcaacatgaccacgcagagctgtgatctgacacagccaagaggtgagctccttggcgtcaggtgtgtggtgstaacgacatgtcacgagcagctgcctggcacttggcaagcatctgcttcccaggtaagcattctaaaaggcatttacaaatataagacgtaacatcactgcacatagctctgggaatgtaaagggggctacacaaaaggctggatttgtgaaattcagtgttttgtttacaggtagcagggctgttgtcattgttggcctgtgagagcctgaactcccagcatctccaagagtgcaggtgaacgtcctgactgcctgagccctcttcctgtgcaacttgtctctcatccagtaaytttg

SEQ ID NO: 90265 - DNA, 600 bp, Chicken  19866894397990_2
ggtgstaacgacatgtcacgagcagctgcctggcacttggcaagcatctgcttcccaggtaagcattctaaaaggcatttacaaatataagacgtaacatcactgcacatagctctgggaatgtaaagggggctacacaaaaggctggatttgtgaaattcagtgttttgtttacaggtagcagggctgttgtcattgttggcctgtgagagcctgaactcccagcatctccaagagtgcaggtgaacgtcctgactgcctgagccctcttcctgtgcaacttgtctctcatccagtaaytttggtattcttctttcgatacagacacaataagcacagtgaagaaagcctttacctggtatagcttgtttcgttcaggcaggtgtctgaacctgtctgtgtagctcaggtgtactctaagaccaatattcatctgtgtagcttttagattccgattagactggagacactcatggagagagttgtcatgcattggaatgggatgcccagggaggtggtaatgaaggtatatctctgtccttggcagtaattaagagatacatggatatggcactgagggcatggtttagtggcgagatt

SEQ ID NO: 90266 - DNA, 600 bp, Chicken  19866894398005_1
tagaggatggtcatggtccaagatgctctcagtgttgattgttgtagagtttggtagagcaacaaagtggagtttgtgttgattcttggtgattattgttttcctgtgttaatctctgctgtagctagagtctttcaaaagccaagtgatgcgagtatgcagcccacatgcagcaggagagtcagggaaggccctcacagtgcagcaggtgagtgcagagaccatctcagggatgctcagagcctacaaaacccattagggtttgaggatgctgcagaacagccacagcaccagccagcktcacatattacaagtgtggccaccccagaagaattaccatgcatcataatataaagaaagtgtggcccttctcctcctcctccagagtttggctggagtcctggggcttcaactgggaaaaaccccagagcccagaaattgcagaggctttggtcactgctgcagttgtctctggccccagtggattgcccagagagctgtgggtgccccatccctggaggttcccaaggtcatggatgggccctgggcagcctgagatggtggggagcaacaagcccatggcaggagggtgccactggg

SEQ ID NO: 90267 - DNA, 600 bp, Chicken  19866894398012_1
gagtggcaacacatgaactccccatcaaagaaggtcaagacaaagccctcgggaggtaaagtgatgtgcacagttgtgtgagataagaaaggactgatccttccagatttcctgaaacccagtcaaaccatcaactctgactgctgcatcacagcactgactaagctgaagactcaaacttccagagtcagatgagagaagacaacaacctttttcttccaacatagtaatgccaggccccataccagcttgaagactgtggagcacgatgcctattttggctgaactgtcctaccacayccactgtaagtccgaaattagcaccttctgacttccatctgtttgggctggtgaaagattgactgtgtgggcaacattttcctagcaatgatgtcatcacagcagctgtgaaagtgggtcaccttctctagtacagattttgatgagggcagcatgcattctcttgtccatggctggcaaaaacgcatggctattggttgtgaccatgttgaaaaagagtgaattgtggcagtgaatgtgctctaccaaaatagtgttattgcattctttgtatctgttgtagttccatggaaataaata

SEQ ID NO: 90268 - DNA, 600 bp, Chicken  19866894398014_1
tctacaattttccacctagaaatctttctccggatattttcattaattgcaagtatttgcatattaagccacacataggttttgcaagtaagccgagtgcagaaaactagaaaaaataaggcatacaactactgaagttatatgctatagaaataatctaatgtttctaaaaaattcaatacttaataataataaaaatttggttttatatatatatgtgaattctttttttgttctttcattctgtttgttgtcagaacgctattattatttttctaacaaaaattttcaggtcagtcytctgtgagaatttttttttcagagagtcagaaattctgcttaattgccatgtcgtggatggctagttatgttttctgatagttgaaagattgttcwgaggtttccttatggttaacttctccccatccctttcccagaactgaaaaagcaggatgccttaattgagggcaaagaaattctgatactgacattatcttaggtttctgcggtattgaatagtgagaaatacgtaagttatagcaagaggatggcttccatcaaaatctctcgtttgagggatgcaagaggtaatcagtgtgt

SEQ ID NO: 90269 - DNA, 600 bp, Chicken  19866894398014_2
gtgcagaaaactagaaaaaataaggcatacaactactgaagttatatgctatagaaataatctaatgtttctaaaaaattcaatacttaataataataaaaatttggttttatatatatatgtgaattctttttttgttctttcattctgtttgttgtcagaacgctattattatttttctaacaaaaattttcaggtcagtcytctgtgagaatttttttttcagagagtcagaaattctgcttaattgccatgtcgtggatggctagttatgttttctgatagttgaaagattgttcwgaggtttccttatggttaacttctccccatccctttcccagaactgaaaaagcaggatgccttaattgagggcaaagaaattctgatactgacattatcttaggtttctgcggtattgaatagtgagaaatacgtaagttatagcaagaggatggcttccatcaaaatctctcgtttgagggatgcaagaggtaatcagtgtgtggcacttgggaacaatgtgtggtaactttcctttcccagccacggttctagggactgactgactccacgctgcctcctgactggggcttttatatg

SEQ ID NO: 90270 - DNA, 600 bp, Chicken  19866894398017_1
tgttggtgtccctgggcacacacaggtaaaacatggaagaaacccaataattttgagttcaagagctttcattgaacatgtaaacccactcaacaggacattaaaaaaacccaaacactgatattttaatagccagctgtggttatgcacactgctgcctgaaatacctgccatgttagaaagaactggttaatgaacaggggctaaaaccagtccatttaattctacatttgcttctttccaagatacacacttgcctgttggaagtatctgccagcctacattgattttggctttaayccactctacatttactacacatttaccattgaagataatttctttagttctctgctacatcttttgttctttgcagagttgcctaatgcttgaccttaaggcttttaggagacctgcctcaaattcgccctctttcttactacttttttagacctttcagccctgtttaatattctggcacctgggccagaatgggctcctatgatgtccccagtgatgtccccaacagccaggcagatttgctcaacaacaaacatctcaacacacagctatggtgcttgctttactaccctacctcct

SEQ ID NO: 90271 - DNA, 599 bp, Chicken  19866894398024_1
  misc_feature (1)..(50): n is any nucleotide
nnnnnnnnnnnnnnnnnnnnnnnnnnnnnnnnnnnnnnnnnnnnnnnnnntatctgttactttcatgttaatttttatcttgctgtagtgagacccagcggtcctcagtgtgcggagtccctggagcatacataacctgatagaaggatgctgcacctttctggttttgtgtgcctctcatgtgaattctcaaagctgaatctattgtacagagtactcgatttaaagatgactgtgtattgtgctgaatgcaaagcttactttatacaggagttacagaaaccaacttttcaccctgartatctctgactgttccctcttggagcctgtagcacaggctgtgactttgcagtttctgttgaacaacatcacctgagcatgatgcgtttttttcctctctgtgtggccctgtcttgaagaagggtgcttgattgtgaaatcytgtgttggaacgtgcaaggaatcaaaaaacatttgagagatccactgctttaggacctagaaggagtatttgccataaaattccaggctttgctttgctattttgacgacagaaatgaccagaattaactgaaatatctaagttaatcatggcccaa

SEQ ID NO: 90272 - DNA, 600 bp, Chicken  19866894398024_2
gaaggatgctgcacctttctggttttgtgtgcctctcatgtgaattctcaaagctgaatctattgtacagagtactcgatttaaagatgactgtgtattgtgctgaatgcaaagcttactttatacaggagttacagaaaccaacttttcaccctgartatctctgactgttccctcttggagcctgtagcacaggctgtgactttgcagtttctgttgaacaacatcacctgagcatgatgcgtttttttcctctctgtgtggccctgtcttgaagaagggtgcttgattgtgaaatcytgtgttggaacgtgcaaggaatcaaaaaacatttgagagatccactgctttaggacctagaaggagtatttgccataaaattccaggctttgctttgctattttgacgacagaaatgaccagaattaactgaaatatctaagttaatcatggcccaaatgctgtaatatttgctggagattcagcaacgatagcttgggaatacttttatgtaacaataatctgttatagcagctgctagcaactggaaattctaatacatctattttcagttagaaataattattgcccttctgtaaag

SEQ ID NO: 90273 - DNA, 600 bp, Chicken  19866894398028_1
aaactaagtagtagaaaaaatctctttctcagaggttgtgtatagtatgggagctcttttcttctttattaccagtttggagtttcttctttgtgattttctggggcaaaagtgccttttttattcaagcagttctccttgttctgattgacactgatttgaggctctcagaaatataaagatttgtaggctatctagctcttttatttcttctaggggtgataatgtcctctgccaaattgcagcattctctgtcttgttgctgttcattcaccaggactcatcgtatctttgtgctaytgtgtttctcccaaacctctgggagatgggtctgtctgcagctgaaagtctctaaggagagagattctactgtagcccagtactttaaacatgctgcttcagtaatgtgcttacctactgatgcttgttgggttttattgggggtggaatatatggtctcccagtggcagacatcagggtttctctgatatgagtgggactcaggctgctattgtcctaaattagcccaagtgccaatcaaaatctaacactgagttaatttatgttagtgcacttagttgaaaggaagcttgtttgtca

SEQ ID NO: 90274 - DNA, 599 bp, Chicken  19866894398033_1
  misc_feature (1)..(94): n is any nucleotide
nnnnnnnnnnnnnnnnnnnnnnnnnnnnnnnnnnnnnnnnnnnnnnnnnnnnnnnnnnnnnnnnnnnnnnnnnnnnnnnnnnnnnnnnnnnnnntgcaaaacagtctctttcactttcagtgctaagatcttctagccatgggtatccaacctttgggttcacctgggccaggctgaatgaagaggaattgtcttgggccgtatctatgtaggttgctccaaaagtaatgcctcctatttatttccatggaaacaacaatggctacacagagcacaacaacactttctgacagagcaaaygctcagctataaaacactgtttttcaacagtcaccaccattagctttgcatttttgccacaagaacaagagcctgcatgccaccgttgtagaagtcagacccgctgttgctgtcaccactgctgaaacacagcaccctctcactgtgctcccactcatggatcagtctctacagacattcacgagtgttaatgaatgtcagtagctgccatctttctgtayagaggaattcagtgacagctttgctccacccgcgctcccatgtcagactccatttggtcacagtgcccctctgctgcc

SEQ ID NO: 90275 - DNA, 600 bp, Chicken  19866894398033_2
aaagtaatgcctcctatttatttccatggaaacaacaatggctacacagagcacaacaacactttctgacagagcaaaygctcagctataaaacactgtttttcaacagtcaccaccattagctttgcatttttgccacaagaacaagagcctgcatgccaccgttgtagaagtcagacccgctgttgctgtcaccactgctgaaacacagcaccctctcactgtgctcccactcatggatcagtctctacagacattcacgagtgttaatgaatgtcagtagctgccatctttctgtayagaggaattcagtgacagctttgctccacccgcgctcccatgtcagactccatttggtcacagtgcccctctgctgccatctgtcccacagccacagcacctgatgggatgttggtaggaaggttctgcctctgctgccgtaccaccaacataacaaaatagaaggcattacttttggatcagccctcataaaatatatcatatagctaatgtatatgaggtagaaaaacttactttatttttaaatgtttttttattacaccctattaaaaagaatgcagcagaaccatagcagcagtg

SEQ ID NO: 90276 - DNA, 476 bp, Chicken  19866894398059_1
aacagcagttttccttttcaatttattttcaatttgcatctctttttttaggggaggagagaaagaatttttctgttttgaataacagaacttcaatattgacctaagtttggcattgctataatgcaaaactactacaggacctgtggtgcaaaaaggtaatgtttaaatgcagaagtagttacactgaatacatgaaataaagagtactcattacattaaacattagactgatattttggaataggagtgccacaaaggggcagtggacaatgcagaagcttgtcttttatctagcayrtagataggcacaccattccagagaaagagaaatatttcatgtattttttatatgccatagcatggcttcattttcatacatacaggcaaagaggtctgcagggaatgctacactggtgacagtgatgtgctggaaacagcatcgggtagtacatttcattcggggaaattcattt

SEQ ID NO: 90277 - DNA, 475 bp, Chicken  19866894398059_2
acagcagttttccttttcaatttattttcaatttgcatctctttttttaggggaggagagaaagaatttttctgttttgaataacagaacttcaatattgacctaagtttggcattgctataatgcaaaactactacaggacctgtggtgcaaaaaggtaatgtttaaatgcagaagtagttacactgaatacatgaaataaagagtactcattacattaaacattagactgatattttggaataggagtgccacaaaggggcagtggacaatgcagaagcttgtcttttatctagcayrtagataggcacaccattccagagaaagagaaatatttcatgtattttttatatgccatagcatggcttcattttcatacatacaggcaaagaggtctgcagggaatgctacactggtgacagtgatgtgctggaaacagcatcgggtagtacatttcattcggggaaattcattt

SEQ ID NO: 90278 - DNA, 576 bp, Chicken  19866894398060_1
aatactctctgaaactcactaggtagcctttgagagcagacctgatacactgatctgtttctgaatcagaccaagttactgcctggccctctcagtgctcaccatgagggttcgttgcaccatctgcttgaccagggatatgaatgagagaaactcgggcgatgcgaatctgggaattctctttccaaggacttaagataatctgatgtgctggatcttctgtctgttctggctgaattagtagagccagtatcttctatacttttgaaggaaggggataaacattgcttacatgtcatytctttgatatctgtccctaagtgctccagaacagcctttaaactgagggttaagttcagtgcacaggatggagagcttcttatgacttcctcctgtgctacacttgctagagtggtgagtaggaactttaatcaatgccttcatattattaaagagaacaggatggctaagggatcgtcacgtcagcctgttgttggttacagacacatctacctaaccttaaaatagcctgcaatctgtgggagacacaaaaaagtaaaataaagacaagagagt

SEQ ID NO: 90279 - DNA, 600 bp, Chicken  19866894398063_1
gctgaaggccacctcttgggaggggagccagtgtgcaaggatcctgcaaggtgagtgttagctgggccatgggaagcttggtggggagaagtgctgctagagaaggaaaaggtggggaaagagggagcaccatggaaagggaagggatggaagcccaaaggctgcaagaccaaagttgcctgggctatgttaaacagacctactgaagaggaggcacatggaataacaaatgtgaaagtgcagaggggaaaaaaatcatcttgggcatttctgaactctcccagcctcctgctagtgagygtaggtgctggtggaagggaataaatcaccaggtctgggttgaaatcagaaaaagaatggataagctcaaattagagtgctatttttaattggtaaatgtttttgatgatggaagataactttctggcaaatggaaactttatgaagaaaggctgggattttgtttttctatatatttttttatgtaaaaacttgggaataagagaaaataacatatacattgtctgcaattttgcttctcttaagagaataattatataagatacagtacaaatagtttaatattcctgaggaaatatt

SEQ ID NO: 90280 - DNA, 600 bp, Chicken  19866894398068_1
acaaatacacagtcaaaacaaatacacaggtctcttcctctctctattaaaaataattctttaacacttttgtaatactgcagcttatgatttttagctcagaccatttaaaaaagggatcccagcaaagctttcctctatacttcactgaacctacaaatgagtagaaaactctattttttttaaacttgctttctgttttcaagctgggctctacttacatcttcttaaatatttgacaaaatcacagcttcttaaaatcttgtttccttcttgtatttctatctactgctaaaaatyggaactgccttcatatatagtcacttcttgtaaaatcttgaacaaggcttctgctggaaattagattatttgctgctgtataaaaggtgctgatggaacataacagtcaaagaaatgtgatgaaatctggactcccagcgctaatctccagtagagacgctatgattattagccatgacaaccaagaatttctcctccatgttcaccctgctgggtattcctcaaagagctgtgatctccaactgttgtatggaatgttttcccatatttgcaacaacaaacagactaacataagaatat

SEQ ID NO: 90281 - DNA, 599 bp, Chicken  19866894398069_1
  misc_feature (1)..(12): n is any nucleotide
nnnnnnnnnnnntgctgccacctgcattgcaaaactcagctgctgtatatctgctggtggctttcctcctggagctagcccgccaatgcatcccaactggcagtacagccaggctcctgtgagtcacccagctgcagctcaaccaagccattcggctcctgtggcagggacagggcctgctcagccaccgccgccgctatcaggaaatcctccaggaagttatcagtatgctgcttctccaggaggtccttcacttcagaacagctatatgaagccaggtaatcataactttttgatacyrttctttaactgactgccagtgcccccttctgtgtccttttaataaaatgatgttawtaataatattcactctatagtagccttttgyttgtggaactgggttgtcaaacacttgaagaaatgtacatcataaatattggctggcttctttccatttcttcattccataagaaatggaaactttgcatgcaggatttcattttgcttgagtggctgaagcaggtaacttctgttttgggaagctgtgtgtgggtaaggctgtttctgttgcctttgtttcttccttgagtgttggagtg

SEQ ID NO: 90282 - DNA, 599 bp, Chicken  19866894398069_2
  misc_feature (1)..(11): n is any nucleotide
nnnnnnnnnnntgctgccacctgcattgcaaaactcagctgctgtatatctgctggtggctttcctcctggagctagcccgccaatgcatcccaactggcagtacagccaggctcctgtgagtcacccagctgcagctcaaccaagccattcggctcctgtggcagggacagggcctgctcagccaccgccgccgctatcaggaaatcctccaggaagttatcagtatgctgcttctccaggaggtccttcacttcagaacagctatatgaagccaggtaatcataactttttgatacyrttctttaactgactgccagtgcccccttctgtgtccttttaataaaatgatgttawtaataatattcactctatagtagccttttgyttgtggaactgggttgtcaaacacttgaagaaatgtacatcataaatattggctggcttctttccatttcttcattccataagaaatggaaactttgcatgcaggatttcattttgcttgagtggctgaagcaggtaacttctgttttgggaagctgtgtgtgggtaaggctgtttctgttgcctttgtttcttccttgagtgttggagtgc

SEQ ID NO: 90283 - DNA, 600 bp, Chicken  19866894398069_3
tggctttcctcctggagctagcccgccaatgcatcccaactggcagtacagccaggctcctgtgagtcacccagctgcagctcaaccaagccattcggctcctgtggcagggacagggcctgctcagccaccgccgccgctatcaggaaatcctccaggaagttatcagtatgctgcttctccaggaggtccttcacttcagaacagctatatgaagccaggtaatcataactttttgatacyrttctttaactgactgccagtgcccccttctgtgtccttttaataaaatgatgttawtaataatattcactctatagtagccttttgyttgtggaactgggttgtcaaacacttgaagaaatgtacatcataaatattggctggcttctttccatttcttcattccataagaaatggaaactttgcatgcaggatttcattttgcttgagtggctgaagcaggtaacttctgttttgggaagctgtgtgtgggtaaggctgtttctgttgcctttgtttcttccttgagtgttggagtgcttgtgtgcttcagtcacatgagggcttctggacttgctagatgaaaatcagttgctt

SEQ ID NO: 90284 - DNA, 600 bp, Chicken  19866894398069_4
catcccaactggcagtacagccaggctcctgtgagtcacccagctgcagctcaaccaagccattcggctcctgtggcagggacagggcctgctcagccaccgccgccgctatcaggaaatcctccaggaagttatcagtatgctgcttctccaggaggtccttcacttcagaacagctatatgaagccaggtaatcataactttttgatacyrttctttaactgactgccagtgcccccttctgtgtccttttaataaaatgatgttawtaataatattcactctatagtagccttttgyttgtggaactgggttgtcaaacacttgaagaaatgtacatcataaatattggctggcttctttccatttcttcattccataagaaatggaaactttgcatgcaggatttcattttgcttgagtggctgaagcaggtaacttctgttttgggaagctgtgtgtgggtaaggctgtttctgttgcctttgtttcttccttgagtgttggagtgcttgtgtgcttcagtcacatgagggcttctggacttgctagatgaaaatcagttgcttttagtgagtgtggtcttctgcagtttaaaat

SEQ ID NO: 90285 - DNA, 600 bp, Chicken  19866894398076_1
ctgaacttgaaccaagtgtagctttgcatgcagttaccagctcctggaagcataatataatgataaatattcattaaattgattttgttagaaagtagaatcaatctttctccacagttgatgcttccaataaagcggaagccaaattaatcatggaagcactatatacacaactataaatgcaaagggaatatggaaagagatcacagaagcagtttgatggatgctggttgtgatcctgcagtgtcacctctcacagatgatttcattatagctcggtaattgcactgctctgtgcartgtcctctatggtacgttgctctccacagcagcaaygttgccagctagtaaagcctggtgggtgtgcagatcagcaaatgatgatttaagaatccacttgaaagtctttggatgagcaaatgagcaaggcagcaattacgagaagcaattttagtagcgttgtgtgcagatgagagagatggagcatttctgtggcttttagcgttaaaatattaggaattgctgggctgtgattgacagtaatagaatcaaatctgtgtttcagttccaggcgcagttattcacagtgcagaggaaaca

SEQ ID NO: 90286 - DNA, 600 bp, Chicken  19866894398076_2
ccagctcctggaagcataatataatgataaatattcattaaattgattttgttagaaagtagaatcaatctttctccacagttgatgcttccaataaagcggaagccaaattaatcatggaagcactatatacacaactataaatgcaaagggaatatggaaagagatcacagaagcagtttgatggatgctggttgtgatcctgcagtgtcacctctcacagatgatttcattatagctcggtaattgcactgctctgtgcartgtcctctatggtacgttgctctccacagcagcaaygttgccagctagtaaagcctggtgggtgtgcagatcagcaaatgatgatttaagaatccacttgaaagtctttggatgagcaaatgagcaaggcagcaattacgagaagcaattttagtagcgttgtgtgcagatgagagagatggagcatttctgtggcttttagcgttaaaatattaggaattgctgggctgtgattgacagtaatagaatcaaatctgtgtttcagttccaggcgcagttattcacagtgcagaggaaacattyggtagttccatttttgttttgtacttaaaaaaa

SEQ ID NO: 90287 - DNA, 600 bp, Chicken  19866894398076_3
cctctatggtacgttgctctccacagcagcaaygttgccagctagtaaagcctggtgggtgtgcagatcagcaaatgatgatttaagaatccacttgaaagtctttggatgagcaaatgagcaaggcagcaattacgagaagcaattttagtagcgttgtgtgcagatgagagagatggagcatttctgtggcttttagcgttaaaatattaggaattgctgggctgtgattgacagtaatagaatcaaatctgtgtttcagttccaggcgcagttattcacagtgcagaggaaacattyggtagttccatttttgttttgtacttaaaaaaatacccacaaagtacagctgttgtctgcagctgtgaacaaaagctgggtttgagagacatctctgtgtaggttctggaagcttttcatgttggtttcttacgttaccagtttaagacaggtctttcccatacaaataaatttggaagcatccctgtcaccattcatttctgaagcatgcatttcctcggagacccttccttgtagccacatcagggtaactgctggatgcaaattcagggtcacattcagcctttcccgggcttgatt

SEQ ID NO: 90288 - DNA, 600 bp, Chicken  19866894398080_1
tactggaactgacgcttttcttttaactccctggcttcccttctgcctggtgcagctgcagcatactcacgttgttgctgatgttcctgctgttcatctttacatggtaacatcggctctgcaatacttcccgtctttgatagcccgggaaccaggcatttcaaggttgcttctgaactcagaggttttgtgtagcagcaccatccatcagtgcatgtaggaccagaaataattcctccgggctctttgctaaggacttcaaaccgcagtggtaacacgctgtgaaggatcgtcctgccytgcctgctatgccagcccttcctacaccttctgaacatcaggaaaggcttatataatctgtactaacgtcaccgtgggtgactttttttgtcacatttgcagaccttggctgtgctgtgaggaacacagagcagcgrtgtgtttatggtgagtgccttcttatggagatctgtgtgaatggttcagtacttacagtgtcttcgcttcgtacacatcagatgttcaggatccattcttatgggttgtatcgcatcgcctatgcttaaggtacagcaatctttgtgacaacgtgcagataca

SEQ ID NO: 90289 - DNA, 600 bp, Chicken  19866894398080_2
tgatagcccgggaaccaggcatttcaaggttgcttctgaactcagaggttttgtgtagcagcaccatccatcagtgcatgtaggaccagaaataattcctccgggctctttgctaaggacttcaaaccgcagtggtaacacgctgtgaaggatcgtcctgccttgcctgctatgccagcccttcctacaccttctgaacatcaggaaaggcttatataatctgtactaacgtcaccgtgggtgactttttttgtcacatttgcagaccttggctgtgctgtgaggaacacagagcagcgrtgtgtttatggtgagtgccttcttatggagatctgtgtgaatggttcagtacttacagtgtcttcgcttcgtacacatcagatgttcaggatccattcttatgggttgtatcgcatcgcctatgcttaaggtacagcaatctttgtgacaacgtgcagatacagggattaaatgcatttttataagaaatttaaaacaatttaaaaaaacagttacttctgaaatctgcctttttgccattgttatatcccacatctccatgcaataatgcagaaacagatgaatgttcaaactttccat

SEQ ID NO: 90290 - DNA, 600 bp, Chicken  19866894398090_1
agcaaatgacagcagggtgaaacaacctttgcagaaatagatatcagtgatgtgtaaactatgtgaaagccacatcacatgtcatttttagtattacattgaggtaggattgtaggtctaaagaagaaaaatgttggaaggatgagaagtttcgcctatcgtagtgtcctaattattttgtcacgatagacctattactaaaaaatacagtgtgaagtatttcacttcctaagagtgcacctgagaaatgagagataactcacttgggcaaaccttcaataagagtaactaacttgataycaggctctgaaaatgttttgtgttttgatgcacaattcacgcggagtcattctgccaggaccagaaggttttgattcattttaatagtccaaactagataaatttgctcaaggaaagtacttaaaagcatttctgagcagtccagttgttgctgtcaaactattattggtttgttttgttctttttcttttttttttttaagtggtttcctccttagactactgtttgtaggtcttggggtcttagaggggtgagtaccatttctgtggttaatgaacataattatgttactcttcagag

SEQ ID NO: 90291 - DNA, 600 bp, Chicken  19866894398093_1
ttgttgggttatatatcacttctgagaaaactatccatgaacaaagattttaagtgattttccatagacaaacatggtatgatggtaatgtaaaatgggtgattgccctgattacgagtttattcatttatatctataattaaagaaaaacatataattaatgacatgtattttaaacatagtaagtaacaatatttaattacactgcagtatgtatttacaacagcataaagcatgtataaaaatgcaccatcatatcatagaatcatagaatggactgggttgaaagggaccacaatyatcatgtagtttcaacccccctgctatgtgcagggtcaccacccactagaataaacactttttttttttttgtcttggcaatgtgtagtattaggtgactaaagacagctccacagttaaagagtctcaattaaacagtttttgttctaattttatgtgatattgtgttaattaaaatgaacctatgcaatcctgcctaaatatttctcagcaaaattgctgcccagtacaataattctcagcataatcttgataaaaaggccatccttcagtggtccaggagggatatatttttttcta

SEQ ID NO: 90292 - DNA, 600 bp, Chicken  19866894398097_1
cacagctaggtaacagctgtagggaagacgaccagaatgcctgatttcacaccacaaagaccacttgcccatcctgcttgccatttcattgatggtactcatcagactttggtatctgcttgctgtgcttgcggtgctcatttagccaactcctattattcaccatatactataatgagtcaggcctagcacctcaaaaccctgtgcctgcatcaccaggtacatgggttccaaaatcccacatacagggacacagcagtaccatcaggaagcccaattaaagcatcagaagagggtgtrtcctccatttctctgcttcatttatttttcctgccagactctttccttcactcctgttgaagaaaatactgattagtttctaattagtacttagtcaaaaatacatcacctggaaggatatcatgaaacaaattaacatagagttgtactgcattttcacagataaaattataaattggcacaaatattgtcaaatttccagtttaaaaagttacttatattttagcttcctgagcagcaagttatgtaggtcactccaagttacaccagcataccaaaaatttccaagtgttcaatttc

SEQ ID NO: 90293 - DNA, 600 bp, Chicken  19866894398101_1
attcatcgtgaagacacagaagtaaatacaccaggggttgaatagaaattttctttcacgtattatattctgtaaccaatcagttgcagtaagttaatagttttagctgtttctgctgatccccaaagtgtaaacaagtagtgagtgacggagggaagatgatgtaacctgaaggctaagtggtctgatttgctctcaccaagtctgagcaaagtctgacgtcaatgaagccatactttaatgaaataatgccattatttgctttcattctcgtggatggtcataccaagtaataatttyattctgcagaatagtaatggtgtcttaactcagagcagcaaaactcttatagcccttaaatactcaaagtacctgatttgtcgctattgtccaaccaacaaacrcaacactgcacatcccttcatagagctggattctccaagaacccctaagagatctctaagagctgagggacttgttaaatcttagaaatcagagcagcagaggtgggtaccaccttcctcccagtcagtttgagggcactgttattctccacagagtcacagatcttcattcatttggggttccactatgtgtccc

SEQ ID NO: 90294 - DNA, 600 bp, Chicken  19866894398101_2
agctgtttctgctgatccccaaagtgtaaacaagtagtgagtgacggagggaagatgatgtaacctgaaggctaagtggtctgatttgctctcaccaagtctgagcaaagtctgacgtcaatgaagccatactttaatgaaataatgccattatttgctttcattctcgtggatggtcataccaagtaataatttyattctgcagaatagtaatggtgtcttaactcagagcagcaaaactcttatagcccttaaatactcaaagtacctgatttgtcgctattgtccaaccaacaaacrcaacactgcacatcccttcatagagctggattctccaagaacccctaagagatctctaagagctgagggacttgttaaatcttagaaatcagagcagcagaggtgggtaccaccttcctcccagtcagtttgagggcactgttattctccacagagtcacagatcttcattcatttggggttccactatgtgtccctcctgataggtttctaactcctaactcctttcagactgtaacatctcatctccactgcctccaaaaaattagacatttggagggatgtttataacatgagactt

SEQ ID NO: 90295 - DNA, 584 bp, Chicken  19866894398107_1
tttttttcctttagcatttacttctaaatcaaggactgagaaacacattgttttccaccatctacaagacacattctcactgatacctgatgcttctatgtagttattaaagaacctttaagaattatgcacctggacaaacccagtcttgtgttgtggttccatttggacccattgccttccagcagctgtgcaatgtttccattcttgcattctgtagcagtcctatttccaatggcacactcattccttctgtgcggaatttttggcagcgaagagttttagtgaagtaccaatccsacttccagccagttatgggcaagggataaaagctccagcaatactctgtggagaaggagggcatagctctaccctggttcctctcataccaaatgtgattggcacatgttcagagataaaaagagcctggataattcaatcacccaatttcctccaaaacctttttttcttcagcgcttttgtgaagagaggataccaaaacacacatttgttgtgttggaacacattcatgttcagagacagtgtatgagctgaacaccagggaatctcagagccttttaaga

SEQ ID NO: 90296 - DNA, 600 bp, Chicken  19866894398108_1
attttactcctgcagttctttcatacgtatatctaaaggtgattttctgatagcttctagagctttctgttttagctagtctttttaggaataaaaaaacccacatttaatgtaaaacattgatctactctggacattgtggtataccaaccactgtgttgataaaacagacctttattatagcaactttttaaacactattccaagaatccgtttttgctgcacactaggatgtataagtacaaaaggatgcatcagcaataacggaaacttaataaggaaacacttacaattaagttrctgtggatcaagatagaacagtgcttttattccctctggatacatttgtaacagttaatctagttgtcattcagtagtagatacaattctagtctacatcaaacgcaactaaaatactgctttgatggtttaatagtagctggcagtgtaatgacagatggccacaaccacaacctaatttgaaacaagctgaaatcttagttaaagatgtagaactctttgaagcatatttctttgaatgaacagagaaatataagttgtgatcagactataatactgtacatgatataccttccccat

SEQ ID NO: 90297 - DNA, 600 bp, Chicken  19866894398116_1
tactactcgtgtagaaaggaaggacaggtggttttcttctttttttacaaccagtcttatgttcactgggacttcacaaacatttttttcttaaagcctttgcaggaatggggctacagtctgttgctgatatttgtactacagcaagcattactttaagactgcagagtttttgaaagccttgttgtagtatatcggtatagcaagtgcacctgataaaggctgttcctttaatcagagacattttaattgttactgaatgaaatacaaaacaattcatgcatgcacacatacaaatayactcagaagaattaaatctgtgaacatcagtaaacatgcttcaaaagaacatgactggcctttgaaggcacaatcctttatgctcttttsttcacctttacatagcttgagtttttctccttctctcttccctttcttttacttgggtgagttgtcttctgcctcctaactatttcagatttatttatttatttytaaagattgtcctaaggaagtggtatctgtcatatcaagatatcagtctttgaaattggtgcatgtgagctttcttcacttcctgtgcatctggcaytctgcaca

SEQ ID NO: 90298 - DNA, 600 bp, Chicken  19866894398116_2
ttaaagcctttgcaggaatggggctacagtctgttgctgatatttgtactacagcaagcattactttaagactgcagagtttttgaaagccttgttgtagtatatcggtatagcaagtgcacctgataaaggctgttcctttaatcagagacattttaattgttactgaatgaaatacaaaacaattcatgcatgcacacatacaaatayactcagaagaattaaatctgtgaacatcagtaaacatgcttcaaaagaacatgactggcctttgaaggcacaatcctttatgctcttttsttcacctttacatagcttgagtttttctccttctctcttccctttcttttacttgggtgagttgtcttctgcctcctaactatttcagatttatttatttatttytaaagattgtcctaaggaagtggtatctgtcatatcaagatatcagtctttgaaattggtgcatgtgagctttcttcacttcctgtgcatctggcaytctgcacaactaagcttgtttgcaatccactatcrttttctaaccaaactttaaagaataaaatgaaatctcatagaaaaacatccctaatcttgttc

SEQ ID NO: 90299 - DNA, 600 bp, Chicken  19866894398116_3
cggtatagcaagtgcacctgataaaggctgttcctttaatcagagacattttaattgttactgaatgaaatacaaaacaattcatgcatgcacacatacaaatayactcagaagaattaaatctgtgaacatcagtaaacatgcttcaaaagaacatgactggcctttgaaggcacaatcctttatgctcttttsttcacctttacatagcttgagtttttctccttctctcttccctttcttttacttgggtgagttgtcttctgcctcctaactatttcagatttatttatttatttytaaagattgtcctaaggaagtggtatctgtcatatcaagatatcagtctttgaaattggtgcatgtgagctttcttcacttcctgtgcatctggcaytctgcacaactaagcttgtttgcaatccactatcrttttctaaccaaactttaaagaataaaatgaaatctcatagaaaaacatccctaatcttgttcagtgtcctgtttctctgtatgtaccacagaagacatcttttagcatatctcacccattggctcaatggaaacttcttcaaaaaaagaaaaartatcttctgggga

SEQ ID NO: 90300 - DNA, 600 bp, Chicken  19866894398116_4
acaaatayactcagaagaattaaatctgtgaacatcagtaaacatgcttcaaaagaacatgactggcctttgaaggcacaatcctttatgctcttttsttcacctttacatagcttgagtttttctccttctctcttccctttcttttacttgggtgagttgtcttctgcctcctaactatttcagatttatttatttatttytaaagattgtcctaaggaagtggtatctgtcatatcaagatatcagtctttgaaattggtgcatgtgagctttcttcacttcctgtgcatctggcaytctgcacaactaagcttgtttgcaatccactatcrttttctaaccaaactttaaagaataaaatgaaatctcatagaaaaacatccctaatcttgttcagtgtcctgtttctctgtatgtaccacagaagacatcttttagcatatctcacccattggctcaatggaaacttcttcaaaaaaagaaaaartatcttctggggaagggggaaggtaggtgtttgctgccagtgtyccctgaatttaatgggtttgttgaaaaccagctggagctgattagcaatgaatcagtaattaagta

SEQ ID NO: 90301 - DNA, 600 bp, Chicken  19866894398116_5
cagtaaacatgcttcaaaagaacatgactggcctttgaaggcacaatcctttatgctcttttsttcacctttacatagcttgagtttttctccttctctcttccctttcttttacttgggtgagttgtcttctgcctcctaactatttcagatttatttatttatttytaaagattgtcctaaggaagtggtatctgtcatatcaagatatcagtctttgaaattggtgcatgtgagctttcttcacttcctgtgcatctggcaytctgcacaactaagcttgtttgcaatccactatcrttttctaaccaaactttaaagaataaaatgaaatctcatagaaaaacatccctaatcttgttcagtgtcctgtttctctgtatgtaccacagaagacatcttttagcatatctcacccattggctcaatggaaacttcttcaaaaaaagaaaaartatcttctggggaagggggaaggtaggtgtttgctgccagtgtyccctgaatttaatgggtttgttgaaaaccagctggagctgattagcaatgaatcagtaattaagtaagggtaattaagaattaatgagtgcaaaacagagt

SEQ ID NO: 90302 - DNA, 600 bp, Chicken  19866894398116_6
atttatttatttytaaagattgtcctaaggaagtggtatctgtcatatcaagatatcagtctttgaaattggtgcatgtgagctttcttcacttcctgtgcatctggcaytctgcacaactaagcttgtttgcaatccactatcrttttctaaccaaactttaaagaataaaatgaaatctcatagaaaaacatccctaatcttgttcagtgtcctgtttctctgtatgtaccacagaagacatcttttagcatatctcacccattggctcaatggaaacttcttcaaaaaaagaaaaartatcttctggggaagggggaaggtaggtgtttgctgccagtgtyccctgaatttaatgggtttgttgaaaaccagctggagctgattagcaatgaatcagtaattaagtaagggtaattaagaattaatgagtgcaaaacagagttgtacctaggaggaatagaaagaaaggcaggctaaatgttagcagatattctaagggtgctttttctaaattatggagcagcctcccccggaaaaaggtgggttcccattcactgggattgtttatatcctgactgtacaaattgccaggaattt

SEQ ID NO: 90303 - DNA, 600 bp, Chicken  19866894398116_7
atatcaagatatcagtctttgaaattggtgcatgtgagctttcttcacttcctgtgcatctggcaytctgcacaactaagcttgtttgcaatccactatcrttttctaaccaaactttaaagaataaaatgaaatctcatagaaaaacatccctaatcttgttcagtgtcctgtttctctgtatgtaccacagaagacatcttttagcatatctcacccattggctcaatggaaacttcttcaaaaaaagaaaaartatcttctggggaagggggaaggtaggtgtttgctgccagtgtyccctgaatttaatgggtttgttgaaaaccagctggagctgattagcaatgaatcagtaattaagtaagggtaattaagaattaatgagtgcaaaacagagttgtacctaggaggaatagaaagaaaggcaggctaaatgttagcagatattctaagggtgctttttctaaattatggagcagcctcccccggaaaaaggtgggttcccattcactgggattgtttatatcctgactgtacaaattgccaggaatttactgtatggaacaattttgcagtggctctgaggaaatgaactga

SEQ ID NO: 90304 - DNA, 599 bp, Chicken  19866894398139_1
  misc_feature (1)..(105): n is any nucleotide
nnnnnnnnnnnnnnnnnnnnnnnnnnnnnnnnnnnnnnnnnnnnnnnnnnnnnnnnnnnnnnnnnnnnnnnnnnnnnnnnnnnnnnnnnnnnnnnnnnnnnnnnnatctgttttggccttttgattccaccaaaagtacctttcagtgtggattaattaaaagaactgtgttgttttttttttctttccattgcctctaagagagatgagttcccagatggcacaagggaaggagagagaggctttttctctgggcaaagccatgcatttgttgtaggccgaaggctttctctgtccttygttacacttcgtgagtctgctcctctgatgtgctcaaggtgctgtctccagggagcttgcaaattccagagccaagtgagaaccctcagcagcatcccagtccaaatgaacagctttctaataacaacgatgacttttaatattgcagcatcttgtctccgcagagcagtcagttaattatgaggtgtgaataaggaatatgtttcacagtgccttggcaattttctgagttcactgatccgtaaacaagattattccctaatagtccttcatctttgccattattacacaaggatgtt

SEQ ID NO: 90305 - DNA, 525 bp, Chicken  19866894398139_2
tgacttttaatattgcagcatcttgtctccgcagagcagtcagttaattatgaggtgtgaataaggaatatgtttcacagtgccttggcaattttctgagttcactgatccgtaaacaagattattccctaatagtccttcatctttgccattattacacaaggatgttcaacttcaaattaaattagaaatgatcatctttaaagtttgttgagccacagctaatcttttgagagtgtttccaggattaactatttttaaattgcctcgttatttggggagaatttttttgctcttccygctgtgccgttttttataaagaccctgcggtagtgactatccactgggaaatgtgaattagaaccattattattattattttttccttacgaagtccctgacactgtcagacagctgatgttttgaggggaagctgcctctctgaggcatatgaagacttttacaattctttcagctgctgccagccccagaagtgagagaataaatttgattctcaaatgccat

SEQ ID NO: 90306 - DNA, 600 bp, Chicken  19866894398141_1
ttcagttgtgtctttctctgccagatttaagcaacgaatgtgttcactccttcctgtgttcttggaccatatgtggagatttccactgaagtcccatggcttcttccgtgagacagtcatgcactgccattgtcccacttcatgtgctaacatcacatttccctcatcaaagggaaatctttacaggcgatcgctttcctagcttagtctacaggtactcaataatgcagtaagaatccaaacacctacatgtattgaagacagttaatttctacttcagatttacttcttaaatctcayagcttcctccaacgcttaatgctcccatgatcttcacaattctcatgttctctatcacagttgctaatgggcaattaggaacctacctagaaggcctctggtctccataaagcaagacagtctgcagccaactactttgttgccagctttgcataggcaaattaatgtacagacttaagcatgacccatagcaagaacagataatcatttcacagacatactcagagaaaaagcacaattaatttgaccattagagctgggcaagcattttttttcacatcttttactagacaaaaaggc

SEQ ID NO: 90307 - DNA, 600 bp, Chicken  19866894398153_1
gtcactttcttttcctttcccttctacccacagaaggattttgacatcttgcattgcaaaatgacaaacagtctcccaggttttctgctgcagatgccagccagaaagtttccctccccacccaatatgtgaaatgcactcgccaccagaacaccaattattccctggccaaccaggaaaggattttctcattcccttggtgactttgagtcctgacaacttaattactgtaattgaaggcaaatattacttgaactccacacatttctttttataagatacattaggcatatatatatrtawaaaagaaagaatagcattgctttggttaagctgagttcagaaggtacgcatgatmgcagaaaatcagaaccttgctcagaaactcctttattgataagaattttcataaccacgggtcaccgaacacagaactaacagggcatggagacaaatgaggaggtgccaactctagaaaacctcactgtttaggaaaagcttgtgtaaagccataaatcatccacaagggctgttacatgccagcagtgctccccttctctgatgtacttgcccaagtagccatgggagcagtgttggagc

SEQ ID NO: 90308 - DNA, 600 bp, Chicken  19866894398153_2
actttcttttcctttcccttctacccacagaaggattttgacatcttgcattgcaaaatgacaaacagtctcccaggttttctgctgcagatgccagccagaaagtttccctccccacccaatatgtgaaatgcactcgccaccagaacaccaattattccctggccaaccaggaaaggattttctcattcccttggtgactttgagtcctgacaacttaattactgtaattgaaggcaaatattacttgaactccacacatttctttttataagatacattaggcatatatatatrtawaaaagaaagaatagcattgctttggttaagctgagttcagaaggtacgcatgatmgcagaaaatcagaaccttgctcagaaactcctttattgataagaattttcataaccacgggtcaccgaacacagaactaacagggcatggagacaaatgaggaggtgccaactctagaaaacctcactgtttaggaaaagcttgtgtaaagccataaatcatccacaagggctgttacatgccagcagtgctccccttctctgatgtacttgcccaagtagccatgggagcagtgttggagctct

SEQ ID NO: 90309 - DNA, 600 bp, Chicken  19866894398153_3
aaatgacaaacagtctcccaggttttctgctgcagatgccagccagaaagtttccctccccacccaatatgtgaaatgcactcgccaccagaacaccaattattccctggccaaccaggaaaggattttctcattcccttggtgactttgagtcctgacaacttaattactgtaattgaaggcaaatattacttgaactccacacatttctttttataagatacattaggcatatatatatrtawaaaagaaagaatagcattgctttggttaagctgagttcagaaggtacgcatgatmgcagaaaatcagaaccttgctcagaaactcctttattgataagaattttcataaccacgggtcaccgaacacagaactaacagggcatggagacaaatgaggaggtgccaactctagaaaacctcactgtttaggaaaagcttgtgtaaagccataaatcatccacaagggctgttacatgccagcagtgctccccttctctgatgtacttgcccaagtagccatgggagcagtgttggagctctaaacatggcccttctcccacctctcgattggagagttgcagtttatgcaattcca

SEQ ID NO: 90310 - DNA, 600 bp, Chicken  19866894398153_4
atggagacaaatgaggaggtgccaactctagaaaacctcactgtttaggaaaagcttgtgtaaagccataaatcatccacaagggctgttacatgccagcagtgctccccttctctgatgtacttgcccaagtagccatgggagcagtgttggagctctaaacatggcccttctcccacctctcgattggagagttgcagtttatgcaattccaaaaatacgacgcacttatttaaatgagtactgcatttctgcaacctccaacaagcagctgtacgagagaagagaggaaaggttccwgctccaaagactgaagaacatgtaaaaggaaaagagcagttctgctctaactgctgggaggcctgaagactttggaagagatatctttgtgtcttgagttcttcaactgccaacaaaatcaggctgagaagttgggaacagcagtctgcagggagttgggaggatggtcccaagcaggagcaaagcaccgcttaaaacagtgttaagtgtggagtgattaggaggaaacaataggaaaattcaaggagaggctgggaagtgcacaggaaaagatgagggtcaattatagccagaagtccc

SEQ ID NO: 90311 - DNA, 600 bp, Chicken  19866894398164_1
gtggagatgtgtttgcagaagcccacaggtgagtgtttctaagcaagttgctgcagtctggcagtaccaggagcatctcttgttgcacagctgcagtttagttgtttgggcctgctgaagagagcttatgatgaatcagagaggtttcaacaaagtggatttgactgaaaaaggaaaaatgtggaatcaatcttatttttgctgctattttctgaatggatatatcaaggagagaagcaaataaaaggggtcaataaaatatgtgtgggagggatagtagcagaggttcaggggcgagarttgcaacactggaatgccaagcaggccctaaatgagctcctggaactgctgccctgaagctctctcactgcagtccagctctgtatgcytgtgttgctttttgcttaacccaaggttggtgtgtcttggrggatgttgtgtgaggtggaagcttttcctgagcaaggcaggaaggctcagctgggcctgctttgctttcagtgccctgtgcagtagcatctgttgcttctcccacactgcaggcttgtctcmtttttcttacatcgtagtcacagcaatgtcctsttcaccaatggcacg

SEQ ID NO: 90312 - DNA, 600 bp, Chicken  19866894398164_2
gctgcagtttagttgtttgggcctgctgaagagagcttatgatgaatcagagaggtttcaacaaagtggatttgactgaaaaaggaaaaatgtggaatcaatcttatttttgctgctattttctgaatggatatatcaaggagagaagcaaataaaaggggtcaataaaatatgtgtgggagggatagtagcagaggttcaggggcgagarttgcaacactggaatgccaagcaggccctaaatgagctcctggaactgctgccctgaagctctctcactgcagtccagctctgtatgcytgtgttgctttttgcttaacccaaggttggtgtgtcttggrggatgttgtgtgaggtggaagcttttcctgagcaaggcaggaaggctcagctgggcctgctttgctttcagtgccctgtgcagtagcatctgttgcttctcccacactgcaggcttgtctcmtttttcttacatcgtagtcacagcaatgtcctsttcaccaatggcacgtcctgtgtgctttggataggtttaaaggtaggtttgaagtttaccggaacatgttgggaagccttatatgaattggatayttttagtct

SEQ ID NO: 90313 - DNA, 600 bp, Chicken  19866894398164_3
atgaatcagagaggtttcaacaaagtggatttgactgaaaaaggaaaaatgtggaatcaatcttatttttgctgctattttctgaatggatatatcaaggagagaagcaaataaaaggggtcaataaaatatgtgtgggagggatagtagcagaggttcaggggcgagarttgcaacactggaatgccaagcaggccctaaatgagctcctggaactgctgccctgaagctctctcactgcagtccagctctgtatgcytgtgttgctttttgcttaacccaaggttggtgtgtcttggrggatgttgtgtgaggtggaagcttttcctgagcaaggcaggaaggctcagctgggcctgctttgctttcagtgccctgtgcagtagcatctgttgcttctcccacactgcaggcttgtctcmtttttcttacatcgtagtcacagcaatgtcctsttcaccaatggcacgtcctgtgtgctttggataggtttaaaggtaggtttgaagtttaccggaacatgttgggaagccttatatgaattggatayttttagtctttcctgatttatgtactgctctctgcagatgcgtatgtact

SEQ ID NO: 90314 - DNA, 600 bp, Chicken  19866894398164_4
aataaaatatgtgtgggagggatagtagcagaggttcaggggcgagarttgcaacactggaatgccaagcaggccctaaatgagctcctggaactgctgccctgaagctctctcactgcagtccagctctgtatgcytgtgttgctttttgcttaacccaaggttggtgtgtcttggrggatgttgtgtgaggtggaagcttttcctgagcaaggcaggaaggctcagctgggcctgctttgctttcagtgccctgtgcagtagcatctgttgcttctcccacactgcaggcttgtctcmtttttcttacatcgtagtcacagcaatgtcctsttcaccaatggcacgtcctgtgtgctttggataggtttaaaggtaggtttgaagtttaccggaacatgttgggaagccttatatgaattggatayttttagtctttcctgatttatgtactgctctctgcagatgcgtatgtacttctctgccatagtatrttcttcaaatgtgtgctgtgattctggctcacaagtaatccttaagataaaaagaaatgcatgtaatgagcagcctttgttgtcaaatgtctatgaacagagttgt

SEQ ID NO: 90315 - DNA, 600 bp, Chicken  19866894398164_5
gttcaggggcgagarttgcaacactggaatgccaagcaggccctaaatgagctcctggaactgctgccctgaagctctctcactgcagtccagctctgtatgcytgtgttgctttttgcttaacccaaggttggtgtgtcttggrggatgttgtgtgaggtggaagcttttcctgagcaaggcaggaaggctcagctgggcctgctttgctttcagtgccctgtgcagtagcatctgttgcttctcccacactgcaggcttgtctcmtttttcttacatcgtagtcacagcaatgtcctsttcaccaatggcacgtcctgtgtgctttggataggtttaaaggtaggtttgaagtttaccggaacatgttgggaagccttatatgaattggatayttttagtctttcctgatttatgtactgctctctgcagatgcgtatgtacttctctgccatagtatrttcttcaaatgtgtgctgtgattctggctcacaagtaatccttaagataaaaagaaatgcatgtaatgagcagcctttgttgtcaaatgtctatgaacagagttgttcatatgaacaactattgtctgtgaacagagtt

SEQ ID NO: 90316 - DNA, 561 bp, Chicken  19866894398164_6
ctgtatgcytgtgttgctttttgcttaacccaaggttggtgtgtcttggrggatgttgtgtgaggtggaagcttttcctgagcaaggcaggaaggctcagctgggcctgctttgctttcagtgccctgtgcagtagcatctgttgcttctcccacactgcaggcttgtctcmtttttcttacatcgtagtcacagcaatgtcctsttcaccaatggcacgtcctgtgtgctttggataggtttaaaggtaggtttgaagtttaccggaacatgttgggaagccttatatgaattggatayttttagtctttcctgatttatgtactgctctctgcagatgcgtatgtacttctctgccatagtatrttcttcaaatgtgtgctgtgattctggctcacaagtaatccttaagataaaaagaaatgcatgtaatgagcagcctttgttgtcaaatgtctatgaacagagttgttcatatgaacaactattgtctgtgaacagagttactgttttttcagagctaattatgcaagagtcacatatcctttaagtggggcagat

SEQ ID NO: 90317 - DNA, 495 bp, Chicken  19866894398164_7
ggaagcttttcctgagcaaggcaggaaggctcagctgggcctgctttgctttcagtgccctgtgcagtagcatctgttgcttctcccacactgcaggcttgtctcmtttttcttacatcgtagtcacagcaatgtcctsttcaccaatggcacgtcctgtgtgctttggataggtttaaaggtaggtttgaagtttaccggaacatgttgggaagccttatatgaattggatayttttagtctttcctgatttatgtactgctctctgcagatgcgtatgtacttctctgccatagtatrttcttcaaatgtgtgctgtgattctggctcacaagtaatccttaagataaaaagaaatgcatgtaatgagcagcctttgttgtcaaatgtctatgaacagagttgttcatatgaacaactattgtctgtgaacagagttactgttttttcagagctaattatgcaagagtcacatatcctttaagtggggcagat

SEQ ID NO: 90318 - DNA, 599 bp, Chicken  19866894398166_1
  misc_feature (1)..(59): n is any nucleotide
nnnnnnnnnnnnnnnnnnnnnnnnnnnnnnnnnnnnnnnnnnnnnnnnnnnnnnnnnnncactgttagtcctgctgcctgttaagattctttctaccctgcaggtcagaggagtacgtggaccagcgttacaaggagtatttaaagaaccaaggaaaggtagattcggtatgtatttgggatgtcccccaggacagggacagagctccccagggccttccttatagggcttttgcctaaatatccgtgggagagggttctgtatatgcctgagtcatggcttctgcttaccagatgggtyacactggatctctgcttccagaaagagggagggactgtgtgtatgtgaagaaaagatggaggtggataggaaacctggccttcacagtgaatttatgctgtttccatcctcagctggtgggagtcgacgtcatggctgctttggatatgtatgcagagcaggagcaatgggagaagtgtctggaggttgcagctaagcaggtgagtacctgtgtgagccctcagcaggcaggctgggggtsctggctctctgaagcagggccagcaggaatgaatgggcagaggcaaaccagccttctc

SEQ ID NO: 90319 - DNA, 600 bp, Chicken  19866894398166_2
atccgtgggagagggttctgtatatgcctgagtcatggcttctgcttaccagatgggtyacactggatctctgcttccagaaagagggagggactgtgtgtatgtgaagaaaagatggaggtggataggaaacctggccttcacagtgaatttatgctgtttccatcctcagctggtgggagtcgacgtcatggctgctttggatatgtatgcagagcaggagcaatgggagaagtgtctggaggttgcagctaagcaggtgagtacctgtgtgagccctcagcaggcaggctgggggtsctggctctctgaagcagggccagcaggaatgaatgggcagaggcaaaccagccttctctttggggagcacagggagtcactgcagcagctcaaaaaccacctctctgctgcccccatcctggcacgccacacctaataaggaagcatgagaaaccagaaacatattgcgtttaatttttgtgattgatggaactctggaaaagctaaatgagttgtttgggctcaaagtaattggcaccacggaaacggagagctctctctctacgtgttcttcagaagcctggtgtcagttgaaattag

SEQ ID NO: 90320 - DNA, 600 bp, Chicken  19866894398168_1
gacttgctttcacgagtcttgattttcttccttagtttgcatgtcttacgtttgtcctgctccttatagaccggtttcatcttacatcactcttgtattttcatcaacactttctttttaacagagaaacactccttagaaatagttaatagctacatttccccaagcttagagtgaaatcagtctgaaatttcatttgtctgtgaggctcgaataaatgtttttcctgaattaaaaaagcttaaaattaactttactccttaaagatacagtcatagttgcacctgaacttttcagttyatgtccatcctttaaaccttaattacaaaaatactcattggcagaaggcagagaaagatttagcatcacagtacaatcagaaataggggttgtatatatatatatgtgtgtgtgtgaacaaacaacatagtttaagtgcattacagatatctaattcagctgactttatttgagtctattctgttctgcagtttctttgtcttagggagaaacaagatgaaggctggctaggtgagtacaaacttgtatcacayacattcatatgcaggaatcagtaaaatcctattcagaagctgtatt

SEQ ID NO: 90321 - DNA, 379 bp, Chicken  19866894398168_2
tactccttaaagatacagtcatagttgcacctgaacttttcagttyatgtccatcctttaaaccttaattacaaaaatactcattggcagaaggcagagaaagatttagcatcacagtacaatcagaaataggggttgtatatatatatatgtgtgtgtgtgaacaaacaacatagtttaagtgcattacagatatctaattcagctgactttatttgagtctattctgttctgcagtttctttgtcttagggagaaacaagatgaaggctggctaggtgagtacaaacttgtatcacayacattcatatgcaggaatcagtaaaatcctattcagaagctgtattgtccaagacattatacagagacaaacataattt

SEQ ID NO: 90322 - DNA, 596 bp, Chicken  19866894398175_1
gttgccatcagcggtgcagagtctggttggaggcctgtaaatagcagtgtccccaggggtaaaagctgggtttggtcttgatcaacatctttatcagtgacctggaggaggaagagagagtccactctcagcaagtttgctgatgatacaaagctgaaaggagtgattgacacactgaaaggctgagccaccattcaataagacctggacagatgggagagttggacagggaggaatctgatgagatttaacaagagcaagtgtagtcttgcatctggggaggaataacaatatgcatcrttacaggttaggggatgacttgctggacagatctgtgcagaaggacctggttgttttggtggacaacaggttggccattatccagcattgtgcccttgtggtcaagaaggccaatggtatcctgaagagcattataaagagtatggccagaaggtggagggaggtgatcctccccctctactctgcactagtgagaccacatctgaagcgttgtgtccaattctgggcccccagttcaaaaaagacagtgatctccaagaaggaattcagtcgagagctacaaagtcgattaaggg

SEQ ID NO: 90323 - DNA, 600 bp, Chicken  19866894398179_1
ctcagactgataaggtgtttatgctgttctctgaaggcctcatccttactaccttggataaggttttaccatcagtagatttttctcaacttcctgatgtctggcggatctgttttttccctacccttaccaaattatttatgttcaacaggacggttcccagtacctgtgcaggtatgtagatcactccaaaacaaatgtctactatttatttccatggaaattgcaatggatacaaagaacacaataacatcatttgatagcgcaaagtttcagctacaaaagccatattgactcttyacagatgcagcatgtttagcaagttatttactaatctgtccttcattacactttctgttatcagatctcaaacttaaacaaatggattccagagaactttcttgtttctctggtttgtcatyrtatttgtcagctccattgttgaggtagaaaagaaagtgtagtcttgsaggtgcttcattctgtatttcctcagaaccccaggccatggcattactctgtatgtgtttgtactgtaaatccttctgcagttacttctaatttaaaccggttctgcttcatgacttaatagcttagatg

SEQ ID NO: 90324 - DNA, 600 bp, Chicken  19866894398179_2
acccttaccaaattatttatgttcaacaggacggttcccagtacctgtgcaggtatgtagatcactccaaaacaaatgtctactatttatttccatggaaattgcaatggatacaaagaacacaataacatcatttgatagcgcaaagtttcagctacaaaagccatattgactcttyacagatgcagcatgtttagcaagttatttactaatctgtccttcattacactttctgttatcagatctcaaacttaaacaaatggattccagagaactttcttgtttctctggtttgtcatyrtatttgtcagctccattgttgaggtagaaaagaaagtgtagtcttgsaggtgcttcattctgtatttcctcagaaccccaggccatggcattactctgtatgtgtttgtactgtaaatccttctgcagttacttctaatttaaaccggttctgcttcatgacttaatagcttagatgtggtagtccccttaattttgttgtttagtcagctgatttcactttaccctgtaccagcgtttgctttagtaagctgtgcatgctggcattgtgcttctgatgtaaaatcatccaggttggaa

SEQ ID NO: 90325 - DNA, 600 bp, Chicken  19866894398179_3
cccttaccaaattatttatgttcaacaggacggttcccagtacctgtgcaggtatgtagatcactccaaaacaaatgtctactatttatttccatggaaattgcaatggatacaaagaacacaataacatcatttgatagcgcaaagtttcagctacaaaagccatattgactcttyacagatgcagcatgtttagcaagttatttactaatctgtccttcattacactttctgttatcagatctcaaacttaaacaaatggattccagagaactttcttgtttctctggtttgtcatyrtatttgtcagctccattgttgaggtagaaaagaaagtgtagtcttgsaggtgcttcattctgtatttcctcagaaccccaggccatggcattactctgtatgtgtttgtactgtaaatccttctgcagttacttctaatttaaaccggttctgcttcatgacttaatagcttagatgtggtagtccccttaattttgttgtttagtcagctgatttcactttaccctgtaccagcgtttgctttagtaagctgtgcatgctggcattgtgcttctgatgtaaaatcatccaggttggaag

SEQ ID NO: 90326 - DNA, 600 bp, Chicken  19866894398179_4
gcaggtatgtagatcactccaaaacaaatgtctactatttatttccatggaaattgcaatggatacaaagaacacaataacatcatttgatagcgcaaagtttcagctacaaaagccatattgactcttyacagatgcagcatgtttagcaagttatttactaatctgtccttcattacactttctgttatcagatctcaaacttaaacaaatggattccagagaactttcttgtttctctggtttgtcatyrtatttgtcagctccattgttgaggtagaaaagaaagtgtagtcttgsaggtgcttcattctgtatttcctcagaaccccaggccatggcattactctgtatgtgtttgtactgtaaatccttctgcagttacttctaatttaaaccggttctgcttcatgacttaatagcttagatgtggtagtccccttaattttgttgtttagtcagctgatttcactttaccctgtaccagcgtttgctttagtaagctgtgcatgctggcattgtgcttctgatgtaaaatcatccaggttggaagataccttcaagattaccaagcccagccatcaagatgatctgccaagt

SEQ ID NO: 90327 - DNA, 600 bp, Chicken  19866894398184_1
gcaaggcgtaaagaaagcctttcagaggtgttcacattaaatagccccagaagcccactgggaagggcttttctttatcaactgatggcagacctctgtgtgctcctgacaactcagctgctctgtcaatcaaagcatctgaaatccaccacaaagtcaaccccagtggccagagcaattcatcatgaacataactgttttggcttaggattataattaggatcagcttaacaaatgtcactcttgctgggcaaaggataatgatcaaaatgcaacgagttgtgggtatctctacctttygggccacagctccctgtgtgctgaggaaagagctgcattcaccttcgtggtattcttctttacattcacggcagaacacaaactggaaaataaaccaaaacacagaagtgataaaaacacattagtgatacagacagcagaatacaaccgtgagaagtcatatagcagatgatctcttgccctcctcatcccattaaattcccataatcctccaaattgtgcacctcatgatacaatctgatcattaacatgacagttttgcagttattatcatacacttctttggtgaaataaaataaa

SEQ ID NO: 90328 - DNA, 599 bp, Chicken  19866894398191_1
  misc_feature (1)..(27): n is any nucleotide
nnnnnnnnnnnnnnnnnnnnnnnnnnngaagcttgaaacagaaaaagaggacaccctgtacagcttctaacaagaaaaatgatactgtgaaagcatctgcaacagtattcagaaaagatcatacattgaccacatcatactaccatgtttcagtcatctgtgcaagcaacttacacagtgttgaatgttcaaactgaaatactaagcatgttaggatatactgtatgaacaaagaagataagaaaggattaatcttgagaaaccctaacaaactccctctaatgaaagtgtcagtatgtmctagagaaccgagattatatcttcccaaaatcacttccttcaagcagttttgcacagttccraaaaccctgaggcaacttgccactgttaagctgcacacagctttccccagaaagaaccaccatcactgacccttcttgcacaagaccaccatataagaacctcactcaggccacagtgctaaaacggtaagaaatcccagacttctgaacgctgcaaaacctgaatttcaactgccagaatgaaytaacagagacctctaagtatattataccttatgttaacatcattaagtcccc

SEQ ID NO: 90329 - DNA, 600 bp, Chicken  19866894398191_2
gcttctaacaagaaaaatgatactgtgaaagcatctgcaacagtattcagaaaagatcatacattgaccacatcatactaccatgtttcagtcatctgtgcaagcaacttacacagtgttgaatgttcaaactgaaatactaagcatgttaggatatactgtatgaacaaagaagataagaaaggattaatcttgagaaaccctaacaaactccctctaatgaaagtgtcagtatgtmctagagaaccgagattatatcttcccaaaatcacttccttcaagcagttttgcacagttccraaaaccctgaggcaacttgccactgttaagctgcacacagctttccccagaaagaaccaccatcactgacccttcttgcacaagaccaccatataagaacctcactcaggccacagtgctaaaacggtaagaaatcccagacttctgaacgctgcaaaacctgaatttcaactgccagaatgaaytaacagagacctctaagtatattataccttatgttaacatcattaagtccccctcccttactagacctccagtttatcctgtggacaatgtgaatgatgatttacaatgactatg

SEQ ID NO: 90330 - DNA, 600 bp, Chicken  19866894398191_3
attaatcttgagaaaccctaacaaactccctctaatgaaagtgtcagtatgtmctagagaaccgagattatatcttcccaaaatcacttccttcaagcagttttgcacagttccraaaaccctgaggcaacttgccactgttaagctgcacacagctttccccagaaagaaccaccatcactgacccttcttgcacaagaccaccatataagaacctcactcaggccacagtgctaaaacggtaagaaatcccagacttctgaacgctgcaaaacctgaatttcaactgccagaatgaaytaacagagacctctaagtatattataccttatgttaacatcattaagtccccctcccttactagacctccagtttatcctgtggacaatgtgaatgatgatttacaatgactatgaaccaccaagttaaaaggcctgctgcgcttagaatacatgttcatttgctaccaaaaggaaaataaagtacctaaaggattacgagagagagatgagagaaagtcaatacttcaggcagttgaatggtgccctagagaactggattgcatctccttctttgtcatagattttataataataagca

SEQ ID NO: 90331 - DNA, 600 bp, Chicken  19866894398202_1
tctgccactgtaatttgacagaaatcagagcagctgactcagacaccttcagatttgtggacagagagacgttaggcttcttaaaggttcccggggaaagaatgatctgctgcccttatgagtccttccaaggtcaggagcacaacacacacatgccagatcacactggatttgagcagaagtagtagcaaggagcatgacacctccttaggaactggctgctttttgagaaggaaaattagagatgtaaaggagatttattggaatagaaagaaatgacgtgattgttccaaatggagwgaatctgcatggatcgaaaaagcctaagtttgaacagatggaacatgccaaaaaatgaagctttttcagtcatttcctcagcttaatttcttgttctctgcctggcaaatattcgtgtgccatgattggtaggttggaataggattcatttaattgaacgttagctgttaaattcagccctagtcactggatgtgtattgaatcatccctggagattcctgttttataaacctattttaggatccaatgaatcaccaactgaaggtgcctgtctcttattgctgattccagaggaagcat

SEQ ID NO: 90332 - DNA, 600 bp, Chicken  19866894398203_1
tggccaccttgaggccgtgtccccatcccactcacctctgctgctgcagcacaccccgctaggccccagctacctgagccaggcagggctggggaaatgaagatgctgtaggatgggcaccaagaactgctgccccgagaacagcacaacctaaccaaggcctcgttcagcgggtccaagtctcgcagctgtgctcgactggagtccaggcacgagtgcacgctgggctttgccagcacctgagcttatacagcaagggcctgtgagaccacaatcatctctcgctgatgtcacaacccyttcttgctcggtgacctcacagccaatggctgcatgcatttgggcaccagcctgggctttcatcaccctccagccttctgtgattttcctttgtgtttgtcacaaatttggaaaaataaaagttgcgcgttcattatctccacactaatccgacttttgtgacctgtttaaacttcctgaaattttgagagtcacttgttgcctgttccgttttgaacgcaatacaaatcggcggtcatctttatgccgggcttgctttttataccatmtgcgcataccacaggagggtatttgttcacg

SEQ ID NO: 90333 - DNA, 600 bp, Chicken  19866894398203_2
cacaatcatctctcgctgatgtcacaacccyttcttgctcggtgacctcacagccaatggctgcatgcatttgggcaccagcctgggctttcatcaccctccagccttctgtgattttcctttgtgtttgtcacaaatttggaaaaataaaagttgcgcgttcattatctccacactaatccgacttttgtgacctgtttaaacttcctgaaattttgagagtcacttgttgcctgttccgttttgaacgcaatacaaatcggcggtcatctttatgccgggcttgctttttataccatmtgcgcataccacaggagggtatttgttcacgctttcctctgcaatctactccacaggatctgctccagcagatgatctccagaggtcccttccaacccctgccattctgtgattccgagattttgytctatttcargcattcgcttttgccttgaaggactatttcatcccaaacaagctactttaaaacctcactgaactgcaaatgtaatgaactccgtgttataacccaagacctaaccaactagtggaaagttgtaatctcagagatttagctgggtctcaagtgaagataccaga

SEQ ID NO: 90334 - DNA, 600 bp, Chicken  19866894398203_3
tttgtcacaaatttggaaaaataaaagttgcgcgttcattatctccacactaatccgacttttgtgacctgtttaaacttcctgaaattttgagagtcacttgttgcctgttccgttttgaacgcaatacaaatcggcggtcatctttatgccgggcttgctttttataccatmtgcgcataccacaggagggtatttgttcacgctttcctctgcaatctactccacaggatctgctccagcagatgatctccagaggtcccttccaacccctgccattctgtgattccgagattttgytctatttcargcattcgcttttgccttgaaggactatttcatcccaaacaagctactttaaaacctcactgaactgcaaatgtaatgaactccgtgttataacccaagacctaaccaactagtggaaagttgtaatctcagagatttagctgggtctcaagtgaagataccagaaaaacagtaaatctaacgtgcatgcctcaatcgccttgtcaataatacagagagttttgggtttttgttttaaawtttttaaacatttttattttttctccacagcagagagggagttagatgttg

SEQ ID NO: 90335 - DNA, 600 bp, Chicken  19866894398203_4
atttggaaaaataaaagttgcgcgttcattatctccacactaatccgacttttgtgacctgtttaaacttcctgaaattttgagagtcacttgttgcctgttccgttttgaacgcaatacaaatcggcggtcatctttatgccgggcttgctttttataccatmtgcgcataccacaggagggtatttgttcacgctttcctctgcaatctactccacaggatctgctccagcagatgatctccagaggtcccttccaacccctgccattctgtgattccgagattttgytctatttcargcattcgcttttgccttgaaggactatttcatcccaaacaagctactttaaaacctcactgaactgcaaatgtaatgaactccgtgttataacccaagacctaaccaactagtggaaagttgtaatctcagagatttagctgggtctcaagtgaagataccagaaaaacagtaaatctaacgtgcatgcctcaatcgccttgtcaataatacagagagttttgggtttttgttttaaawtttttaaacatttttattttttctccacagcagagagggagttagatgttggcctcccact

SEQ ID NO: 90336 - DNA, 600 bp, Chicken  19866894398203_5
tctccagaggtcccttccaacccctgccattctgtgattccgagattttgytctatttcargcattcgcttttgccttgaaggactatttcatcccaaacaagctactttaaaacctcactgaactgcaaatgtaatgaactccgtgttataacccaagacctaaccaactagtggaaagttgtaatctcagagatttagctgggtctcaagtgaagataccagaaaaacagtaaatctaacgtgcatgcctcaatcgccttgtcaataatacagagagttttgggtttttgttttaaawtttttaaacatttttattttttctccacagcagagagggagttagatgttggcctcccactctgcctgagacacgctgcgcccggcggcgggctgctggtctagtgctgccgccgaggccccctcttgcggggcggagatgaatcccgggggctgctgcgggccttcctcttcagggggcgccggggccccccgggcaagcgctccctgccgcgggccgagggcttcttgtgccgagtggagggacctgctgcctccatctgctcctgctcctcccgtggctcctctgaggacacagcgt

SEQ ID NO: 90337 - DNA, 600 bp, Chicken  19866894398210_1
atgacgatattcagaagtagtttatcaaatagagattatctcaccttgaatccttttcattttctgcattcaagcgattggcttcctgtgctttctctgccatccaacgtgagaccagctcctggttatcctcagttgttttcctcagtttctcctccaaggcattgaaggtgatctggagagcatcatattcatctttcagtgtctgattagctcgctcaagatcttgtagcttgctgcgtagttcctggcactcagtttccagttcagagattttttgcaaatactctgcaatcctgraaggacgacaaaatttatagaacagtgagaatctctcaagtctgtaccatcattttgcactatttatttatttatttacaacgcagaaaggaatttttagcccatgggtaaggctcctggggagtatcataacaaataacccaaccagaattctgcatctcaaaacaatcacacagaagaaactgttcctactcactttgcttcattcatctgcatctctttgtccttctgctgcatttggttattcagatcaattacagactgggccaactacagagaggagaaacacattacagaaat

SEQ ID NO: 90338 - DNA, 600 bp, Chicken  19866894398212_1
gcgtcggtgactcacagcgagcacagagccagcagcgtgcttcttgcagcgtttcctccagcgtggccagagggaggtgaggtcgccttaaaggctttgtagcgcacctcactttattaaatgcctcagaactcaagggagcaatgacagtgaagaggttttgtgagggaaatgacatctttcagcctgagtgagaccttgtgctcagcacttacttacttcagcaagattctaggcttgcgcccaaagctgaggaaacaaatctaaattttcttcagcttgcctattcacgagtgcctygtgtcagcaaaacgtgcctcatcatgtggctaccggatgttttcttcacctcctgcaccacttccaccacaacaaatgggaaastccatttttggttgtagcgttgccactggcagcagcctgtaggagatgctggatcaactccctgtgcgttaacagtgtctgaaggccggcttcagacatggttgagctgagtaggccttgcccctactgcagaattcaatgtgaaggggcaagtgaagatgttgctgggaagtgttggcacacgttctgatcagaggtgtctgagctgtggcctgt

SEQ ID NO: 90339 - DNA, 600 bp, Chicken  19866894398212_2
gccttaaaggctttgtagcgcacctcactttattaaatgcctcagaactcaagggagcaatgacagtgaagaggttttgtgagggaaatgacatctttcagcctgagtgagaccttgtgctcagcacttacttacttcagcaagattctaggcttgcgcccaaagctgaggaaacaaatctaaattttcttcagcttgcctattcacgagtgcctygtgtcagcaaaacgtgcctcatcatgtggctaccggatgttttcttcacctcctgcaccacttccaccacaacaaatgggaaastccatttttggttgtagcgttgccactggcagcagcctgtaggagatgctggatcaactccctgtgcgttaacagtgtctgaaggccggcttcagacatggttgagctgagtaggccttgcccctactgcagaattcaatgtgaaggggcaagtgaagatgttgctgggaagtgttggcacacgttctgatcagaggtgtctgagctgtggcctgtggaatgtcttctgtctgacttctgtttgtatgctctctggccattggctgaactgttatggtatgctctgcatccatattgtct

SEQ ID NO: 90340 - DNA, 600 bp, Chicken  19866894398213_1
acaagtcagtcagcctcaccttgatccctgaaaagcttatggagcagctgtgcctggaaaccatttccaggcatatgaaggagttgaaaatcatcaggagttgtcagcatggattcaacaaagggaaatcatgcttgaccaaccttgtaagctccactaattaaatcaccagtatgatggatgagtgatattgtctacctggacttcagtaaggcctttgacactgccaccttaagatcctcatggagaagctttcgacatatatagtctcaacaagcagacagtgaggtggattgaaamgtgtcagaattggcaaacctagagcgtggtgatcagtaaaccaaagcctagttggaggccagtaacttgtggtgtaccctagggattgatactgggtccattcttgtttggtaacaacaattcggtaatgaatgacrttgaaggagtgagtactctcagcaagtttgtagatgacacaaactaggaagaactgacaaatcagagactcatgctgctatccagaggaacttttacagtctggagaaattggctggcaggaaatctgtgaagttcaataacaagaagttcaaagccttgggg

SEQ ID NO: 90341 - DNA, 568 bp, Chicken  19866894398213_2
accaaccttgtaagctccactaattaaatcaccagtatgatggatgagtgatattgtctacctggacttcagtaaggcctttgacactgccaccttaagatcctcatggagaagctttcgacatatatagtctcaacaagcagacagtgaggtggattgaaamgtgtcagaattggcaaacctagagcgtggtgatcagtaaaccaaagcctagttggaggccagtaacttgtggtgtaccctagggattgatactgggtccattcttgtttggtaacaacaattcggtaatgaatgacrttgaaggagtgagtactctcagcaagtttgtagatgacacaaactaggaagaactgacaaatcagagactcatgctgctatccagaggaacttttacagtctggagaaattggctggcaggaaatctgtgaagttcaataacaagaagttcaaagccttggggagggctttgaaactggggaggaacagacccagacactggaacatggtggggggcaatccagctgaaaagcagctttgcaaaaatgcccagtgggtcctagtagat

SEQ ID NO: 90342 - DNA, 600 bp, Chicken  19866894398215_1
gtccccagccctccagcactatcacctctttgcgtttggtgaaagacaggtgtacttcttccctttagaggaaatccatctccatgcttctgttcaaggttcttgccatcagccccctgcctgctatcactttcccgttgatcccatcacctcatctccatccttcaaatcaggcagggctttcaaacagaacttgcacctcctggcctcagaccttgtcaccacagcaccctgtgggctctccactcaccaggaaaatatcccattcctactacataccctcaaattgccacccacctmctgcagaaaggagctgtgaggtattcatggccccactggaagcagtggtacacaaaggtatgcctgaccgcatggtgcctagtatcatcacagtgagcacaaaccaacattcatgcaaatcaggaaaataaaagctgcrcttagtttgcacatcaggcctgaaattctcctcctgacagttttatcctgtattgccagttactacagatatgcacttcacaattgcataagcacaataaaaatctccaaaggcacaggcatgtgaagatgtgaagcagttagatagtcctgtgcagagac

SEQ ID NO: 90343 - DNA, 600 bp, Chicken  19866894398215_2
gatcccatcacctcatctccatccttcaaatcaggcagggctttcaaacagaacttgcacctcctggcctcagaccttgtcaccacagcaccctgtgggctctccactcaccaggaaaatatcccattcctactacataccctcaaattgccacccacctmctgcagaaaggagctgtgaggtattcatggccccactggaagcagtggtacacaaaggtatgcctgaccgcatggtgcctagtatcatcacagtgagcacaaaccaacattcatgcaaatcaggaaaataaaagctgcrcttagtttgcacatcaggcctgaaattctcctcctgacagttttatcctgtattgccagttactacagatatgcacttcacaattgcataagcacaataaaaatctccaaaggcacaggcatgtgaagatgtgaagcagttagatagtcctgtgcagagactggttatttttctcctaaaaacattggaaaaacctgctttttaaataacccaagcagcacccagcacagctttgccacatgggaccatgtacacaacctatcattgccatgtattaaatagatttgaagcaccagacca

SEQ ID NO: 90344 - DNA, 600 bp, Chicken  19866894398222_1
tttataaaaacctgtctgagctgctggcagagatcctgaagtctcttcaaaacacaaaaaattctgcatcaaaggtctgggaaatgtttggaatggatttgtgtatgagtgatgggaagttctgaaaatggtttagttcatctttgccaatactttaaagacaagaagtgtgaattatatatattacaagaaattgtcattatactccaatgttgttctccttagcagagaagcagcttctttagaatagatatagctgacaattggaagagaagaaagcacctgagtatggagtgctaytccacttagacatgyagtcagccgagattcacttctcttctgttcagtgatttatttaactgtgtgactccccagaagtcagacataaaattctagtgcattttcctgacaaaatcctccktcagtaatttatttaccatttaatcaagtacaaccattcatcatttcaatttgttgaaccctgtgaaactgcacagctgataacaaagcagaagctaaaaggcaacgttactatgttgaatttgggaagcaacttatttgcatggaaaaccctcactgttcaattctgacagcagcatc

SEQ ID NO: 90345 - DNA, 600 bp, Chicken  19866894398222_2
ctgagctgctggcagagatcctgaagtctcttcaaaacacaaaaaattctgcatcaaaggtctgggaaatgtttggaatggatttgtgtatgagtgatgggaagttctgaaaatggtttagttcatctttgccaatactttaaagacaagaagtgtgaattatatatattacaagaaattgtcattatactccaatgttgttctccttagcagagaagcagcttctttagaatagatatagctgacaattggaagagaagaaagcacctgagtatggagtgctaytccacttagacatgyagtcagccgagattcacttctcttctgttcagtgatttatttaactgtgtgactccccagaagtcagacataaaattctagtgcattttcctgacaaaatcctccktcagtaatttatttaccatttaatcaagtacaaccattcatcatttcaatttgttgaaccctgtgaaactgcacagctgataacaaagcagaagctaaaaggcaacgttactatgttgaatttgggaagcaacttatttgcatggaaaaccctcactgttcaattctgacagcagcatcaggctaaagagactg

SEQ ID NO: 90346 - DNA, 600 bp, Chicken  19866894398222_3
ctgaaaatggtttagttcatctttgccaatactttaaagacaagaagtgtgaattatatatattacaagaaattgtcattatactccaatgttgttctccttagcagagaagcagcttctttagaatagatatagctgacaattggaagagaagaaagcacctgagtatggagtgctaytccacttagacatgyagtcagccgagattcacttctcttctgttcagtgatttatttaactgtgtgactccccagaagtcagacataaaattctagtgcattttcctgacaaaatcctccktcagtaatttatttaccatttaatcaagtacaaccattcatcatttcaatttgttgaaccctgtgaaactgcacagctgataacaaagcagaagctaaaaggcaacgttactatgttgaatttgggaagcaacttatttgcatggaaaaccctcactgttcaattctgacagcagcatcaggctaaagagactggacagggaggctctgagctttctgttttgcaaagtttctgctcagaatatgctagcacaacaaaagagctaagatggatgccacatactggataggtccacagagc

SEQ ID NO: 90347 - DNA, 600 bp, Chicken  19866894398223_1
ctgctgagtgtaacgctttcttaacatgcgttcactttttcaacagactgacctcttttaaggatgtctgccaataaattgctacccaaacgaaacataccctgaaagagcatctcagtgcctcgtgtcatcatttaatcggttccccagtccatcatgacagcatatcatcagttcttgtaccatgatctgataaatgtcagaaaaatagaccttataaatagcctgtttttaacataagctgtgagacccagaaaatgcagtgcaattctgcctcccaccatctccttttcacccccrgcctcaaacactacacaaagtgataaccaagctgctctcctgtgggactgcagcctttaattgggagtgggactgatttccttcatggctgttctctgaggagagaaagccccaattcaacgcttgcttttccctgagcgagccacaragaaaagagagccgcactaaacaacaatagctccaatcagccacacacgcgctaagcaaagggaagttttttgctgcacagccaaaagaggaggggtctgattggcattcaggttttgcagcatctcgctgtgggagagaggtcttctgcag

SEQ ID NO: 90348 - DNA, 600 bp, Chicken  19866894398223_2
agtccatcatgacagcatatcatcagttcttgtaccatgatctgataaatgtcagaaaaatagaccttataaatagcctgtttttaacataagctgtgagacccagaaaatgcagtgcaattctgcctcccaccatctccttttcacccccrgcctcaaacactacacaaagtgataaccaagctgctctcctgtgggactgcagcctttaattgggagtgggactgatttccttcatggctgttctctgaggagagaaagccccaattcaacgcttgcttttccctgagcgagccacaragaaaagagagccgcactaaacaacaatagctccaatcagccacacacgcgctaagcaaagggaagttttttgctgcacagccaaaagaggaggggtctgattggcattcaggttttgcagcatctcgctgtgggagagaggtcttctgcagtcattactctcctatggtgcttgttattgacagcactttccactgactctagcagagaataaaagtatccctctcagtaatatcattcacttccctcactttctattcccccttcctgtgcctccctcagagtacatgtgcagctgac

SEQ ID NO: 90349 - DNA, 600 bp, Chicken  19866894398226_1
tttgcagaaataactgaagataaaacctagccctaggcctggcattgatctgccatgagacttgaactgatgcaccttttattctatactctacaatatactttctattatatactttaaaaattagtgtggatatgctccaatcctctcgttttatttatttatttatttatttatttttgagttatatattttctctgtatagattttctaactctttttaagtatatgtaaacatgcatacatttacttcaaagacttctgacatgaacatcaaattcaaagagctgaatgctttgytgcagctgagrcttataaagcactctgaaaatacacatcaygcagcatttctcttctatgctgtggaagtcccaagctgtacatgtgcaggattccctcttttaccctgctgytggggaggatcgttagtcagcaggctgcggacagctgactgagctcactgctccttgccaacaggagaaagattggaaatctttcacaaaccaccgaatacctctttaacactgggattctataaggaaaaaagtcatgctgaaaatccagaatttatgagcactaagtaaagttacttaaacacag

SEQ ID NO: 90350 - DNA, 600 bp, Chicken  19866894398226_2
aactgaagataaaacctagccctaggcctggcattgatctgccatgagacttgaactgatgcaccttttattctatactctacaatatactttctattatatactttaaaaattagtgtggatatgctccaatcctctcgttttatttatttatttatttatttatttttgagttatatattttctctgtatagattttctaactctttttaagtatatgtaaacatgcatacatttacttcaaagacttctgacatgaacatcaaattcaaagagctgaatgctttgytgcagctgagrcttataaagcactctgaaaatacacatcaygcagcatttctcttctatgctgtggaagtcccaagctgtacatgtgcaggattccctcttttaccctgctgytggggaggatcgttagtcagcaggctgcggacagctgactgagctcactgctccttgccaacaggagaaagattggaaatctttcacaaaccaccgaatacctctttaacactgggattctataaggaaaaaagtcatgctgaaaatccagaatttatgagcactaagtaaagttacttaaacacaggcataaaaatc

SEQ ID NO: 90351 - DNA, 600 bp, Chicken  19866894398226_3
gcattgatctgccatgagacttgaactgatgcaccttttattctatactctacaatatactttctattatatactttaaaaattagtgtggatatgctccaatcctctcgttttatttatttatttatttatttatttttgagttatatattttctctgtatagattttctaactctttttaagtatatgtaaacatgcatacatttacttcaaagacttctgacatgaacatcaaattcaaagagctgaatgctttgytgcagctgagrcttataaagcactctgaaaatacacatcaygcagcatttctcttctatgctgtggaagtcccaagctgtacatgtgcaggattccctcttttaccctgctgytggggaggatcgttagtcagcaggctgcggacagctgactgagctcactgctccttgccaacaggagaaagattggaaatctttcacaaaccaccgaatacctctttaacactgggattctataaggaaaaaagtcatgctgaaaatccagaatttatgagcactaagtaaagttacttaaacacaggcataaaaatcctgtttgcaatgctgtcctgaacagggatg

SEQ ID NO: 90352 - DNA, 600 bp, Chicken  19866894398226_4
actttaaaaattagtgtggatatgctccaatcctctcgttttatttatttatttatttatttatttttgagttatatattttctctgtatagattttctaactctttttaagtatatgtaaacatgcatacatttacttcaaagacttctgacatgaacatcaaattcaaagagctgaatgctttgytgcagctgagrcttataaagcactctgaaaatacacatcaygcagcatttctcttctatgctgtggaagtcccaagctgtacatgtgcaggattccctcttttaccctgctgytggggaggatcgttagtcagcaggctgcggacagctgactgagctcactgctccttgccaacaggagaaagattggaaatctttcacaaaccaccgaatacctctttaacactgggattctataaggaaaaaagtcatgctgaaaatccagaatttatgagcactaagtaaagttacttaaacacaggcataaaaatcctgtttgcaatgctgtcctgaacagggatggttcttccatggcagaatctgtgataaagtttttaggtccctatagacccattaatggaatattctcatgag

SEQ ID NO: 90353 - DNA, 599 bp, Chicken  19866894398231_1
  misc_feature (1)..(134): n is any nucleotide
nnnnnnnnnnnnnnnnnnnnnnnnnnnnnnnnnnnnnnnnnnnnnnnnnnnnnnnnnnnnnnnnnnnnnnnnnnnnnnnnnnnnnnnnnnnnnnnnnnnnnnnnnnnnnnnnnnnnnnnnnnnnnnnnnnnnnnctaggaaatgtttcatgcaccatattcatttggaaaattaaaacctcattagggttaacaacctcaaaatgcaaacagtaattacaccagttttgtgaacttcctgtggtagcaataatagtaaatggcaggcaaaagaaaagaagaaatgaaaaatccaagagartctacctcatgatggagtgagatctacaaaagggagaatggtaaaactacagtgaagcaataaatgtgacaggaaagtagtcagactaaaagtgtgattttttttttaaatattattttaaatctaaatagtagtagctgttacaaatggtagagtactgtaaacttgccagcagtgtatgcatagcgcctgtcattgttgtcaaaattgtatatatgtgtcagagtatgtaagcattccaaaaatgcagcttgctaaatttatcaaatctgtaaacttgaatgtcaatgaagagaaat

SEQ ID NO: 90354 - DNA, 600 bp, Chicken  19866894398231_2
agcaataaatgtgacaggaaagtagtcagactaaaagtgtgattttttttttaaatattattttaaatctaaatagtagtagctgttacaaatggtagagtactgtaaacttgccagcagtgtatgcatagcgcctgtcattgttgtcaaaattgtatatatgtgtcagagtatgtaagcattccaaaaatgcagcttgctaaatttatcaaatctgtaaacttgaatgtcaatgaagagaaatctgggtttagaagagaaactgtaaatactgcatactttaaagcaaatcagaagatkcttgtcactaatatgactgctgatttttcacaccaattggcacataccctggattatttaatttttgagaccatttttcttcctctgtcaaatygctgaaggtccagaatctagttgaaccttcaatctgtatttgtgtctcaacagctcaaaccagtggaacaaaaacatctgtgagattttaggtgctagagcagcacctgataaagatatgtattcccatcatgaaagttaaactgaaaagagcagctagggactttcttattgagccatgctcagatcagttaggccagcaaacca

SEQ ID NO: 90355 - DNA, 600 bp, Chicken  19866894398231_3
gtagagtactgtaaacttgccagcagtgtatgcatagcgcctgtcattgttgtcaaaattgtatatatgtgtcagagtatgtaagcattccaaaaatgcagcttgctaaatttatcaaatctgtaaacttgaatgtcaatgaagagaaatctgggtttagaagagaaactgtaaatactgcatactttaaagcaaatcagaagatkcttgtcactaatatgactgctgatttttcacaccaattggcacataccctggattatttaatttttgagaccatttttcttcctctgtcaaatygctgaaggtccagaatctagttgaaccttcaatctgtatttgtgtctcaacagctcaaaccagtggaacaaaaacatctgtgagattttaggtgctagagcagcacctgataaagatatgtattcccatcatgaaagttaaactgaaaagagcagctagggactttcttattgagccatgctcagatcagttaggccagcaaaccacctgactgcagtgaagtatgaaatattaaaggcattttcttgataaacacaaagacagagttcaaaaattgaatgtgtagccctgaagacacaa

SEQ ID NO: 90356 - DNA, 599 bp, Chicken  19866894398233_1
  misc_feature (1)..(29): n is any nucleotide
nnnnnnnnnnnnnnnnnnnnnnnnnnnnntaattattagcccatggtaaactagttatcaattaattgctagaaaattgaagtatgtgtgtgtgttattgcttagatctctaattggctatactgttgctttcttgttaaatgctaattaaagtttcaaaacggccgaacattagttaactttaaatggtttaacaagatacactaatgtataaacacatttatattgcacattacttttatgccaggttatggtaaacctgcaataaagatgacagacattttcccccatattaatackatgttctatatataggtcttaactaaatgaacaagatctctttcttcctttcattaatttgtcaaatgtctattcaatactgaagataacatgcatgagtcaagacaaaccagcctgcaaagtcttttccagtgccagtaattctggttgcagttcacccaaggtctcctggaagaaaataaaggctcacagtagcagccaacgttctaaccaaggggctctgcccccaaacagcatggccctgccttccttctctgctattctgcttcatctccaggaaacaaagctccatctgccac

SEQ ID NO: 90357 - DNA, 600 bp, Chicken  19866894398243_1
cttttcaaacacctgagcagctcaggtgtttttggggccgctctgcaggctctgccttctggtgtgtcccataaggatgtgctccggtttcatttcatgccattcatctccagcaaacctcagaggagttagtgctgggtttgaagcctttcagcctgtctccttcagggagtgctttttggagcaacaataagggattttagcaagatcacctctgcgctgagtatggtatgagtttaatttgctagttaagatgttactgacttctcctagatttctaatgtttcctattctacgaartcttatatatcacctatacaggagttgttgtggctgggggttgcagaagaacacgcaggaattccttactgcttctctggtacttgagttcaatttacaccatacaccaaagaaatgtctccctttgggttaggataggttacrggctctgctggtgcaggaacaaagggctgtctgttccagcgggcatgtctgtaaggcaggaggggatgctgcaggcagtgaagatgcgatgcagcatttcgtggacacgtttcacttttaggagctcacagacaatgagagcggttcagtaaaact

SEQ ID NO: 90358 - DNA, 600 bp, Chicken  19866894398243_2
agcctttcagcctgtctccttcagggagtgctttttggagcaacaataagggattttagcaagatcacctctgcgctgagtatggtatgagtttaatttgctagttaagatgttactgacttctcctagatttctaatgtttcctattctacgaartcttatatatcacctatacaggagttgttgtggctgggggttgcagaagaacacgcaggaattccttactgcttctctggtacttgagttcaatttacaccatacaccaaagaaatgtctccctttgggttaggataggttacrggctctgctggtgcaggaacaaagggctgtctgttccagcgggcatgtctgtaaggcaggaggggatgctgcaggcagtgaagatgcgatgcagcatttcgtggacacgtttcacttttaggagctcacagacaatgagagcggttcagtaaaactggacacagacaactcctgggatactggaggcgctgaaagaaaggaggtggtcagagctccacgtgcttgcagcactggtttctgcagggacrttattgcagccctttgtggtttggtggggctggtctcttgctgagaggagca

SEQ ID NO: 90359 - DNA, 600 bp, Chicken  19866894398243_3
atttacaccatacaccaaagaaatgtctccctttgggttaggataggttacrggctctgctggtgcaggaacaaagggctgtctgttccagcgggcatgtctgtaaggcaggaggggatgctgcaggcagtgaagatgcgatgcagcatttcgtggacacgtttcacttttaggagctcacagacaatgagagcggttcagtaaaactggacacagacaactcctgggatactggaggcgctgaaagaaaggaggtggtcagagctccacgtgcttgcagcactggtttctgcagggacrttattgcagccctttgtggtttggtggggctggtctcttgctgagaggagcagcaaggttgcatgggtcgctggtggccctgggctgtgtaggtggccccaaacagctctgccctctggggactgatcagtcccctccctgtgcagccatctctgcagtgctcttcctgcagacttgtctgctcctggagctgctgcaggtcgctgcgtggccccgtgcccctggggtcctgtgcaaacagagcctgcacggtagcgagccctgacctctcctcaggacttttcgcaccggtcagaatga

SEQ ID NO: 90360 - DNA, 599 bp, Chicken  19866894398250_1
  misc_feature (1)..(10): n is any nucleotide
nnnnnnnnnnattgaaataagtagaagttgttactgaacataactatgctttaattttgtgaataattgaatatattatgtaaatgttcatcaaattatgaaatagtttgagaatttattgcctaatgttgtgtgagcagagtcagtaaacaagcattttctatgttcaattttattcatgtttgatagctatcatagctatttgggcaaaatgagatgcagtgatgtggttatgatcatacactgaaaacaaactggcttttttcaaagtttaacagcctgtgtctcccattagacatsccttttacatacatggttttgtatgcttataatgtatcttacacaatgaatcctcgattcatttgacttccgacatgacagtatctcaatctgctgttttcattactaataaatactgatatgtcttcagaaccttccataacttaggccasttatcaaccatgatgcttgtcaactcagttctgtggttggaaactagcaggtaggaggcaggtcatctttagaagacaaagcagctgctgttaattacatatctactgtgagtcttgcaggggaagctttatttttaaccaaaaaac

SEQ ID NO: 90361 - DNA, 600 bp, Chicken  19866894398250_2
agcattttctatgttcaattttattcatgtttgatagctatcatagctatttgggcaaaatgagatgcagtgatgtggttatgatcatacactgaaaacaaactggcttttttcaaagtttaacagcctgtgtctcccattagacatsccttttacatacatggttttgtatgcttataatgtatcttacacaatgaatcctcgattcatttgacttccgacatgacagtatctcaatctgctgttttcattactaataaatactgatatgtcttcagaaccttccataacttaggccasttatcaaccatgatgcttgtcaactcagttctgtggttggaaactagcaggtaggaggcaggtcatctttagaagacaaagcagctgctgttaattacatatctactgtgagtcttgcaggggaagctttatttttaaccaaaaaacctttatttttaaactaaaaccttactgcatgaaaatattggtgcttttaactataggaactgcactggtgtgaactcccaaatgctgttaccctatccaaaaggctatgaattagcaaagccatcagtaagtgattattgtatggctattact

SEQ ID NO: 90362 - DNA, 600 bp, Chicken  19866894398259_1
gtgtccttcccgtgtgatggcaaaggtgaagtaagccccacagaaggcatcctggaagcgcatcttgcctttgcctctgacagggacacgctgggggaccagcaggcgctctggggacaagaaacaaggcatcacacgagagcttatgattcacacccttctcctctcctccaagctgcacatcactgaacgtaagcaaccgatttacaaacaagccctcgagcagccaaggaagagacggagcgcctctgctcctcagcaaagctctgcacagagcccaagcgtgccacggcccccaaygtttctgagcaccaaagccactcacgcagcccyttccgtcctcctcggttggaaaagagggctggcaccctgcccagctggccctgctcgccacagccacacgtgaacaggtcgccatccaccgtcagcatcaccaaatggtcgttccctgcagagagacacgggaggtgagagcagcagtcaccctccagatcccaccagggggacatcccaccccgaagtcccatctgcccaagctttgcacgattctgtggcctttggcagctcctggatcgcttggcacacctgaatgctcttcct

SEQ ID NO: 90363 - DNA, 600 bp, Chicken  19866894398259_2
agccccacagaaggcatcctggaagcgcatcttgcctttgcctctgacagggacacgctgggggaccagcaggcgctctggggacaagaaacaaggcatcacacgagagcttatgattcacacccttctcctctcctccaagctgcacatcactgaacgtaagcaaccgatttacaaacaagccctcgagcagccaaggaagagacggagcgcctctgctcctcagcaaagctctgcacagagcccaagcgtgccacggcccccaaygtttctgagcaccaaagccactcacgcagcccyttccgtcctcctcggttggaaaagagggctggcaccctgcccagctggccctgctcgccacagccacacgtgaacaggtcgccatccaccgtcagcatcaccaaatggtcgttccctgcagagagacacgggaggtgagagcagcagtcaccctccagatcccaccagggggacatcccaccccgaagtcccatctgcccaagctttgcacgattctgtggcctttggcagctcctggatcgcttggcacacctgaatgctcttcctgatggaggttccccattggaaagtctcactgca

SEQ ID NO: 90364 - DNA, 600 bp, Chicken  19866894398260_1
aatattgaaatgacatagactgctgagatttttcagagttctgtttccaaaaattgtaacttactgaatctgttaaataataaaaagagccagctgttatacagcagccaagaaactcctaaacgctatatataatttatggcaaatattttgtgcctggaggaaagcagagggtctgcccattactgtggtggtttggcatggctagaaggcatgccaaagaccacagaaatattgctttcaactttttcctacaatactttcttacattacttaaaaaaaaaaaatcaaccaaccaastaacagcaacaacaaaaaattactcctaaataactytccagaaaactctgcagcccatttcatagcacaccactgtctgcaactgggagaggaacaagcaaggccaatatacagcatttagaacttcttctaatagctgctggaagccagtgaattttcagccatgtgttttaagatgagttttaagtccacggtgaacgttatgtgtgttaatatgcacataacttaataacataaacgtctcctttgtgtacattcccaaaagacctcagccatttccctcattcacatctttacatc

SEQ ID NO: 90365 - DNA, 600 bp, Chicken  19866894398260_2
agttctgtttccaaaaattgtaacttactgaatctgttaaataataaaaagagccagctgttatacagcagccaagaaactcctaaacgctatatataatttatggcaaatattttgtgcctggaggaaagcagagggtctgcccattactgtggtggtttggcatggctagaaggcatgccaaagaccacagaaatattgctttcaactttttcctacaatactttcttacattacttaaaaaaaaaaaatcaaccaaccaastaacagcaacaacaaaaaattactcctaaataactytccagaaaactctgcagcccatttcatagcacaccactgtctgcaactgggagaggaacaagcaaggccaatatacagcatttagaacttcttctaatagctgctggaagccagtgaattttcagccatgtgttttaagatgagttttaagtccacggtgaacgttatgtgtgttaatatgcacataacttaataacataaacgtctcctttgtgtacattcccaaaagacctcagccatttccctcattcacatctttacatcagttttagaactctttcatcagtgcaaagaaaaaca

SEQ ID NO: 90366 - DNA, 600 bp, Chicken  19866894398267_1
tgatttacagaataattagaaataatgtcactgcaactaaagctcagtcaccgcatttgtggcatcgatgccctaacttttagtagaagtccggagcctatttccttaagttgcattttttacatgaatacaatccagtgttagatggtggcattttaatttttctagactgtcttgtccagtcttcaagattaaggtgttgttccttctttcccttgaatctatccctgtgtggatgaacctgctactgctgttgctggaggaggtttccagacttgtagaaacaaagtgatttaataytgatgggaattcaccagtgccctgtrtgcatactcaagatttaggaaaacttcagtgtgggctgttctactttggagatatgaacaacaggaagtgtgatttagactcatgaaatcccttttaaagatttcttgagttgtgtgctcttctgatggcagagtcagctttcctagaaggaaagttggagtcctaaggctttatctcttcaggcagaagattgaaatgtagctgccactcatccactctacatcctagtctgttgagtaccaaactttggtctgtattatgatgttcaccaag

SEQ ID NO: 90367 - DNA, 600 bp, Chicken  19866894398267_2
gtcactgcaactaaagctcagtcaccgcatttgtggcatcgatgccctaacttttagtagaagtccggagcctatttccttaagttgcattttttacatgaatacaatccagtgttagatggtggcattttaatttttctagactgtcttgtccagtcttcaagattaaggtgttgttccttctttcccttgaatctatccctgtgtggatgaacctgctactgctgttgctggaggaggtttccagacttgtagaaacaaagtgatttaataytgatgggaattcaccagtgccctgtrtgcatactcaagatttaggaaaacttcagtgtgggctgttctactttggagatatgaacaacaggaagtgtgatttagactcatgaaatcccttttaaagatttcttgagttgtgtgctcttctgatggcagagtcagctttcctagaaggaaagttggagtcctaaggctttatctcttcaggcagaagattgaaatgtagctgccactcatccactctacatcctagtctgttgagtaccaaactttggtctgtattatgatgttcaccaagcaatttatgaaagctgaagatgtaaa

SEQ ID NO: 90368 - DNA, 599 bp, Chicken  19866894398268_1
  misc_feature (1)..(59): n is any nucleotide
nnnnnnnnnnnnnnnnnnnnnnnnnnnnnnnnnnnnnnnnnnnnnnnnnnnnnnnnnnnaactgctgctgccctaaaacaatggaattagcctgaatcagccacaacatccttctttaggcttctggtaaagcgcatacaactcagcactgcagtagacaggatcttaagtgttgacacccacgccccttttcttacagcttgtttgttatttccacttctactccaaattacactgcatatctgagatgcaaaccctttactgtcacaaagcatcctttctgtgtactacaatgaaatyccaagaatttgtaggttcctggtaattggtgggtggctgcaaacactataaagccaacttgtgttaagtttattgcagtgacaccaaccttcccgacaagaaaaggcagtgtccttccagacagctcttatctgcacaccagtgaaacgcagttagacaacaggctctgtacacagcaggctggtttataggtcagatgccagcacaagagaagtttcaggcttgcaataaatacacagacaggtaattctccatatagagaaggcaagcaaggcctcactcctgaccgtgtgtccyca

SEQ ID NO: 90369 - DNA, 600 bp, Chicken  19866894398268_2
atyccaagaatttgtaggttcctggtaattggtgggtggctgcaaacactataaagccaacttgtgttaagtttattgcagtgacaccaaccttcccgacaagaaaaggcagtgtccttccagacagctcttatctgcacaccagtgaaacgcagttagacaacaggctctgtacacagcaggctggtttataggtcagatgccagcacaagagaagtttcaggcttgcaataaatacacagacaggtaattctccatatagagaaggcaagcaaggcctcactcctgaccgtgtgtccycaggttccctgtttacctcattatcatggggcggcagctgatagagaagttgtttaatcctgtgcttctctcccgggctgttaacataagggaccttctcctctggcaggcaggcaaaatacagctgtacctacacaggaggaatgggaagtcagaccaggagaaacgcagcacccaagcagccttcagctactgttttatctcaagtctcattacaaaggaagcaggctatgctacattagagccgtgacagggcctgtgctgaaaatacgagacccagatgaaccaactcagcaaacc

SEQ ID NO: 90370 - DNA, 600 bp, Chicken  19866894398270_1
acccagcatacaggcatgtctactttgccacagtcagcattaaaaaattacctacaaatgctgtcaccatcgcttctgactagaacaaaactaaaagctctcgtatttggatatgggtttttttaaccatatgcttctattctaaacagcaataattgcacaggtattctccattcactccagggtgagagagagcagtgcaggacaagttctgaaagtcgatagaaaaataccgacttattagaagatcatagggaaattatagcaggagcacaatttctgcctgaagttatgaaggcytgtatagggcaatggtctcattattatatttctttggagactaatctgcattcatttttgtagtatgctggagagctcagaagcagttttcttgctcagactgctggatgttgagcttgtctgatataaaaacacttctcgctcaggctaaaatcatttttcattgaagctgagattgccatcaaagtaaaatatgaatatagcttcttatgcaaatgtttcttacaggtttgagatcttctcttcatgaaatatcaagcaggatcagctacaaaggggctagattccattctttttttc

SEQ ID NO: 90371 - DNA, 599 bp, Chicken  19866894398271_1
  misc_feature (1)..(42): n is any nucleotide
nnnnnnnnnnnnnnnnnnnnnnnnnnnnnnnnnnnnnnnnnntaacgtgcaattgaggggagagaactgcaaagattcgggtgatgtatttaataaataagaacccccaggacataaaagtaaatgagcatctggattctatatcaatccctaaaagtgacagtactgcttacctgctgtaatttgttctgctgcttttaactgaattgtagtttcttgtgtgatttaattgttggaacatgtgggttcttttgataataaggagtatgtatcggttataaatgccatgaatacttcatsatggtttagaaaaattaacagttttaaatcctcgtttctcctgaattgcagtgaacaccactggaacactaaaaatatgttctgtttctatttttagtgtgtgtcctctgtaccagagggcagatgaaagaggcggtatctgagtacagctgtaaagtaacaccacagagctgacatgattagtggctgtaatgtttgagtctgaatgtaaccctgttttgaatcactctggatgaaaagggtactcatgcagaaagctcgagatgaacgttggcctctccatctgtccatgctgcatt

SEQ ID NO: 90372 - DNA, 600 bp, Chicken  19866894398276_1
gtgcaaacgccagggaggccgtgaacaagcagtacaggacttctgctctttttttggaactgttgcaggagctaatggctcatcttgccctctctgcatacttgggacttgcgtgttataagagcagatccactaacagaacaaatttggacccggtgcccaggaaacaacaatgccagcagtgagctctcccttttttccaatgcaggaggccaccaaagctgtcactctgctcctgcagcccatggggtaaaaaccacccttcccactaggaccactgtttccctggaagcagtcttygcaggttttattgccaggaatcagaaggcaacaacaggctttaaatctgcctcttcactatagcccatggtaagctgtttttctgtgtgcatcattgcctacaaactccaaaggaatgcaaaggctggagttttaccaagtcttttgctctcagcaaacatgtatgattattttttgcatccttgctggaaagaacagagcagactgtactccaggactttgtcaccttaggacatatgacaaacatttgcatgtgtcacactcacttacaccagcctattagcagagcaggaatagtaa

SEQ ID NO: 90373 - DNA, 600 bp, Chicken  19866894398277_1
acctgccctggtgcagcttgaggctcccggacctcttcaaaacacaacccagaagctgataaatggggaaggaggcaaaaggagctgcatttgctgtggtctgtgcagcaatggctggtggcgcccagctcattaaaaaagctgaatagcgttatgaaattggaatatgtgaaatcaagaaacaagggcaggctggatggggctctgagcacctaatggagctgtgggtgtccctgttcagtgcgggggagctgggctgggtgccctttagaggtcccttccaactccaatgattccacrattctatgataacgccgttttcctgcacagcctgccgttggatgatgagtgtgtgatgtctctgcctgttgctgcatgtctgcytcragcttccccttgatgctgtgccatccctgtgtctgcaggtggagtactacaaccagcacacggccacctggcacccggtggccagcatgctcaacaagcgctgccgccacggggcggcctccctgggcagcaagatgtttgtctgcgggggttacgacggctctgccttcctcagcatcgccgaagtgtacagctctgtggcagaccagtggt

SEQ ID NO: 90374 - DNA, 600 bp, Chicken  19866894398277_2
ctgcatttgctgtggtctgtgcagcaatggctggtggcgcccagctcattaaaaaagctgaatagcgttatgaaattggaatatgtgaaatcaagaaacaagggcaggctggatggggctctgagcacctaatggagctgtgggtgtccctgttcagtgcgggggagctgggctgggtgccctttagaggtcccttccaactccaatgattccacrattctatgataacgccgttttcctgcacagcctgccgttggatgatgagtgtgtgatgtctctgcctgttgctgcatgtctgcytcragcttccccttgatgctgtgccatccctgtgtctgcaggtggagtactacaaccagcacacggccacctggcacccggtggccagcatgctcaacaagcgctgccgccacggggcggcctccctgggcagcaagatgtttgtctgcgggggttacgacggctctgccttcctcagcatcgccgaagtgtacagctctgtggcagaccagtggtatctgatcgtccccatgaacacccgcaggagccgagtgtccctggttgcaaactgtggccgcctctacgccgttgggggctatg

SEQ ID NO: 90375 - DNA, 600 bp, Chicken  19866894398277_3
catttgctgtggtctgtgcagcaatggctggtggcgcccagctcattaaaaaagctgaatagcgttatgaaattggaatatgtgaaatcaagaaacaagggcaggctggatggggctctgagcacctaatggagctgtgggtgtccctgttcagtgcgggggagctgggctgggtgccctttagaggtcccttccaactccaatgattccacrattctatgataacgccgttttcctgcacagcctgccgttggatgatgagtgtgtgatgtctctgcctgttgctgcatgtctgcytcragcttccccttgatgctgtgccatccctgtgtctgcaggtggagtactacaaccagcacacggccacctggcacccggtggccagcatgctcaacaagcgctgccgccacggggcggcctccctgggcagcaagatgtttgtctgcgggggttacgacggctctgccttcctcagcatcgccgaagtgtacagctctgtggcagaccagtggtatctgatcgtccccatgaacacccgcaggagccgagtgtccctggttgcaaactgtggccgcctctacgccgttgggggctatgatg

SEQ ID NO: 90376 - DNA, 501 bp, Chicken  19866894398279_1
tttgttgtctttgtgttctgtcctactgatctcttgcttgcacttgattaactgaagaatttttgtgagtaagttttttgtgtgttgaatagcagtaggcatggcttacccaggcatgtgatttttgccgtgaagcttttgaagttccaatcatagaatggcttgggttggagaggacctcaaagatcttcaagctcaatagtaatattgggggctaagtaaataaaattgaagtgagaatgtttacagtggtttggacagaagccccttctggcagtagcccttgtgtgacagtaaccsatgccagatgcttctggagagcatgagaacagggcaaccataaagcagtgcttccygcctgcgtagccttgcaattttttgccattctgaggtatagagacttctttgattaaaagttgtgttgtcaccttggtggttaacagtcacgtgctttctgtgaatgtatgcatttgtgggtttgggctcattaatgccttccga

SEQ ID NO: 90377 - DNA, 445 bp, Chicken  19866894398279_2
gaatttttgtgagtaagttttttgtgtgttgaatagcagtaggcatggcttacccaggcatgtgatttttgccgtgaagcttttgaagttccaatcatagaatggcttgggttggagaggacctcaaagatcttcaagctcaatagtaatattgggggctaagtaaataaaattgaagtgagaatgtttacagtggtttggacagaagccccttctggcagtagcccttgtgtgacagtaaccsatgccagatgcttctggagagcatgagaacagggcaaccataaagcagtgcttccygcctgcgtagccttgcaattttttgccattctgaggtatagagacttctttgattaaaagttgtgttgtcaccttggtggttaacagtcacgtgctttctgtgaatgtatgcatttgtgggtttgggctcattaatgccttccga

SEQ ID NO: 90378 - DNA, 600 bp, Chicken  19866894398283_1
ttaattccccaaatgaacttcaaaccatgggggcaataagtaggagacaggctgggacacgtcctctctgtgcacaatgctcacatcagtgcatccaggacactcttcacaatgcacacgagcttcacaaaatgaagcacttaacaaaaaggcttcagccatttccaggttggctctgggtaaaaatcccattttttttttcccctcttgttttcagaatccagctcaacattgtggcagattcagtgtcagacagctttggcccataggctatggccagctccatctccagcacagcasagctctaaatttagggagagaagctcctggaacatccaaacccagcgccatccccatgcaaacacacactgctctgtgcacagcagcccacagrcagaactggtagagcctggtttcctcctgctctccaacatccaacagccccacaaagggagaacagattgttcccttctgctgcagcagtgttatccacgcttctactcttttgtcataagatttgtaggaacttagcatttgttttaaccatatcactgagcgaaatctggttgcaaataacaggttaggatatatcaactggga

SEQ ID NO: 90379 - DNA, 600 bp, Chicken  19866894398283_2
ccaggacactcttcacaatgcacacgagcttcacaaaatgaagcacttaacaaaaaggcttcagccatttccaggttggctctgggtaaaaatcccattttttttttcccctcttgttttcagaatccagctcaacattgtggcagattcagtgtcagacagctttggcccataggctatggccagctccatctccagcacagcasagctctaaatttagggagagaagctcctggaacatccaaacccagcgccatccccatgcaaacacacactgctctgtgcacagcagcccacagrcagaactggtagagcctggtttcctcctgctctccaacatccaacagccccacaaagggagaacagattgttcccttctgctgcagcagtgttatccacgcttctactcttttgtcataagatttgtaggaacttagcatttgttttaaccatatcactgagcgaaatctggttgcaaataacaggttaggatatatcaactgggagcatcaaaactgtgcttcttggaaaagccaggctaaaggaaggtcagtccagtgttaaaaggaacagcagtgatttccccggctggaggtatag

SEQ ID NO: 90380 - DNA, 599 bp, Chicken  19866894398289_1
  misc_feature (1)..(128): n is any nucleotide
nnnnnnnnnnnnnnnnnnnnnnnnnnnnnnnnnnnnnnnnnnnnnnnnnnnnnnnnnnnnnnnnnnnnnnnnnnnnnnnnnnnnnnnnnnnnnnnnnnnnnnnnnnnnnnnnnnnnnnnnnnnnnnnntcttattaatattcttgtagaactgaactggataatctctttcctgatttccattttgcatagaggtggtctctgtgtaagttagtagcagagaagaagctcagccatccagttcaagtattatctttattgacctttgagaaggtctatttatgccctatattgttcacaygtacccagcaaagtaacagtgaggaaatggattcttaaaagcaacaaactttgagcaagagtcagttcacagctctgyggrcatttctggagctgagtaagggtattgttctgaagccaaaccgatcygtgtttgacctacgcrtcaatattggcttcttgcaattacctttgcttttagcctgttactgccattaatttaaaaawttgagttgtattactgactgtgagcaggctatagaatccagcaacttggtgtaaccgtggtctaatccaggctagctgatctgttgtgtgacc

SEQ ID NO: 90381 - DNA, 599 bp, Chicken  19866894398289_2
  misc_feature (1)..(50): n is any nucleotide
nnnnnnnnnnnnnnnnnnnnnnnnnnnnnnnnnnnnnnnnnnnnnnnnnntcttattaatattcttgtagaactgaactggataatctctttcctgatttccattttgcatagaggtggtctctgtgtaagttagtagcagagaagaagctcagccatccagttcaagtattatctttattgacctttgagaaggtctatttatgccctatattgttcacaygtacccagcaaagtaacagtgaggaaatggattcttaaaagcaacaaactttgagcaagagtcagttcacagctctgyggrcatttctggagctgagtaagggtattgttctgaagccaaaccgatcygtgtttgacctacgcrtcaatattggcttcttgcaattacctttgcttttagcctgttactgccattaatttaaaaawttgagttgtattactgactgtgagcaggctatagaatccagcaacttggtgtaaccgtggtctaatccaggctagctgatctgttgtgtgaccaaatgtacagtgatatgattgcaatgtttctgctgtttctgtctagctgcatcgtgcaccatgaaaggggccctgggg

SEQ ID NO: 90382 - DNA, 599 bp, Chicken  19866894398289_3
  misc_feature (1)..(47): n is any nucleotide
nnnnnnnnnnnnnnnnnnnnnnnnnnnnnnnnnnnnnnnnnnnnnnntcttattaatattcttgtagaactgaactggataatctctttcctgatttccattttgcatagaggtggtctctgtgtaagttagtagcagagaagaagctcagccatccagttcaagtattatctttattgacctttgagaaggtctatttatgccctatattgttcacaygtacccagcaaagtaacagtgaggaaatggattcttaaaagcaacaaactttgagcaagagtcagttcacagctctgyggrcatttctggagctgagtaagggtattgttctgaagccaaaccgatcygtgtttgacctacgcrtcaatattggcttcttgcaattacctttgcttttagcctgttactgccattaatttaaaaawttgagttgtattactgactgtgagcaggctatagaatccagcaacttggtgtaaccgtggtctaatccaggctagctgatctgttgtgtgaccaaatgtacagtgatatgattgcaatgtttctgctgtttctgtctagctgcatcgtgcaccatgaaaggggccctggggctt

SEQ ID NO: 90383 - DNA, 600 bp, Chicken  19866894398289_4
tcttattaatattcttgtagaactgaactggataatctctttcctgatttccattttgcatagaggtggtctctgtgtaagttagtagcagagaagaagctcagccatccagttcaagtattatctttattgacctttgagaaggtctatttatgccctatattgttcacaygtacccagcaaagtaacagtgaggaaatggattcttaaaagcaacaaactttgagcaagagtcagttcacagctctgyggrcatttctggagctgagtaagggtattgttctgaagccaaaccgatcygtgtttgacctacgcrtcaatattggcttcttgcaattacctttgcttttagcctgttactgccattaatttaaaaawttgagttgtattactgactgtgagcaggctatagaatccagcaacttggtgtaaccgtggtctaatccaggctagctgatctgttgtgtgaccaaatgtacagtgatatgattgcaatgtttctgctgtttctgtctagctgcatcgtgcaccatgaaaggggccctggggcttcgatatgttaaagcaaaaatagatcattatgaaaagatcagggaaaca

SEQ ID NO: 90384 - DNA, 600 bp, Chicken  19866894398289_5
gtagaactgaactggataatctctttcctgatttccattttgcatagaggtggtctctgtgtaagttagtagcagagaagaagctcagccatccagttcaagtattatctttattgacctttgagaaggtctatttatgccctatattgttcacaygtacccagcaaagtaacagtgaggaaatggattcttaaaagcaacaaactttgagcaagagtcagttcacagctctgyggrcatttctggagctgagtaagggtattgttctgaagccaaaccgatcygtgtttgacctacgcrtcaatattggcttcttgcaattacctttgcttttagcctgttactgccattaatttaaaaawttgagttgtattactgactgtgagcaggctatagaatccagcaacttggtgtaaccgtggtctaatccaggctagctgatctgttgtgtgaccaaatgtacagtgatatgattgcaatgtttctgctgtttctgtctagctgcatcgtgcaccatgaaaggggccctggggcttcgatatgttaaagcaaaaatagatcattatgaaaagatcagggaaacatctgaatatcatctga

SEQ ID NO: 90385 - DNA, 600 bp, Chicken  19866894398289_6
aagttagtagcagagaagaagctcagccatccagttcaagtattatctttattgacctttgagaaggtctatttatgccctatattgttcacaygtacccagcaaagtaacagtgaggaaatggattcttaaaagcaacaaactttgagcaagagtcagttcacagctctgyggrcatttctggagctgagtaagggtattgttctgaagccaaaccgatcygtgtttgacctacgcrtcaatattggcttcttgcaattacctttgcttttagcctgttactgccattaatttaaaaawttgagttgtattactgactgtgagcaggctatagaatccagcaacttggtgtaaccgtggtctaatccaggctagctgatctgttgtgtgaccaaatgtacagtgatatgattgcaatgtttctgctgtttctgtctagctgcatcgtgcaccatgaaaggggccctggggcttcgatatgttaaagcaaaaatagatcattatgaaaagatcagggaaacatctgaatatcatctgaatatacagtttatcatatagatttccattctatatatgtttgagtgcaaaatataaaatatg

SEQ ID NO: 90386 - DNA, 494 bp, Chicken  19866894398292_1
aatgagcattgtgcatggagaaaatcgtgttttgaaaaaaaaaaaccctacattttgacatgaatattttccctcttgagttggcattcgtgatctttagtccgtggcattatgctcctctagtctggccttgtctctgctgccagtgctggtgctgcttcaatgagactgatgatggctttgtcatttatctcctcctaatgtccctgctgagctgggcctctttcttcctgctttaaatggtagtttttctatgctctttgtaatatttttctgctgccagcacgctgagcacttttwaaatgtttttaagtaaaatcaataggatcttttttttaacataaattcatcaagccagagccattagtgaaatattctaggagcgccttcatcaataactaacatttagcatcttgccctacagtactctttttgatgtatatgtttactagaagcaaatgaagtcaaacaactttgaatggctcaccagattt

SEQ ID NO: 90387 - DNA, 599 bp, Chicken  19866894398295_1
  misc_feature (1)..(58): n is any nucleotide
nnnnnnnnnnnnnnnnnnnnnnnnnnnnnnnnnnnnnnnnnnnnnnnnnnnnnnnnnnggaagggacccttagaaatctgtctggtccactctcctgcaatgaacagggagggacacctacagctagatcaggttgcccagagccccatgcagcctgaccttgaatgtcacatgagaaggggcatctactacccctaaactttctgctgctaatttctaataatctgtgatagatgcatctcctacttgtttaaatagacttgcaacattcttcagaaatctcatgtaatctctggggaratacttattgaccttggtgaacttggcatttagtagtaactattgaacttccaattcttgcaattggcaaaaaaaaawtataatatggttataatttgactgccagctgactacatggtttgatatattctataacttggtggtcagcaggcaaactgcggacttttaaatttcctagtgccaaaagtaaatctgaaaagatggctaaaaagtattcaaacyatcagaaagctccaaattaatataaattacacgccacagaatagtgtgtgaataagcagatgctgtagagggtagtt

SEQ ID NO: 90388 - DNA, 600 bp, Chicken  19866894398295_2
tgtctggtccactctcctgcaatgaacagggagggacacctacagctagatcaggttgcccagagccccatgcagcctgaccttgaatgtcacatgagaaggggcatctactacccctaaactttctgctgctaatttctaataatctgtgatagatgcatctcctacttgtttaaatagacttgcaacattcttcagaaatctcatgtaatctctggggaratacttattgaccttggtgaacttggcatttagtagtaactattgaacttccaattcttgcaattggcaaaaaaaaawtataatatggttataatttgactgccagctgactacatggtttgatatattctataacttggtggtcagcaggcaaactgcggacttttaaatttcctagtgccaaaagtaaatctgaaaagatggctaaaaagtattcaaacyatcagaaagctccaaattaatataaattacacgccacagaatagtgtgtgaataagcagatgctgtagagggtagttcctctggactgcttattaaagaataaataatggcatccaaaagcggtgcagctcaatgacacaggtcattgacttggac

SEQ ID NO: 90389 - DNA, 600 bp, Chicken  19866894398295_3
atctgtgatagatgcatctcctacttgtttaaatagacttgcaacattcttcagaaatctcatgtaatctctggggaratacttattgaccttggtgaacttggcatttagtagtaactattgaacttccaattcttgcaattggcaaaaaaaaawtataatatggttataatttgactgccagctgactacatggtttgatatattctataacttggtggtcagcaggcaaactgcggacttttaaatttcctagtgccaaaagtaaatctgaaaagatggctaaaaagtattcaaacyatcagaaagctccaaattaatataaattacacgccacagaatagtgtgtgaataagcagatgctgtagagggtagttcctctggactgcttattaaagaataaataatggcatccaaaagcggtgcagctcaatgacacaggtcattgacttggacttctctgctgggaatgattaaagtgacattaagctctacccggttgacttgctacagtgctgaaaaacatcacatcaatacaaatctgcttagctgcttacaggaagaatgacgtcatggaaacataaataagtcctctctaaa

SEQ ID NO: 90390 - DNA, 600 bp, Chicken  19866894398296_1
gtagactagttgtgttttagtaatgcgcacctttagtaaggtgctgagccaattagttttcctatatggacatgaaagaccaatggcaccctggcttgaatcagcagcagcgcagctagcagaactaaggaggcaatcgacactggtgaggctgcacttcgagtactgtgttcagttttgggcccctcactacaaaagagacgctggggccctggagtgtgtccagagaagggcaatgaagctgtgaagggtctggagcacaagacttagtgggccagctgagggaactggggtttttcygtctgaagaacaggaagctcagggaagcctctagtgctctctacagctccctgaaaggaggtggtggttggcctcttctcccaggtaatagtgataggatgagaggtaaaggctttaagttgcaccaggggaggtttgkgttgggtattaagaaacatttcttctcagaaagagtggtaaggcactggaacgggctgcccaggggggtggtggagtcatcattccttgaggtgtacaagaaatgtggagatgtggctctgaggaatatattttaatgacacggtggggatgggtttgatg

SEQ ID NO: 90391 - DNA, 556 bp, Chicken  19866894398296_2
acactggtgaggctgcacttcgagtactgtgttcagttttgggcccctcactacaaaagagacgctggggccctggagtgtgtccagagaagggcaatgaagctgtgaagggtctggagcacaagacttagtgggccagctgagggaactggggtttttcygtctgaagaacaggaagctcagggaagcctctagtgctctctacagctccctgaaaggaggtggtggttggcctcttctcccaggtaatagtgataggatgagaggtaaaggctttaagttgcaccaggggaggtttgkgttgggtattaagaaacatttcttctcagaaagagtggtaaggcactggaacgggctgcccaggggggtggtggagtcatcattccttgaggtgtacaagaaatgtggagatgtggctctgaggaatatattttaatgacacggtggggatgggtttgatggttggactaaatgatcctagagatcttttccaaagttaatcattctataattctgtgtaggattttgcatgctgaggagttaaacacgaaaatga

SEQ ID NO: 90392 - DNA, 599 bp, Chicken  19866894398298_1
  misc_feature (1)..(4): n is any nucleotide
nnnntatgggaatacagaaaatgagccattcctcagacatactgcagcaggctcaaaatagttggtaggagtgaggaggaagactcatttagaaactgcttttaaacagagaccagttcttagaacagagactgaatacatcatattacattaaccaactttatggcattcctcaaactacaaacttggctgtgttttttttctgatgtctttctttttttaccctcatgctctccactgtgttacagcttgcaagtccactgtatctgtgctgttgaagcaacctcccactgctctagkgcctgccacttcattctgttattaatgctacatacttagcagcagagcttttgtctaagaaaatgaaaggaaagaaaacttatagagttaatkcacaaaaataacaagaataaaaaactacatatgagtacaaagtctcccgcaaaggagcagtaagctttcagaagttgaaactgattatttctcaaaaaaacaattccttatctgtgcaagttacacttgaaaagggggaaggtccccttgcaggaatgggaagaaagaggagaaaggcacataaaaatctcaattctatcttcaaa

SEQ ID NO: 90393 - DNA, 600 bp, Chicken  19866894398298_2
aactgcttttaaacagagaccagttcttagaacagagactgaatacatcatattacattaaccaactttatggcattcctcaaactacaaacttggctgtgttttttttctgatgtctttctttttttaccctcatgctctccactgtgttacagcttgcaagtccactgtatctgtgctgttgaagcaacctcccactgctctagkgcctgccacttcattctgttattaatgctacatacttagcagcagagcttttgtctaagaaaatgaaaggaaagaaaacttatagagttaatkcacaaaaataacaagaataaaaaactacatatgagtacaaagtctcccgcaaaggagcagtaagctttcagaagttgaaactgattatttctcaaaaaaacaattccttatctgtgcaagttacacttgaaaagggggaaggtccccttgcaggaatgggaagaaagaggagaaaggcacataaaaatctcaattctatcttcaaaccatgagtaaaaagagctgtaaactctgctgaaggacagtacagtagctactgtttcattaagtacaatatccgccttacaatatttcgcagtg

SEQ ID NO: 90394 - DNA, 599 bp, Chicken  19866894398300_1
  misc_feature (1)..(161): n is any nucleotide
nnnnnnnnnnnnnnnnnnnnnnnnnnnnnnnnnnnnnnnnnnnnnnnnnnnnnnnnnnnnnnnnnnnnnnnnnnnnnnnnnnnnnnnnnnnnnnnnnnnnnnnnnnnnnnnnnnnnnnnnnnnnnnnnnnnnnnnnnnnnnnnnnnnnnnnnnnnnnnnnntctctgaaggaagtgagtaccccagtagttgatctgcggtatcttttctaccatataggaacacaattgctgtagcaagtctagctccaagtgaactcttggtacttttaagtccctgcaaaactttccaggctctgayatcttgcttttccaggtgtgtttgcttattttttcagtaattagcctgaagctgagccacagaactgcactttctgtaccattctgggtctttcaactcctgctacctcaaataaagaaatgactatgttcagtgtaagagatactgaagtgtggaagcactgccagtgtccatgcatctcattttgtgatcaagcagatttgatcrtgatttggtctcttgaatggacgtttgctctgatatgtgtgcctgtagcagtttgtgaagctgatatgtgaacctgcaggtgtcttaaggag

SEQ ID NO: 90395 - DNA, 600 bp, Chicken  19866894398300_2
tctaccatataggaacacaattgctgtagcaagtctagctccaagtgaactcttggtacttttaagtccctgcaaaactttccaggctctgayatcttgcttttccaggtgtgtttgcttattttttcagtaattagcctgaagctgagccacagaactgcactttctgtaccattctgggtctttcaactcctgctacctcaaataaagaaatgactatgttcagtgtaagagatactgaagtgtggaagcactgccagtgtccatgcatctcattttgtgatcaagcagatttgatcrtgatttggtctcttgaatggacgtttgctctgatatgtgtgcctgtagcagtttgtgaagctgatatgtgaacctgcaggtgtcttaaggagaggagatagatgtttaccccagtaatgggaaattggtctcaaagagcctgttataagcctgtgcaaatagacagccctgcatcccagaatatcactaatgagcttcattccttgttatctttcctcaataatcttctgattttagctgcttactgggcaggatggatgctggcaatggaagttattgaaaacaactgtgctgcctgcc

SEQ ID NO: 90396 - DNA, 600 bp, Chicken  19866894398310_1
gcacactgatgcccctccatttaagttcagttaggaactggcagcctgtttgtgacactacaggcttcaggagaagcatctcataattcagctggtgcagtccatgttgtcaaggcgctttcttacaaagtttccttagctaaacagggaattgctccacaagtattcaattaaggcaagtaacagctcctgttcacaccttatgccttttttcagttcaacagtagttaaaaatacataccaggaaactgacagaaaacctcttggaagatcaaatccagcctctttctacgctcccaktatttctcctgcagcatgcagcacccaaaacagctggctgagaaacgtgactaactgataatgagaagtgtgctgacctgaactgacagacrgactgactgagccttcatggagtgctcacttaaaccatatatggcctcacagatacactgcaacccccacatactgctcctgtacctggcacactcatatacacactggtgactttcaaatcctggtgaagtcagtgcacatagcctcaccaggcagcaccaggccagctcagacagcacaagtgtcttgatccagccagtagctgtc

SEQ ID NO: 90397 - DNA, 600 bp, Chicken  19866894398310_2
tggtgcagtccatgttgtcaaggcgctttcttacaaagtttccttagctaaacagggaattgctccacaagtattcaattaaggcaagtaacagctcctgttcacaccttatgccttttttcagttcaacagtagttaaaaatacataccaggaaactgacagaaaacctcttggaagatcaaatccagcctctttctacgctcccaktatttctcctgcagcatgcagcacccaaaacagctggctgagaaacgtgactaactgataatgagaagtgtgctgacctgaactgacagacrgactgactgagccttcatggagtgctcacttaaaccatatatggcctcacagatacactgcaacccccacatactgctcctgtacctggcacactcatatacacactggtgactttcaaatcctggtgaagtcagtgcacatagcctcaccaggcagcaccaggccagctcagacagcacaagtgtcttgatccagccagtagctgtcctggcagacagcatctgatctaatgaaggttagatgaagacctgtgccacacagaagagccaggagaacacgcatctggaaagggtggaagg

SEQ ID NO: 90398 - DNA, 600 bp, Chicken  19866894398316_1
gcagattttactgttttgttttatattttacaaggtgaatttcattgattgcagcacaacattgttcagtaaatccttctgtcagtgatgtctgtgcagtgtaactgaacaatttagatgtaatttataaataaatccagcattcagctgacaaaatcaccaggtagactagcaaattggctggaattcctggattcagatcacccgatgaggtaatgctttatcctctcacaatgtctactgcagaaattacatttatgctttcagtctatgcagagctttatcttcgcctgcagagckaatgcttgcagaatatttgtactcttgttttgttaaattgtgtttaattatttttttgtggtggggggaaggggtcaggtccttcctcagcttcttttactgggacttgaaactcaaatgttttcagtcttttgagaaatattttctatcaaagggcacaatgatatgttcagaaagttcattcatgattacacgcatcattcatggtttttattcacatataatctcctatttgttttgaaagcttgctcccaaaatattccattgtgctggaaattccccagagcatattccttttac

SEQ ID NO: 90399 - DNA, 600 bp, Chicken  19866894398321_1
agacagaaaaaagggcagtgatattgactaaatattgaatgatgttttccacctcactcttccatctcatattagaactttcaagtgcttttagttgcttttcattagtagcttgttttttctcttccatcatttttgttttgatgcagatgatttatgtttgatccatttctgatgtgttttatcagtttaatcattcttttccttgagtgttatagccttactttaatctgctttagctatatgactgttcttaagaaacatagttgattgagataggaaaaatatcaaaattctctrattatagtagctggaaaaatgttttatcagcagttatcagagttaagcacttatacagaatataayrgacaggtcttgcttttctgttttctactacaagaaattaaaaggctgtgacaatattgacttgctcattagataaacacaataggaacaaaaaagacagaatataatagagattgggatagagcgatgatggcttctcaagactcactgacccattgttacaatttgactcagaatatttattatgtcctacagttccactgagcaggaacaaaaaagctcatacccatcgcc

SEQ ID NO: 90400 - DNA, 600 bp, Chicken  19866894398321_2
tcatattagaactttcaagtgcttttagttgcttttcattagtagcttgttttttctcttccatcatttttgttttgatgcagatgatttatgtttgatccatttctgatgtgttttatcagtttaatcattcttttccttgagtgttatagccttactttaatctgctttagctatatgactgttcttaagaaacatagttgattgagataggaaaaatatcaaaattctctrattatagtagctggaaaaatgttttatcagcagttatcagagttaagcacttatacagaatataayrgacaggtcttgcttttctgttttctactacaagaaattaaaaggctgtgacaatattgacttgctcattagataaacacaataggaacaaaaaagacagaatataatagagattgggatagagcgatgatggcttctcaagactcactgacccattgttacaatttgactcagaatatttattatgtcctacagttccactgagcaggaacaaaaaagctcatacccatcgcctgctgcagctgatatgcatctgacatggtgctgaatgtattgatccacaggtaacagattttataa

SEQ ID NO: 90401 - DNA, 600 bp, Chicken  19866894398321_3
catattagaactttcaagtgcttttagttgcttttcattagtagcttgttttttctcttccatcatttttgttttgatgcagatgatttatgtttgatccatttctgatgtgttttatcagtttaatcattcttttccttgagtgttatagccttactttaatctgctttagctatatgactgttcttaagaaacatagttgattgagataggaaaaatatcaaaattctctrattatagtagctggaaaaatgttttatcagcagttatcagagttaagcacttatacagaatataayrgacaggtcttgcttttctgttttctactacaagaaattaaaaggctgtgacaatattgacttgctcattagataaacacaataggaacaaaaaagacagaatataatagagattgggatagagcgatgatggcttctcaagactcactgacccattgttacaatttgactcagaatatttattatgtcctacagttccactgagcaggaacaaaaaagctcatacccatcgcctgctgcagctgatatgcatctgacatggtgctgaatgtattgatccacaggtaacagattttataag

SEQ ID NO: 90402 - DNA, 419 bp, Chicken  19866894398321_4
ggaacaaaaaagacagaatataatagagattgggatagagcgatgatggcttctcaagactcactgacccattgttacaatttgactcagaatatttattatgtcctacagttccactgagcaggaacaaaaaagctcatacccatcgcctgctgcagctgatatgcatctgacatggtgctgaatgtattgatccacaggtaacagattttataagcaacctttgaaaacttttatatagcactgttgaatttcttccaaacaaaaaaatcaagtgtaagcaaacatagtaaagattcycatcatcaaaacagacagtctgaactgcaatacttaataaaactgggaagcaatataccatacagaatcacaaagttgtagggtttggaagggacctcaagtgatcgagtccaactccc

SEQ ID NO: 90403 - DNA, 600 bp, Chicken  19866894398322_1
gggcaggcttgttcacaaggaaacagtggccctctgatgttattctgctactgagaactatcacagaattcactaatgagtgattacatacttgatggtctgaatatccatgagatgtagttacccgcaagactggatgtttttatcattttgtgtagtgacagcttggacaacaattcatttggctttgaaagcatcagcattaaaatgtaggaatccattaaaacgctgtatgccaggatttataaattaggcaatttccttgattattgcaatcatttacaaaattgattatcccaktgtggtataggcagatttcagcagtgatcattgacaacaggcatgtcctctaatatctatactcattgttctctaaaagaaaagccactccactgctacgttattctccatctcaaggtcaattatgcattgcaagaagtctactagcgtagaagatcacacatctttaaaggaaaactacatcagctctttatagatggcagtgataccttgaaagtgggttctgtgttgatttttcttcccccattgtttgtaatttgcttgctgatggtcaggactttcatttgaaactgtagtgcg

SEQ ID NO: 90404 - DNA, 600 bp, Chicken  19866894398324_1
tagggccacactccatcatattatgcagaccagaataatacataaagttcagatttgttgacaaaaggaagcttccattcctaagtatgtggtaagcagtagagtcatttttgatcaataatctttgaaaaccaaaacaagagcatttatccaaatatagatatcaaatgtaaaattcaaatataactctggattaatatctctggagttcagaggtaagtagcacaatgacttgctgggcctggtatgctgttgtattctagaataaggtttttgtttgttggtttttgttgttgttgktgttgtttttttttttttttttttgtagtcgtgcacgtgtaatagacccctagactaagagaaagaattgtttctgaggtgcatataatgtctgaatcataggattggacatctccaaataaacacattcataacattgtttttaagcaaaattagtatattagccaagatttccagtgaaattcaactactttactggacaagttaattggtaaatatttttacaattctattttgtagtaacaaatctgaatctgcttttctgcaaactatattacttactgttccgttctcagaaga

SEQ ID NO: 90405 - DNA, 599 bp, Chicken  19866894398326_1
  misc_feature (1)..(131): n is any nucleotide
nnnnnnnnnnnnnnnnnnnnnnnnnnnnnnnnnnnnnnnnnnnnnnnnnnnnnnnnnnnnnnnnnnnnnnnnnnnnnnnnnnnnnnnnnnnnnnnnnnnnnnnnnnnnnnnnnnnnnnnnnnnnnnnnnnnagctggcatgctctgttctgtctctgctttgagcacgtggtgcttgacccagtcctgtaagtatgtcctctgctgaatcacaaaaggctacttggatattttggactaagaacatccaaaagctgtccgcctctgaaattgtacatgttgaacaggcatgctgatgtcygtaagatgttatgccttttaaaaggtgacctgtgtgtgtgtgtgaccaagtttttaataaaatcaagcaaaataccattaacgccaaaacccctcacagtttaaaactgtcagggtcttttttcctatttaatttttattgttacacttcctttctctaagaactgtgccagtttctaccttaatctcctgtcttggtataaactyttgtgtttggagcacttctgtttcttttgttgttgttgctgttgttcttatggtggtttcacagcaactgagcaaagcagtgttcaaagccat

SEQ ID NO: 90406 - DNA, 600 bp, Chicken  19866894398326_2
aatcacaaaaggctacttggatattttggactaagaacatccaaaagctgtccgcctctgaaattgtacatgttgaacaggcatgctgatgtcygtaagatgttatgccttttaaaaggtgacctgtgtgtgtgtgtgaccaagtttttaataaaatcaagcaaaataccattaacgccaaaacccctcacagtttaaaactgtcagggtcttttttcctatttaatttttattgttacacttcctttctctaagaactgtgccagtttctaccttaatctcctgtcttggtataaactyttgtgtttggagcacttctgtttcttttgttgttgttgctgttgttcttatggtggtttcacagcaactgagcaaagcagtgttcaaagccattaaatctaagaacttgaatctgcatattactttataagataaaatatacygaagggtgtttggtcatcaagcaactgttacaatccagttagtcagtaaggctgcctcacttggtagaaaatgccaccaccaatgttatagcccttgctgacgtgtaaaacccacaacttctctgactaaattggtatacgttccatttattgtcta

SEQ ID NO: 90407 - DNA, 600 bp, Chicken  19866894398326_3
gtttttaataaaatcaagcaaaataccattaacgccaaaacccctcacagtttaaaactgtcagggtcttttttcctatttaatttttattgttacacttcctttctctaagaactgtgccagtttctaccttaatctcctgtcttggtataaactyttgtgtttggagcacttctgtttcttttgttgttgttgctgttgttcttatggtggtttcacagcaactgagcaaagcagtgttcaaagccattaaatctaagaacttgaatctgcatattactttataagataaaatatacygaagggtgtttggtcatcaagcaactgttacaatccagttagtcagtaaggctgcctcacttggtagaaaatgccaccaccaatgttatagcccttgctgacgtgtaaaacccacaacttctctgactaaattggtatacgttccatttattgtctacgtacagctcatctccagactacactctcagatcttccatatgtaaaaataaattcttgagttgcaaataacattattaaaagaagtgcaccctaaagatctgtctgtcacaaagcacagcatggaagtagcagaaagcaaat

SEQ ID NO: 90408 - DNA, 600 bp, Chicken  19866894398327_1
attaaagagtattggccccaacaccaaccctcggggagcaccactcatcaccaatctccatccagacatggagccattggccatcactctctggactagatccttcagccggttctttaacgattgaacagtcatatccatatctttctaaatttagggctttattggatcctggctaggtccaaagagcagacaaatactagtagatggagtgtattagtacaagggtattcctagagcatgtggcatttcatttaaagggatgaaaatttacttctccaagtaatacttctacagtaygcaatgaagcacagtagatgggaaagactaggagacaatctgcaacagcatgtttctctctcaatggaaacacagtaccatcattcaagcaggaactgaatgtcaattgcagagaaattttgttgttgttgttgttgtttttggttttttttttccagctgttttgactgcatctgaacagttgctgcaatacttattatttacttgctttcacacaaattgagaaccagataattttactctgtagttgtgcttgtttcttatttattatttaaacagaaatggtagctattaatttac

SEQ ID NO: 90409 - DNA, 600 bp, Chicken  19866894398327_2
ttctaaatttagggctttattggatcctggctaggtccaaagagcagacaaatactagtagatggagtgtattagtacaagggtattcctagagcatgtggcatttcatttaaagggatgaaaatttacttctccaagtaatacttctacagtaygcaatgaagcacagtagatgggaaagactaggagacaatctgcaacagcatgtttctctctcaatggaaacacagtaccatcattcaagcaggaactgaatgtcaattgcagagaaattttgttgttgttgttgttgtttttggytttttttttccagctgttttgactgcatctgaacagttgctgcaatacttattatttacttgctttcacacaaattgagaaccagataattttactctgtagttgtgcttgtttcttatttattatttaaacagaaatggtagctattaatttactttggctagttccatgtygatatgctcagtgatataaacaggcaaagatctttgatttacataattctgagtttgggtccattatctctgctgtctctgataaagtctgtcttgcacaaatacttccctatgttcttccatcagc

SEQ ID NO: 90410 - DNA, 600 bp, Chicken  19866894398327_3
tgggaaagactaggagacaatctgcaacagcatgtttctctctcaatggaaacacagtaccatcattcaagcaggaactgaatgtcaattgcagagaaattttgttgttgttgttgttgtttttggttttttttttccagctgttttgactgcatctgaacagttgctgcaatacttattatttacttgctttcacacaaattgagaaccagataattttactctgtagttgtgcttgtttcttatttattatttaaacagaaatggtagctattaatttactttggctagttccatgtygatatgctcagtgatataaacaggcaaagatctttgatttacataattctgagtttgggtccattatctctgctgtctctgataaagtctgtcttgcacaaatacttccctatgttcttccatcagcaatcttctattaaacagaggagatacttaaatcatttgctagaagattgtgcacagaggttgtttacccaagtgtttcaaagcaaagttcattatcatactctttcaatataacatcccccctccctaattaccacatgattacatgtttaatgcataaaatatcagtcattg

SEQ ID NO: 90411 - DNA, 599 bp, Chicken  19866894398331_1
  misc_feature (1)..(85): n is any nucleotide
nnnnnnnnnnnnnnnnnnnnnnnnnnnnnnnnnnnnnnnnnnnnnnnnnnnnnnnnnnnnnnnnnnnnnnnnnnnnnnnnnnnnntcttcctaaatttctgaatacacacattcatgtctagcacagcttggagaaattttaacacaaacacatattgtgagaataacagatgtttcccttacctgtacgtgttggttgctggtactctccagatttgaataccttggagaatcccctcagctccaacgatcacactgaggttggagttcctgtaggcatcattgcattggctctgtgtrgggccataggctccgctagcaccacatgttgtgaacagccagtgatctgaaacgagaacgtagacaaaccatgctctgagcacacaaagatcaagtagctgctctgctcttcatccactctctgttattgcagtatcaagagaagaacttggcccttgaggttttagccagaacaaatattcacacaattctttcaaacgactcacaacaccgtacagctttgacagcttctcatccaaaacttctcaaaactgctacaaccaggagcacggctttactttttctaaggctccaaaaag

SEQ ID NO: 90412 - DNA, 600 bp, Chicken  19866894398341_1
atactaattgtcacatgtgccttaaaacaccaactgtgcaaaactgaatttccctgtggtgcacaacatggctggcccttgagcttttattaatgccattgctccagtttctttgctgcagctgttcagtttaatctttgtgtttaatgctgtggcataaaaggtggtgttggttaaaaatcattgtgtaattttattctctcccttagtagaaggacaaaagttttgctctaacttaagctgtccaatcctattttcctactgtatgagtaaatgtctgacattgtttctttaggcacrcaattaacttttaattatattgaaatgattaatcactgcccaagcccttaatttactcaatagccccctgtgattttaatggaacttcaaaaaaaaagaatgttatgttgtccctagcaggtatgttaatgtaaatgtgagaaaatattgttgacaacagaccaacacccgtagtgggtatgaaataacttatgcatttcagcactgcaaggttacactgaagttctgcctcagcttgtccattactcattgtgtgattctggttgtgatgttggatgcagttgtcctcatatttttcat

SEQ ID NO: 90413 - DNA, 600 bp, Chicken  19866894398356_1
attatcatccagtcagcaaaacgaagccttaaggaattaggatggaggaggtgaccctcatacatggtttgcttgagagcagactgcttcacagtcgtgatggctgaggtctgagagactcaaaaatgcgtgtacagacatggcgacagcctcaacctgaggagtgagactgaacttggcatattgagggtaggatttaaaacccctgagacaagcaagtaactgtcagtttgagatattgcagaaagtgctcccagcgagtgttgcgggcacagagcagtcatggcctgttaggccccygagcaaccagccacaagtcatcttctcccagcccctgtgctggtagcaagaaagggagcagaaatgacactgctgttcacagagagcatggcagttcctagaaagcaaagcctgtaacttcttctgaaacatgaagccggacgatcaagtgctgcagcctgtccctcaacagagattttggaactggcagtcaggctcacagatgcagatgtgctatggtggaagcggtggcaagtgtacaactttccttgctcgaagtcagtcagcagccactgccaagtgtttcagcaggcccagaag

SEQ ID NO: 90414 - DNA, 368 bp, Chicken  19866894398358_1
aaccacaaagtcactaactgtattttgcttgcctaaggctttacctaacatacatattttgatcaaaatttgcaaagtttaattattttccaagggagccagaaagagaactaacttaagatctgcactgctttgtctttttgttttcatatacacaaagaattctcagtgattcgtaaaagtgctaaaataatgattaataacccaaataaagccattaaaactgttctcaactaaaattttacaagacaaagtattttaattgaaaaaatcctagcatatcactgttaatctgacagyctttcccaagtaatttgtaaagatgttcaaacatgagctgaatgtccagaagctctaccactgtattt

SEQ ID NO: 90415 - DNA, 600 bp, Chicken  19866894398359_1
caggaaaaaaaaagaagcttatataaaaagaacttttaataaaccataaatacacttcaattgccatgaagttatattaaaagaaattataaaatatccttgctaaagaaaatttcatttcacactgacaatagtggactgaaaaagatatctgatttttttgatgttattttgggcatttttcctcagctgcccagttgctgcttgctgaatagaagaaacttaagtaggaaatgaaaaaaaaaatgctacatggaactttgtggtaagtgttgcttctcaaaaccaagagactagcakagcatggtatctcacttaatgtagttgcacattatgttattttcttatagtagcaagggaagagaggcacatctcctttaggtctcatcctttttcattatcagctgtattcaccttttaattttcagagtcacaaaatcttaggggttggaaagggcctctggagatcatctagtctactccccctgataagactagttctctacagtaagttgacatgacagcattcaagagggttttgaatatctctggagaagaagattccaccatctctctagacagcctattccagaactctgt

SEQ ID NO: 90416 - DNA, 600 bp, Chicken  19866894398371_1
tgctacatcacgacactgactaagctgaaggccagagtcaggccacagaagaagacaacctctcttgcaacacaataacaccaggcctcataccagcttgaagaccatggagcacatggccaatcttggctgaaccgtcctaccatgcctaccatatagtctaaacttggcaacttttgacttttatctgtttgggccaatgaaagattgactgcatgggcaacgagttcctagcaacgatgctgccatagcagctgtgaaacagtgggtcaccttcactggtacagattttgatgagcrtggcgtgcaggctcttgttcatcactgatgaaaatgcacagctaatggtggtgactatgttgaaaagtagtgttttgtagctaagaatttgctatatctaatactgttattgtgctctttgtatctgttgtagtttcaatggaaataaacagaggcattactttcggaataacctatgtacttgaagagatttgaacctaagcaagaccaattacataaggcgccccacagtgaggaaaacatttcatctgtgaagctgaggttgrtggtggtggtgatgctcatcagtgctctttgaaa

SEQ ID NO: 90417 - DNA, 600 bp, Chicken  19866894398371_2
gggtcaccttcactggtacagattttgatgagcrtggcgtgcaggctcttgttcatcactgatgaaaatgcacagctaatggtggtgactatgttgaaaagtagtgttttgtagctaagaatttgctatatctaatactgttattgtgctctttgtatctgttgtagtttcaatggaaataaacagaggcattactttcggaataacctatgtacttgaagagatttgaacctaagcaagaccaattacataaggcgccccacagtgaggaaaacatttcatctgtgaagctgaggttgrtggtggtggtgatgctcatcagtgctctttgaaactcgtggagtttaggtacttctgctcagcctgcagcacaaagcatgcgatgctggtctttccagkgatgttgtttctggtatttctgcatattggtattgtcaaacatcacttgctcagtgagctcygtatccacatactcatttcttcactaggactttgatggtagcaagtggttaatcagcaaatagtcccaaaagcagaaagggtaagattaccgttttaagtaggaatattcaaggtaatggggcatgttagagtactttc

SEQ ID NO: 90418 - DNA, 600 bp, Chicken  19866894398371_3
agtagtgttttgtagctaagaatttgctatatctaatactgttattgtgctctttgtatctgttgtagtttcaatggaaataaacagaggcattactttcggaataacctatgtacttgaagagatttgaacctaagcaagaccaattacataaggcgccccacagtgaggaaaacatttcatctgtgaagctgaggttgrtggtggtggtgatgctcatcagtgctctttgaaactcgtggagtttaggtacttctgctcagcctgcagcacaaagcatgcgatgctggtctttccagkgatgttgtttctggtatttctgcatattggtattgtcaaacatcacttgctcagtgagctcygtatccacatactcatttcttcactaggactttgatggtagcaagtggttaatcagcaaatagtcccaaaagcagaaagggtaagattaccgttttaagtaggaatattcaaggtaatggggcatgttagagtactttcagcatattgctaaaagatatacaagatgatggataaaccagtaaactttgatactgccaatgtgaaagtctagagctattacatttctttatgaatagc

SEQ ID NO: 90419 - DNA, 600 bp, Chicken  19866894398371_4
ttgtagtttcaatggaaataaacagaggcattactttcggaataacctatgtacttgaagagatttgaacctaagcaagaccaattacataaggcgccccacagtgaggaaaacatttcatctgtgaagctgaggttgrtggtggtggtgatgctcatcagtgctctttgaaactcgtggagtttaggtacttctgctcagcctgcagcacaaagcatgcgatgctggtctttccagkgatgttgtttctggtatttctgcatattggtattgtcaaacatcacttgctcagtgagctcygtatccacatactcatttcttcactaggactttgatggtagcaagtggttaatcagcaaatagtcccaaaagcagaaagggtaagattaccgttttaagtaggaatattcaaggtaatggggcatgttagagtactttcagcatattgctaaaagatatacaagatgatggataaaccagtaaactttgatactgccaatgtgaaagtctagagctattacatttctttatgaatagcatacaccaactaacatcttactttctaaaaagtatacttgttccactgtggtttatagaaca

SEQ ID NO: 90420 - DNA, 600 bp, Chicken  19866894398372_1
tctatgtagttctttgctcttgtagtaaaaattctatagtatgctcttgccataggaatgactggaaaaataactgttaataaaacttgtagtctgtgggctaattgatttttttgaagaaacaaaatggacttcaaccaagcattaatagttaataggcattaatatgtgaaagttgctttttgagattataagtatttgtttgcttgtaatcgggattaaacctaaatgtagtgggtaatgattacgtgaatggcagtgctaaatggagactttttaaatggactactttttttaatygctgtgttctgcactccaaaaatcacggagaaggaatggctgaaggccacatgcccaggactatctcctagttgagtgatgtggggagatatttgcagcactgcctctgcagatttcttctcatcctcctgttacggtgaagcctaagaacaaaaaggaagttgttttctaaaagctgaagttcaaaatctatgctgcatttcttcaccacttcagtcctttccagagtttctgacttctgtggttggggtccactgaagggaagtgaggaaaaaattgtgttttcatagtgaatatctg

SEQ ID NO: 90421 - DNA, 600 bp, Chicken  19866894398377_1
tttaaggtataagcaggaataacagagacaaaaagacaaaatgtgggaaaaagcctcacttaatacctgagtaatagcaactgtgtcagcacaaattaaagcaagtttagttttcattttttattataagaaagcatcagaggtttctacaatgttacttttactttttcagttcctttacagcatctgatatgaactaaatgaatccatgtgtaatggtccaaatctgccacagattttagtgagttactctaatatggtggcagatggtgtaaatctgtgcaaaaatttggctttagrtrttaattgaaatctgtgttgttttcagggacttgtatgcatgcaatccatgagttccatctgaaatcataatttttttttcatctccttggatgaaagcttgagcttcatttagcctcgcagactattccttgccttgaggttgtcattagtcttcgttctgagttagaaataagtgtatgctaggaagtcagagggtggaaactagtgacaggcagtcattaaaagacaagtttggtaattcaaagaaagatttcmwtggaccaaaatctaacgagtgctgcatagtaaggcagtttt

SEQ ID NO: 90422 - DNA, 600 bp, Chicken  19866894398377_2
taaggtataagcaggaataacagagacaaaaagacaaaatgtgggaaaaagcctcacttaatacctgagtaatagcaactgtgtcagcacaaattaaagcaagtttagttttcattttttattataagaaagcatcagaggtttctacaatgttacttttactttttcagttcctttacagcatctgatatgaactaaatgaatccatgtgtaatggtccaaatctgccacagattttagtgagttactctaatatggtggcagatggtgtaaatctgtgcaaaaatttggctttagrtrttaattgaaatctgtgttgttttcagggacttgtatgcatgcaatccatgagttccatctgaaatcataatttttttttcatctccttggatgaaagcttgagcttcatttagcctcgcagactattccttgccttgaggttgtcattagtcttcgttctgagttagaaataagtgtatgctaggaagtcagagggtggaaactagtgacaggcagtcattaaaagacaagtttggtaattcaaagaaagatttcmwtggaccaaaatctaacgagtgctgcatagtaaggcagttttat

SEQ ID NO: 90423 - DNA, 524 bp, Chicken  19866894398377_3
ggtggcagatggtgtaaatctgtgcaaaaatttggctttagrtrttaattgaaatctgtgttgttttcagggacttgtatgcatgcaatccatgagttccatctgaaatcataatttttttttcatctccttggatgaaagcttgagcttcatttagcctcgcagactattccttgccttgaggttgtcattagtcttcgttctgagttagaaataagtgtatgctaggaagtcagagggtggaaactagtgacaggcagtcattaaaagacaagtttggtaattcaaagaaagatttcmwtggaccaaaatctaacgagtgctgcatagtaaggcagttttatcagaccttcatttgagaatggcttgagaggtgggcttggcaaaatgcactcagtgagcttggacaaacttgacctgattgtttgacacatcgtggaggaacaaaggccaggaaacaggactctggattaagtacagctgaattctactcatcagtgaggagacaaattcaacagcgtaag

SEQ ID NO: 90424 - DNA, 523 bp, Chicken  19866894398377_4
gtggcagatggtgtaaatctgtgcaaaaatttggctttagrtrttaattgaaatctgtgttgttttcagggacttgtatgcatgcaatccatgagttccatctgaaatcataatttttttttcatctccttggatgaaagcttgagcttcatttagcctcgcagactattccttgccttgaggttgtcattagtcttcgttctgagttagaaataagtgtatgctaggaagtcagagggtggaaactagtgacaggcagtcattaaaagacaagtttggtaattcaaagaaagatttcmwtggaccaaaatctaacgagtgctgcatagtaaggcagttttatcagaccttcatttgagaatggcttgagaggtgggcttggcaaaatgcactcagtgagcttggacaaacttgacctgattgtttgacacatcgtggaggaacaaaggccaggaaacaggactctggattaagtacagctgaattctactcatcagtgaggagacaaattcaacagcgtaag

SEQ ID NO: 90425 - DNA, 600 bp, Chicken  19866894398389_1
tttagccaagtcaagtacttcaaaaataaccccatggttccttcctatgctactcattacatatctctgttttcactactgcaataaatcttaaaaaaaaaaaaaagagaaatctgctctctgatagataaaatgaccaacatatggctttgcaggtactgacagtgagatgtagtatgtgagagataaaaattgtttccaggtatgataataataaagtctttctctgaaagtaagctagtgggttcatatttacaaaggaaaaatcagagactgaaacaaaatattgagatattccakgcaagaatctgactctcatgattactatttttctatatgcttttttttaatttgtcccatatcttcatgtaagcaaagccttccccccctccccctctggcaagattattgtgatttttatttctatyatcagtcatttactctttgttgtatgaaaataagaaatgatgaaaaawtaagtatttgagtgaaaatgttttttaaatacttaggaaacgtacaagctttaagctttttgaagtactgggaggttcagataaggtattaagagatcttgttctattcaatttcccttcagtg

SEQ ID NO: 90426 - DNA, 600 bp, Chicken  19866894398389_2
taaaatgaccaacatatggctttgcaggtactgacagtgagatgtagtatgtgagagataaaaattgtttccaggtatgataataataaagtctttctctgaaagtaagctagtgggttcatatttacaaaggaaaaatcagagactgaaacaaaatattgagatattccakgcaagaatctgactctcatgattactatttttctatatgcttttttttaatttgtcccatatcttcatgtaagcaaagccttccccccctccccctctggcaagattattgtgatttttatttctatyatcagtcatttactctttgttgtatgaaaataagaaatgatgaaaaawtaagtatttgagtgaaaatgttttttaaatacttaggaaacgtacaagctttaagctttttgaagtactgggaggttcagataaggtattaagagatcttgttctattcaatttcccttcagtgctaacaactgcaaaagcccagattctgttgttctttccggttcttccatttatatgtcgtgtagaatgtttttttcataggaagtagtctccagtcaagcttgtagctattacgcacctgccaaattt

SEQ ID NO: 90427 - DNA, 600 bp, Chicken  19866894398389_3
atgtgagagataaaaattgtttccaggtatgataataataaagtctttctctgaaagtaagctagtgggttcatatttacaaaggaaaaatcagagactgaaacaaaatattgagatattccakgcaagaatctgactctcatgattactatttttctatatgcttttttttaatttgtcccatatcttcatgtaagcaaagccttccccccctccccctctggcaagattattgtgatttttatttctatyatcagtcatttactctttgttgtatgaaaataagaaatgatgaaaaawtaagtatttgagtgaaaatgttttttaaatacttaggaaacgtacaagctttaagctttttgaagtactgggaggttcagataaggtattaagagatcttgttctattcaatttcccttcagtgctaacaactgcaaaagcccagattctgttgttctttccggttcttccatttatatgtcgtgtagaatgtttttttcataggaagtagtctccagtcaagcttgtagctattacgcacctgccaaatttgggcctgaactccactgtgtctgtattatacccatttatcaagtcatg

SEQ ID NO: 90428 - DNA, 600 bp, Chicken  19866894398390_1
ttctccttcaggaataaaggaggagcctatcctcacatactgaaagtagactgagacctttaaatatctatgtgcttgaaggcaaaatgaattgtggttagtttatttcaatgtctcttaaacaatggaatatttcttcaggcatggttttccattgcttcattgtcctcactattgcacagcagtcttcaaatgctaaaatttgagtccattaactattcatcatcttgcttctcattgcagaacatttctaaatagttgaaagaaaacaacaatttttgctatttcttttttgtaaaytaccatactccggaaattcttcattttttttaccatagtccatgttttctgaactctaatcatcctcactgctttttaagttttccacaatctttcttaaagtgaagttcactctttaaatagtaatcccactgaaacagtactagttccaagtataaggaaaattattttaattttgaataccacattcttgtctaagtacttcagtatactttgccttcttttcttctgaaacaatacaatattgttggcttgtaagcaactggtgatgaacccatgaattcaagtctcttagatgag

SEQ ID NO: 90429 - DNA, 600 bp, Chicken  19866894398400_1
aagtgataaaacaacaaatgaacagcagcaagaatacagaatcaggagaatcatcttaccttccaacttgtcatttcagtaaaagcttcagagatacagatcagcctgattaagtctttgttacagagatgtgttggcatgtgccagttttgctctctgcctccagtatttctgctagaaagtcactccagaataacacagttataaacttgttttaatattcaaaattaatggaagtacagaccacatctacccatcaatatctacattaccttcagtttaaatagcctttcatttgcrcaaccaccacactgcttgtacagcctgcctatccctccttaatgtatttatggaagacaacaatatgctttctcaatcttcccatacccatattggtaggacagataagacagggtcttgattcataaaacagttctgtacttcccttatgtacaaaattgaaataaatatcaactaaaagcctctagctgaagaagaatcatctaaattaaaatagctatccatgtaccacccacacaggatggaagtgaggtcactgcagcctcagcccataagaccagactgagaggagcagctcct

SEQ ID NO: 90430 - DNA, 577 bp, Chicken  19866894398402_1
cagtaaccgtgcctcctttactggaggtactgcagatttgaagtaacgtaagtgagaggaaataagtcttctgatatttatattggaagagttgtgacgtacagaaaaagaggtaaaattcagtcttgctgactgttaaagccggtgtttctaactcgccgcaatttcgcagtcacttaaattattcaaagtcacatgaggctacggggactaaaactcaaaggaaaaagataagcctaacacaggcacgcataaactgttttctgcctacagcctcagccctgcaaatatttctagaawcttgaactgaccactgggagcatgttttaattcctaayattgctagcttggtcaccagttgtatgacttgaacgatctttagcaagaacctcagaggataggacatattcgtagggcataatyttagttcaatcttggatatttaatagatgattccttcagtagtccagctgtgatgtgcttagttaccctagtagcttaaaactagcatttccattttagtgtcttgaaaggagatcagagctgaagcagaaacgatttctggttttgtgtcata

SEQ ID NO: 90431 - DNA, 539 bp, Chicken  19866894398402_2
cagtaaccgtgcctcctttactggaggtactgcagatttgaagtaacgtaagtgagaggaaataagtcttctgatatttatattggaagagttgtgacgtacagaaaaagaggtaaaattcagtcttgctgactgttaaagccggtgtttctaactcgccgcaatttcgcagtcacttaaattattcaaagtcacatgaggctacggggactaaaactcaaaggaaaaagataagcctaacacaggcacgcataaactgttttctgcctacagcctcagccctgcaaatatttctagaayattgctagcttggtcaccagttgtatgacttgaacgatctttagcaagaacctcagaggataggacatattcgtagggcataatyttagttcaatcttggatatttaatagatgattccttcagtagtccagctgtgatgtgcttagttaccctagtagcttaaaactagcatttccattttagtgtcttgaaaggagatcagagctgaagcagaaacgatttctggttttgtgtcata

SEQ ID NO: 90432 - DNA, 454 bp, Chicken  19866894398402_3
cagtaaccgtgcctcctttactggaggtactgcagatttgaagtaacgtaagtgagaggaaataagtcttctgatatttatattggaagagttgtgacgtacagaaaaagaggtaaaattcagtcttgctgactgttaaagccggtgtttctaactcgccgcaatttcgcagtcacttaaattattcaaagtcacatgaggctacggggactaaaactcaaaggaaaaagataagcctaacacaggcacgcataaactgttttctgcctacagcctcagccctgcaaatatttctagaayttagttcaatcttggatatttaatagatgattccttcagtagtccagctgtgatgtgcttagttaccctagtagcttaaaactagcatttccattttagtgtcttgaaaggagatcagagctgaagcagaaacgatttctggttttgtgtcata

SEQ ID NO: 90433 - DNA, 599 bp, Chicken  19866894398403_1
  misc_feature (1)..(78): n is any nucleotide
nnnnnnnnnnnnnnnnnnnnnnnnnnnnnnnnnnnnnnnnnnnnnnnnnnnnnnnnnnnnnnnnnnnnnnnnnnnnnnatatgcagccagccaatgtggaattgaaagaagaaggatcaatcaaattgtgaaggaaaaaaaagtctcagtcacaaatgaaacgaaacaaaacaacaaaaaaaaaaccaacaacaacaaaaaaacacaacaaaaaagggtagggaagaacagatgaaaacgaaaaccatttctgtaaataggaacactcaaaaaaacccaccacaacccaataccatgcamcacacagaaaaacgttactttaaagaccctaaaagcaagggttaggaaccaaatgaaaaagctgttctattgaaacatacacaaagccaaaaccacgatgtactccacaatgaaactgacgtgtaaaccttcatcctttggagcagcccrtcttactggtcctgctggaactgctggcaccatgatcccggcactgcttcatggctgtggtcmgagcacaacacactgctgcatgcagcaccagaccagccaggcccttatgctacctgctgtgcctctgcccgcttctactcagtcag

SEQ ID NO: 90434 - DNA, 600 bp, Chicken  19866894398403_2
cacaaatgaaacgaaacaaaacaacaaaaaaaaaaccaacaacaacaaaaaaacacaacaaaaaagggtagggaagaacagatgaaaacgaaaaccatttctgtaaataggaacactcaaaaaaacccaccacaacccaataccatgcamcacacagaaaaacgttactttaaagaccctaaaagcaagggttaggaaccaaatgaaaaagctgttctattgaaacatacacaaagccaaaaccacgatgtactccacaatgaaactgacgtgtaaaccttcatcctttggagcagcccrtcttactggtcctgctggaactgctggcaccatgatcccggcactgcttcatggctgtggtcmgagcacaacacactgctgcatgcagcaccagaccagccaggcccttatgctacctgctgtgcctctgcccgcttctactcagtcagagatgctacatacatggcccagtggctcaagtccctgtctgcacttgagattttgttatttagtaatctaataaacgataacatctgaagtgcatatrggggccaacacaacccaaacaatcagacgaaagcaagcggagattaatacacc

SEQ ID NO: 90435 - DNA, 600 bp, Chicken  19866894398403_3
aagggtagggaagaacagatgaaaacgaaaaccatttctgtaaataggaacactcaaaaaaacccaccacaacccaataccatgcamcacacagaaaaacgttactttaaagaccctaaaagcaagggttaggaaccaaatgaaaaagctgttctattgaaacatacacaaagccaaaaccacgatgtactccacaatgaaactgacgtgtaaaccttcatcctttggagcagcccrtcttactggtcctgctggaactgctggcaccatgatcccggcactgcttcatggctgtggtcmgagcacaacacactgctgcatgcagcaccagaccagccaggcccttatgctacctgctgtgcctctgcccgcttctactcagtcagagatgctacatacatggcccagtggctcaagtccctgtctgcacttgagattttgttatttagtaatctaataaacgataacatctgaagtgcatatrggggccaacacaacccaaacaatcagacgaaagcaagcggagattaatacacctggtttaaagatcccatggaaagattttagcaaaagctacacttgaccatgatctggtttgga

SEQ ID NO: 90436 - DNA, 600 bp, Chicken  19866894398403_4
atgtactccacaatgaaactgacgtgtaaaccttcatcctttggagcagcccrtcttactggtcctgctggaactgctggcaccatgatcccggcactgcttcatggctgtggtcmgagcacaacacactgctgcatgcagcaccagaccagccaggcccttatgctacctgctgtgcctctgcccgcttctactcagtcagagatgctacatacatggcccagtggctcaagtccctgtctgcacttgagattttgttatttagtaatctaataaacgataacatctgaagtgcatatrggggccaacacaacccaaacaatcagacgaaagcaagcggagattaatacacctggtttaaagatcccatggaaagattttagcaaaagctacacttgaccatgatctggtttggaatagcacacatttctaactcaagtgcaagcacaaattttggttccaactgcattacgtgaaacagatgcrctctgaggaataagccaatacctccaaatgacatagcaacccatgaatgtggcagcacaggtgaatactagattgggagtttctgctctgctggccatgggtagataagcctta

SEQ ID NO: 90437 - DNA, 507 bp, Chicken  19866894398403_5
gcttctactcagtcagagatgctacatacatggcccagtggctcaagtccctgtctgcacttgagattttgttatttagtaatctaataaacgataacatctgaagtgcatatrggggccaacacaacccaaacaatcagacgaaagcaagcggagattaatacacctggtttaaagatcccatggaaagattttagcaaaagctacacttgaccatgatctggtttggaatagcacacatttctaactcaagtgcaagcacaaattttggttccaactgcattacgtgaaacagatgcrctctgaggaataagccaatacctccaaatgacatagcaacccatgaatgtggcagcacaggtgaatactagattgggagtttctgctctgctggccatgggtagataagccttacagtctttaagaacagcatcatacagccaggaacaattggagtgacagcaggcatcccacctggactcactattgaggtttgcattttgatga

SEQ ID NO: 90438 - DNA, 600 bp, Chicken  19866894398404_1
ttaccctggggaaaaaagaggtgaacagctgggagttttccagcatctccttggagcccttctgacagatctcagtccctgaagtgtcaggttactggacggggaactgcttttattataagagggtcagtagggaattctggcattttcaattacccgctcgcaggagcggctgtgatccggggtcaggattaactgcgtgacctccagctgaagacggagtggtagggaaatgcagcatgatgctgcaaggcaccagctagtccggaggccaagggacagggcagaaaatggggagayggggagaaagctgctctctctggtgagaccaaagggtgwtgctgtgcagcgaggaggacgtgctgtgatcagtcatggagcaccggcttccctgagcctgaagtcgcagggcctggtgacatctaggctgggatccaggctccacagtgcatgaaagaaaagttggaaatgacagaaaggcacagtgcctccatgcagggctatgggcagctcagacacatgtgcctgcctccctgtgggcagagatgacgtctgaaggacgatcccctttgagagtgcagtaaaatgccctgagatgtc

SEQ ID NO: 90439 - DNA, 600 bp, Chicken  19866894398404_2
ccagcatctccttggagcccttctgacagatctcagtccctgaagtgtcaggttactggacggggaactgcttttattataagagggtcagtagggaattctggcattttcaattacccgctcgcaggagcggctgtgatccggggtcaggattaactgcgtgacctccagctgaagacggagtggtagggaaatgcagcatgatgctgcaaggcaccagctagtccggaggccaagggacagggcagaaaatggggagayggggagaaagctgctctctctggtgagaccaaagggtgwtgctgtgcagcgaggaggacgtgctgtgatcagtcatggagcaccggcttccctgagcctgaagtcgcagggcctggtgacatctaggctgggatccaggctccacagtgcatgaaagaaaagttggaaatgacagaaaggcacagtgcctccatgcagggctatgggcagctcagacacatgtgcctgcctccctgtgggcagagatgacgtctgaaggacgatcccctttgagagtgcagtaaaatgccctgagatgtcccagacccacagcagtgattgccttcttaccaccactga

SEQ ID NO: 90440 - DNA, 600 bp, Chicken  19866894398408_1
ttgggttctgatttaagtatctactgaaataacctttaaaaaattttagttgcttaatacagttgaagaaaccacaaaagatgtatctggtctccatgcaaaactggaccgtaagaaagctgttgatcagcacaatgctattgtccaaaatacattcgcacaacaaatgactgatttgttcaacaaaatacaagattcagttaatgagaacagtgtgaagcagcaacagatgctgacgtcttacacaaattttataggtaagtgtaatacctgtatgtgagggtcatcctgatatattgyaatagtactatcaaagatcagcattttaaaatggacccattttagtaaatagattaagctttgttttaaacaatgtaatgattatataataatgtgtctgggatgatcagctaagagtactaagttttgtaacgcttcatgatttcttttgcaggtgacatcttgtctaccagctcttcagcatctaatattcttacatcagttgtatcagcatcttttgcctctcttaaggagttggtgtctactgaagtttcctgcatgtctgaaaaagtattacaacacgagaatctgtcacttgat

SEQ ID NO: 90441 - DNA, 600 bp, Chicken  19866894398412_1
ctgatactgtcataacttaataagtaataatttcacagactccttgcctccccagaggagcttttggtgccatctgactcactaagaaataagcattttaaaatagataacaatagtgaagaaattagtcagatttaataaggcgcagtcttttggaattatacagcatcctgctccctctttcccataacagctagggaattgccagagcccccagctgatatcacagcattttttgttgtctcctgatgcatatagagtgtaattatctcaatatacaaaaggtctaggatttgtacraggagcaaaagcgtattattggtgagcaggcactcaacccaaatgatcacatatactgtgtcattaataatattctaaatcctctctttaacttttgtggcacagattgttaacagtaatagtcaaagcaaataaagactcatawgcagatctcacagatgttttaaggtaccgatttagtctattatttaaaacaagcttattttctcaytggggccaaggcagttcatatattttgtcagcagaggttcacaggatggctttgatcctactcaaagcagtccaaacaggaggatgtct

SEQ ID NO: 90442 - DNA, 600 bp, Chicken  19866894398412_10
tgggctatcactactacatgcaactatgtagacagatcttaatataaatgatggtaaaaggctatcaatatgaacactgaagtttgaagtaaggaaatatccaatacagaggagactcacttctgctttaagcatctggcatttctagaatataattttactgaaacctaagtgactgacagaaagattggaaacatctgaaggtattgatgtaatggctggtttttattccttagctatgtgtcattctagtaataccaagtctatgcagcatatcattaagtagagcattgaagttcytgttgaataacaaccaggtgtaaattccttctggtacttctgctgacatacagttctgaggaccgatttggttctgtacttctcatctgttttgattctgaattatatcagctggaaaccagctccatatgtcatgatctccaatccattactcattttgatgtgctacagtggatcatttcagtgtttttgatggaactggtgagaccaaaatatatgtggtatttcaggtgtagcttaacaagttacaattgaaatggaataataatcacataccttgttttaattagcaagaatatc

SEQ ID NO: 90443 - DNA, 600 bp, Chicken  19866894398412_2
cagtcttttggaattatacagcatcctgctccctctttcccataacagctagggaattgccagagcccccagctgatatcacagcattttttgttgtctcctgatgcatatagagtgtaattatctcaatatacaaaaggtctaggatttgtacraggagcaaaagcgtattattggtgagcaggcactcaacccaaatgatcacatatactgtgtcattaataatattctaaatcctctctttaacttttgtggcacagattgttaacagtaatagtcaaagcaaataaagactcatawgcagatctcacagatgttttaaggtaccgatttagtctattatttaaaacaagcttattttctcaytggggccaaggcagttcatatattttgtcagcagaggttcacaggatggctttgatcctactcaaagcagtccaaacaggaggatgtcttactccagtctatgccttgcctctctttcttgctactgcccttccatctttctggtgctcatctgtagtccaggaagatggttctgaaggatagttttaaacttggaagagttttcccarcagccaatgttcatttgtcttgcga

SEQ ID NO: 90444 - DNA, 600 bp, Chicken  19866894398412_3
ccccagctgatatcacagcattttttgttgtctcctgatgcatatagagtgtaattatctcaatatacaaaaggtctaggatttgtacraggagcaaaagcgtattattggtgagcaggcactcaacccaaatgatcacatatactgtgtcattaataatattctaaatcctctctttaacttttgtggcacagattgttaacagtaatagtcaaagcaaataaagactcatawgcagatctcacagatgttttaaggtaccgatttagtctattatttaaaacaagcttattttctcaytggggccaaggcagttcatatattttgtcagcagaggttcacaggatggctttgatcctactcaaagcagtccaaacaggaggatgtcttactccagtctatgccttgcctctctttcttgctactgcccttccatctttctggtgctcatctgtagtccaggaagatggttctgaaggatagttttaaacttggaagagttttcccarcagccaatgttcatttgtcttgcgaaattttatcctaagattatgtcatgaagtggcacagtgtacacagargactgtcaagcaagcatca

SEQ ID NO: 90445 - DNA, 600 bp, Chicken  19866894398412_4
agtcaaagcaaataaagactcatawgcagatctcacagatgttttaaggtaccgatttagtctattatttaaaacaagcttattttctcaytggggccaaggcagttcatatattttgtcagcagaggttcacaggatggctttgatcctactcaaagcagtccaaacaggaggatgtcttactccagtctatgccttgcctctctttcttgctactgcccttccatctttctggtgctcatctgtagtccaggaagatggttctgaaggatagttttaaacttggaagagttttcccarcagccaatgttcatttgtcttgcgaaattttatcctaagattatgtcatgaagtggcacagtgtacacagargactgtcaagcaagcatcaggtggcaagagaagtgtaattttaattgtaagagcttttcatattggataattaaaatgaatattggccggtcaaaagtgcaaaaagatacagattttgtaagcctctctggcatcatagaggaagcacgcaaaagaatctttgcataaaaaacaagcaaatgcttcaaacactctgttggcaggcagagcatttcaaaacaggaggaa

SEQ ID NO: 90446 - DNA, 600 bp, Chicken  19866894398412_5
aacaagcttattttctcaytggggccaaggcagttcatatattttgtcagcagaggttcacaggatggctttgatcctactcaaagcagtccaaacaggaggatgtcttactccagtctatgccttgcctctctttcttgctactgcccttccatctttctggtgctcatctgtagtccaggaagatggttctgaaggatagttttaaacttggaagagttttcccarcagccaatgttcatttgtcttgcgaaattttatcctaagattatgtcatgaagtggcacagtgtacacagargactgtcaagcaagcatcaggtggcaagagaagtgtaattttaattgtaagagcttttcatattggataattaaaatgaatattggccggtcaaaagtgcaaaaagatacagattttgtaagcctctctggcatcatagaggaagcacgcaaaagaatctttgcataaaaaacaagcaaatgcttcaaacactctgttggcaggcagagcatttcaaaacaggaggaagaaactgttttgggtatgaaaacatactttacagttcatattagtgcactggaactaaatagcctctggaaa

SEQ ID NO: 90447 - DNA, 600 bp, Chicken  19866894398412_6
cactggaactaaatagcctctggaaaacaggcctaattatgaaggaagggtattttcttaagaatgaaaaacaaagcaaagctatatctccttctatatgttctatatttgactagataagtccacagagattggatattcaagcaagtagacaaagtcagtgaatgcaaataagcaattaaggatatgcctgcagtgccatctgtagtagagtaatatttaagccaccttttctttttgatgtgatcctatattgacacattatgaacctcctgactatgatttcagatttcaggcgtrttgcatttcaggccatagaatcttgtaaatttatgtcatagtcaagctaggggatttttaagtgcaaactacagcattatggttgtttactataatgaaaatgctcaaatctaggcaatgtagaatgtctgctgrcagaagttctttcyaatgttccattgtgggtgatgttcatgcagctcatgcttgacaaatcttttgtataaagacttctaagactgaagtgttaaatgctatcaactcttattaataagaatatgagtttaaacactgtgtgtacatttgtggatcaaatacaca

SEQ ID NO: 90448 - DNA, 600 bp, Chicken  19866894398412_7
atattcaagcaagtagacaaagtcagtgaatgcaaataagcaattaaggatatgcctgcagtgccatctgtagtagagtaatatttaagccaccttttctttttgatgtgatcctatattgacacattatgaacctcctgactatgatttcagatttcaggcgtrttgcatttcaggccatagaatcttgtaaatttatgtcatagtcaagctaggggatttttaagtgcaaactacagcattatggttgtttactataatgaaaatgctcaaatctaggcaatgtagaatgtctgctgrcagaagttctttcyaatgttccattgtgggtgatgttcatgcagctcatgcttgacaaatcttttgtataaagacttctaagactgaagtgttaaatgctatcaactcttattaataagaatatgagtttaaacactgtgtgtacatttgtggatcaaatacacaaagctgtctggtagagtgtttgccaaaaactgatggtatttaagatgaaggcaaccatcacagactagagtagaaacaggagcagtcacaagctagtttgacactgccaaatgctgtagtgctgccatcacactt

SEQ ID NO: 90449 - DNA, 600 bp, Chicken  19866894398412_8
agacaaagtcagtgaatgcaaataagcaattaaggatatgcctgcagtgccatctgtagtagagtaatatttaagccaccttttctttttgatgtgatcctatattgacacattatgaacctcctgactatgatttcagatttcaggcgtrttgcatttcaggccatagaatcttgtaaatttatgtcatagtcaagctaggggatttttaagtgcaaactacagcattatggttgtttactataatgaaaatgctcaaatctaggcaatgtagaatgtctgctgrcagaagttctttcyaatgttccattgtgggtgatgttcatgcagctcatgcttgacaaatcttttgtataaagacttctaagactgaagtgttaaatgctatcaactcttattaataagaatatgagtttaaacactgtgtgtacatttgtggatcaaatacacaaagctgtctggtagagtgtttgccaaaaactgatggtatttaagatgaaggcaaccatcacagactagagtagaaacaggagcagtcacaagctagtttgacactgccaaatgctgtagtgctgccatcacacttctgcttcagctaca

SEQ ID NO: 90450 - DNA, 600 bp, Chicken  19866894398412_9
aaacactgtgtgtacatttgtggatcaaatacacaaagctgtctggtagagtgtttgccaaaaactgatggtatttaagatgaaggcaaccatcacagactagagtagaaacaggagcagtcacaagctagtttgacactgccaaatgctgtagtgctgccatcacacttctgcttcagctacagagcagtaacctcactggccaagcagggacccacactttgggtttgtgatcatgagctcatgcaatgcttcctcatcagcatgggctagtgagaaaacattgtgaagaacagcacrcgtatctataaagcacccatgtctctttacaggactatgcaagtagggccacacacatttctgaaatggtccttgtaatccatatattctgtgaaaaagggatggctgtgatagtaaccatgggaatgtatgattttatgtgtatttgtgaccagaatgtttggtgactggttaaatatttagaaaattgtaggtgcttactaacatttttggaactggctagtatagttatttctgtgttgtgttactgatactgaccctggaaatggatgactactagtcagttacatgttattaata

SEQ ID NO: 90451 - DNA, 531 bp, Chicken  19866894398414_1
aagcgttgatagaccaatgggtccattaaagttcaattccaaattctctcttctggtcatatagctcacttactgtggccaattttgaactctgagaagaaaaattaaataaattgtcctattcattaacatgaagcttcaacagtgggaatgccagggctaattgagtcatgaatgagtattttggctgccgtctaagtgccaggcattatcaaaatgctggtcttactaagccaattaaacatttgaatttgctagcatagtgaagttaggcaccatgggaattacgacttcctgtcwgatacrtctttgcccacacgcttgtgttaagtattatcatgaaggcttaataacctgccttttaactcagtgttttttttattgccttctgcctggcttagtgcaaagccagtggatggggctcatcttgtaagcagcaattccacagcacatttgctctctgtttttcagcatgggtctccaagctctgcttgggggctgcagctgtaacaaggtattgacagatttcca

SEQ ID NO: 90452 - DNA, 525 bp, Chicken  19866894398414_2
tgatagaccaatgggtccattaaagttcaattccaaattctctcttctggtcatatagctcacttactgtggccaattttgaactctgagaagaaaaattaaataaattgtcctattcattaacatgaagcttcaacagtgggaatgccagggctaattgagtcatgaatgagtattttggctgccgtctaagtgccaggcattatcaaaatgctggtcttactaagccaattaaacatttgaatttgctagcatagtgaagttaggcaccatgggaattacgacttcctgtcwgatacrtctttgcccacacgcttgtgttaagtattatcatgaaggcttaataacctgccttttaactcagtgttttttttattgccttctgcctggcttagtgcaaagccagtggatggggctcatcttgtaagcagcaattccacagcacatttgctctctgtttttcagcatgggtctccaagctctgcttgggggctgcagctgtaacaaggtattgacagatttcca

SEQ ID NO: 90453 - DNA, 600 bp, Chicken  19866894398419_1
ctccccaaatgctctacaacatagccaacagaaagaactatatgtacagtaatgtagtctgaatataatttatttaagttaaagacattgtatttaattcctttatataaaggtctgaacactgtagagttgctgttttcatgacaatggctagtaaaaagagaagcaaaacctggttaacaccaccatctagcctcttacacttttggctacaacagttcccaggatttagctataatcccatcattaataaagactatgtaacagatatatatctatatttatatccactctcacacrtagctcacagacaggtaggtgcagggtaattttcctgcaaagttagagtggaaccagaatggcaaatttctgyctaccatgccatcgtgtttcatctgttattgtcaagatagtgaagaaatcctacgctattatttcattttcagaaaactgaactttcttgcaatacttcaactaaggtacatatccagaactctgtaaaccaaggagatgctcctaaatctatttctggcctaagatggaacgctaacctcgaagtcaattaactgcaaagaaaaacattttsattgaagccgattc

SEQ ID NO: 90454 - DNA, 600 bp, Chicken  19866894398419_2
ttaagttaaagacattgtatttaattcctttatataaaggtctgaacactgtagagttgctgttttcatgacaatggctagtaaaaagagaagcaaaacctggttaacaccaccatctagcctcttacacttttggctacaacagttcccaggatttagctataatcccatcattaataaagactatgtaacagatatatatctatatttatatccactctcacacrtagctcacagacaggtaggtgcagggtaattttcctgcaaagttagagtggaaccagaatggcaaatttctgyctaccatgccatcgtgtttcatctgttattgtcaagatagtgaagaaatcctacgctattatttcattttcagaaaactgaactttcttgcaatacttcaactaaggtacatatccagaactctgtaaaccaaggagatgctcctaaatctatttctggcctaagatggaacgctaacctcgaagtcaattaactgcaaagaaaaacattttsattgaagccgattctcaaggcactcaagagactgcacgctctgcaagtaagagcagagggaatgatacaaacagaaaaactctatta

SEQ ID NO: 90455 - DNA, 600 bp, Chicken  19866894398419_3
tccactctcacacrtagctcacagacaggtaggtgcagggtaattttcctgcaaagttagagtggaaccagaatggcaaatttctgyctaccatgccatcgtgtttcatctgttattgtcaagatagtgaagaaatcctacgctattatttcattttcagaaaactgaactttcttgcaatacttcaactaaggtacatatccagaactctgtaaaccaaggagatgctcctaaatctatttctggcctaagatggaacgctaacctcgaagtcaattaactgcaaagaaaaacattttsattgaagccgattctcaaggcactcaagagactgcacgctctgcaagtaagagcagagggaatgatacaaacagaaaaactctattacgagaccattcctacaaatgcagacctagaaatgcactgatctttcctgtgacccttttaagagagtgaagtttgtgaagtctttggttttgtaagcataagattttagtgcacttcccaaaaaacacaatacactttgtagctgttcactgaaacaaaccaatctagacaaatatttgaagactattttcttcagtctcgcagttcaatttc

SEQ ID NO: 90456 - DNA, 600 bp, Chicken  19866894398435_1
ctttttttttttttcctgatttcagcactgctggatacattctctccacactgctccagcaattctgcttcagaagcaggatctgagcataggttgccatgctccaaatggtgcccattttccttcttgaggaaaacccttctaatcttaactggaccgcttccaaacggagggctgcaataccaggctgcctttcaaaatatcacatgccatgttatttaaaaacagcttgccaacatttttcatgtgaatgaccatcgcattaaaaagtaatttgaaaaaggaattcaaggttcttgyaacttacagataatcttctattaagatggcataagaagaagaaacattacagaaacagctatgtaaatataattcattcaataaaaatgtaaataagattcatagaatagacatagaaaccttgaaatatttattttaaatgacagggattaagtcctcaacttgtaagtccagtattgttgaggctgctgtgttttattttatttattttttaggaactgactctttcataactattttagcctactctggcatctactactgctttttttcccccttcttttttaatgacttctgatg

SEQ ID NO: 90457 - DNA, 600 bp, Chicken  19866894398436_1
ataaaaaagaggcgattacctcaaaaagctctgcatagcagtagtagagtattattaaaactcacaaccgcttctatactttataaacacaccaccttcaaataaatccccatcccagtgtgtgtcctgtgctgtttgggctgttcacaacctaagctccctggccaagcaaccctgtttgtcctgtatgattccaactgtgcttcccctccactggtggcccacatggaactgcaaaaagtttaaatgctgttgaatcgtaaaggttggaaatgaccactgcaactctctagtccaacygtcgacccatcaccattgtgctcactaaaccatatccctaaatatccatgaggagtgaaggatggagagtccaggcagacgctgcccgctgataaactcagttaaagcaaagcccaggggaacggtcattgcaatttgtaatcaacacttttagtttttacacaatatctttttctgttttaatctaaatgctccttccccctgccccccaaatcactaagcaaggacagccaagcccctgtgctccattgcacatgagttttactccacttgataggcagaagctgctcagaaaagcca

SEQ ID NO: 90458 - DNA, 576 bp, Chicken  19866894398437_1
ttagaacacaatagtaagtttttatctctctactcaacatgtccattaaggaggcaatactgggtatgacagcatgaataggcagcatgacctcatttaactctatagtccactgtcattctccatgtcccatctgactttcttactggtcatatgggggaattacacgggctatgtgcaggtcttataatgcccattttctctaattccttcatcgttcttggtatttcatcttgcctacccaggagtctatattgcctaacattggtaatctgtcgtggttttggcaggcaaataggytcttgcttcgcatggactcttaatattgcctgcaccgcccagatactaatacacctttgttgaagtctgaattctcccacagtcatttggagagccagaccccacaacatatctatgcccaggatgtattcttgcactggggcaatagataccttatactcctgaggtgggagacgtccaatccccagttttaaccatgtctgggtgactggaatggtttctcccccaaaacctccaatcatcagtctatcgacatcgaattggtcagatcaccat

SEQ ID NO: 90459 - DNA, 600 bp, Chicken  19866894398441_1
tttcatagtaatgtacaatacaatatacatagtaatatagtctagtattatcaaatatctagtgatttagggggacatagagatcagagatcccattagaactttccatcaatttaaatacatccttctttacagatgatgactgctgatgtataagcagtcccataatttagcttttcttaataactacagcaactcgtagctgtttgttaaggtgtcagaggcagcattctgcagtggttgtgccttccttttcaaagccagcactttcttttttatgatattatagtccataatatrcaaggggcaaatcatacaatcaactgttactttagtgtatmtttttctgtattttaaaaacatctctatctttcttgcatctctagttcttttctggctatacagaacagaaatggttaaagcatagctttgaattagatagcttagtaatggtaagccttgctactccacagtggtattcagaatggttttttaatcctgttctttgaaatttgtactccagttactatttcactcaatacctaatttawaactagcaatttacactatggttggaactcctgatttctgagtaggcaa

SEQ ID NO: 90460 - DNA, 600 bp, Chicken  19866894398441_2
ctagtattatcaaatatctagtgatttagggggacatagagatcagagatcccattagaactttccatcaatttaaatacatccttctttacagatgatgactgctgatgtataagcagtcccataatttagcttttcttaataactacagcaactcgtagctgtttgttaaggtgtcagaggcagcattctgcagtggttgtgccttccttttcaaagccagcactttcttttttatgatattatagtccataatatrcaaggggcaaatcatacaatcaactgttactttagtgtatmtttttctgtattttaaaaacatctctatctttcttgcatctctagttcttttctggctatacagaacagaaatggttaaagcatagctttgaattagatagcttagtaatggtaagccttgctactccacagtggtattcagaatggttttttaatcctgttctttgaaatttgtactccagttactatttcactcaatacctaatttawaactagcaatttacactatggttggaactcctgatttctgagtaggcaaattccttttaagccactgcaaaccatgacttacatatcaaa

SEQ ID NO: 90461 - DNA, 600 bp, Chicken  19866894398441_3
ttttcaaagccagcactttcttttttatgatattatagtccataatatrcaaggggcaaatcatacaatcaactgttactttagtgtatmtttttctgtattttaaaaacatctctatctttcttgcatctctagttcttttctggctatacagaacagaaatggttaaagcatagctttgaattagatagcttagtaatggtaagccttgctactccacagtggtattcagaatggttttttaatcctgttctttgaaatttgtactccagttactatttcactcaatacctaatttawaactagcaatttacactatggttggaactcctgatttctgagtaggcaaattccttttaagccactgcaaaccatgacttacatatcaaataccatttcagagcttccaagtatgctctctttttctctccrcatttgctttcttatatctttatattcagaattccatggtaggactatttctctaaatggtaaaaaaaacatcaatgagtgatgtaaaagagtaagaaatgtccttttatcttccatttttgaaaataaaaaaaaaaaatcttgtcttttggcagaacttacgggtac

SEQ ID NO: 90462 - DNA, 600 bp, Chicken  19866894398441_4
tagttcttttctggctatacagaacagaaatggttaaagcatagctttgaattagatagcttagtaatggtaagccttgctactccacagtggtattcagaatggttttttaatcctgttctttgaaatttgtactccagttactatttcactcaatacctaatttawaactagcaatttacactatggttggaactcctgatttctgagtaggcaaattccttttaagccactgcaaaccatgacttacatatcaaataccatttcagagcttccaagtatgctctctttttctctccrcatttgctttcttatatctttatattcagaattccatggtaggactatttctctaaatggtaaaaaaaacatcaatgagtgatgtaaaagagtaagaaatgtccttttatcttccatttttgaaaataaaaaaaaaaaatcttgtcttttggcagaacttacgggtacatactgtgtttctatgcacagtaaaacagtagtttgagctataatttattctatgaaaaattgagagaaataatgatcagtgtttcatgtaatgctttgttggttgtttcgctattggtaccatcaaaaacc

SEQ ID NO: 90463 - DNA, 600 bp, Chicken  19866894398441_5
gtaaaagagtaagaaatgtccttttatcttccatttttgaaaataaaaaaaaaaaatcttgtcttttggcagaacttacgggtacatactgtgtttctatgcacagtaaaacagtagtttgagctataatttattctatgaaaaattgagagaaataatgatcagtgtttcatgtaatgctttgttggttgtttcgctattggtaccatcaaaaacccattccaatctcaggtgttttagggaaaacaaaactagagttgagacaggaattttatataataaacacttatgaaaggtctrtgttctacatttcttcactcctttatgtgagaagttatttactctctgagagatgtgttctatcagggtaccttgcagttcggaataaaatgtaattagggactggttcctaggaaccaatgagcagcttaagccactaatcagtgtttttgctccttatctgctctgggtcaagttgtgaagtcagtgtyttacgctttggctgcctcaaggtctacatatacttcagggcttcattgaactagcagtacacaagtgtacaaaaaataacccatttgggcttttgccatgaaaaatgtg

SEQ ID NO: 90464 - DNA, 600 bp, Chicken  19866894398441_6
tttcgctattggtaccatcaaaaacccattccaatctcaggtgttttagggaaaacaaaactagagttgagacaggaattttatataataaacacttatgaaaggtctrtgttctacatttcttcactcctttatgtgagaagttatttactctctgagagatgtgttctatcagggtaccttgcagttcggaataaaatgtaattagggactggttcctaggaaccaatgagcagcttaagccactaatcagtgtttttgctccttatctgctctgggtcaagttgtgaagtcagtgtyttacgctttggctgcctcaaggtctacatatacttcagggcttcattgaactagcagtacacaagtgtacaaaaaataacccatttgggcttttgccatgaaaaatgtgaagtcagtttttgaatgttgactaaaatctcattactttggtggcaaatgagccatgaaacatattgtcaaaaatatagagcccgaaatacagtggcactaaatattttatcttcatggaatgtactacaaaaggtttgaactctaaatcagtcagggcacttaagcacacaccatcattcatcaaatgca

SEQ ID NO: 90465 - DNA, 599 bp, Chicken  19866894398468_1
  misc_feature (1)..(112): n is any nucleotide
nnnnnnnnnnnnnnnnnnnnnnnnnnnnnnnnnnnnnnnnnnnnnnnnnnnnnnnnnnnnnnnnnnnnnnnnnnnnnnnnnnnnnnnnnnnnnnnnnnnnnnnnnnnnnnnntatgttcccttgtttagccaaaggaaattgtttaaagcgcatgactttgtgaagtctagaagagataaaggaagagctgggtgctgctcaaagagattagtgctagggaaataatgacagacttttagttatgcaagtattagggagcactgccatggtaagagtgtaagctgtgctagcagagtctrtaataggatcaagctggataaaactttctccttatgcatgaaggagcgctttcataagtcagtgttcttctgttataatccttgaggtctaattcaagaaaagttcatcatatgagattttcattcaaagagactagtgcagcctgaaaagcagggcaggacttaccagctcatgtttcagcgtgcacttasatttttgaaagaaaatgttgrtgtaaacgaaggaaaaaaatatctrttttgaagtatttgaaggctctaatggttgtttttgtgcactgcacaaattactgctggga

SEQ ID NO: 90466 - DNA, 600 bp, Chicken  19866894398468_2
gtgctgctcaaagagattagtgctagggaaataatgacagacttttagttatgcaagtattagggagcactgccatggtaagagtgtaagctgtgctagcagagtctrtaataggatcaagctggataaaactttctccttatgcatgaaggagcgctttcataagtcagtgttcttctgttataatccttgaggtctaattcaagaaaagttcatcatatgagattttcattcaaagagactagtgcagcctgaaaagcagggcaggacttaccagctcatgtttcagcgtgcacttasatttttgaaagaaaatgttgrtgtaaacgaaggaaaaaaatatctrttttgaagtatttgaaggctctaatggttgtttttgtgcactgcacaaattactgctgggagctgtgrgagagaggaaaaggaacacaactgcctcttcccaccagtacccctcccaaaactttgatacccctgagtgcaatgaggagctgaaagcacaacagaattcacatacagcctggaccactgtaacaaccrtgacaaaatgatatgcctttgataaacaaaacacagtaatggaaagtttggctatcc

SEQ ID NO: 90467 - DNA, 600 bp, Chicken  19866894398468_3
gctagggaaataatgacagacttttagttatgcaagtattagggagcactgccatggtaagagtgtaagctgtgctagcagagtctrtaataggatcaagctggataaaactttctccttatgcatgaaggagcgctttcataagtcagtgttcttctgttataatccttgaggtctaattcaagaaaagttcatcatatgagattttcattcaaagagactagtgcagcctgaaaagcagggcaggacttaccagctcatgtttcagcgtgcacttasatttttgaaagaaaatgttgrtgtaaacgaaggaaaaaaatatctrttttgaagtatttgaaggctctaatggttgtttttgtgcactgcacaaattactgctgggagctgtgrgagagaggaaaaggaacacaactgcctcttcccaccagtacccctcccaaaactttgatacccctgagtgcaatgaggagctgaaagcacaacagaattcacatacagcctggaccactgtaacaaccrtgacaaaatgatatgcctttgataaacaaaacacagtaatggaaagtttggctatcctttgcgatcatctcttctgag

SEQ ID NO: 90468 - DNA, 600 bp, Chicken  19866894398468_4
agttatgcaagtattagggagcactgccatggtaagagtgtaagctgtgctagcagagtctrtaataggatcaagctggataaaactttctccttatgcatgaaggagcgctttcataagtcagtgttcttctgttataatccttgaggtctaattcaagaaaagttcatcatatgagattttcattcaaagagactagtgcagcctgaaaagcagggcaggacttaccagctcatgtttcagcgtgcacttasatttttgaaagaaaatgttgrtgtaaacgaaggaaaaaaatatctrttttgaagtatttgaaggctctaatggttgtttttgtgcactgcacaaattactgctgggagctgtgrgagagaggaaaaggaacacaactgcctcttcccaccagtacccctcccaaaactttgatacccctgagtgcaatgaggagctgaaagcacaacagaattcacatacagcctggaccactgtaacaaccrtgacaaaatgatatgcctttgataaacaaaacacagtaatggaaagtttggctatcctttgcgatcatctcttctgaggatatggaacagtatacaattaaaa

SEQ ID NO: 90469 - DNA, 600 bp, Chicken  19866894398468_5
gatcaagctggataaaactttctccttatgcatgaaggagcgctttcataagtcagtgttcttctgttataatccttgaggtctaattcaagaaaagttcatcatatgagattttcattcaaagagactagtgcagcctgaaaagcagggcaggacttaccagctcatgtttcagcgtgcacttasatttttgaaagaaaatgttgrtgtaaacgaaggaaaaaaatatctrttttgaagtatttgaaggctctaatggttgtttttgtgcactgcacaaattactgctgggagctgtgrgagagaggaaaaggaacacaactgcctcttcccaccagtacccctcccaaaactttgatacccctgagtgcaatgaggagctgaaagcacaacagaattcacatacagcctggaccactgtaacaaccrtgacaaaatgatatgcctttgataaacaaaacacagtaatggaaagtttggctatcctttgcgatcatctcttctgaggatatggaacagtatacaattaaaatatccagaaagactatccaagaaagtcactaattctatcttttactgtattctcagtgaaatttgttt

SEQ ID NO: 90470 - DNA, 600 bp, Chicken  19866894398468_6
agtgcagcctgaaaagcagggcaggacttaccagctcatgtttcagcgtgcacttasatttttgaaagaaaatgttgrtgtaaacgaaggaaaaaaatatctrttttgaagtatttgaaggctctaatggttgtttttgtgcactgcacaaattactgctgggagctgtgrgagagaggaaaaggaacacaactgcctcttcccaccagtacccctcccaaaactttgatacccctgagtgcaatgaggagctgaaagcacaacagaattcacatacagcctggaccactgtaacaaccrtgacaaaatgatatgcctttgataaacaaaacacagtaatggaaagtttggctatcctttgcgatcatctcttctgaggatatggaacagtatacaattaaaatatccagaaagactatccaagaaagtcactaattctatcttttactgtattctcagtgaaatttgtttccagtctatttttcttcaaagatggtagtctttgaaagaagtctttgaaagactttgaaagtctttgaaagactaccatcttcggatggtagaaaaactctttcctacccaaagtgatgaatattgcct

SEQ ID NO: 90471 - DNA, 599 bp, Chicken  19866894398473_1
  misc_feature (1)..(183): n is any nucleotide
nnnnnnnnnnnnnnnnnnnnnnnnnnnnnnnnnnnnnnnnnnnnnnnnnnnnnnnnnnnnnnnnnnnnnnnnnnnnnnnnnnnnnnnnnnnnnnnnnnnnnnnnnnnnnnnnnnnnnnnnnnnnnnnnnnnnnnnnnnnnnnnnnnnnnnnnnnnnnnnnnnnnnnnnnnnnnnnnnnnnnnncggtgcactgttggtaaacttatacaaaaacccagaaaataagtgtatgtgtgcatgtctgtggctttgtttatttttaaagcattgatgttgacaaagtatgaggaccaaagaatrtttgggacagtgttacaaaygtgaaaaatggtactctaagcttcaagcttagagacaatctgtgcaaggaaactgcaacctctttggctttgtgtgggtatgtttcagaagtttgagatctttacctgtttcatatcagcctcgtaggacatgtcaaagaatttgacaaatgagaattccttccaattttacacctgattcttaacttgtaactgtggtctcctaggttcagcacttcgagacaaacactgatgtggattccagactcctttttttccaggtatttgtaagagctaatt

SEQ ID NO: 90472 - DNA, 599 bp, Chicken  19866894398473_2
  misc_feature (1)..(163): n is any nucleotide
nnnnnnnnnnnnnnnnnnnnnnnnnnnnnnnnnnnnnnnnnnnnnnnnnnnnnnnnnnnnnnnnnnnnnnnnnnnnnnnnnnnnnnnnnnnnnnnnnnnnnnnnnnnnnnnnnnnnnnnnnnnnnnnnnnnnnnnnnnnnnnnnnnnnnnnnnnnnnnnnnnncggtgcactgttggtaaacttatacaaaaacccagaaaataagtgtatgtgtgcatgtctgtggctttgtttatttttaaagcattgatgttgacaaagtatgaggaccaaagaatrtttgggacagtgttacaaaygtgaaaaatggtactctaagcttcaagcttagagacaatctgtgcaaggaaactgcaacctctttggctttgtgtgggtatgtttcagaagtttgagatctttacctgtttcatatcagcctcgtaggacatgtcaaagaatttgacaaatgagaattccttccaattttacacctgattcttaacttgtaactgtggtctcctaggttcagcacttcgagacaaacactgatgtggattccagactcctttttttccaggtatttgtaagagctaattttttgccatagatattttta

SEQ ID NO: 90473 - DNA, 479 bp, Chicken  19866894398473_3
ctttgtgtgggtatgtttcagaagtttgagatctttacctgtttcatatcagcctcgtaggacatgtcaaagaatttgacaaatgagaattccttccaattttacacctgattcttaacttgtaactgtggtctcctaggttcagcacttcgagacaaacactgatgtggattccagactcctttttttccaggtatttgtaagagctaattttttgccatagatatttttattccttactgctttttccacaccacgagcaataggatggattcatctgaaatgagctggtatccaaawtgcttcttctgtcttraatgatgcactggcagcttacatgtgctgaacagttgtcactcctcagatggactgtcctggaaatatgggtacaaatctgtgggaaagggagatatgactgactctgttgttatagtgccacttgtgattttattgaccatgcgtagtagcaccatctttat

SEQ ID NO: 90474 - DNA, 463 bp, Chicken  19866894398473_4
ttcagaagtttgagatctttacctgtttcatatcagcctcgtaggacatgtcaaagaatttgacaaatgagaattccttccaattttacacctgattcttaacttgtaactgtggtctcctaggttcagcacttcgagacaaacactgatgtggattccagactcctttttttccaggtatttgtaagagctaattttttgccatagatatttttattccttactgctttttccacaccacgagcaataggatggattcatctgaaatgagctggtatccaaawtgcttcttctgtcttraatgatgcactggcagcttacatgtgctgaacagttgtcactcctcagatggactgtcctggaaatatgggtacaaatctgtgggaaagggagatatgactgactctgttgttatagtgccacttgtgattttattgaccatgcgtagtagcaccatctttat

SEQ ID NO: 90475 - DNA, 600 bp, Chicken  19866894398474_1
ggctgctgttcactttttttggagcggagactcttaggggcatctcttgagggctttgcaaatgaaaaacaacatatagaagccaagtgctattttgcattgtgttcttttggcgtataattaagattttgttgcttagagtcggtagtgtcccaagtgccattaaaaaagaagagacaatttgtaattctgtccgtgtgagagttaaacagagtcactcgcatttattttcatcactacagaattaaagatcaggatggaaactgcctggccgaaagttgcatcgtacgcgttcttctmgctttaattaaaataatctgcactacagaggtttgattcccatcagttgcatgtgcacacgcctgccctggatttttttccacacttcagactgagcgaaataagctggtgttccttcatcttaacgcctatccaagcctgcgcrgggctgatgagagcagagatccgacgtgggagtggccctgcgccctggagtgctgctgtgacccaggaagttgtacacgggctgttcatcatttccactctcataattttattatacgagttttgtcacttgctckctaacgcttcttttttttt

SEQ ID NO: 90476 - DNA, 600 bp, Chicken  19866894398474_2
tagtgtcccaagtgccattaaaaaagaagagacaatttgtaattctgtccgtgtgagagttaaacagagtcactcgcatttattttcatcactacagaattaaagatcaggatggaaactgcctggccgaaagttgcatcgtacgcgttcttctmgctttaattaaaataatctgcactacagaggtttgattcccatcagttgcatgtgcacacgcctgccctggatttttttccacacttcagactgagcgaaataagctggtgttccttcatcttaacgcctatccaagcctgcgcrgggctgatgagagcagagatccgacgtgggagtggccctgcgccctggagtgctgctgtgacccaggaagttgtacacgggctgttcatcatttccactctcataattttattatacgagttttgtcacttgctckctaacgcttctttttttttcttttaatctgcagcttctctgtttttcagttaatccatgacctcatctgaacagagattagctcgcggctgccccttgctctctagttttcttctctccgttgcaggtttgttatcagtaactgtaaaagtgagtgtgactaaa

SEQ ID NO: 90477 - DNA, 503 bp, Chicken  19866894398474_3
catcgtacgcgttcttctmgctttaattaaaataatctgcactacagaggtttgattcccatcagttgcatgtgcacacgcctgccctggatttttttccacacttcagactgagcgaaataagctggtgttccttcatcttaacgcctatccaagcctgcgcrgggctgatgagagcagagatccgacgtgggagtggccctgcgccctggagtgctgctgtgacccaggaagttgtacacgggctgttcatcatttccactctcataattttattatacgagttttgtcacttgctckctaacgcttctttttttttcttttaatctgcagcttctctgtttttcagttaatccatgacctcatctgaacagagattagctcgcggctgccccttgctctctagttttcttctctccgttgcaggtttgttatcagtaactgtaaaagtgagtgtgactaaaaccccgatccccagagcactctgtgaccctcgcgtaggg

SEQ ID NO: 90478 - DNA, 600 bp, Chicken  19866894398475_1
gttttaccagtataataattcatacttcaggcataagaattccagagaatgttgtcttttttccttttttattccatggatttaaagtttcctggactgctctgtttatggcacagtaatgctgggttggcactgcaccgccctgctccgagttgtaagccattgaattgaaatgcaacaattacaagaacttagatggagggcacccattccgaggaaactacagtaaatgagatgcttagatgtgtgtttatggagtgcaagttagtctcaggaaggaaaactcagttcactgttacyagctgtgctcaggtttgaaggggtgaaagagaaaatagacttggtgcttgctttcctgggcaatgtcaatgaaagccacctgaatgcatgcagacagagtatttaatctgttcctgttcctagactttgcggtgatggattctctataaataaataaagactcaagagatttagtaaggtgctggaggaaggtgatcacaatttgtcttgactaaaagctttgtggtagcaatatccataaactgtatgctaatatgttgtcccctctgccctgaaattaaatatgaagatatttctttc

SEQ ID NO: 90479 - DNA, 600 bp, Chicken  19866894398478_1
atttagaacaaagtcagtcagcatatcttttgcatatttgggaaacactgtctgaatttttcatccctgcataggatgccatcaagatcaaattaaatctgacttcacattaatttacatgtatatactttggaaatggaattttctgttcagatgatgaagtccattgtaaataactgtttatttttcactataaattgtaattatttaaggctaaaagctgccaaaacaattctactctctataaaatcctccactgcacttttcttagaagtgaatcttactattattttgatccarcttgcatcmagtattactcattcctgatcaaactatgaaatttaatctaccaagtacatgttccttcttgctcagttactcatgtccttgctgcaaatctatggatgaatttaatttcaactaggtagtggtagatataaactagcaaacactttggtcaagagaattatctttgcttttttcagcctttgaccatactttatgttactaaatcatacagtacttcatcgttactaatttgtacacagtagtccttttttcaatatctctaagacaaataatttctatgtaaaacatcag

SEQ ID NO: 90480 - DNA, 600 bp, Chicken  19866894398478_2
aaagtcagtcagcatatcttttgcatatttgggaaacactgtctgaatttttcatccctgcataggatgccatcaagatcaaattaaatctgacttcacattaatttacatgtatatactttggaaatggaattttctgttcagatgatgaagtccattgtaaataactgtttatttttcactataaattgtaattatttaaggctaaaagctgccaaaacaattctactctctataaaatcctccactgcacttttcttagaagtgaatcttactattattttgatccarcttgcatcmagtattactcattcctgatcaaactatgaaatttaatctaccaagtacatgttccttcttgctcagttactcatgtccttgctgcaaatctatggatgaatttaatttcaactaggtagtggtagatataaactagcaaacactttggtcaagagaattatctttgcttttttcagcctttgaccatactttatgttactaaatcatacagtacttcatcgttactaatttgtacacagtagtccttttttcaatatctctaagacaaataatttctatgtaaaacatcagaaaaagcta

SEQ ID NO: 90481 - DNA, 600 bp, Chicken  19866894398479_1
cagcttactctttttccagcatggcacacaaactgaaaaaaaaaaaaactttcatctgcttggcacatgcccatggtattcagtgtaaacatatcgctgtgtgacatctgaacaagttataccaagtgtgcattccttgtagagtgaaagtagggtaattcttccctctgtgaagatggattgggtgaaaggtgcttaattggagtaaagggttactgttaggaatgtacctcatctcttccagctgttcatactgttaatatgcagtacattcttttccctcttaggcattacaccagsgagagagaatgagttttggctggtcttcatgcagtgatagccctgagttcgtggctttgatcacaagggtggtaaaccagcagcaagctcaattgttctaatgctttccctaatcctgacaaccaaagtagctcttgctaatgtctgtcaacattaaacatatgtgattaacacacagtaaaaccgaaactttgccctacttaggtgaatttcctaccaaggagaacagccgctcccccctgaaacattgtctagtttatctagctgatagctttgtctttttgatatgatactccttga

SEQ ID NO: 90482 - DNA, 550 bp, Chicken  19866894398483_1
taggtttcttccttgtgtttgtttgcatctcttctagcaccagtctgtccttgttcgaccctaaccaagcccagctacataattccacctaactccacaactttcacccaatttctcctaactgtgaatttgaaagacacaaagtttacaaacttagagagttttctcaccactgcaagacttacagaatgtggtcttttgcaagcaaagcttgcctacttgctcttagttcaatcataaccactgattttcatattcatatggaaacagtgggatttaagagcagattcagatgacagyaaaggcagtggaggatagttaacaagatcagggagagggagggagaaaagacaaattgttccagagcagcccagcagaattccaataataagtgcttcacattcagccattgctataagtggtctggcagctctggctctgaaggacatagcagtagcagagagaattttcagtcaaaatcctgctcctgcccacctttacgaaactactaatgttacaacccaagcttttcttacacgaatataaagag

SEQ ID NO: 90483 - DNA, 600 bp, Chicken  19866894398484_1
gtgggcaaaggatctcagctccccactgggctccgctatcctacggcagtgctgtgcgttttctgggtatgcaatccatcagactaccccaaaacctgtcagagggtgctgcgagcccccagcaggatgctcagagcccggcttcacaggttgggctgcatccagctcccagatctgggacacctggcaacaaccatcctcccagcaagggatgtttatgcttggagtgtttctaccatggtgctgacagcactggcggtgctagcacaaacctcagtaggtgatgtgctccatcaagtycagctctgagagctatataaagacacgaggaatcagagcttctcctcaagaatgcacctcacaggtggttggacatttgttccattacagcgtggggaggagaaagcctctatcccggtaaccaaccagaacaggagagctgtgcagcatgctgaatccaaggggatcctgaaaaggtctcctcatttgggtttggattgctcttgatttttgaacgcttctaagcggtgattctgctgatggctttagctctgctcagctctctccctgtctgtgctaagaggacgctgcccctcgctt

SEQ ID NO: 90484 - DNA, 600 bp, Chicken  19866894398490_1
ttatttctgccttggtgctgctttccccacttagatatctaagtgctttttggatatgtaattgctcaaccctactgaaacactactgcattcttgtcagggctgcaattctgtgaagtgtcatcttgagtcctttactgcttagagtgttaaagctacagtatgatagcagaacacatttcacctcatgttttgagtaacatattccttgtaattgcttataggctggactgcccagtggatttgccctaacaaaaaatcttcatccttcttgtaccatccaagccattcagattcttwatagtactcatctcttactccctcactcatatttcttccaccttgctgacaacttcccacaaagataatatcagttccaaagctcttccttaatcctcaattatttttccaaagtttacagtagaattaaatttaatacatatcccttagaggaaatatgacacttgctgaaaattgcatcagatatcttaagccctgggtgctttgaaatgtgggtggtacttgcaaatcctggatggtatgtctaaatgtgagacctgattgaatgcttccactcacagttggagttggtgggttaag

SEQ ID NO: 90485 - DNA, 600 bp, Chicken  19866894398490_2
gggttaagaggcagtctttcaaatcactggaaagtgctaagttaatatcaagagttaacttaccaaaattccaacagatgtggcatgaacatcagttaggaggtatgattctgcattctgtggtgcttgaagtttagaggtggataaattcagtgctgctgtgaagcaggactgaagtagagtcgggagagacagatgaacgtggctgtttcaaggtctagaaatatgcagggacttcagttacctgttctattactgtaaagccaatttataacaattacatcttcagaaaatgtcccrccttcagtcaagatgtgcttcttctatggcttctgcaggatttctgtcttctgggctgaatgtcaatattgtccttgaaagactaagtttagatacttatcagaaaccattgtacctggcattttatgttgctatttactcgtgctttagtaagccatctttctaagtgttgwtagtcagaacatgagcaaatacaaggatttcagtgaattgagcttgctttggatgtggccctgagttattgcttttgctagcatctggtagctgtcaaagctcatgtactgtctggatagagatgac

SEQ ID NO: 90486 - DNA, 600 bp, Chicken  19866894398490_3
gaagtagagtcgggagagacagatgaacgtggctgtttcaaggtctagaaatatgcagggacttcagttacctgttctattactgtaaagccaatttataacaattacatcttcagaaaatgtcccrccttcagtcaagatgtgcttcttctatggcttctgcaggatttctgtcttctgggctgaatgtcaatattgtccttgaaagactaagtttagatacttatcagaaaccattgtacctggcattttatgttgctatttactcgtgctttagtaagccatctttctaagtgttgwtagtcagaacatgagcaaatacaaggatttcagtgaattgagcttgctttggatgtggccctgagttattgcttttgctagcatctggtagctgtcaaagctcatgtactgtctggatagagatgacttctatacgctgtttttctgaactttagtcttccatgtaaagatgaacaaaaatgctgttgtgaagatgggagaaaaactgtgtcctgaataccagaagttgctggtaccaaatgtcgggcaaaacaaatgcaggtaggggggtctgactttgttttgcatggagagaagttg

SEQ ID NO: 90487 - DNA, 600 bp, Chicken  19866894398499_1
catctgaatggtcaggtatgctggcaagcgactaattttagactaaaaaagaagtttagaagatgctattaattcagatatattcacagatcattaataccttaaacaccattcatcctaagtcatagggtattacaggaacacttttgtacatagagggataaaagaagccttcccctcttgtagttctatatagtattgtactcaaagaaataatccagaactgaacttaaatttctcagtagtggatgttcaggtactttataaacataaatggcatgcagcaataagtttgtgttytaggttagaaaactggcagcagttaaagaaaaaaaatcagaaagagcaacagaattaccactcacagatttgatgtagagtgcatctctctgcaaagtcggagagagtttggtgatttcctcctgtagacgctgttcaaaaaagcacaacagacacatccatgataaagcactgagcttcaagcacagcgtggataaacaatctaaatgttcttctgttgatccattccattgctatcagccattaagtcataaggcattttgaaatcccttggcaccaccaccactgccattcatttgt

SEQ ID NO: 90488 - DNA, 599 bp, Chicken  19866894398504_1
  misc_feature (1)..(223): n is any nucleotide
nnnnnnnnnnnnnnnnnnnnnnnnnnnnnnnnnnnnnnnnnnnnnnnnnnnnnnnnnnnnnnnnnnnnnnnnnnnnnnnnnnnnnnnnnnnnnnnnnnnnnnnnnnnnnnnnnnnnnnnnnnnnnnnnnnnnnnnnnnnnnnnnnnnnnnnnnnnnnnnnnnnnnnnnnnnnnnnnnnnnnnnnnnnnnnnnnnnnnnnnnnnnnnnnnnnnnnnnnnnnnnnataggcttctgctcagagcctacaatgattatgaagcatcaagagaccaagctcctaattcagcactttaaaataaragccyacaggaaattatgttaatcccatcatcctctttgtttcagtcagttatcttgcaaacaaaaaagcactaagttttgatgaaatgaatgcacagaaaaaaaaagacttgtcatctgatattacaaaatcgcatggattaagggaaaattttccagctcagaaattgcagaattgattctgtaattatctgaagcattggcgtcgttgaatttttcaaaaaacagagtaaaaactcaccatctggcagtttttcggacrcttgaaggcacttctgaccactccagcttcacctgta

SEQ ID NO: 90489 - DNA, 599 bp, Chicken  19866894398504_2
  misc_feature (1)..(218): n is any nucleotide
nnnnnnnnnnnnnnnnnnnnnnnnnnnnnnnnnnnnnnnnnnnnnnnnnnnnnnnnnnnnnnnnnnnnnnnnnnnnnnnnnnnnnnnnnnnnnnnnnnnnnnnnnnnnnnnnnnnnnnnnnnnnnnnnnnnnnnnnnnnnnnnnnnnnnnnnnnnnnnnnnnnnnnnnnnnnnnnnnnnnnnnnnnnnnnnnnnnnnnnnnnnnnnnnnnnnnnnnnnataggcttctgctcagagcctacaatgattatgaagcatcaagagaccaagctcctaattcagcactttaaaataaragccyacaggaaattatgttaatcccatcatcctctttgtttcagtcagttatcttgcaaacaaaaaagcactaagttttgatgaaatgaatgcacagaaaaaaaaagacttgtcatctgatattacaaaatcgcatggattaagggaaaattttccagctcagaaattgcagaattgattctgtaattatctgaagcattggcgtcgttgaatttttcaaaaaacagagtaaaaactcaccatctggcagtttttcggacrcttgaaggcacttctgaccactccagcttcacctgtatagcc

SEQ ID NO: 90490 - DNA, 600 bp, Chicken  19866894398504_3
caagagaccaagctcctaattcagcactttaaaataaragccyacaggaaattatgttaatcccatcatcctctttgtttcagtcagttatcttgcaaacaaaaaagcactaagttttgatgaaatgaatgcacagaaaaaaaaagacttgtcatctgatattacaaaatcgcatggattaagggaaaattttccagctcagaaattgcagaattgattctgtaattatctgaagcattggcgtcgttgaatttttcaaaaaacagagtaaaaactcaccatctggcagtttttcggacrcttgaaggcacttctgaccactccagcttcacctgtatagccgggtgtgcagcaaattgccctgttgcaatctgagtagcaacctgatagtcctggcaatctttaccccatttaagggtaccctagtagaggggaatacatattttgtgtgcaaagcacagtaagattgttaaatttcatttacatttgagctgatcatattttaaacctaccgatgctttatgggaatttactactgaagcatcagcacagagtttccacctatctgattctgtgatgcttgaaacaaacacctgcacc

SEQ ID NO: 90491 - DNA, 600 bp, Chicken  19866894398512_1
ctagtcggggagatggaagtcttccattcttgatatttacttattttgaatccagtgtatctgttgtactgacattcacttctgtgctatgtatatacaataaaaaaatgtgcccatagacaaaaagaaaaaggcatcaaaacaaaccatcagcaactctccagagtatctgatgagtttcttttttgttgttaatgtcactctgcctcatagaaacattcttttaacagtgaaacatgtgctatacatagcaaaaaaggatctcaaaaatgtttttttttccatacactcaacgctggwattagacaagtaatccagtaggacaacatactacaagtgcttaaagaagagaaaacatagtaaaatagaagtattacctgcaagtatacttctatayggatatgtaatacatatatacatatatatacaaatatacttctatatggatatgtaatatgcatatatatttaaaactagtcataatgtatctgtttttaaattagaaatataaaaatagataaaatatgttttataaatgcagggttaacttggatatatagttgcatgcacatgtatgtatgagaggtatagaagaggtac

SEQ ID NO: 90492 - DNA, 600 bp, Chicken  19866894398512_2
caataaaaaaatgtgcccatagacaaaaagaaaaaggcatcaaaacaaaccatcagcaactctccagagtatctgatgagtttcttttttgttgttaatgtcactctgcctcatagaaacattcttttaacagtgaaacatgtgctatacatagcaaaaaaggatctcaaaaatgtttttttttccatacactcaacgctggwattagacaagtaatccagtaggacaacatactacaagtgcttaaagaagagaaaacatagtaaaatagaagtattacctgcaagtatacttctatayggatatgtaatacatatatacatatatatacaaatatacttctatatggatatgtaatatgcatatatatttaaaactagtcataatgtatctgtttttaaattagaaatataaaaatagataaaatatgttttataaatgcagggttaacttggatatatagttgcatgcacatgtatgtatgagaggtatagaagaggtactcttctataatacagaaagaagaaaaaaaagcttggagaaaaagaaagaacaaggaaaacaaagtggttgctcagttttagtacaaaactagtttga

SEQ ID NO: 90493 - DNA, 600 bp, Chicken  19866894398512_3
ctgtttttaaattagaaatataaaaatagataaaatatgttttataaatgcagggttaacttggatatatagttgcatgcacatgtatgtatgagaggtatagaagaggtactcttctataatacagaaagaagaaaaaaaagcttggagaaaaagaaagaacaaggaaaacaaagtggttgctcagttttagtacaaaactagtttgaggaaaaaaaaatcagtgtttttgatagttccaagacctagtctctgaggatactcaattcctgagatgtgctctcagcgtggcacattccraatccygtgtctggaacctgtaagatatgcaatgttctggtctgaatgaggcctctggaagcgctttgtgggtgctgatgctctatgggtttgttttcatgggaagtgaagcacatcaaaactgtgcttgaggaaaacttaaagattgatactgtgattctaagattgcaaaagaccactatgatcatctagtccaacctatcagtccatcaccagtatacccactaaaccattgactctgtgtgacatctgcccttttcttggaaacctccagaggcagtgactccactacttcactgg

SEQ ID NO: 90494 - DNA, 600 bp, Chicken  19866894398512_4
ttaaattagaaatataaaaatagataaaatatgttttataaatgcagggttaacttggatatatagttgcatgcacatgtatgtatgagaggtatagaagaggtactcttctataatacagaaagaagaaaaaaaagcttggagaaaaagaaagaacaaggaaaacaaagtggttgctcagttttagtacaaaactagtttgaggaaaaaaaaatcagtgtttttgatagttccaagacctagtctctgaggatactcaattcctgagatgtgctctcagcgtggcacattccraatccygtgtctggaacctgtaagatatgcaatgttctggtctgaatgaggcctctggaagcgctttgtgggtgctgatgctctatgggtttgttttcatgggaagtgaagcacatcaaaactgtgcttgaggaaaacttaaagattgatactgtgattctaagattgcaaaagaccactatgatcatctagtccaacctatcagtccatcaccagtatacccactaaaccattgactctgtgtgacatctgcccttttcttggaaacctccagaggcagtgactccactacttcactgggcagcc

SEQ ID NO: 90495 - DNA, 490 bp, Chicken  19866894398512_5
gattctaagattgcaaaagaccactatgatcatctagtccaacctatcagtccatcaccagtatacccactaaaccattgactctgtgtgacatctgcccttttcttggaaacctccagaggcagtgactccactacttcactgggcagcctgttccaatgccttaccactctttctgaggagcaatttttcctaatctctaacatgaacctcccctggcacaatttgaggtcattccctctagtactattgcatgtgatgtgggagaagaggctgaccccctttgcagtagttgtaacrggcggtaaggtctcctctctgtgctgttgtaagtcatcttcctactggtagatttcaactctaccatttatatttatcagaaggcagctagaaaataaatagtgggtctttcctcagtttgtttactttgtgcattagagagtgctccatgaattacagttcctcttctcttaagagtcaatcaggcatg

SEQ ID NO: 90496 - DNA, 600 bp, Chicken  19866894398522_1
tttcaaaattcaagcaaatctctaagaccctttcacatccaacccttagtattataaagttgcaccatcccttcagtgttgataacaagaaccttcagtacaacataaagctatacgctaaaaggctatctaaagaagcaagagctgacaaaacctcgttaattatataacacttgcattactctgcaaaaaggatactgcagtacagcaccaagataaagtaaacatttgctaaattagcatgaaaacagcagataatcttcaagttaacaataataatagagtcaattctcttgggaraacaggattacgagtagaaactgctcagaatccttaaatcaaaaagtcatttaacaaaacaaacttaatataatcatatcagtcatgcaaacaggaacatcatttttgaactgcattttaaatgcaaatgaaattactacagtgcagtggtatttccatgaaacactttcttggcactagttccaggctgacattatctaattttgaccagtatttgtgacattacggaaacaatgtgacgagagcaggattggttctgtttgcttctaattgacatctgcagttgctgggagagaatgg

SEQ ID NO: 90497 - DNA, 600 bp, Chicken  19866894398537_1
ttccttctctttttcggtcgcgggatgagttgtctgagccttgcccatgctgccggggagcccggggctggctctttgctcatcccaagcctggctggtgcatccccagccagccaagccggcccgaaccactccttccctgctcctggggcttttctgctgtgctccccagctgactcagggcctgaccagacaggtcgactccagacgctctcggacaaacagcacccagctggccgggctccgacacattcctggcttgccctgtgcccccaggataaacaatatttagatgaagtyggtgtgtgctgctcgcagagagcttgtctgtaggacgctggttaaaaatatcacctgggctcatgcatgatgctcagggggtgctctggggatgctgtttgctgtgcacatagctgggtctgctctggcgcacaggcagagcattyggtactgctgctgtgtggttctatggaagcattgctgctctgccagctgcatggcattcaaaccctgctttcctaacaagctccagcaatgaaacaactgctccccagctccctgagctcgtggcatagctatagcatgccacagcccagaaaa

SEQ ID NO: 90498 - DNA, 600 bp, Chicken  19866894398537_2
tggggcttttctgctgtgctccccagctgactcagggcctgaccagacaggtcgactccagacgctctcggacaaacagcacccagctggccgggctccgacacattcctggcttgccctgtgcccccaggataaacaatatttagatgaagtyggtgtgtgctgctcgcagagagcttgtctgtaggacgctggttaaaaatatcacctgggctcatgcatgatgctcagggggtgctctggggatgctgtttgctgtgcacatagctgggtctgctctggcgcacaggcagagcattyggtactgctgctgtgtggttctatggaagcattgctgctctgccagctgcatggcattcaaaccctgctttcctaacaagctccagcaatgaaacaactgctccccagctccctgagctcgtggcatagctatagcatgccacagcccagaaaaagcctccaggctacaggcagggaaggctcctactcttccgcaagccccttgtggggctggttctgctcctttcctggccccatggctggagccctgagacatggtgccatcccacagtgccaggacgcagccccaagggcacagaa

SEQ ID NO: 90499 - DNA, 599 bp, Chicken  19866894398539_1
  misc_feature (1)..(28): n is any nucleotide
nnnnnnnnnnnnnnnnnnnnnnnnnnnncagttcaagctagaggtggacagagagaagcccactgtggacagtcttcaggtcaggcttcaagttagtgaaaaaaataaaaagtgtggatttttaattatcaacttcctttggtattcatccttttataacttgggatgtctttatgtaatatgcctctaatttcaccaccacttccttatgaaaaatgagatacactctaataagtcagaccgaaagcttgccagtctggatgcgttggtagaggagacaaaacaatccctcacaaagaygggttattgctaaccttgtcagcaggcataaagaaaaccaaggggagttatgtgcactaattgtgttatctttctgagctttgtgatctcaaaaaccctcagggattttttgagatgctccctcgctgtcaggcgcaaataggaagcgtgctcagagtgtgttcctcagatacacagcaataacaatgaaatcacaattatgataaatgatgaacagtaatgaaataatggtagaaggagcacgtgctcccacttgtccacctgccttctgtgcactacaawgggcaccgatctaccct

SEQ ID NO: 90500 - DNA, 600 bp, Chicken  19866894398539_2
acaatccctcacaaagaygggttattgctaaccttgtcagcaggcataaagaaaaccaaggggagttatgtgcactaattgtgttatctttctgagctttgtgatctcaaaaaccctcagggattttttgagatgctccctcgctgtcaggcgcaaataggaagcgtgctcagagtgtgttcctcagatacacagcaataacaatgaaatcacaattatgataaatgatgaacagtaatgaaataatggtagaaggagcacgtgctcccacttgtccacctgccttctgtgcactacaawgggcaccgatctaccctggcaggaccaaatcctctytktttggaccagaaaagcacatgctcacacacagcggaagtcaaaggacattcgctgctgaattcctaaatgaaagagatttcagtgtgaggggctgggccatgtcaaagagccctttaagctttgtgctctggtggagctggtggcagcaaagagcactttgttggtcacgtatacagctgtggctattgccttgcacaagcctcctcagcagcctctgatctagggaaaactcatgaacaacgaggatattaaaccacatga

SEQ ID NO: 90501 - DNA, 600 bp, Chicken  19866894398539_3
tcagcaggcataaagaaaaccaaggggagttatgtgcactaattgtgttatctttctgagctttgtgatctcaaaaaccctcagggattttttgagatgctccctcgctgtcaggcgcaaataggaagcgtgctcagagtgtgttcctcagatacacagcaataacaatgaaatcacaattatgataaatgatgaacagtaatgaaataatggtagaaggagcacgtgctcccacttgtccacctgccttctgtgcactacaawgggcaccgatctaccctggcaggaccaaatcctctytktttggaccagaaaagcacatgctcacacacagcggaagtcaaaggacattcgctgctgaattcctaaatgaaagagatttcagtgtgaggggctgggccatgtcaaagagccctttaagctttgtgctctggtggagctggtggcagcaaagagcactttgttggtcacgtatacagctgtggctattgccttgcacaagcctcctcagcagcctctgatctagggaaaactcatgaacaacgaggatattaaaccacatgagcacagtctcgtctggtttaatgccaaggcattaga

SEQ ID NO: 90502 - DNA, 600 bp, Chicken  19866894398539_4
agcaggcataaagaaaaccaaggggagttatgtgcactaattgtgttatctttctgagctttgtgatctcaaaaaccctcagggattttttgagatgctccctcgctgtcaggcgcaaataggaagcgtgctcagagtgtgttcctcagatacacagcaataacaatgaaatcacaattatgataaatgatgaacagtaatgaaataatggtagaaggagcacgtgctcccacttgtccacctgccttctgtgcactacaawgggcaccgatctaccctggcaggaccaaatcctctytktttggaccagaaaagcacatgctcacacacagcggaagtcaaaggacattcgctgctgaattcctaaatgaaagagatttcagtgtgaggggctgggccatgtcaaagagccctttaagctttgtgctctggtggagctggtggcagcaaagagcactttgttggtcacgtatacagctgtggctattgccttgcacaagcctcctcagcagcctctgatctagggaaaactcatgaacaacgaggatattaaaccacatgagcacagtctcgtctggtttaatgccaaggcattagagg

SEQ ID NO: 90503 - DNA, 600 bp, Chicken  19866894398542_1
gggagatgtggattgatttcctgctcatctgccaatctttaattattattatgcatcatggtatttagtttcctaaacaaaaggcaatgaaaaccgaatagagtaacatcagatacctctaactcgatttaggtataacagctttattaactcaaaactgaaacattccaagggagctactgcagatccaagggctctgtgttgactttgggaagcccccatcatgctgcccggccagggccggctcccagtggaagcagcagtttcctcctgcagcaaagtgcccggggttaaagctcyttgggtctcatttggggcactggttctcttcactctgagaagtgcccgtacttcaacatccattagtgccttatctctgcaagcctgccccgctcctgctgctctgctgggcgccgtagggaacgtcacactgcagcactcggtggccctgtcattccttgtgcatgtcatggcttcatcgtgtgtctcgttagttaattagatgacagaagagcgagtggcaccagtcagagcagcgctacaaaatgtgtgaaaatgtcaaatgagctcatggagtgaagcccaaggtgctgcccgttg

SEQ ID NO: 90504 - DNA, 599 bp, Chicken  19866894398548_1
  misc_feature (1)..(1): n is any nucleotide
ntctttttgagtacgaggagtcaaaaagcactgtgtggattcctgaaaaatcctatcccactgtttccaaaaagacctgttacttttgaacagaaatcacaaataagagattccactgtgatgttggaaataggcaacacatacattatagaggtaataagtgcatgcacttttgttgaacgcagatttcaagaatatttgctttattttttccagtcacaaaagaggagggcatgacattctgtgacagggtcctcctgaatctattttctccctgttctgattttagctgtaaatacktaattactgtaaatgcatccaacgcctacactgcttctaaaacagtacagaattgttcatattgcatctgctgatcaataattactaatgtcatgcagagacaggtaaattgccagtgctttagcctgggacatttcacattcacacagacgcctacagcttaaggcaacagttagcaataaaaaaaggcaaaaccagtcttagttttttcttaataatttgcttccagctgattgcccagcacagtcaaatgtcctcctatatgctggaaaagcttaccggatataacttggttgcct

SEQ ID NO: 90505 - DNA, 600 bp, Chicken  19866894398548_2
taatgtcatgcagagacaggtaaattgccagtgctttagcctgggacatttcacattcacacagacgcctacagcttaaggcaacagttagcaataaaaaaaggcaaaaccagtcttagttttttcttaataatttgcttccagctgattgcccagcacagtcaaatgtcctcctatatgctggaaaagcttaccggatataacttggttgcctggagtatttacagcccaagggtggacaatagttttgttcacactttctaagcttagtttattggaaagcttcctgaagagagaagyrttcaattacccrgtaaatatcaaagaacattcttggtgttgctcttctctcagacaagaatcccatcccttgaagagcaatcttttgtgcagaccttctgaaatctgtatttaagctgtatgctggagaattggatgcggtaccgatcttaagagcaaattccacgctgtttaatatataaggcatgaagaatcacagaaagcacagaccaaatggcccaaggcagtagtttctccacaattctccagaagaaaacaaaacagaaaagagcagaaatctgaaacagttgaaacccaatg

SEQ ID NO: 90506 - DNA, 600 bp, Chicken  19866894398548_3
aatgtcatgcagagacaggtaaattgccagtgctttagcctgggacatttcacattcacacagacgcctacagcttaaggcaacagttagcaataaaaaaaggcaaaaccagtcttagttttttcttaataatttgcttccagctgattgcccagcacagtcaaatgtcctcctatatgctggaaaagcttaccggatataacttggttgcctggagtatttacagcccaagggtggacaatagttttgttcacactttctaagcttagtttattggaaagcttcctgaagagagaagyrttcaattacccrgtaaatatcaaagaacattcttggtgttgctcttctctcagacaagaatcccatcccttgaagagcaatcttttgtgcagaccttctgaaatctgtatttaagctgtatgctggagaattggatgcggtaccgatcttaagagcaaattccacgctgtttaatatataaggcatgaagaatcacagaaagcacagaccaaatggcccaaggcagtagtttctccacaattctccagaagaaaacaaaacagaaaagagcagaaatctgaaacagttgaaacccaatgt

SEQ ID NO: 90507 - DNA, 597 bp, Chicken  19866894398548_4
agacaggtaaattgccagtgctttagcctgggacatttcacattcacacagacgcctacagcttaaggcaacagttagcaataaaaaaaggcaaaaccagtcttagttttttcttaataatttgcttccagctgattgcccagcacagtcaaatgtcctcctatatgctggaaaagcttaccggatataacttggttgcctggagtatttacagcccaagggtggacaatagttttgttcacactttctaagcttagtttattggaaagcttcctgaagagagaagyrttcaattacccrgtaaatatcaaagaacattcttggtgttgctcttctctcagacaagaatcccatcccttgaagagcaatcttttgtgcagaccttctgaaatctgtatttaagctgtatgctggagaattggatgcggtaccgatcttaagagcaaattccacgctgtttaatatataaggcatgaagaatcacagaaagcacagaccaaatggcccaaggcagtagtttctccacaattctccagaagaaaacaaaacagaaaagagcagaaatctgaaacagttgaaacccaatgtcttgaattt

SEQ ID NO: 90508 - DNA, 600 bp, Chicken  19866894398560_1
actagaggataaacactttctggtatgaactttggccattctaccatttctttcaggactttcgaaaataacaaaatatctggagatggagaaacaattgatggagaaacaagtccagtagagctgcatcttcatctgtaacagagatgtggtttgcaagcttcctcagtaacagagactttccagactattctagagtgggtagaaagaaagctgactattttggcatacctggtttcacggttccatggtggctttctttaatcaaaacaaaatcataaaaactcaggggaacttttycttgtctttcctcaattaagttttctttatagttgctgccrcaacctgttttttaagcatattgtcacaccatactaaatgtttgttaccacgtaacaaaatggtattgctatgtatactggacagtagagtacgctctgtgggatacttctgcatttctccacccctcaagctgctgggggaaacagttcttgagtagtgtcaggatgtcaaagtgagggctaaaaacccgagagagaactatcacaccttcagtaaaaacaaaaacctgtcatcactataacaacctttccataatcg

SEQ ID NO: 90509 - DNA, 600 bp, Chicken  19866894398560_2
taccatttctttcaggactttcgaaaataacaaaatatctggagatggagaaacaattgatggagaaacaagtccagtagagctgcatcttcatctgtaacagagatgtggtttgcaagcttcctcagtaacagagactttccagactattctagagtgggtagaaagaaagctgactattttggcatacctggtttcacggttccatggtggctttctttaatcaaaacaaaatcataaaaactcaggggaacttttycttgtctttcctcaattaagttttctttatagttgctgccrcaacctgttttttaagcatattgtcacaccatactaaatgtttgttaccacgtaacaaaatggtattgctatgtatactggacagtagagtacgctctgtgggatacttctgcatttctccacccctcaagctgctgggggaaacagttcttgagtagtgtcaggatgtcaaagtgagggctaaaaacccgagagagaactatcacaccttcagtaaaaacaaaaacctgtcatcactataacaacctttccataatcgaattatgaaagagacactcaaaaagtgaaaactctgtgaaa

SEQ ID NO: 90510 - DNA, 600 bp, Chicken  19866894398562_1
gttcagtcagcaacagtttcggtctaaagagcaaaagactctttcaccttaattgttctctgagactcttacccaacatttgtcctactctcagaagacctactgtccaagttactagaggttagctttacttctgctctggatttatgttaatgatgcataaagaatcaaattgtcttaagagacactaggatgtcaatgcagaattagggaaggcatgttcttcctttctttcactcctctcgtctctaacaccagtcagcatttgagcatgttcttacatgcagacatgtccataamtgcacagccctcctcctcctttgtggagagaagacactcagcatcattatctgctttttctgttttttagacaagatctgacaacctccccactaccctgaaaatgatgaactataatcaaatttaaaatggaagtgttacttatgtgcgtttgaatgaggtcagtcttttcagcacattccttttctttacagaggaccttataaatgttttatatttattatttctgcacctctgtccagttgctgaattaaaggtgatgataatgatgagagcagaaagagattacaaagactaaag

SEQ ID NO: 90511 - DNA, 600 bp, Chicken  19866894398565_1
acacacacaaatacacacaaaaaaataccatgtacagaaataatgatgcaacaatgctttttagtggaaaaatgttcctccaaaaaaaattcctagtatcttcctacatacatgttttctgtgatgatctttcctgtctcctccagattgtgtcctgaggactgttttcccatactgtccttaagtgtatatcttctcataacacattattctttcttgtgtcttccagggctgtgtacctctccaggtctgcatttcacctcagctccaatccacaggatcacagactgaatctgttcstggttagttcctcgctgccctatcccagagggaatgaggaacctctgttgggtaaaggagaggtaaaggattggaactgggtaatatgggagagatgtgtgaggaacaaggaacaaaaacagtccttaattcaagagggttgagagggsaagtcactctagaggatctgtcactaggtctccatcccgtgcattgtaggtagcttggtagcaggaatccacagcttactgtttggtcaccatttgtgtaaatctttaaaagacaagttgctatgtgaaatatattggcaatcacaaagtc

SEQ ID NO: 90512 - DNA, 600 bp, Chicken  19866894398565_2
gtgtcctgaggactgttttcccatactgtccttaagtgtatatcttctcataacacattattctttcttgtgtcttccagggctgtgtacctctccaggtctgcatttcacctcagctccaatccacaggatcacagactgaatctgttcstggttagttcctcgctgccctatcccagagggaatgaggaacctctgttgggtaaaggagaggtaaaggattggaactgggtaatatgggagagatgtgtgaggaacaaggaacaaaaacagtccttaattcaagagggttgagagggsaagtcactctagaggatctgtcactaggtctccatcccgtgcattgtaggtagcttggtagcaggaatccacagcttactgtttggtcaccatttgtgtaaatctttaaaagacaagttgctatgtgaaatatattggcaatcacaaagtcccctagcattttctaatccgatgaggtgcaccttgctgcctttggtgggctcctctcccaccatctcacttatgaaagaggtagtgcatggagttcgtcgggtgctttgcatgaaggcagtaggcagatgtgtctcaggatgttactgt

SEQ ID NO: 90513 - DNA, 542 bp, Chicken  19866894398572_1
tgttgcaaatgagccctgtagcatttagggtgtgttgtcaattcagtaaatgagggtaaagatgttattgtagaattagctaagatgggactcatgctgcagcttaaataaaacatgtttggtattttgtgatatttagatatttagttaaactagatgctacagttctgatgaaaaactttaaatgtgatagatgcaaaaaacctgggaagatatttacaggcattgaaagccctgaatacaagtgaatcagtttggtaagtcatcctcaaatggatcctgcaggtaaagtggactgcrtgctgcaggttaggaagtggaagggagaaggaaggcagtctgttttgtctgcctgggaataattattcttctgagactgggggatttgcatgctgtgactttgagcagcatagcgggtgtacacccacatggattctccagcagcattaaccaactccagcatctcatctgcagctgcaagcacaaaaaggaaacaaattatgaatcggatggaaaaataaataaaacttgatcccacaggg

SEQ ID NO: 90514 - DNA, 600 bp, Chicken  19866894398579_1
aaagtaaatgatgtcctcataatcagcatccacacttttaaggaactcctggaactggcgatgattcagtcgattggacttcaagaaattcacagctctgatgatgatttgcatggcagtgtccatttttaaggctttcacacataaattttctggatgcatgatgcagtgatatttcatcaaacatgagctgccagtggccattgcgtcatcttctgttaattttataagttcctttctttttaccaaccatcactgaggcaccatagaatcatagaatcaccaaggttggaaaagatytctaagatcatccartagatatcagtaactatatcagatacgttgacaagggttaaagtarattgctttaatgtaatttttactgctttatagatatcaagagacttagttgtctttcagtggcaccagagcagccatttcttcagtggcattatattcgttgtcagtacctctaatgaaaatggctaagctatatctgtagcatcagtaccttcatctatcgtcaaagcataacatttgaaattagcagctctactctccaaatttctttccatagattttcctgtttcttcagttcac

SEQ ID NO: 90515 - DNA, 600 bp, Chicken  19866894398579_2
ctcataatcagcatccacacttttaaggaactcctggaactggcgatgattcagtcgattggacttcaagaaattcacagctctgatgatgatttgcatggcagtgtccatttttaaggctttcacacataaattttctggatgcatgatgcagtgatatttcatcaaacatgagctgccagtggccattgcgtcatcttctgttaattttataagttcctttctttttaccaaccatcactgaggcaccatagaatcatagaatcaccaaggttggaaaagatytctaagatcatccartagatatcagtaactatatcagatacgttgacaagggttaaagtarattgctttaatgtaatttttactgctttatagatatcaagagacttagttgtctttcagtggcaccagagcagccatttcttcagtggcattatattcgttgtcagtacctctaatgaaaatggctaagctatatctgtagcatcagtaccttcatctatcgtcaaagcataacatttgaaattagcagctctactctccaaatttctttccatagattttcctgtttcttcagttcacctgactacaggttga

SEQ ID NO: 90516 - DNA, 600 bp, Chicken  19866894398579_3
tgattcagtcgattggacttcaagaaattcacagctctgatgatgatttgcatggcagtgtccatttttaaggctttcacacataaattttctggatgcatgatgcagtgatatttcatcaaacatgagctgccagtggccattgcgtcatcttctgttaattttataagttcctttctttttaccaaccatcactgaggcaccatagaatcatagaatcaccaaggttggaaaagatytctaagatcatccartagatatcagtaactatatcagatacgttgacaagggttaaagtarattgctttaatgtaatttttactgctttatagatatcaagagacttagttgtctttcagtggcaccagagcagccatttcttcagtggcattatattcgttgtcagtacctctaatgaaaatggctaagctatatctgtagcatcagtaccttcatctatcgtcaaagcataacatttgaaattagcagctctactctccaaatttctttccatagattttcctgtttcttcagttcacctgactacaggttgacttctgttgagaaggtctacttctgttgagaaggaaaatccaggtt

SEQ ID NO: 90517 - DNA, 600 bp, Chicken  19866894398583_1
gtcctatggtgcagtacagttaaccggttgattgcaaatgtattcagtaccatttccttaatgtggcaagtcagtgctgggttccttactattagctagttgtgcagtgaattctgtacagtggtattggttcttgtcttacctgtccaagggttttataaaagcagtgttccctctaagtcggaagaaagaaggtcgctactccatgtggcagaagataagtcagtaccttctctgaggcttgttttagcaccactgggcactaggtgccacagagtgcctgggaaagccaaaaatacyttttcctgttagaaaacaaggtagctgatgagttgttcatctygttcttccagagctaacacagatgtggcctcattgcagcgagggggactgcagctgtggcggttggccctgggctagtcctgctgctggcagagctttcatgtacagcacagagcagaggccatggaaagtgccaaatttacaaagaaataagtggtgtctgtgttacttttatttgtatatatttattgtacaaaaaaacacaaccaaacaggtgtttcaaatgtagtgcaggggagcatgggggcacagaagctt

SEQ ID NO: 90518 - DNA, 600 bp, Chicken  19866894398583_2
tcagtaccatttccttaatgtggcaagtcagtgctgggttccttactattagctagttgtgcagtgaattctgtacagtggtattggttcttgtcttacctgtccaagggttttataaaagcagtgttccctctaagtcggaagaaagaaggtcgctactccatgtggcagaagataagtcagtaccttctctgaggcttgttttagcaccactgggcactaggtgccacagagtgcctgggaaagccaaaaatacyttttcctgttagaaaacaaggtagctgatgagttgttcatctygttcttccagagctaacacagatgtggcctcattgcagcgagggggactgcagctgtggcggttggccctgggctagtcctgctgctggcagagctttcatgtacagcacagagcagaggccatggaaagtgccaaatttacaaagaaataagtggtgtctgtgttacttttatttgtatatatttattgtacaaaaaaacacaaccaaacaggtgtttcaaatgtagtgcaggggagcatgggggcacagaagcttgggttttatgttgaatatccaaatagcttctatgcttccatgc

SEQ ID NO: 90519 - DNA, 600 bp, Chicken  19866894398588_1
atgttctaatgagaatctgtttctacaaggaaaactaagcctgttttattctgaaattgtggactgctttgtagaaagaaggattaaattttgttgcatacattcttctgtgccctttgcgtgcttccatattttatacatctactttagcaagcgacagctaaaaataaagctaaatttaatttgagggctctgacagatgagccctgatggattttgctggaggcagctttagctgttctttcttcaagctgtgctttctctccctctgctcaaggtgacaacctgtctggggcagcrctgggcaggatatggccaaatcgtttgagattggcctcttgacacccacccctcagctcagatgtgtggtggaaatgtgatggttgttgtacagaaatgtctgagtcctttctctgcctagcttttggttggtggctttctttttgtttgctgttgttcggctgggattttgggcagaggctgagggcagatcgctatgtgggtatttattttttatagtttcrtatatttttttgtattttgataaatagctggcattaattttaaaatttgatatgctttttttttcctaaaaaaaaa

SEQ ID NO: 90520 - DNA, 600 bp, Chicken  19866894398588_2
ggcagctttagctgttctttcttcaagctgtgctttctctccctctgctcaaggtgacaacctgtctggggcagcrctgggcaggatatggccaaatcgtttgagattggcctcttgacacccacccctcagctcagatgtgtggtggaaatgtgatggttgttgtacagaaatgtctgagtcctttctctgcctagcttttggttggtggctttctttttgtttgctgttgttcggctgggattttgggcagaggctgagggcagatcgctatgtgggtatttattttttatagtttcrtatatttttttgtattttgataaatagctggcattaattttaaaatttgatatgctttttttttcctaaaaaaaaaatatttacttctactaaaatcatgaggacrggrgctcttccatcagggtacaacagtgtgtgccaaggatgacatttcaatgttaactttcaaccccttcttacagaatgatacacatagtgcttttgtgcttgtttttgtggtggtcctattttcagctaaatcttattgcactatccatttttaccttggctgtagtagaagaaatgactgaatataactca

SEQ ID NO: 90521 - DNA, 600 bp, Chicken  19866894398588_3
ttggcctcttgacacccacccctcagctcagatgtgtggtggaaatgtgatggttgttgtacagaaatgtctgagtcctttctctgcctagcttttggttggtggctttctttttgtttgctgttgttcggctgggattttgggcagaggctgagggcagatcgctatgtgggtatttattttttatagtttcrtatatttttttgtattttgataaatagctggcattaattttaaaatttgatatgctttttttttcctaaaaaaaaaatatttacttctactaaaatcatgaggacrggrgctcttccatcagggtacaacagtgtgtgccaaggatgacatttcaatgttaactttcaaccccttcttacagaatgatacacatagtgcttttgtgcttgtttttgtggtggtcctattttcagctaaatcttattgcactatccatttttaccttggctgtagtagaagaaatgactgaatataactcatctttgtatcggggggccacataacaagcaattattgtgtgtaggcagggagggcttagtctttttttcatttacaactgactttaaagaacataggctgcaagtc

SEQ ID NO: 90522 - DNA, 600 bp, Chicken  19866894398588_4
gcctcttgacacccacccctcagctcagatgtgtggtggaaatgtgatggttgttgtacagaaatgtctgagtcctttctctgcctagcttttggttggtggctttctttttgtttgctgttgttcggctgggattttgggcagaggctgagggcagatcgctatgtgggtatttattttttatagtttcrtatatttttttgtattttgataaatagctggcattaattttaaaatttgatatgctttttttttcctaaaaaaaaaatatttacttctactaaaatcatgaggacrggrgctcttccatcagggtacaacagtgtgtgccaaggatgacatttcaatgttaactttcaaccccttcttacagaatgatacacatagtgcttttgtgcttgtttttgtggtggtcctattttcagctaaatcttattgcactatccatttttaccttggctgtagtagaagaaatgactgaatataactcatctttgtatcggggggccacataacaagcaattattgtgtgtaggcagggagggcttagtctttttttcatttacaactgactttaaagaacataggctgcaagtctga

SEQ ID NO: 90523 - DNA, 600 bp, Chicken  19866894398588_5
tattagctgttagctttcctcagagacttcactgtattgtctttagagctgttgcttcatagatttaagtaataccgggctagctggtaggcattcgtgaagttcttattctggagaacaaaacaggagaagatctgagaagtacaggagaccaggagaataaaaatcctgtagcatgaggatggagggcgttcaccttcagagagatgtcacctttgtgggaagtaggtttgtagactgggcagagaaagtgggatgcagaaaaggatggaaggaagagaaagaaagcccagtacaggmagataagtaggttactccaggtgggttttcttaagctttgcagcgaatgcagttcagaatggactttatgttcgtaatttcatttcattatgttcataatgagtactagttaaagcsgtgagaccactattctgattartgttacttactttttggcaggtgaatagctttgacatcagcaacgtgtcccataaccacgcrcgagcagtgctgtcacagccctgcacggtgctgcacctcaccgtgctgcgggagcggcggtttgggagccgtacccacggccacactgacaccaccacc

SEQ ID NO: 90524 - DNA, 600 bp, Chicken  19866894398588_6
acaaaacaggagaagatctgagaagtacaggagaccaggagaataaaaatcctgtagcatgaggatggagggcgttcaccttcagagagatgtcacctttgtgggaagtaggtttgtagactgggcagagaaagtgggatgcagaaaaggatggaaggaagagaaagaaagcccagtacaggmagataagtaggttactccaggtgggttttcttaagctttgcagcgaatgcagttcagaatggactttatgttcgtaatttcatttcattatgttcataatgagtactagttaaagcsgtgagaccactattctgattartgttacttactttttggcaggtgaatagctttgacatcagcaacgtgtcccataaccacgcrcgagcagtgctgtcacagccctgcacggtgctgcacctcaccgtgctgcgggagcggcggtttgggagccgtacccacggccacactgacaccaccaccaccaccaccacctcctcctcctcacgggacgacagcttccaagtcactctgcacaaacgtgactccagtgagcagcttggcatcaagctggtccgcaggacggatgagccgggagtc

SEQ ID NO: 90525 - DNA, 600 bp, Chicken  19866894398588_7
aagtacaggagaccaggagaataaaaatcctgtagcatgaggatggagggcgttcaccttcagagagatgtcacctttgtgggaagtaggtttgtagactgggcagagaaagtgggatgcagaaaaggatggaaggaagagaaagaaagcccagtacaggmagataagtaggttactccaggtgggttttcttaagctttgcagcgaatgcagttcagaatggactttatgttcgtaatttcatttcattatgttcataatgagtactagttaaagcsgtgagaccactattctgattartgttacttactttttggcaggtgaatagctttgacatcagcaacgtgtcccataaccacgcrcgagcagtgctgtcacagccctgcacggtgctgcacctcaccgtgctgcgggagcggcggtttgggagccgtacccacggccacactgacaccaccaccaccaccaccacctcctcctcctcacgggacgacagcttccaagtcactctgcacaaacgtgactccagtgagcagcttggcatcaagctggtccgcaggacggatgagccgggagtcttcattcttgacctcttagaag

SEQ ID NO: 90526 - DNA, 600 bp, Chicken  19866894398588_8
gagagatgtcacctttgtgggaagtaggtttgtagactgggcagagaaagtgggatgcagaaaaggatggaaggaagagaaagaaagcccagtacaggmagataagtaggttactccaggtgggttttcttaagctttgcagcgaatgcagttcagaatggactttatgttcgtaatttcatttcattatgttcataatgagtactagttaaagcsgtgagaccactattctgattartgttacttactttttggcaggtgaatagctttgacatcagcaacgtgtcccataaccacgcrcgagcagtgctgtcacagccctgcacggtgctgcacctcaccgtgctgcgggagcggcggtttgggagccgtacccacggccacactgacaccaccaccaccaccaccacctcctcctcctcacgggacgacagcttccaagtcactctgcacaaacgtgactccagtgagcagcttggcatcaagctggtccgcaggacggatgagccgggagtcttcattcttgacctcttagaaggagggttggctgcccaggatggccggctctgcagcaatgaccgagtgctcgccatcaatggg

SEQ ID NO: 90527 - DNA, 599 bp, Chicken  19866894398597_1
  misc_feature (1)..(52): n is any nucleotide
nnnnnnnnnnnnnnnnnnnnnnnnnnnnnnnnnnnnnnnnnnnnnnnnnnnntctagcagtaagagtctgcttctgtgtgtctttggtgagaatgaggaagacaaatgacttttaatagtccatgcagaagctttcgtctgtctcactgttgctgagtagattgatggtctttgtaaagattagacataaaccattgtttaattcacacgatgcgtaaataggatcctccaaaaaaaccaaaacccaacgcaaacctggatatcttcagctgtaagctaacctaaaggagctcttgtgtygcagtaccactgtcagccgtgagggctgtaaggagatgctgtgatttcagacatgttaaacactgcttgtagccttggacagtatcccccttcagttatcattaaagaccagcaaaggaagtgaacacaaaaacagtaatgttgagatctgattagaatcaagcgaagcaaggaagtgcggagttaagatttatatgctaaccttaattagctctattgttctcgagagctgaagcatacacaatgaggaacattatacttgcatctccacagctcttcagtacctaaacataagaagg

SEQ ID NO: 90528 - DNA, 600 bp, Chicken  19866894398597_2
atcaagcgaagcaaggaagtgcggagttaagatttatatgctaaccttaattagctctattgttctcgagagctgaagcatacacaatgaggaacattatacttgcatctccacagctcttcagtacctaaacataagaaggaattcactgtgcttttcagccctagattttgtgtgcgctgcctttcattaatatctaaatctgcactcgtacttggtaaggttgtggatttttaggctttagtttttctgcaggcaaagagaggacgctgccctcagcggtgagttgaagtctgtggygtgagtggtgcttggggggaaggtggtctgacatcagagtagtgccaccctcctcacgggcagtaacataaatctccatgtaacagagtgcattcagcgtagcttagtgatgctttgttaaccatgtcacagttcaaacgagcacaaaccacttgacagattagacactggtcgcagagcacacggctgcacgaggccttgatctttctgcattaagtaccctttcgggaacatcacctcctccagaggtttagtaattctcggggatgctaccttctcttctcaccttgaggacttaca

SEQ ID NO: 90529 - DNA, 600 bp, Chicken  19866894398597_3
ctttgttaaccatgtcacagttcaaacgagcacaaaccacttgacagattagacactggtcgcagagcacacggctgcacgaggccttgatctttctgcattaagtaccctttcgggaacatcacctcctccagaggtttagtaattctcggggatgctaccttctcttctcaccttgaggacttacagaataaatagaagctttagctttgcaagcactacaaaatccaggcggtctcagcaaccacttagtcctttgccataagcctgatggtaacgtgaggcttgcagagatgtgarctctcaaggttaacgagcggtgtgctgtcgggttggcttttcagctggtgacttctcctccagcctgtgtacttcatttagggcaattctgtgtagtaaatgctggctgctgagaaagtttgctgggaaagtttgtatgttaaggtcatctttgcttagcctgttgtgtgtgcacgtcggaaatacttgcatcgcttccctaatgagtgtgtgctcagggctgtctgaaaaggctcctgggccaagtacaaagagcaggaggaaaaagtcaatcttatacctcgtttgtggttgctgtcg

SEQ ID NO: 90530 - DNA, 599 bp, Chicken  19866894398605_1
  misc_feature (1)..(113): n is any nucleotide
nnnnnnnnnnnnnnnnnnnnnnnnnnnnnnnnnnnnnnnnnnnnnnnnnnnnnnnnnnnnnnnnnnnnnnnnnnnnnnnnnnnnnnnnnnnnnnnnnnnnnnnnnnnnnnnnnctccctataagggaactgtaaaaaaaattaaaataaaaatcaggaaaccagttactgtttaactagttgcaagtggctttgtccaaagaagtcaagctcaatattgcattagctttgtatgcaataagaagtctctagaagcagaagtatcacatacataggcaaaaagatctcccatggatacacraaaaccatgttttaaagagctacatcacaagggtagtttaaaattgcctaaaaaacagccactaatggcatgcacaggtcaataatcttaactttggtaatgtcagtcatttttggtcaaacctggattccwcttttagcaaaaaaaagtataaaaacacacctgtcctgtgcataaagcaacacaaattccacgtgctaccagctagaggcaggccttcacgacatggcagaagcatgccacgtttgctgccagaagcctgcttagctctagatcacatctcttactactcatcagcc

SEQ ID NO: 90531 - DNA, 600 bp, Chicken  19866894398605_2
aaaaaaaattaaaataaaaatcaggaaaccagttactgtttaactagttgcaagtggctttgtccaaagaagtcaagctcaatattgcattagctttgtatgcaataagaagtctctagaagcagaagtatcacatacataggcaaaaagatctcccatggatacacraaaaccatgttttaaagagctacatcacaagggtagtttaaaattgcctaaaaaacagccactaatggcatgcacaggtcaataatcttaactttggtaatgtcagtcatttttggtcaaacctggattccwcttttagcaaaaaaaagtataaaaacacacctgtcctgtgcataaagcaacacaaattccacgtgctaccagctagaggcaggccttcacgacatggcagaagcatgccacgtttgctgccagaagcctgcttagctctagatcacatctcttactactcatcagcctaccaggccagaccaacaggacaaggaagtggacagattgttttgttttaaatgcagaacaagagccatctttaaagttatacagctttaagtaacaccaatttttccaaaatgtttttgtaagaaatccaac

SEQ ID NO: 90532 - DNA, 600 bp, Chicken  19866894398605_3
ttagcaaaaaaaagtataaaaacacacctgtcctgtgcataaagcaacacaaattccacgtgctaccagctagaggcaggccttcacgacatggcagaagcatgccacgtttgctgccagaagcctgcttagctctagatcacatctcttactactcatcagcctaccaggccagaccaacaggacaaggaagtggacagattgttttgttttaaatgcagaacaagagccatctttaaagttatacagctttaagtaacaccaatttttccaaaatgtttttgtaagaaatccaacagkttttttaagctttwtgtagctccccaagacacatttaattttcctttctgaagccatcaataccctgtaaataagtgttttgttcttcctgaggaagaaagcaaaggtggttttatttacaatggtggagtcaacgcttaagattgtaactggacttggaacagttaaaaaagtataatgaaaatgacaaccttaagtgctactttccatacagaatccacacttggttcagttttattcgttgcagagtaaagtaaaaagacatcccattacactagtaaaaacgcagatttaaattta

SEQ ID NO: 90533 - DNA, 600 bp, Chicken  19866894398605_4
tataaaaacacacctgtcctgtgcataaagcaacacaaattccacgtgctaccagctagaggcaggccttcacgacatggcagaagcatgccacgtttgctgccagaagcctgcttagctctagatcacatctcttactactcatcagcctaccaggccagaccaacaggacaaggaagtggacagattgttttgttttaaatgcagaacaagagccatctttaaagttatacagctttaagtaacaccaatttttccaaaatgtttttgtaagaaatccaacagkttttttaagctttwtgtagctccccaagacacatttaattttcctttctgaagccatcaataccctgtaaataagtgttttgttcttcctgaggaagaaagcaaaggtggttttatttacaatggtggagtcaacgcttaagattgtaactggacttggaacagttaaaaaagtataatgaaaatgacaaccttaagtgctactttccatacagaatccacacttggttcagttttattcgttgcagagtaaagtaaaaagacatcccattacactagtaaaaacgcagatttaaatttatactcaaaaaaaac

SEQ ID NO: 90534 - DNA, 600 bp, Chicken  19866894398617_1
ccggggatgatgacgaaggtttcctcgtgcatgaactcagggaaaagcacctactgtaaaaatgcagcataacttcattgcattgcagagggagtttttcagctggcacatgtctaacacttccatgattttctgttgtgcagacagctttggggaaatgcttacatgacctactgccaaaccagcatcagtgaagtatctgcagaactaaggaagtcagctagatacgtgtaataacgcttgctgctctccttgttgctagaatccttaaggctgttgtgatctggataacccaagcamaaatttcagccaaaatattacaaagagtttctgattaagtaggtgttacagcagagcagtgtccctattgccttccaaaaccaccagcagaaatcaacatgtatgtcagaaataaatatatatgtaatggaatttcatgtgggatgcagcacagatttgcttctcttggcattttaaatctgtgtggaaaaactcattaaaccccactwacaggttgagataattaagatcattttttctttcccgacatccaactttcatttgggataaggactgctgcttggatgcttcaaagactat

SEQ ID NO: 90535 - DNA, 600 bp, Chicken  19866894398617_2
aaggaagtcagctagatacgtgtaataacgcttgctgctctccttgttgctagaatccttaaggctgttgtgatctggataacccaagcamaaatttcagccaaaatattacaaagagtttctgattaagtaggtgttacagcagagcagtgtccctattgccttccaaaaccaccagcagaaatcaacatgtatgtcagaaataaatatatatgtaatggaatttcatgtgggatgcagcacagatttgcttctcttggcattttaaatctgtgtggaaaaactcattaaaccccactwacaggttgagataattaagatcattttttctttcccgacatccaactttcatttgggataaggactgctgcttggatgcttcaaagactattctttttctctgcagccctgctataacaatgcacttaggaagcatggctgtctgcctgtaaacacggcataaatataaatggactataaattcagyacctctgaggttctgtagatattgttctctattcagagggatgggaaaatgaggcagacagcagcctagaagtttctcacaagaactgttggttcagagacaacgcagatctc

SEQ ID NO: 90536 - DNA, 600 bp, Chicken  19866894398617_3
acatgtatgtcagaaataaatatatatgtaatggaatttcatgtgggatgcagcacagatttgcttctcttggcattttaaatctgtgtggaaaaactcattaaaccccactwacaggttgagataattaagatcattttttctttcccgacatccaactttcatttgggataaggactgctgcttggatgcttcaaagactattctttttctctgcagccctgctataacaatgcacttaggaagcatggctgtctgcctgtaaacacggcataaatataaatggactataaattcagyacctctgaggttctgtagatattgttctctattcagagggatgggaaaatgaggcagacagcagcctagaagtttctcacaagaactgttggttcagagacaacgcagatctcgtactcatcagtgttcacaggcttcaagatatttggtgttatggatcagaactcagctgcaatatctgcacagttctgtagttagcccagcgttctatgggattgagacttgtgcaattggccgcattaggcaaattttaaccagatcttacacaccaaaccttgaagttgctaagttctacaaaac

SEQ ID NO: 90537 - DNA, 600 bp, Chicken  19866894398619_1
tgcctgaagagtgctgtaatctctgcctgcctgtgccaacaggtagcatctgaaaaggcaggagagagattatttattttgcattttccattctcataccaaacttttgcctttcatttcagccttcagatgatgagaacagtgacaacagcaacgagtgtgtggtttgcctgtcggacctccgggacactctcattctgccctgcagacacctctgtctgtgtaattcctgtgctgacaccctgcgctaccaggccaacaactgccccatctgcaggctgcgtgagtttcctgcccagraaacaagggcatcyttcttccttcctgcacttctgttaagtcagtacaggctgtgaggatgagtatgtgttgtatttaccccaccccaaagctcagtacyaaatgtgccactcttctgggtgacgtctggagattcctggaacctaaaataactatccttgaacagggaaggaatacagtgggagaaagggcatttgtccrgggcctcttaaggccctctctgctgcctctcttgtaagtgaggtgtatggcagcactggctctggtgcagctgaaattgcagtactggcttagtgccat

SEQ ID NO: 90538 - DNA, 600 bp, Chicken  19866894398619_2
tgtaatctctgcctgcctgtgccaacaggtagcatctgaaaaggcaggagagagattatttattttgcattttccattctcataccaaacttttgcctttcatttcagccttcagatgatgagaacagtgacaacagcaacgagtgtgtggtttgcctgtcggacctccgggacactctcattctgccctgcagacacctctgtctgtgtaattcctgtgctgacaccctgcgctaccaggccaacaactgccccatctgcaggctgcgtgagtttcctgcccagraaacaagggcatcyttcttccttcctgcacttctgttaagtcagtacaggctgtgaggatgagtatgtgttgtatttaccccaccccaaagctcagtacyaaatgtgccactcttctgggtgacgtctggagattcctggaacctaaaataactatccttgaacagggaaggaatacagtgggagaaagggcatttgtccrgggcctcttaaggccctctctgctgcctctcttgtaagtgaggtgtatggcagcactggctctggtgcagctgaaattgcagtactggcttagtgccatcctagtgctgttaa

SEQ ID NO: 90539 - DNA, 600 bp, Chicken  19866894398619_3
aaacttttgcctttcatttcagccttcagatgatgagaacagtgacaacagcaacgagtgtgtggtttgcctgtcggacctccgggacactctcattctgccctgcagacacctctgtctgtgtaattcctgtgctgacaccctgcgctaccaggccaacaactgccccatctgcaggctgcgtgagtttcctgcccagraaacaagggcatcyttcttccttcctgcacttctgttaagtcagtacaggctgtgaggatgagtatgtgttgtatttaccccaccccaaagctcagtacyaaatgtgccactcttctgggtgacgtctggagattcctggaacctaaaataactatccttgaacagggaaggaatacagtgggagaaagggcatttgtccrgggcctcttaaggccctctctgctgcctctcttgtaagtgaggtgtatggcagcactggctctggtgcagctgaaattgcagtactggcttagtgccatcctagtgctgttaacacaactccctcagcatttcttttaaagcagactgaaaccccaggtcactgtgtgatgctttcctggccctgcacccttctctaaa

SEQ ID NO: 90540 - DNA, 600 bp, Chicken  19866894398619_4
cctgcagacacctctgtctgtgtaattcctgtgctgacaccctgcgctaccaggccaacaactgccccatctgcaggctgcgtgagtttcctgcccagraaacaagggcatcyttcttccttcctgcacttctgttaagtcagtacaggctgtgaggatgagtatgtgttgtatttaccccaccccaaagctcagtacyaaatgtgccactcttctgggtgacgtctggagattcctggaacctaaaataactatccttgaacagggaaggaatacagtgggagaaagggcatttgtccrgggcctcttaaggccctctctgctgcctctcttgtaagtgaggtgtatggcagcactggctctggtgcagctgaaattgcagtactggcttagtgccatcctagtgctgttaacacaactccctcagcatttcttttaaagcagactgaaaccccaggtcactgtgtgatgctttcctggccctgcacccttctctaaacctcgcctcttaccttgcacactcctgccttttctgtttgtgtgtggatcactccagtgattctaccttcttgctactctgggtctagcaaggtgggcact

SEQ ID NO: 90541 - DNA, 600 bp, Chicken  19866894398623_1
tgtcaccctgtaacagagactgaggtataaaaaagttggcaaacttgctctagaacttagttacagacaatagatttttttttccaggactttttgggtggacctgggtattaatcacacatttccatcagacatcaccattttgaccatctgttcaaaagactatcataaatgaatgcaaaggtgattctgcagagaattcaagaagccaaagaataaatattaccatcacattaccatgtccctgagagggaggaaagagaaaagatttaattttctttctctttgatgttgttctcrgtattaaattacagaatcttgcaggaggagaaaaagaaaaaaacttttggaagttgcaccctttrtttatcttttttgcaaygtagcagacaamtacttgccagactctacccttattactcatactaggaggaattcaaaatgtcattcctgtttaaaacaactttgaaaaatgagagccttgtgaggataggccaaagcatttagataagtcaaatatgtaaagaccatacatttttgtaaatcactactggatttggtatgtttttcagaggtatttaagaataagaagtgacttgg

SEQ ID NO: 90542 - DNA, 575 bp, Chicken  19866894398623_2
gacaatagatttttttttccaggactttttgggtggacctgggtattaatcacacatttccatcagacatcaccattttgaccatctgttcaaaagactatcataaatgaatgcaaaggtgattctgcagagaattcaagaagccaaagaataaatattaccatcacattaccatgtccctgagagggaggaaagagaaaagatttaattttctttctctttgatgttgttctcrgtattaaattacagaatcttgcaggaggagaaaaagaaaaaaacttttggaagttgcaccctttrtttatcttttttgcaaygtagcagacaamtacttgccagactctacccttattactcatactaggaggaattcaaaatgtcattcctgtttaaaacaactttgaaaaatgagagccttgtgaggataggccaaagcatttagataagtcaaatatgtaaagaccatacatttttgtaaatcactactggatttggtatgtttttcagaggtatttaagaataagaagtgacttggaattccgaggtccaattctcctaaggggattttgccacta

SEQ ID NO: 90543 - DNA, 558 bp, Chicken  19866894398623_3
tccaggactttttgggtggacctgggtattaatcacacatttccatcagacatcaccattttgaccatctgttcaaaagactatcataaatgaatgcaaaggtgattctgcagagaattcaagaagccaaagaataaatattaccatcacattaccatgtccctgagagggaggaaagagaaaagatttaattttctttctctttgatgttgttctcrgtattaaattacagaatcttgcaggaggagaaaaagaaaaaaacttttggaagttgcaccctttrtttatcttttttgcaaygtagcagacaamtacttgccagactctacccttattactcatactaggaggaattcaaaatgtcattcctgtttaaaacaactttgaaaaatgagagccttgtgaggataggccaaagcatttagataagtcaaatatgtaaagaccatacatttttgtaaatcactactggatttggtatgtttttcagaggtatttaagaataagaagtgacttggaattccgaggtccaattctcctaaggggattttgccacta

SEQ ID NO: 90544 - DNA, 546 bp, Chicken  19866894398623_4
tgggtggacctgggtattaatcacacatttccatcagacatcaccattttgaccatctgttcaaaagactatcataaatgaatgcaaaggtgattctgcagagaattcaagaagccaaagaataaatattaccatcacattaccatgtccctgagagggaggaaagagaaaagatttaattttctttctctttgatgttgttctcrgtattaaattacagaatcttgcaggaggagaaaaagaaaaaaacttttggaagttgcaccctttrtttatcttttttgcaaygtagcagacaamtacttgccagactctacccttattactcatactaggaggaattcaaaatgtcattcctgtttaaaacaactttgaaaaatgagagccttgtgaggataggccaaagcatttagataagtcaaatatgtaaagaccatacatttttgtaaatcactactggatttggtatgtttttcagaggtatttaagaataagaagtgacttggaattccgaggtccaattctcctaaggggattttgccacta

SEQ ID NO: 90545 - DNA, 600 bp, Chicken  19866894398629_1
cacaggatattgcaatatcacctctctctctattttgatccatggattttcttttcacagaaactgtttttaattattaaaaatttaattaataactctgcgctgttcaaaacttcaaatcagggtgaggactatgttttgtgtaaacatatggtaaaaagatttgtttctgaagactgatttaaaattaaaaaaaaaaataatagcttgctttttcctctttctgtttcttttcacattcataatttagcatacatttacttaagtcagaggctgtgctttgcaaagtgaatgaagcayataaaccctgatatatattatgtctttgtatatgaggtagataagataaatttattaacatttttcctgacagttacattaatcatcttaacaccctgtgatttttttttcttttttttgccagtgaagtgcaatgacaattggtcaatattaaagagcagtcatcatattatgaagataacatctatgtaagctgaagcaaacaaaaacaagacgtgacattttgaaaatcataacttacttttaatagggttaacaactaactgcttttgaaaataaactattggaaattgttcctat

SEQ ID NO: 90546 - DNA, 600 bp, Chicken  19866894398632_1
caacagctttgcaggacgctcttgcaccaatctataattttccaaagaatacatagtttggaagttgtgccatcatttacgttcagctccacgagagaacagtgcactgtttgagtctcagagtttttgaggaagtggacacaagataagatggtgtgttggatggccagatggagacaaaatggggtgctgtcttttaaaggtgctggaagtacttgtgaagtgtaacgtatattttcttcctagtaacctgtaatcatggaaatggtggctgtcaacatacatgtgatgatgctgatmatgggcctatttgtggatgtcaccccaagtacatcatgcatacggatgggaaaacctgcctgggtcagtatatagaggagaggagtagcgtttgctgatgaccagctcaagagtggtttgatattactgcatgtccatgactaatgttcctcttgctagtagagctagaaagcgcctaggaatccaaagttaaaaaacatgctagtgcatgagttgagtgagctggttgggtccaggcaatttatgcttccctatgtgagtagctacctcggattactgcagcctgtaattagcactggt

SEQ ID NO: 90547 - DNA, 600 bp, Chicken  19866894398633_1
tttccttatttttctaggaatggatttgtagtgacccacctaattcttcaaggatctttggaaattaattcttgattcgtttggctattgactgtacagctcttttttccattttgctattagcctttatctttaagtaaattaaattgcgtttaactggattttgtgggtatcttgcttaaaggtacttgtaagggcttttaaaactcaatttgtaactattctatacatcttaactgtaactcaggactgtaaattccttagattgaccacgaaacctgacttgtaaccagagaggaraagcttaccgtcaggctgttttgtgaactagctttttgtaggtaagctgtcaacctgctaggtttgggatgtatctgtatgtcaactacttgctagctcggcttctgtgcttcagcagaatagagatgcaggaatttacttgcccgattcaagtgaactcctataacctagttacaacctagttgcagcaaaaaaatttacrttaaatccttgtgaaataaactagcatgcctcaaaaatcagtttgtacctccacatatagtgagacagtgtgcttgaactaaggttactcagaggtaa

SEQ ID NO: 90548 - DNA, 600 bp, Chicken  19866894398633_2
aaaactcaatttgtaactattctatacatcttaactgtaactcaggactgtaaattccttagattgaccacgaaacctgacttgtaaccagagaggaraagcttaccgtcaggctgttttgtgaactagctttttgtaggtaagctgtcaacctgctaggtttgggatgtatctgtatgtcaactacttgctagctcggcttctgtgcttcagcagaatagagatgcaggaatttacttgcccgattcaagtgaactcctataacctagttacaacctagttgcagcaaaaaaatttacrttaaatccttgtgaaataaactagcatgcctcaaaaatcagtttgtacctccacatatagtgagacagtgtgcttgaactaaggttactcagaggtaataggtctgtttctgttcttcgttttacatttgctttctcatctccctcctgtgcttgctaccctggctcaccttgagtccagaagctctcgcatgttctgacagacagctggtgtccctgtatgcccactgtttggctttatttccactttggagtgtctctttgctacacctgcctttatccatatttccaatctgtgtag

SEQ ID NO: 90549 - DNA, 599 bp, Chicken  19866894398636_1
  misc_feature (1)..(136): n is any nucleotide
nnnnnnnnnnnnnnnnnnnnnnnnnnnnnnnnnnnnnnnnnnnnnnnnnnnnnnnnnnnnnnnnnnnnnnnnnnnnnnnnnnnnnnnnnnnnnnnnnnnnnnnnnnnnnnnnnnnnnnnnnnnnnnnnnnnnnnnncctagcctcctgccctgctgctgcgctgagagcaagcctgacactcaatctgctgcctggctaagacccaacatctgtgctgagcagctgggcactgcccgtgggacacctgggcaccgcgggacacctgggcaccatagggacagctgggcatcacagggatrcctgggcactgccacaccaggctctgctcacttggacgtctgggcactaggggaaaaataggcaccatgggggtacctgggcatgggcacagttgggcaatgcctgcagggacactggccaccagattgacmtggtcaccacccagaagggacacccagggcactgttgaaggggatgyrtgcctctgcgttctctgggcagggtggtaccatgccagggatggtgctggctgcaggaaatgggaaacgtgggctgtcaccagcaaggggaggtgacggtgactcagtggtggtgcctg

SEQ ID NO: 90550 - DNA, 599 bp, Chicken  19866894398636_2
  misc_feature (1)..(4): n is any nucleotide
nnnncctagcctcctgccctgctgctgcgctgagagcaagcctgacactcaatctgctgcctggctaagacccaacatctgtgctgagcagctgggcactgcccgtgggacacctgggcaccgcgggacacctgggcaccatagggacagctgggcatcacagggatrcctgggcactgccacaccaggctctgctcacttggacgtctgggcactaggggaaaaataggcaccatgggggtacctgggcatgggcacagttgggcaatgcctgcagggacactggccaccagattgacmtggtcaccacccagaagggacacccagggcactgttgaaggggatgyrtgcctctgcgttctctgggcagggtggtaccatgccagggatggtgctggctgcaggaaatgggaaacgtgggctgtcaccagcaaggggaggtgacggtgactcagtggtggtgcctgcagtggtgccagtgtttctggggcatgtcagaccctgtcctgccgatccactgtgcccagcatgatgcctgcgtcagcccagggattagccctgctgtcccctctgcatttcctgctgcagtttcgggtgag

SEQ ID NO: 90551 - DNA, 600 bp, Chicken  19866894398636_3
ctcaatctgctgcctggctaagacccaacatctgtgctgagcagctgggcactgcccgtgggacacctgggcaccgcgggacacctgggcaccatagggacagctgggcatcacagggatrcctgggcactgccacaccaggctctgctcacttggacgtctgggcactaggggaaaaataggcaccatgggggtacctgggcatgggcacagttgggcaatgcctgcagggacactggccaccagattgacmtggtcaccacccagaagggacacccagggcactgttgaaggggatgyrtgcctctgcgttctctgggcagggtggtaccatgccagggatggtgctggctgcaggaaatgggaaacgtgggctgtcaccagcaaggggaggtgacggtgactcagtggtggtgcctgcagtggtgccagtgtttctggggcatgtcagaccctgtcctgccgatccactgtgcccagcatgatgcctgcgtcagcccagggattagccctgctgtcccctctgcatttcctgctgcagtttcgggtgaggatgggacagcgtcccaggggctgcccctctggccgggtgcacccatg

SEQ ID NO: 90552 - DNA, 600 bp, Chicken  19866894398636_4
tcaatctgctgcctggctaagacccaacatctgtgctgagcagctgggcactgcccgtgggacacctgggcaccgcgggacacctgggcaccatagggacagctgggcatcacagggatrcctgggcactgccacaccaggctctgctcacttggacgtctgggcactaggggaaaaataggcaccatgggggtacctgggcatgggcacagttgggcaatgcctgcagggacactggccaccagattgacmtggtcaccacccagaagggacacccagggcactgttgaaggggatgyrtgcctctgcgttctctgggcagggtggtaccatgccagggatggtgctggctgcaggaaatgggaaacgtgggctgtcaccagcaaggggaggtgacggtgactcagtggtggtgcctgcagtggtgccagtgtttctggggcatgtcagaccctgtcctgccgatccactgtgcccagcatgatgcctgcgtcagcccagggattagccctgctgtcccctctgcatttcctgctgcagtttcgggtgaggatgggacagcgtcccaggggctgcccctctggccgggtgcacccatgc

SEQ ID NO: 90553 - DNA, 599 bp, Chicken  19866894398667_1
  misc_feature (1)..(71): n is any nucleotide
nnnnnnnnnnnnnnnnnnnnnnnnnnnnnnnnnnnnnnnnnnnnnnnnnnnnnnnnnnnnnnnnnnnnnnnatatccatctgggaagaatgaaagaaaaccaggaggaccaacttctattttagtcaaaggtgatagacctacgtcagtgtgtcaagcaagttaccgttagtatagatcacatggagacacaaagtacaagggttgctccgaaagtaatgcctcctgttttataatgctggcccattgcatcaaaggtggatgttggtgggatggaagtagaggttgaatcttcccaccratattctgttacactttattgtcatgtgacaggtggcaccagagaggcagtctgtcaaaatggtgtttgacaaggaaatgcgtatgaagcaaagrggtggaattgaattcctccatgcagaaaatttgtactcattgacattcaacaatacttgctgaacatttatagagatcattattggtggatgttagcacagtgacactgtgtatggtgtgttttagcggaggcaacagcagcaaaacaaaccatgctctggatggacacgaacagcagtcacaccacaaaaagaagagcttctt

SEQ ID NO: 90554 - DNA, 590 bp, Chicken  19866894398667_2
aaaaccaggaggaccaacttctattttagtcaaaggtgatagacctacgtcagtgtgtcaagcaagttaccgttagtatagatcacatggagacacaaagtacaagggttgctccgaaagtaatgcctcctgttttataatgctggcccattgcatcaaaggtggatgttggtgggatggaagtagaggttgaatcttcccaccratattctgttacactttattgtcatgtgacaggtggcaccagagaggcagtctgtcaaaatggtgtttgacaaggaaatgcgtatgaagcaaagrggtggaattgaattcctccatgcagaaaatttgtactcattgacattcaacaatacttgctgaacatttatagagatcattattggtggatgttagcacagtgacactgtgtatggtgtgttttagcggaggcaacagcagcaaaacaaaccatgctctggatggacacgaacagcagtcacaccacaaaaagaagagcttcttaaccagctcatccatgtgaattgactaatgggggtgactatgttgcaaaatagtgttttgtagctgagaatttgctctatcaaata

SEQ ID NO: 90555 - DNA, 600 bp, Chicken  19866894398672_1
aaatatttcaccatcctgagttgcagttcttaccctaagcaggttttttttttttacttaactgtagcttttttctttcatttctaatgcagctcatccttatttcatgcatgaaaaattctgaatacctggggacaatttacctgtaagctacacatgctgctttatatttcctagccagcaacgtgccaagctgtttcttgcttacaaagcatctagaacctgaaaaacattttcagattgaatctttttattttgtatcacttacttcattactatagcaatatgcaagcccaaagraaaaaaaaaaggccactttcatcactttcattcaaaatactcttttaacaggaaaaaaaagaagcacggtaagacatgcctcaagccataagctaacagccctcagctattctaatgccttcycagcagacagaagtcagattaaactgatgaaagtcatcaagctgttgggtgctgccaaacagccactgaaagacatagacctacagctcttgcccaaattcagtggcaagcagcaatacctccacagaattccagcagtatggaaggactasaagaatgaaggctgtatggctgctg

SEQ ID NO: 90556 - DNA, 600 bp, Chicken  19866894398672_2
aatacctggggacaatttacctgtaagctacacatgctgctttatatttcctagccagcaacgtgccaagctgtttcttgcttacaaagcatctagaacctgaaaaacattttcagattgaatctttttattttgtatcacttacttcattactatagcaatatgcaagcccaaagaaaaaaaaaaaggccactttcatcactttcattcaaaatactcttttaacaggaaaaaaaagaagcacggtaagacatgcctcaagccataagctaacagccctcagctattctaatgccttcycagcagacagaagtcagattaaactgatgaaagtcatcaagctgttgggtgctgccaaacagccactgaaagacatagacctacagctcttgcccaaattcagtggcaagcagcaatacctccacagaattccagcagtatggaaggactasaagaatgaaggctgtatggctgctgataagtagccaggctccaagctcaagtgctccccagaaatcagtctttcctatcctcagcactggaggaagaagaggaaggaaaaggtgaagcagcctcctcacagaacaccaaccagagaat

SEQ ID NO: 90557 - DNA, 600 bp, Chicken  19866894398672_3
ctatagcaatatgcaagcccaaagaaaaaaaaaaaggccactttcatcactttcattcaaaatactcttttaacaggaaaaaaaagaagcacggtaagacatgcctcaagccataagctaacagccctcagctattctaatgccttcycagcagacagaagtcagattaaactgatgaaagtcatcaagctgttgggtgctgccaaacagccactgaaagacatagacctacagctcttgcccaaattcagtggcaagcagcaatacctccacagaattccagcagtatggaaggactasaagaatgaaggctgtatggctgctgataagtagccaggctccaagctcaagtgctccccagaaatcagtctttcctatcctcagcactggaggaagaagaggaaggaaaaggtgaagcagcctcctcacagaacaccaaccagagaattatattagaaaaacttacagcaaattactgaaataacacaaaatgcatcatgttgttccaggaacacttctactttacgaactttgctgtcttctcaccacacagattgccaacagtcatgggatatttctgtccctgggagcgcaaagttg

SEQ ID NO: 90558 - DNA, 600 bp, Chicken  19866894398676_1
tattataaatataaatcccctctcaatggtagaaatcattatagatccaaaccttggcatagtgtgaacacttttcaatttgctgtaatgagaggacattcaagaatgaacgaagcaacttctggtttggtatgctgctatgacgtaatagataaaggcaatagctcatgaaagcacttaaagttcacgttttcctgctcttgagtcaaaaaaagataggggagatattaaatccattgtacagacctctctgctcactcctagcgagacactagcaccagagctgtcttcttctcttargattttctgcatgagagctgtagattctctgttgctttgtccagtttccacaataactgagtctaaataaaataatcacttattactgaaagatggaggaaaatcacgctcattcagaggttatttatcttaacattctgattgcatttagttacaakaaaaataaatgacttagattattaccaaaatacacagagagaaacattccaagaattggtattagtcattttataattctgaaatatttacaaggacagaaaaacaaaagaaaagagagaataaaattatattttaaaagtt

SEQ ID NO: 90559 - DNA, 600 bp, Chicken  19866894398676_2
caatagctcatgaaagcacttaaagttcacgttttcctgctcttgagtcaaaaaaagataggggagatattaaatccattgtacagacctctctgctcactcctagcgagacactagcaccagagctgtcttcttctcttargattttctgcatgagagctgtagattctctgttgctttgtccagtttccacaataactgagtctaaataaaataatcacttattactgaaagatggaggaaaatcacgctcattcagaggttatttatcttaacattctgattgcatttagttacaakaaaaataaatgacttagattattaccaaaatacacagagagaaacattccaagaattggtattagtcattttataattctgaaatatttacaaggacagaaaaacaaaagaaaagagagaataaaattatattttaaaagtttactttaagkatacagactgtattacaaattctttacctcaagatcacgtctaacagttgcctatttttcagctctgtaatgccaaatgccatgcttctcactgacctgagcagaacagagaggacttttctcctttccttccctttgcctaactcct

SEQ ID NO: 90560 - DNA, 501 bp, Chicken  19866894398676_3
atgagagctgtagattctctgttgctttgtccagtttccacaataactgagtctaaataaaataatcacttattactgaaagatggaggaaaatcacgctcattcagaggttatttatcttaacattctgattgcatttagttacaakaaaaataaatgacttagattattaccaaaatacacagagagaaacattccaagaattggtattagtcattttataattctgaaatatttacaaggacagaaaaacaaaagaaaagagagaataaaattatattttaaaagtttactttaagkatacagactgtattacaaattctttacctcaagatcacgtctaacagttgcctatttttcagctctgtaatgccaaatgccatgcttctcactgacctgagcagaacagagaggacttttctcctttccttccctttgcctaactcctgcacagtgttgtagagttgcagctgtagctccacatcagctttggttatttat

SEQ ID NO: 90561 - DNA, 600 bp, Chicken  19866894398678_1
caaaagccccacagggcgccgcctgcttgagtgcatccgaacctccacatgggctgcaatgccaacacaccaccaccctgcccacggcccctcagcccaagcaccgtaaccaagacaagttgggggtattttggtcaaatccagcagcagctctgcgcaccagaagcacagctttcaccaggcctgtgtgcagcaggagggctcggggctccgagcagaagccaggctgctgcttggcacaccatgccacttagagcttgactacagccatgcgtcagcaagccaaaggaagccaaatayaagttacccaaatatttttagagcaatcagatggaaaacattagttcctaatgctctgtgggcacgtgtctctgaatgatgttttgcttcatcagatcttttcattaactattactttggtgtccaagaagcacccactgccccacgtggctgcatcagctccagtcccaaaacctctgtgcccctcctggtaacaggaattaccacatcatcacaacagacattcagcactgccatcacaaacaactcccagcctgataacttggcatcttatcactcctccctacagatttattccag

SEQ ID NO: 90562 - DNA, 600 bp, Chicken  19866894398680_1
ttcaaggttttcacttcactgcacagcactttgttcctggcttttgttgcatcaaggttttttttcacttcctcatgatttttttggagagcatcgtgttccatagtgagtttctgcagtgatgcaaacacatcagaggaaatgacagttatagcctatcaccaagccctgcatactttggtgagcaaaaggagtcacgcgttgcctggaagaattggaagaaaaaaggcattgacatatcatatccctcctaaataagtagaaattataaatagtactgctcactatctgtttgccacmaccaaaaaaagatcagtctgatcagaaatacaagtagacaaggttgattcagcatgtcaggaagcacaagataattttgtgttacagtgtaattctgtatgctgctctttcatttgcctcattattctccatggggaaactttcttacttccaggtacaggctggtgatgccacagtgcctactagaagcagtgcctggcatatgctgtctcctgtgccatgccttcacctagctggaactggtcagagagcactctaatagtcttgtagtaatggacaagtacaagaaatctgggggag

SEQ ID NO: 90563 - DNA, 600 bp, Chicken  19866894398684_1
cgttgcattcaaaagcattcatttgcacaggaaaatggcataagggattgcttagatctctaatcaaatacagctcagatcctacagtagtttgtgtcctccatcccatggatttcatttacagttggctcatattttgacaccactatacatgagacacactcagaacacaaattcctacctacaaggaaaaaaaaaaaaaggctgatttgcagttcctaaatctgagataaaatgtttgtcaacatgaaatcagcaatattaaaaagggagccatctcagtcctaggcttcgtcctaygttacagcttcttcagcttcatatgtgtaatgcttggacagagaacactctcagccagtatatcatattcgttgagtttgtattctttccttcctatgttaggtaatgcaaagcctgaaggagatgggagatgcatctattttcccctatgcatttttccaagaaacgtgtgcagtgtctatcaatgccagctatgtgccacttatctcccttgtctcttaaatagaaagcctatttctctcttccttaagctctccttttctgataagttaaaaaaggaagaaaaagaaatgacttcac

SEQ ID NO: 90564 - DNA, 599 bp, Chicken  19866894398694_1
  misc_feature (1)..(7): n is any nucleotide
nnnnnnnggaatggcagtgacaagtgcctgcaggagctgacttcgagtgaaagctggcaacattggaaacctatatagtggtaacatcgagttcataagtcctgatttatctagcattctttgtcgtctttagctcattgttaactgagaggctctgtggttagaccagctctaatgcggtctgtgttgtacctgacaggacgttttctttcacatgggtgttctttaacagacaatgtaggcttatctttttctttaaaatctattaatgttatttactttctgaaatagcattagccycctgggcctccttattttcacactagagctagttggcaaggatggatacctgtcatgatttaacacacacatcaaaatgaaatgggaattttgccatttgtcagtaacagaaactactgaacatgaagccattctaaaatacagttaaaaaaaaatctctctttggtggagtctataaaagaaagcattaaaaatgctcgaatttcatccttcttgctgtcacttctgaaacaggctggaacagaagccggtgctgtcccagcagtgaagctggacatgtgcagagggagtgcagctgt

SEQ ID NO: 90565 - DNA, 600 bp, Chicken  19866894398694_2
acaatctaacatcacctgcagcaccagatgacttctttagtattatactggtacctgggatggcaaattatgatctctaatgagggtgaagcaaacaaaatacattcattctagtaataaactgattatattctgatcttctaaagttttgggtgatgattgagtacagtcagccgtctgtaaatgcgtatcaccaggatttgttgtgtaggacccttgtgggctccgttttccaccaagtctgagccacccctttgttttccattcccttctcctagagcaagcatttcccatcccttkttcctatttgttttttgtcacttttttaatattcaagcctatatcgtagtcaggtttctagaagagcgacaactgcacaatgatatatagttatcaaagtcataaaaatacaattgtcataaattaggtgtgagtgggaatagacatgaataatacataattctaaaatacagaaatgccttagaagctaaatatgaatgaaaataccattggtgacaaaaaaaaaaaaaggaaataagttaatattccacattctagctggtgccaaaaccactttgggccatgcaagagatctagaat

SEQ ID NO: 90566 - DNA, 600 bp, Chicken  19866894398697_1
ttaattacacggaatgtttgttttctagcatttcatttagcagttaataaactgccttacatcctcaaacataacatcttctctttcggtcacacacacacacacacacaagctcacactgtaaaatcacagccagatatggctttgacgggagcgctattaaaatgaaggatgcagggggttgttaagggtttgctgacagtgaaagttggatttgcaaacctgggagaggtgtttcttgcttcccaaacatttacactttgaagagagaagctttaccagatctagtctgcctcctcmtttaaaatcttgctggaaagttgcattgctgcaaagctgatggatgttgcattggtgcaaaaaggccttccttccacattcactgagcaaaaatcagcttcatggttcacatatgttaatactgtgaaccattttataactttccatactagtgttatttctaaataatcaccaaaattataaatccagtcctaaaattgctttttaatgtaatatagttaatatgaaaactagtctaacacaggcggttgtaatgccaacagtgtaagaatatattccaaaaagaacttgttaatacat

SEQ ID NO: 90567 - DNA, 600 bp, Chicken  19866894398700_1
tattacaaaatttagtaaatattaacaaactgtcttacaagacagctcgaacagcttgtcagacctggaaagtttcttattccctgacatacaagacgaggggccatgtttggcaagcagaccctgggatgggacagggtaatttgggtcatgtactgctccgtcaggtcccagaaagcacaggggctgtttgcagtacctacagcagaggctctgagctcagtgccaatgggatgcacaagcagccgctgctcccacacaggcacaaactgaatcctacaggagggctcctgccccttmccccccccccgtgccacctgtgatccagcaccaaatctcgctccttcgcctcacaaaacttacactgctaaaaggatacatctgcctttaagtaaatgccagtgagaaagttgcagctgaagaggatttaagagcgctgtgctcagctcagcaatccatactgaaccctaacgagagcatctcatgggcacgctcgctgtaattattacataagaagtagtttaatatgcgattaagttcctgtatcttttgtgctccactgacaaaacacaaggcaaggcaacagaggagctttataat

SEQ ID NO: 90568 - DNA, 600 bp, Chicken  19866894398700_2; identical to SEQ ID NO: 90567

SEQ ID NO: 90569 - DNA, 600 bp, Chicken  19866894398700_3; identical to SEQ ID NO: 90567

SEQ ID NO: 90570 - DNA, 469 bp, Chicken  19866894398701_1
cctgggaatggtgccagaggaactacttactgttctaggcatgcatacaaagatccagtgttgaggatccagtatgtcagtttgatgaagatccaacagcttttaccaggattgcaaattttcagttcaattcctacttctgaataacttgggatatcctttgtgaagagtaggaataaggcagaaataaataaatacatgaagaaaaacactgaaaacctttcaattttagagaattctttcctgagcctggaatttcatctttggccctgcactccgatataccagccatgtaattcraaatatttccaaatgaaggccagtaacactgctccacaacatgagaaagcttcatattcctcaaggcagacatacaagggtcagatatctcttccttccagtacagttagcagtagcaaggaaaggtgcagaaatactacttcctgtcactgtctaatattcaagtctg

SEQ ID NO: 90571 - DNA, 600 bp, Chicken  19866894398703_1
ttctcttttttttttttttaccccgtgtgccttttaaataattttaaagctgccaaatttgttttatgtgattctgaaagagcaggctgcctctggctgagaccacacatgccaagcaacgcatctgtgtaggctgctcaaatgtttgtgcagcatttacggtgccccagatgaaaggctccacacaagtgcaaagtacccttatttttatggttgctacttttgtctgactctgaaaatgaggtgaggactgggctgacgctttcaatctggtgatggcagcacatagcaaatgccagygtgtgtgggctggaggcggggagcagaccgacatcccgagaggcagggaagtgtgagcggttccaagtctgctcackgggggtttgaggatggtgtctgccttccaaaatccagcytgcactgcagtcagggcrtgtgtcagccggcagcccagccaggccttggcaccctgcatggctgggacaggacaggatgggatgagcagcaaagcatccagggtatggcacatcccactgccccgcagctgcacgtgggagctccaggtgcttcacagaagcagttgctagctgacatggatgg

SEQ ID NO: 90572 - DNA, 600 bp, Chicken  19866894398703_2
aagagcaggctgcctctggctgagaccacacatgccaagcaacgcatctgtgtaggctgctcaaatgtttgtgcagcatttacggtgccccagatgaaaggctccacacaagtgcaaagtacccttatttttatggttgctacttttgtctgactctgaaaatgaggtgaggactgggctgacgctttcaatctggtgatggcagcacatagcaaatgccagygtgtgtgggctggaggcggggagcagaccgacatcccgagaggcagggaagtgtgagcggttccaagtctgctcackgggggtttgaggatggtgtctgccttccaaaatccagcytgcactgcagtcagggcrtgtgtcagccggcagcccagccaggccttggcaccctgcatggctgggacaggacaggatgggatgagcagcaaagcatccagggtatggcacatcccactgccccgcagctgcacgtgggagctccaggtgcttcacagaagcagttgctagctgacatggatggcgctttcttctccttgtctgtcgtgggtatgaaggcttctcctgcagactgaaccctgggagccatcaccaaagcac

SEQ ID NO: 90573 - DNA, 600 bp, Chicken  19866894398703_3
caacgcatctgtgtaggctgctcaaatgtttgtgcagcatttacggtgccccagatgaaaggctccacacaagtgcaaagtacccttatttttatggttgctacttttgtctgactctgaaaatgaggtgaggactgggctgacgctttcaatctggtgatggcagcacatagcaaatgccagygtgtgtgggctggaggcggggagcagaccgacatcccgagaggcagggaagtgtgagcggttccaagtctgctcackgggggtttgaggatggtgtctgccttccaaaatccagcytgcactgcagtcagggcrtgtgtcagccggcagcccagccaggccttggcaccctgcatggctgggacaggacaggatgggatgagcagcaaagcatccagggtatggcacatcccactgccccgcagctgcacgtgggagctccaggtgcttcacagaagcagttgctagctgacatggatggcgctttcttctccttgtctgtcgtgggtatgaaggcttctcctgcagactgaaccctgggagccatcaccaaagcactgtttatatcaaggtccaggtagcactgcttgtactgag

SEQ ID NO: 90574 - DNA, 600 bp, Chicken  19866894398703_4
tgctcaaatgtttgtgcagcatttacggtgccccagatgaaaggctccacacaagtgcaaagtacccttatttttatggttgctacttttgtctgactctgaaaatgaggtgaggactgggctgacgctttcaatctggtgatggcagcacatagcaaatgccagygtgtgtgggctggaggcggggagcagaccgacatcccgagaggcagggaagtgtgagcggttccaagtctgctcackgggggtttgaggatggtgtctgccttccaaaatccagcytgcactgcagtcagggcrtgtgtcagccggcagcccagccaggccttggcaccctgcatggctgggacaggacaggatgggatgagcagcaaagcatccagggtatggcacatcccactgccccgcagctgcacgtgggagctccaggtgcttcacagaagcagttgctagctgacatggatggcgctttcttctccttgtctgtcgtgggtatgaaggcttctcctgcagactgaaccctgggagccatcaccaaagcactgtttatatcaaggtccaggtagcactgcttgtactgaggtccaggtagcaagccct

SEQ ID NO: 90575 - DNA, 600 bp, Chicken  19866894398708_1
agaaaggagatgttaatactcctgctcacgtctgcaagatgaacaggacccattgatcttcctacattttgcaacccctttctgccagtagtttccatgcctcatggtgttaggcactagaaacataacaaagcacaaggtaccgttccagatttgaatgagcagctgcacaaagactggacaactgcagagctgcacttcacctggtagagatactgatacactgatactttttgaccagattctacaaaagctggagagtctgaagtctggaatcagtgagagagcagtggttttttwgtagacagagttagctaagcctggaggactactgaggaaaacaggaagcttttttatcttagtaaacacatctcagcaaaaaggcatctctgaaatacaggagaccattagccaattttaacagaaaaaaaaaacaacaataaataatgttgtatttgaagagttttgtataggagttaatgagtgcaagatgcacaagcacagggatgtattacactcatgttagttttacaatcgacagaattatgaatcttaattttaattacgaatgctaattttatgttattatactaaaataag

SEQ ID NO: 90576 - DNA, 532 bp, Chicken  19866894398709_1
attaaacagggcctggaagcaaggataatgagatactacaagcaagcctttacacaattaaccattccttccagggtaccttttcctctaggggataatacagccagagcagctgaaaagattttacttttatttgcaggagaataggggaggactcagtgggcatgtttttattccactgagcctacttatgtcccaattaaggacaaaaaccacaccaagaaaaacattgcaggacaaagcaggtgctctcggagagagcaggtgtatttttgcctacataaatagacagaaaagtasaaaaacaaactgagcagagaaatccgaagcagaattcaagggcaactctcccagaggagaccggaaagtgcaggggagctaagagcacgtgcctgcttgaaacaaattcacatttacaatgtagaggaggaactctgaaagccactgcctgcacctacttactgcaaccaaacacccactaacaaggaattaaagaaacaagagttcatctacccatggcgtaagctgccat

SEQ ID NO: 90577 - DNA, 599 bp, Chicken  19866894398713_1
  misc_feature (1)..(4): n is any nucleotide
nnnngtaaggtttgggcttggctacttcaggcactgcagtcaccatcttggcctttatctctgttactgtgtgcagtttggtgtgcgtttatcagcccgttacaaaagggttcgagtagtaaaacacgtgtagctattcagatttatcagctgaaacagcggtctgttggatcagagcttaacagaagccaacctcctgatgttgtgtgatgtttcggatgccttccgttgaaatcaaaattgaaattgcaagggaattgggctaatttggttcataaaacaaagaagatctttgtgacrgaatcgtctgagaattctagaatgagagtaattttgaagccaaaatttattataacctcagtgagtgcaaaatgttatttattttgacatgaacgatgttggttaatttgatgtttgctaattcctcccctgtgttaaaatccaagggacgcaattagaaaagtttgttttcctaacatgccttaataaacaatatgctgttcttacttaatgatgtctcatcaaatggcctcaatgtctttaaagctggcttcagtcgtgctgggggatctggaggagcgaccagggaaattccagga

SEQ ID NO: 90578 - DNA, 600 bp, Chicken  19866894398718_1
ccttgaggcactgttcctcaacaatgtctagctcacatgatgccagatttcaacaaaaacagattctaatacaccccctaggcacccacaaaatttcactgtatttgaaataagcaattgattttatagcaccttaaaagatcgttaattacagcaaagcttctctctgcatgtggcaacagtagaccgacctaagttaagtgatggtagtgacatcaaagtaaatttaaaagcagtaagagaacaaatgactttggcttttactcttactattatatatggggtaaattctacacagarcaaattgccatccattaattcaaacaccagcctttcatgcataaccrgtctgtgagatattttctcctttgattagctatttgctctcttaatctccaggagaaaaagagaaaaaagaaagaaaggaagaaaaaaaaagaacagacactatgtttcaaccttctgctcaaataaagcatgcttccaggcaacgcgatccgactttcttctctctgcatcatgacacagcaaacggatatcaaaacgacaacctgataattgtcttgagctgttgtgatagctgatgaatataaataagta

SEQ ID NO: 90579 - DNA, 600 bp, Chicken  19866894398718_2
tttcaacaaaaacagattctaatacaccccctaggcacccacaaaatttcactgtatttgaaataagcaattgattttatagcaccttaaaagatcgttaattacagcaaagcttctctctgcatgtggcaacagtagaccgacctaagttaagtgatggtagtgacatcaaagtaaatttaaaagcagtaagagaacaaatgactttggcttttactcttactattatatatggggtaaattctacacagarcaaattgccatccattaattcaaacaccagcctttcatgcataaccrgtctgtgagatattttctcctttgattagctatttgctctcttaatctccaggagaaaaagagaaaaaagaaagaaaggaagaaaaaaaaagaacagacactatgtttcaaccttctgctcaaataaagcatgcttccaggcaacgcgatccgactttcttctctctgcatcatgacacagcaaacggatatcaaaacgacaacctgataattgtcttgagctgttgtgatagctgatgaatataaataagtagccacaagcatgctttggagcacttttttgaaaaaatatcttgcaat

SEQ ID NO: 90580 - DNA, 540 bp, Chicken  19866894398718_3
tgcaatacatgaaacaaatattttatcagtattttctgcaccagaaaaacacctggttccggggtgttcctggcggccccacacagcaccacatggccacggcctgcctccttttaactcattctcctcactcaacgtatttcttacttgactggatttatgttgcttttaaggatttataaggaagatccaaatctatttaaagttgtttcttcaactccgttcctttttgcagaggtacgtatttaccctagctccactggaaaaatgacacagtcaaaataacacacacagaaaatygtgccatttataattaccccccagttctgtcagttgagaagtatcctgcacaatttactgcctactgagatgcaatcaaaattaaatgggtggaaataactctgaagtggcagcttcaagctccaccaaaggagtgcagggtcttatttttacaacaacacagaaagtcgccttctgggtcaaactcattgtctgttttgcctccagctgcagcgatgtgaatactgttctttctggggg

SEQ ID NO: 90581 - DNA, 600 bp, Chicken  19866894398719_1
atttaaaatttagatgctactgttaccgcatgcttgttcttcctatgcctcaattttagggaagctgactttcaattacttctgcagctacatcactagctctgctgtttcagttcatgctctctataatcttttaaaagagataaataacagtttctgttttgggacacacatagctttttggtttattccctttcactctgttctttatctagcaacagcagagaaaattaaaatttgatccttgataacattaatagtctagaactattatactgtggtttcggtcatgttgtttaraagtagcactgtggatgaagtatactcattaaatattttgacatttacaataataaaactatatatgtgcagcagaaataactacaggccattcctgcagtggccgttaggaatattcaagtagctaaaattgtttgctgtatttttattagctattctgatagccaaacttctttcctgactgtaagaatttatttatgatcagaagaataatagttttcaaacttgtggcatcattttggataaggtcttgtatacacttgtcaaagcaggacaggaaagctgaagaagagaaaagat

SEQ ID NO: 90582 - DNA, 600 bp, Chicken  19866894398722_1
cccaggctcttctccggcgtgatcccggaggctatattcgtcgctcgtccgcgacctccaccgacagaggggtgactgcagattccctctgtccccggccttgtccccgggcttccaccgcccagcaagtcctaacgccctgcggtgggctcctgccccatcaagcagacagccgactcgttcccctaagcatcacatcgggggtcaccacttgttgcctttcacaggcaaccgtgatgttcgttgcttaggggagcctgtggcttggtcacataccgaggtgacaccaatatgatgagyggtaaaatggcctctattcactactaaaacacagcttatattacatttttacctacaaaaccgtgctgtcatgtcccactctgattggttcataccagacaacatcgtgccctatttggccgtctccacattcttttctcattcttcttcttctcctgttttctctgcatcaaggtcagcacaatagcactgtctctctatgcttatggagaggcctgtcccatacatcccgtgcccccgcaagacgcctactacaacagtcagaggattgtactgttatcatagaatcactaaggttgg

SEQ ID NO: 90583 - DNA, 581 bp, Chicken  19866894398724_1
gtgcatgcagctcaccgccatgtacgtgccttgctcaagttgttactgctcaaaccttggttttgggtacagccacatctatctgtacacacctgaatatatatgtgcacgcacctatacaaatataagcacatctaatttccacttataactattatctgctcagtgtgtctgctttttgtccgtacagaggcagcgctgcctaattcagtgataaatgtctgtgtttaatgtcagtgttgcaggacaaatacagctgcagctgcctcagctctctcactgtgaacacatttgttaacrtgtgtcttgatttagacaacctagcagctgcaaagtataaaaatacataaatacaaaaaaatagattttttttcctaaagttataggatggggagaagacaaacatccactgaaaactgagcttttgccacagaaacgtgtcctgtgtcagtactggtgttgactgtgctgctctcaagccaaatgatcacctgttgtattttactgtgtcatgactataaggattgctgtcccaccaaattttccaacaaaataaaatgacatagaaagccacagcattt

SEQ ID NO: 90584 - DNA, 599 bp, Chicken  19866894398731_1
  misc_feature (1)..(54): n is any nucleotide
nnnnnnnnnnnnnnnnnnnnnnnnnnnnnnnnnnnnnnnnnnnnnnnnnnnnnnttaccctcttagaaaatagttttccatctgctagtcattaaacgacaggttttggttctacccttctgtctcactccaatttataggagggagaagaggttctttgatatatgtatacccagtgtgagattaaggatcaacggtccagatgttggtctgaccagtttattacaaatgttaataagggagatgaagaaaggggaggatggacactattatgtattggggtaatggggaagggaaggygagctatagaaaagataggaaatagaagcaaggagtctctataggaaccaagagggagatagtcaccaccatgggtccagtgtggttcatggtttggtcgttgcgcttcagtagaggtgggccgttgggcrttgttccgttgatgaggatggtgaccaccgctatgacgacgatgatgacgatgaaggcagcacaatcttatttataagtccaaagtggacttctggccttgccagcagataagagggagtatggagatgccaactagtatcttgccttcacaagataggatggtatca

SEQ ID NO: 90585 - DNA, 600 bp, Chicken  19866894398731_2
aatttataggagggagaagaggttctttgatatatgtatacccagtgtgagattaaggatcaacggtccagatgttggtctgaccagtttattacaaatgttaataagggagatgaagaaaggggaggatggacactattatgtattggggtaatggggaagggaaggygagctatagaaaagataggaaatagaagcaaggagtctctataggaaccaagagggagatagtcaccaccatgggtccagtgtggttcatggtttggtcgttgcgcttcagtagaggtgggccgttgggcrttgttccgttgatgaggatggtgaccaccgctatgacgacgatgatgacgatgaaggcagcacaatcttatttataagtccaaagtggacttctggccttgccagcagataagagggagtatggagatgccaactagtatcttgccttcacaagataggatggtatcatcccccaatctcccatagcagactttggtcacagactttttccatcagtaaacagtccagtaagcagtccagtaaacagtcctgagcactcctttaactcttgggccgaaggcaaacagctccaaagaaatg

SEQ ID NO: 90586 - DNA, 600 bp, Chicken  19866894398735_1
aatgatgtgatttcactgtcaaacaaacattgtatgatttcagtaccttggaccactatcaaacaactcccatacaagtgatttataggttttttaaatgcctccataatatattatcattgtagagtatcagaacatattagaagattcttgaatggaagacaaacaaatgaaatgtgtggtgaatatataacttcctacctactttctttaatgttcaaaacttatgccaaaacctgaacttttcagtttagtttagtgataattttggaattacatttatattacattattgagcaycagtgttgtgctttcaagtctatctctactgtgatctacactgtaactaacacatgatattccagcaacaatcctgttagcgatttgtaatataaatatctgtcatttaattagaaaatccactaatgatgagtcagttttrtgggagggtgttcaacagaacacagcaaagacttgaatattggaagctaagtttcatggcctagttttgtagttaaattacaccagtgacaaaacgagtaagagaagatgtctttctagaagggtagtatgtaagcacaagtgagtctattttggaaa

SEQ ID NO: 90587 - DNA, 600 bp, Chicken  19866894398735_2
gaagattcttgaatggaagacaaacaaatgaaatgtgtggtgaatatataacttcctacctactttctttaatgttcaaaacttatgccaaaacctgaacttttcagtttagtttagtgataattttggaattacatttatattacattattgagcaycagtgttgtgctttcaagtctatctctactgtgatctacactgtaactaacacatgatattccagcaacaatcctgttagcgatttgtaatataaatatctgtcatttaattagaaaatccactaatgatgagtcagttttrtgggagggtgttcaacagaacacagcaaagacttgaatattggaagctaagtttcatggcctagttttgtagttaaattacaccagtgacaaaacgagtaagagaagatgtctttctagaagggtagtatgtaagcacaagtgagtctattttggaaatacttgttttgtgtagaactatagttagctgatcacagtcaaggctataacaagcctaatatctgtaaagaaatccttcttgtatgttgacgtttttactacacaaacagaaagaagtgtatggttctcaactgaaatatta

SEQ ID NO: 90588 - DNA, 600 bp, Chicken  19866894398743_1
tgaaaatgtggaatcctaacatgattatctttgagaaatggagcttacattatttggaaagatcgtgggtagagctgttctgaggaattttgaagcaaacaaaggaggggaaaaaaatcagcagagtttggaaacagactcagaagaagagaggtcattccagtggatggtggaagatgtaatcactgacaaaatggttttgtgttacacagaataggggaagtgtttgctagaaatataggtgtgcaagtcagcaacaattgagaaaagataaaatgtgatttctgaaatctgtgaacraataaaatgatgaggaggattggtgatgcaagatgagaggacacaaaaatgaagtagaagggagttgaaagtcaagtaattgtaccgccacagcagtgcagacaaaaaagcatggggaaaaaagaatattcaatgcaaaaacaaaagtaaaacgtggaatattgagtaactaaaaatacctggaaagaatggtagttatcagtgattcatggtaaataactatcaatgatcagatgacaatcagaaaatggcaggaacagagaataatggttaaaaacaaagtaggagctaattgctggt

SEQ ID NO: 90589 - DNA, 600 bp, Chicken  19866894398748_1
ttgaaaactgcattcttcatgtataaggctggaagcaaatgagtctgcatgaataaattgaacagatgtgtcactttctattgtgcagatataataagtagctatgttttatgcaagtactatcgaattacaaactgcacaatggcaaaatactcttgcagaagcaggcgggctcccatagtaagctcagcagctgtaaacctgactctttctctatgattatgtgctgccttcatgctgaacggtttgagctctgtctttaggttataaatgtcttttgagtttttagatatttatttrgtttgagaaaagctgttgttttcactgtaagaagaaagtgaggatcatcacatttattttattttatatttgctttttgtatcagtttgcatttatccttctgttttgtggaggattttttggtggtggaggtttgcttttaaaatgagaagtcagaaaccatctacatgtctagttcagagagagatgaacaatgaaaaatggattcatttaagtctggttaaggacctggttaaaattctggctttctctacagttagagaatgtgttctattactcactttcttggattagatataa

SEQ ID NO: 90590 - DNA, 600 bp, Chicken  19866894398748_2
ttcatttaagtctggttaaggacctggttaaaattctggctttctctacagttagagaatgtgttctattactcactttcttggattagatataacaaatctgtcaaagcaaaaatacaagttatttccttcttgcatttgtaacaaaggctgttctgaaggttatactgaatttgtgccttgtaaaactttcttgctggaattacagcatttaaggcaatagaaaagcctaaagtccaatctttctggaaatgtaagtaccttattgcattttctttttgttttagtttaggtgtaacrattttagggtaggggggggaaaaaaatctgtgttggttaattctgttctgcctttccagttgtctgcagttaagtacagtcatttccttttattcaagcctcatttcttgctctaaagtttgtatgagacattacacagctgctttcataagacccggtggtggatatattcacaacacaggtaaagcaattcctgtgaacactgtgctctagaagtgtttttgtgacaaaattgaacatcctttgggggaggatgcaaacatcctgcagtcagttgtgcctttcatgtctgaaaaatga

SEQ ID NO: 90591 - DNA, 600 bp, Chicken  19866894398752_1
aaaggcagacttttgtgcaaagtcccaacagaatacagaatgtcctcaccaggtcctctggtgacctcattagtcactgactgccaccgtccttttatctcctctgtaaatgggataaactatgctggagcagatgttaggtagcgtgctgaaagcaggatccagtattgactatcacaaggaaaatacagtgttactacaagcaggtggccttctccaggatgggactatttcagcgatggcccttgcagtgaacaggaggtgaaataataaaaggagcaaggatggcaggggaagacmaaagccttaccaagaacactgccattgagttggcatgggcagctatctcgggggctgttaggggatgaagtcccctgatttggcatcctgggctggtgggcttccagctgcagtctgagcctctcctctctgctcagctgtcctctgcaggcactgctgctgctcctgggacagagcaccactgtgatgcacagagtgcttagagtcccatcctaaatcaatcttccaaacaaagcccgtgtgccagagaccccagagcattcactgaaagtaatagttttcaaatgcttccataaagtg

SEQ ID NO: 90592 - DNA, 600 bp, Chicken  19866894398760_1
gattccttctaaacagcagaatttttggaagggagtatagaattcacatcttgagccttgagcaaatctcagtcataaggggaaatgttaaacattaaattaagcatttcccatggtttgcttcccacatcctcctgtgagaagtttgttgcaggccatcaggttgaacagtggacctagatagtcattatctacccttatgcacactgcagtcttctctaggaagatgacagataatctgggatgagaagaaagcagagttccttttcactcttacttcaggaagacactgaaagcccrtcactaaagtggtcttctctcacagtctatgtgatgtgatgcaaatgagaaaaaaaattcaagggatgccttaaaaaggatctaataaccacacctgttttttgcactcataatacataagaaaatgccttggtatcttagctacacacagatcttctcatgtcctcatcctttcttacaaaagccatatgtctgaactgtcatatggcctacataatacgtcaactgttaaaccttgcctgttgtgtagagatttcaaaggcctcatttgaatctcttttctacatcatgccagttgtt

SEQ ID NO: 90593 - DNA, 600 bp, Chicken  19866894398768_1
atccaccacttcctgaatgtaaaggcagcagtatcatatttggcagctctggacatgttgccagtaaatatttcagaagagatgctgttcaggagatacattgagttagaaatttggggttagcagcgttcatgaaccaactaaaaacccctgatttgttttgctgttgaacatgcacaagagcctcagtttgtctggccatggcgtatgtaagtacatctgtctagtataatttattttttaaaaagagtactttcagggaaattcatttatatttaaaagaaatttttggaaaccttrgaaatgccaaccctaagaatgtaacatagagaacatagcttcaaccatgtgaacataacagagaacatagcctcagtcataaggacaaaacagcagcttaatgagcttatttcaacaaggttgttgtaaacattcttcttgttgtccagaaaccttcttaaattttggatggaagtatttaatctacaagcacacacataaaaacatttgccaagtgcactcacaccaagaactgaaagcacctttctcctaatgacagcaacttggacaaattcacctctcctacacaacaggaagcta

SEQ ID NO: 90594 - DNA, 600 bp, Chicken  19866894398773_1
taaaataagcaaaataagcagtgtatcaataacatgagcttataaggaggagggcttatgcataatcaaggggtgaaagaatggtgagattactgtgctggtgaggaagaaaaaagacacaagacttgaagatctgaaaataaggttggctcttagcagttacagtgaatataaactgcacaattcgtactgtgtttcgatgcgcgcccttattgcctagttaacttttcccatgttgcaagttgtgtgaggttttcattccagttgaggagttgtagatgagatgttttttccttctgytgctttttttgctgagttggaggaattaagtagtagacttcctaaaaatccttaataaacttaatcaggtattttaacatgatgtgattacttcatatttgtcaaggggaattccttgctgggagcgtggcagaagaataggttcatgagtagctgtgtgtgctcttgtaattacttctaaatttagaaagatgctgtcactgttcaaggcagtcagctagtacatgcctggcacgatgcaggagaaaaaggatcctttctgtcccgctgagacttgtcatctggactgtgccagcaaac

SEQ ID NO: 90595 - DNA, 600 bp, Chicken  19866894398777_1
ttaaaaggtactggattttattgtctaaaaaaattgttatttgttttaatttacaggactcatcacctgccgattctgtatctgtcagcagacaacctcctgtaagctacagattcacgttctgtcagtacagtcactggacattaaggctgcttgagcagtttgaaagaaaaaaacatgaggcaacagctgttctttgtaaagttgagtaaaacacagacaaccttgaagcagaagcctcttttgatctcaagttgttttcctgcttcagcatccacccagtttatctcaagcagaggkgtatgctacttgcaactatttgagacaagcaggtactgtacatagatgcttagaggatgtacacaaaggagaacgtgccctatctgccataatggacttcaactgatgaaaattggcagaaaggttcaacttgtgcaatagaagaaaagccatttctggaccctcgagcaagaatgtgactttcttcgatattatattcacatattgttaccaaaatattatctgaaaggaaatgctgaaagaatatgggggagaatgacacaagatgaagctctcggatgaaaatctcaggtcagtgaa

SEQ ID NO: 90596 - DNA, 542 bp, Chicken  19866894398777_2
gggaggggggagggggagaggtgcggtcagtggttttagctagttcacaaaaaaattgaaacaagggaactgttttaacagaccatcttgcatgtacaaaggggagttaccttctctgttggccaatcctcggaggactgctttcaagtagccgactccttgacaaaaaaaggatttagtgaacaactcatgatcatgattcatgtaattttgcacattttattctaatactctttttgtaatgttgtttcaaaaagcaaaataaaagttttcttttaattatgacttctaagagttttytttttctattgacaaaacatagataaaataccatttcccattctgtcaataacttttcacttaactgcccttgtttcatattacactttccaacttttctaagctattctggcagtaaaagtatctgtgtttaaaccaaaataaacatcaaatagtacaaaaaataacattctctggctaaaccatagtgaatctactgagaggggcatatacattgtggaggcaaattgttatatatgcaa

SEQ ID NO: 90597 - DNA, 597 bp, Chicken  19866894398778_1
ttcatctcagtcctaatactaatcttctgtcgtttcaaaggcactagccccgaatacaattcatcttctggatacagagctagtccagcacttaagctcagtggctgctgttccttattcttttggtcttctgtaacaaagcaggtatcagactgttttctcttaattacagaatcatgcttttccccattcacaaacagtagctctttcttctctgtacgctcaagctgcatcttcatacttgagttgctgttcttgggagcacttctacaacggagcaaatgcacagcaatagctgtyagagtcatatttccagtgtacacgccacaacagtggatgcacttgaaagctggagactttaaaattgtatgtacagttggcataacatgatgcctctctttcaaatgcatttcataggtttcttgactaataaacaaactgaaacaaaacggacaggttaacactttgttgcatccattgttcaattctgctccctgaggtttcactttgatgtaaatggggacgagcgtccttgaatttactccagcgagcactgccaagtgtactgtctctttcaccaatgtcctcttctggtaa

SEQ ID NO: 90598 - DNA, 599 bp, Chicken  19866894398785_1
  misc_feature (1)..(231): n is any nucleotide
nnnnnnnnnnnnnnnnnnnnnnnnnnnnnnnnnnnnnnnnnnnnnnnnnnnnnnnnnnnnnnnnnnnnnnnnnnnnnnnnnnnnnnnnnnnnnnnnnnnnnnnnnnnnnnnnnnnnnnnnnnnnnnnnnnnnnnnnnnnnnnnnnnnnnnnnnnnnnnnnnnnnnnnnnnnnnnnnnnnnnnnnnnnnnnnnnnnnnnnnnnnnnnnnnnnnnnnnnnnnnnnnnnnnnnnatcccttgctgcagctatgggcctggcaaagggaagaacacctttagtaatgtataagtgctgaaaatktgtccattttattatttctccttgttttggttcctgtctccgatttytctgacaaaaagcattatttcagctgttgcaaaccaatcatgaggcacactgtacattgatgaaacagagcatgtcctgcaaaacagcttgggcatgaagcttctgctggtagtaactgataccctgtcaaggatttggtctcacgccatgaagtcagtgaagccgaagcctccatgctgagtaagcaggactgggtcactcaatcctgccttgaacacagttcrctcttgctgtgttcagcttactgcagc

SEQ ID NO: 90599 - DNA, 599 bp, Chicken  19866894398785_2
  misc_feature (1)..(184): n is any nucleotide
nnnnnnnnnnnnnnnnnnnnnnnnnnnnnnnnnnnnnnnnnnnnnnnnnnnnnnnnnnnnnnnnnnnnnnnnnnnnnnnnnnnnnnnnnnnnnnnnnnnnnnnnnnnnnnnnnnnnnnnnnnnnnnnnnnnnnnnnnnnnnnnnnnnnnnnnnnnnnnnnnnnnnnnnnnnnnnnnnnnnnnnnatcccttgctgcagctatgggcctggcaaagggaagaacacctttagtaatgtataagtgctgaaaatktgtccattttattatttctccttgttttggttcctgtctccgatttytctgacaaaaagcattatttcagctgttgcaaaccaatcatgaggcacactgtacattgatgaaacagagcatgtcctgcaaaacagcttgggcatgaagcttctgctggtagtaactgataccctgtcaaggatttggtctcacgccatgaagtcagtgaagccgaagcctccatgctgagtaagcaggactgggtcactcaatcctgccttgaacacagttcrctcttgctgtgttcagcttactgcagcttgccatatctttacgtttcattgccaccagcccatccaaggtacca

SEQ ID NO: 90600 - DNA, 600 bp, Chicken  19866894398785_3
ctttagtaatgtataagtgctgaaaatktgtccattttattatttctccttgttttggttcctgtctccgatttytctgacaaaaagcattatttcagctgttgcaaaccaatcatgaggcacactgtacattgatgaaacagagcatgtcctgcaaaacagcttgggcatgaagcttctgctggtagtaactgataccctgtcaaggatttggtctcacgccatgaagtcagtgaagccgaagcctccatgctgagtaagcaggactgggtcactcaatcctgccttgaacacagttcrctcttgctgtgttcagcttactgcagcttgccatatctttacgtttcattgccaccagcccatccaaggtaccacgagcatcttccctggttttccctgactacggcactgttgagcagatctgtgctatctctccacctgctccggtttcagcagtgtatcctggcaaggtagcagagcccagcagattctaggagacaaagagtaacacctggaaagcatcttaaattccacgctaaagcttttcttaacttgctttccaaagtgagtccaggactgtgttggtgcaaggcaacatct

SEQ ID NO: 90601 - DNA, 525 bp, Chicken  19866894398785_4
ctgcagcttgccatatctttacgtttcattgccaccagcccatccaaggtaccacgagcatcttccctggttttccctgactacggcactgttgagcagatctgtgctatctctccacctgctccggtttcagcagtgtatcctggcaaggtagcagagcccagcagattctaggagacaaagagtaacacctggaaagcatcttaaattccacgctaaagcttttcttaacttgctttccaaagtgagtccaggactgtgttggtgcaaggcaacatctgatgaaatctgcaccagatrcracaccataagctttaaaaagtgccctgtatgaattataatctgcttcggtaacatttcyagatgaatttgagtgatatgcatcacagaatattcagctggactgcggagagaaatgagaatatttttacagctcctggtaattaaactgtgattgtcgcagctgcctggcaagctgcattatttcacagagcatcaaagcatcataaaacgaatggcaaaaaa

SEQ ID NO: 90602 - DNA, 523 bp, Chicken  19866894398785_5
gcagcttgccatatctttacgtttcattgccaccagcccatccaaggtaccacgagcatcttccctggttttccctgactacggcactgttgagcagatctgtgctatctctccacctgctccggtttcagcagtgtatcctggcaaggtagcagagcccagcagattctaggagacaaagagtaacacctggaaagcatcttaaattccacgctaaagcttttcttaacttgctttccaaagtgagtccaggactgtgttggtgcaaggcaacatctgatgaaatctgcaccagatrcracaccataagctttaaaaagtgccctgtatgaattataatctgcttcggtaacatttcyagatgaatttgagtgatatgcatcacagaatattcagctggactgcggagagaaatgagaatatttttacagctcctggtaattaaactgtgattgtcgcagctgcctggcaagctgcattatttcacagagcatcaaagcatcataaaacgaatggcaaaaaa

SEQ ID NO: 90603 - DNA, 464 bp, Chicken  19866894398785_6
cttccctggttttccctgactacggcactgttgagcagatctgtgctatctctccacctgctccggtttcagcagtgtatcctggcaaggtagcagagcccagcagattctaggagacaaagagtaacacctggaaagcatcttaaattccacgctaaagcttttcttaacttgctttccaaagtgagtccaggactgtgttggtgcaaggcaacatctgatgaaatctgcaccagatrcracaccataagctttaaaaagtgccctgtatgaattataatctgcttcggtaacatttcyagatgaatttgagtgatatgcatcacagaatattcagctggactgcggagagaaatgagaatatttttacagctcctggtaattaaactgtgattgtcgcagctgcctggcaagctgcattatttcacagagcatcaaagcatcataaaacgaatggcaaaaaa

SEQ ID NO: 90604 - DNA, 600 bp, Chicken  19866894398786_1
tctgtgcagctggagaactacaaccctatttcatttccaacccaactatgcagcatgtggtttatatactgaaaagagaaacagaaggcacaattttcctccctgtgcaccgacactccatctcttctgcttgtagccaactgcctctgattgtggataactcatggaaaagtcttgaaaaccccaaattacattgcagcctcgtacatttactgtgagtgatttacacagagtgtaatggacctgtgtgctgctttagaaaataaaaatgaaggtatctcgactgagctcatgcagcaktttccacagacaaagagctgaaagcgctttgcagattgcaagacagtcaagctctcaggtcagtggagatgggtatccagccaagctgtgagttgcaggccatagtgtaatatcatctcaccgagcattttatccacattcttctgcagcaaacatgacatctcttcttaggtggttcgcctttaaccgcagagcgaggttttgtgtatttagctttgccctgcagacagctgcacagcttcccacccaggagcagcttccacatgtctcctgtaaacacagcccacatctgctgacctt

SEQ ID NO: 90605 - DNA, 599 bp, Chicken  19866894398795_1
  misc_feature (1)..(104): n is any nucleotide
nnnnnnnnnnnnnnnnnnnnnnnnnnnnnnnnnnnnnnnnnnnnnnnnnnnnnnnnnnnnnnnnnnnnnnnnnnnnnnnnnnnnnnnnnnnnnnnnnnnnnnnnccctagcatgaagatggggagaaaaagtcattggtttctacttctactatataagcgatgacaattctgatttaggaagtccctgatcctcaaatcactggagcctgggaaagtaccactacatatttatataaaccttcctgcacttccatttgtccacgccaaatgagaatggtgagtcacccttcagatggaraaggtgtcccaccctgcttcaaacaagcgctctctttttccatgaaaagcaaccgaatgtgtccaaccttgtttgcgtccctacagatgaggaggtaagcacgctgcagatggcctggatcctcagatgttacaaacaggagtaattcccttgaagtcatcggagttcatccaatttccaccacctgagaatgctgcctactgttcaaacctgactcacctacctgctgcaaacatctgcatagaaaacaggtttagggaaggagagattgacagcatcattcctgatatcctgtctgt

SEQ ID NO: 90606 - DNA, 600 bp, Chicken  19866894398795_2
gctgcagatggcctggatcctcagatgttacaaacaggagtaattcccttgaagtcatcggagttcatccaatttccaccacctgagaatgctgcctactgttcaaacctgactcacctacctgctgcaaacatctgcatagaaaacaggtttagggaaggagagattgacagcatcattcctgatatcctgtctgtgggtcggatgacaatttatcttgtctctgatcaaacctaccagctatgaaccaagtttcacaactgcaggaggctttgtgttgcaatttgcaacaacaacaamaaaaaaatggcatcgtgcattatggcttaacrtatctgtatgtattgaactcttcttgtaggccaagggaacttttattataggatttttgttgttgctgttgaattgaagagacgtagctccagtctttgaagtttaagactagttgtaaattccttgaagtcagccctatttccttttatattagcatgttaacaagctttggaagactgacagaccttacaggaagacacagctgggtgctcctctagtctgggcttaatgaaaaccagaacacgaaggctgaactctgcggcttgt

SEQ ID NO: 90607 - DNA, 600 bp, Chicken  19866894398795_3
aacaggagtaattcccttgaagtcatcggagttcatccaatttccaccacctgagaatgctgcctactgttcaaacctgactcacctacctgctgcaaacatctgcatagaaaacaggtttagggaaggagagattgacagcatcattcctgatatcctgtctgtgggtcggatgacaatttatcttgtctctgatcaaacctaccagctatgaaccaagtttcacaactgcaggaggctttgtgttgcaatttgcaacaacaacaamaaaaaaatggcatcgtgcattatggcttaacrtatctgtatgtattgaactcttcttgtaggccaagggaacttttattataggatttttgttgttgctgttgaattgaagagacgtagctccagtctttgaagtttaagactagttgtaaattccttgaagtcagccctatttccttttatattagcatgttaacaagctttggaagactgacagaccttacaggaagacacagctgggtgctcctctagtctgggcttaatgaaaaccagaacacgaaggctgaactctgcggcttgtctgctgtttacagactcggcaggaagaatcca

SEQ ID NO: 90608 - DNA, 600 bp, Chicken  19866894398796_1
tccatatgcttctctcatgcatgaacagattaaagagctgctgctcatttctttctgagggagttaaaattcacagaggcctgaagaagttttacagggatttcagatgaatttaaacagcaaagagacatttaagtcccttccttctttttaatctaaaaactatttgtagttatgaaacagggactcaagacctcattctcactgctttctggcagcacttcagtttcttttagctcttggcaatgcctacatatacctagaaatgcagaaaacttttctaagagaatcttccaaatyacttttataagtggagtaatccatgcttgacctacatacaaaacattttgagctccatcactgaaattcaaagtgacacctgccagttaacaacaaaatctccttattacttgaacaggagaaagaaattcaatttgatttcaagttcactaaggatacatctatattgcagtgttgtagagagagggttgggtggcatttcccccacacatccatcytacctggttggatttttgcagcccaggctgaccccaagcagagcaaagcactcatcagctacatcaacaaactgtgcacagc

SEQ ID NO: 90609 - DNA, 600 bp, Chicken  19866894398796_2
cacttcagtttcttttagctcttggcaatgcctacatatacctagaaatgcagaaaacttttctaagagaatcttccaaatyacttttataagtggagtaatccatgcttgacctacatacaaaacattttgagctccatcactgaaattcaaagtgacacctgccagttaacaacaaaatctccttattacttgaacaggagaaagaaattcaatttgatttcaagttcactaaggatacatctatattgcagtgttgtagagagagggttgggtggcatttcccccacacatccatcytacctggttggatttttgcagcccaggctgaccccaagcagagcaaagcactcatcagctacatcaacaaactgtgcacagcaagaaaatcatatccagaggtgaygaagagatgcaacaactacacttatgggctgcctcagagaggagacagctaataagatacttggggtattagaaaggcagctgtcaaagaaaatttgttgttgtaaaggaacttgaacccagggagcctgaagtgtttcagatggttcttactgctgacaaggaatcagtgtttttcagctccaatatgctcta

SEQ ID NO: 90610 - DNA, 600 bp, Chicken  19866894398796_3
gcttgacctacatacaaaacattttgagctccatcactgaaattcaaagtgacacctgccagttaacaacaaaatctccttattacttgaacaggagaaagaaattcaatttgatttcaagttcactaaggatacatctatattgcagtgttgtagagagagggttgggtggcatttcccccacacatccatcytacctggttggatttttgcagcccaggctgaccccaagcagagcaaagcactcatcagctacatcaacaaactgtgcacagcaagaaaatcatatccagaggtgaygaagagatgcaacaactacacttatgggctgcctcagagaggagacagctaataagatacttggggtattagaaaggcagctgtcaaagaaaatttgttgttgtaaaggaacttgaacccagggagcctgaagtgtttcagatggttcttactgctgacaaggaatcagtgtttttcagctccaatatgctctacaagctttagctaagcatgtgttatggagtatctcagtggcatagcagtttcacctattttagaacacagggtatgaagtagagctgcctggaggtgccacagagg

SEQ ID NO: 90611 - DNA, 600 bp, Chicken  19866894398804_1
gatagagatgtattctgtcagcagcttgcagaaaggcaagtagaacgtgcagtctggtatgtgttacctgtgttgtttcataagcctgctgggtaagtattcctcaagatattccttgtaatccaaaaagacagattgtgcttctctttggaaagtcagaagaaatttaagattataatcattttttttaagtaaaactattgaagaggtcagacgcagttaagtatagacaacagaaatgtaaatgaacacacaatatcagtttaataccccagatggagaaattaaaaaaaaatgtaraaagatgtagaaataagcagcagtgtcgttagtgacgttctccttcttaaaactgtaaattaaaaaaaagaaaaccaatactaagaagtaagatttcatgttcaacattgcataggataaataagacaggaaaaaaaacagttctttgttgggctctccagccataatccagaaatgccagtcgttttgttgcaaacagtgagagctgtagcttctgaagttgtgcattttggtagtgctttaaatggaattctcaaatgtagttctcattcaaaattattaagaacatgtattgcatac

SEQ ID NO: 90612 - DNA, 600 bp, Chicken  19866894398808_1
attctctgtttttacagcctagaaacaaataatatgtaatatcaagaatttagccttataactgatagagattatgatttatcctacaagcaataaattatgttaatttttaatataattgttaactaagtcatggtttccataaactcattcctgaagagaatttttcataatttactgtggaattcagtcttcactccatgcaatcctctaaggacatgaatccaaccaataacctactcctagcagttacttttagtatagccctggtgcaacatgagctggattcattgctgtggwgatgttggcagtagcctgctcctgagacagcctcctcccgacagcataaacatttacacaatgactgtgccgaatacacacaatacattgactcctgtacgcagagttaatgagatttcctagaaataatggacttattgtatctgtgcaaaatagtcccagtgtgcatgcagaatacagtaacgttgatgcattcagtggacctagcaagcctgagaaagcagactctaatgtgtctgtgcagttagccctgtacacaataggaaaaaaagctgcacagcatacatgtccatactcaca

SEQ ID NO: 90613 - DNA, 600 bp, Chicken  19866894398809_1
acaaccttagagagaaagacgaattactctttttttaaaaacaacttggatagatatagatagtataaatctatatgatatagctggatacttttggcaaaacattatatatactagctactctagtatatccagaaacatttagattgggttttactgctatttatttattttctttgaaaaatgatatgaagcatagttactattaagtggtgattttatttatgactggggaagctattgatttttaaggtaaaatttttaagaccaaaaaattgctatcaatgtatttttgccttyactacaaccattttacagatctgtgacactatggaaaacattaaggaataccagaaattccattaaaggttaggagggtaacaatgagtaggaagatgctggagagtgaataaagtgaacttttatcacaataagagttgaatttagttccaataagtaactcatccacctacaactgatgctttctcaaagatttccttttacctataagtaaaatgatatcttcagttatccaataagacagacctacagtctaagaaaatcttctatcttttctgattgttgtcagtcagacagtac

SEQ ID NO: 90614 - DNA, 599 bp, Chicken  19866894398818_1
tttggatttgagaggtttacagtatcatagtgcagggtctcaaaaaaaaaaaccaaaacaaattcctgctaaaatggaaacaccttccctatgagaactgcttgcacaactgttggcagcttgcaaagcctacataattggtcatggggataaaggacagaaatattcctaggtccagcacttttttttttgcccatttcagtattgctctttaaagcaaaatgaccattctcgtgtattctcctgtatattagctatttcttctgacaactttctactttttgcaataaaagagcattktctctcaaggacatctaatccctattacttgctttcagttgttcatttatgtggcaagaaaggtcatggtttagctgagataaaatgggctgatcctgtaattttttttcttttacttttctttgttttacaatctatttaggattagaaactttcttagaagatgcaattctcccaaaatggagtttgtgtcaaaaaaaaaggaaaggcaaggaaaaatgtttgaaaagtttgaaagttgttcttccagcaatcttaaaaaaaaaaaaaaaaaaaaaaagcccattaaaaatgtcttg

SEQ ID NO: 90615 - DNA, 600 bp, Chicken  19866894398841_1
ctcactgtctccataagcagaactcaaggcacggagccaagcagagaggctgccctaggctgggagctgagtgcagccattgacctcaggcctggaggtgagcgtggccatcagccttgggctgggaactgtgtggccatcggcccccggccccagcagaccctcagctgtggggcagggacacaggaacagcacagcagaaaaggagaaataggaaaggttcagaggaaggcttatgtccaaaataggtctgcctcactccattcccagggcaagggcagctgaggcacacttagaagrggacttttgtttttctgcccctctcacacagcagtcagggcagrgacagagcactgggtactccccatgcccccggcacagccaaggccaggacggaaagtacctgtgctgtcagtccctggttctctctctgttggacccactctgcccagaaacctttctctcaagggcatttgctcagtgactgaagatggacaacagcatggggcacaggccactctccagctctgcattaggcctttggtcagcattcctgggcatgagtgacgtgrgacacccctgctgtaccctaaatcctgt

SEQ ID NO: 90616 - DNA, 600 bp, Chicken  19866894398841_2
agaggctgccctaggctgggagctgagtgcagccattgacctcaggcctggaggtgagcgtggccatcagccttgggctgggaactgtgtggccatcggcccccggccccagcagaccctcagctgtggggcagggacacaggaacagcacagcagaaaaggagaaataggaaaggttcagaggaaggcttatgtccaaaataggtctgcctcactccattcccagggcaagggcagctgaggcacacttagaagrggacttttgtttttctgcccctctcacacagcagtcagggcagrgacagagcactgggtactccccatgcccccggcacagccaaggccaggacggaaagtacctgtgctgtcagtccctggttctctctctgttggacccactctgcccagaaacctttctctcaagggcatttgctcagtgactgaagatggacaacagcatggggcacaggccactctccagctctgcattaggcctttggtcagcattcctgggcatgagtgacgtgrgacacccctgctgtaccctaaatcctgtgtctgcatctgccacatggcaaacacatggcactacattttatt

SEQ ID NO: 90617 - DNA, 515 bp, Chicken  19866894398841_3
caagggcagctgaggcacacttagaagrggacttttgtttttctgcccctctcacacagcagtcagggcagrgacagagcactgggtactccccatgcccccggcacagccaaggccaggacggaaagtacctgtgctgtcagtccctggttctctctctgttggacccactctgcccagaaacctttctctcaagggcatttgctcagtgactgaagatggacaacagcatggggcacaggccactctccagctctgcattaggcctttggtcagcattcctgggcatgagtgacgtgrgacacccctgctgtaccctaaatcctgtgtctgcatctgccacatggcaaacacatggcactacattttatttttacaatttccaattaaatgtggttcagaaaacttctagcaaatctcataccacatgtgccagaagcatttccatggggagtttgctaagtgttgccatttatacacacacacagaaccgtgacccctcaccagttctccca

SEQ ID NO: 90618 - DNA, 600 bp, Chicken  19866894398846_1
ttatgtagctcaaaaaagtataatgttgtcttcagcaaaatgaagtggaatcatacaggaaggtgactgcaagggcagcagggcccccctggcactctgtcaaggaagaatgtagagccactgcaagagatgtggccagctaagctcctgccaagtggaaacacactacttttccactactgccaccaaggatggactgcaattgtgcaccttgatgcatcttgctgacagttcagccaaaagtgtgcacagctcctgtgtgtggagaaagcaaagcaaaatggctcctaagcatcaacrctactgatgatacttttggcaaatgagagtgccaaactttacacacagctaaatgtattcaccctggacaagaaactgctaaacagtggcaggaaaatggcttctatctcattagccttcccacatatttcaccactatgtaaaggacactgaagtccacatctttggtataattttaattctctgaaaacacaattcatacawatatatataaatgcttatatgtgtataaataaataaatattctcaaaatatcattcagagttgtgatatacccacttcagtcttcatttatacaaa

SEQ ID NO: 90619 - DNA, 600 bp, Chicken  19866894398846_2
gtgcaccttgatgcatcttgctgacagttcagccaaaagtgtgcacagctcctgtgtgtggagaaagcaaagcaaaatggctcctaagcatcaacrctactgatgatacttttggcaaatgagagtgccaaactttacacacagctaaatgtattcaccctggacaagaaactgctaaacagtggcaggaaaatggcttctatctcattagccttcccacatatttcaccactatgtaaaggacactgaagtccacatctttggtataattttaattctctgaaaacacaattcatacawatatatataaatgcttatatgtgtataaataaataaatattctcaaaatatcattcagagttgtgatatacccacttcagtcttcatttatacaaaatgagatacattgcatgccatcatattttttaaaatagaaatgggaaagaactatccattcctaagccaaggaaatgtttttgtggtttttcttttcctttctattttcttttacagtatatgcagtgccagtgatctgatgagaatagatgagcacagtgatttacatttcttttgtggcactttttcataaactaattcatt

SEQ ID NO: 90620 - DNA, 600 bp, Chicken  19866894398847_1
tcaacgtcagatgtcatcttagcagcagcagcaacagcccgctgtgacagtaaaaggcaaacagtggaagacatagccaaaatgttgaagtccctgcttccctcctcagggctagcaaagcatgcagagacctacattctgaacttgggacacagctgttaaaagcactttagttttccaacctgtatgtctggaaaactttgtgattgcaagtgatttggacaagtctggcttttagagcaaagtaaaactagatactgaaggtgtaacaactgagtaagaatggtagaatttcacacmttttatttcagattttcaaatcaggcaaaacaatgtgcttacttttttaactcaactttgtttttaataaaatacaatatatgaaaatataaaattatatggatggagttaaatgagctgtacaatataccccagaaactataacaaattacatctgtgtagaagtcttcattttaaggggaagtttgaaaagtattcacctcacataaaagctgttyattagtctcatcacaaagcctgaaacagtggaactgttagaaatatatagcagkgttaaaaagtgccttaaaatgtccgtat

SEQ ID NO: 90621 - DNA, 600 bp, Chicken  19866894398847_2
tggacaagtctggcttttagagcaaagtaaaactagatactgaaggtgtaacaactgagtaagaatggtagaatttcacacmttttatttcagattttcaaatcaggcaaaacaatgtgcttacttttttaactcaactttgtttttaataaaatacaatatatgaaaatataaaattatatggatggagttaaatgagctgtacaatataccccagaaactataacaaattacatctgtgtagaagtcttcattttaaggggaagtttgaaaagtattcacctcacataaaagctgttyattagtctcatcacaaagcctgaaacagtggaactgttagaaatatatagcagkgttaaaaagtgccttaaaatgtccgtatccraggactagagtgagttgccttacagtaggttgtcatgctgtttctctttcttcttttttttttcaactaccatctgtgctccataatttaggcttttattaaagcaaaaatcacctgtacgttttttgattcattcacagtaaaacccctcataatcactgagagcttgatcatttaaactggaagagggaatatttagatgtattagaaagaaa

SEQ ID NO: 90622 - DNA, 600 bp, Chicken  19866894398847_3
ctgagtaagaatggtagaatttcacacmttttatttcagattttcaaatcaggcaaaacaatgtgcttacttttttaactcaactttgtttttaataaaatacaatatatgaaaatataaaattatatggatggagttaaatgagctgtacaatataccccagaaactataacaaattacatctgtgtagaagtcttcattttaaggggaagtttgaaaagtattcacctcacataaaagctgttyattagtctcatcacaaagcctgaaacagtggaactgttagaaatatatagcagkgttaaaaagtgccttaaaatgtccgtatccraggactagagtgagttgccttacagtaggttgtcatgctgtttctctttcttcttttttttttcaactaccatctgtgctccataatttaggcttttattaaagcaaaaatcacctgtacgttttttgattcattcacagtaaaacccctcataatcactgagagcttgatcatttaaactggaagagggaatatttagatgtattagaaagaaattctttactgtgagggtggtgaggcactggaacaggttgccccggaaggttgtg

SEQ ID NO: 90623 - DNA, 600 bp, Chicken  19866894398847_4
tatttcagattttcaaatcaggcaaaacaatgtgcttacttttttaactcaactttgtttttaataaaatacaatatatgaaaatataaaattatatggatggagttaaatgagctgtacaatataccccagaaactataacaaattacatctgtgtagaagtcttcattttaaggggaagtttgaaaagtattcacctcacataaaagctgttyattagtctcatcacaaagcctgaaacagtggaactgttagaaatatatagcagkgttaaaaagtgccttaaaatgtccgtatccraggactagagtgagttgccttacagtaggttgtcatgctgtttctctttcttcttttttttttcaactaccatctgtgctccataatttaggcttttattaaagcaaaaatcacctgtacgttttttgattcattcacagtaaaacccctcataatcactgagagcttgatcatttaaactggaagagggaatatttagatgtattagaaagaaattctttactgtgagggtggtgaggcactggaacaggttgccccggaaggttgtggattcccctccttggaggcattcaagaccag

SEQ ID NO: 90624 - DNA, 599 bp, Chicken  19866894398851_1
  misc_feature (1)..(6): n is any nucleotide
nnnnnncggcatgtgtttatttaagagatgtttaaacaaatgctacatttctaaacactgtaagactatggagaagtcatacatatgctatatatggcagctgaaacactcatttctttaagcagcatctataacagctaaaagtgattaaacaaacatcagaaataaaacttgcagcatgttttggaacataaataattcatttttcattaacaagttgagtatatttttcaagcaaaccttcacttaaaaaacagtgtagctgatgatgttatgaaaagcaaagactaaaatgattcytgattctttcttacatcccttagaaaaaggcagaaacacacatatatagtcttyttttatatctacatatataaatgcaaacgcaatcatctttactaaaaaattctccyagcatacatagcagaaaacagaattcacacatgcaattcatttgaaaaacagaaaagcaaagagcagtctgttatgattagcagttagagattgcctttgggctttaaaattttatcattagaaattgctcaaaagtactcctaaaagacccaaccagtttagagagaggcctgaaaaaagtgatctgt

SEQ ID NO: 90625 - DNA, 600 bp, Chicken  19866894398851_2
acactgtaagactatggagaagtcatacatatgctatatatggcagctgaaacactcatttctttaagcagcatctataacagctaaaagtgattaaacaaacatcagaaataaaacttgcagcatgttttggaacataaataattcatttttcattaacaagttgagtatatttttcaagcaaaccttcacttaaaaaacagtgtagctgatgatgttatgaaaagcaaagactaaaatgattcytgattctttcttacatcccttagaaaaaggcagaaacacacatatatagtcttyttttatatctacatatataaatgcaaacgcaatcatctttactaaaaaattctccyagcatacatagcagaaaacagaattcacacatgcaattcatttgaaaaacagaaaagcaaagagcagtctgttatgattagcagttagagattgcctttgggctttaaaattttatcattagaaattgctcaaaagtactcctaaaagacccaaccagtttagagagaggcctgaaaaaagtgatctgtttgaaatgtgtacagatgtgttgaattagatgagaagtaccagaggaaacaagtt

SEQ ID NO: 90626 - DNA, 600 bp, Chicken  19866894398851_3
catttctttaagcagcatctataacagctaaaagtgattaaacaaacatcagaaataaaacttgcagcatgttttggaacataaataattcatttttcattaacaagttgagtatatttttcaagcaaaccttcacttaaaaaacagtgtagctgatgatgttatgaaaagcaaagactaaaatgattcytgattctttcttacatcccttagaaaaaggcagaaacacacatatatagtcttyttttatatctacatatataaatgcaaacgcaatcatctttactaaaaaattctccyagcatacatagcagaaaacagaattcacacatgcaattcatttgaaaaacagaaaagcaaagagcagtctgttatgattagcagttagagattgcctttgggctttaaaattttatcattagaaattgctcaaaagtactcctaaaagacccaaccagtttagagagaggcctgaaaaaagtgatctgtttgaaatgtgtacagatgtgttgaattagatgagaagtaccagaggaaacaagtttttaatatttcatggaactttaaaaggaagcgtccagcactaaagttatgagaaga

SEQ ID NO: 90627 - DNA, 600 bp, Chicken  19866894398873_1
tgagccagcagcatgcccttgcagcagtgaagactaactgcccactgggcagtgttagaaagactgcaaccagcaggtcaaaagaaattacttccctttgtaatctgtgaagcctcactgcacgccttagcagtcccagtacaagaggaaggtggctcaacaggagtgattcccaaggagagccacagaggtcaggggctggagcatgcaatgtacagggaacagctgagggcctggggctgttcaggtggaaagctacctcgggggtcagttatagcaacgacagattaaatccttacrtaggcggttttgcattgtatgagaagcaacgaaagctacaagtgaaattctcagtacatttaagaaggaactyttttctgctatgaaagcagtcaaacaccagaacaggttgtacagagcctgtaaaactgccatccttgcaattgctccaagttctactgaataaggctctgagcaacctgatgcaatcctgatgcctgctctaactcgaaaggatagttagactagattatcaccagttattcctcccattttaagttattcatataatttaaaagcctgtgaacttggtcattagga

SEQ ID NO: 90628 - DNA, 576 bp, Chicken  19866894398873_2
caggtcaaaagaaattacttccctttgtaatctgtgaagcctcactgcacgccttagcagtcccagtacaagaggaaggtggctcaacaggagtgattcccaaggagagccacagaggtcaggggctggagcatgcaatgtacagggaacagctgagggcctggggctgttcaggtggaaagctacctcgggggtcagttatagcaacgacagattaaatccttacrtaggcggttttgcattgtatgagaagcaacgaaagctacaagtgaaattctcagtacatttaagaaggaactyttttctgctatgaaagcagtcaaacaccagaacaggttgtacagagcctgtaaaactgccatccttgcaattgctccaagttctactgaataaggctctgagcaacctgatgcaatcctgatgcctgctctaactcgaaaggatagttagactagattatcaccagttattcctcccattttaagttattcatataatttaaaagcctgtgaacttggtcattaggagggtttcttcctacatttgagttctttctaattctaaaaatgcctttaa

SEQ ID NO: 90629 - DNA, 599 bp, Chicken  19866894398891_1
  misc_feature (1)..(164): n is any nucleotide
nnnnnnnnnnnnnnnnnnnnnnnnnnnnnnnnnnnnnnnnnnnnnnnnnnnnnnnnnnnnnnnnnnnnnnnnnnnnnnnnnnnnnnnnnnnnnnnnnnnnnnnnnnnnnnnnnnnnnnnnnnnnnnnnnnnnnnnnnnnnnnnnnnnnnnnnnnnnnnnnnnnntgggtttgtttatatattacagaaaacattctgcttttaattgcctgctgaaaggctcttgcgctctgtctcagctctgcagcagtacttaactggaaggcagcagcccagtaaggcaggtggtgggcaacctccycccctgcacaccatcctgggatgctgagtgtggatgagaccctacccgagagaccaatctgtcccttcagaggccttctgctggtgaaaacagcccagctctcctccctggttgggcactacagaaggggaccaggtcaacagtccatgagaactgacacarctgaartcccatgatacttaagagctggagacctcccagccccatggcattactctttggtggatcagacactaactgtgccctgttaaccagccacattgggcttgcagagctaggctgaagggcacaactgaaaa

SEQ ID NO: 90630 - DNA, 599 bp, Chicken  19866894398891_2
  misc_feature (1)..(2): n is any nucleotide
nntgggtttgtttatatattacagaaaacattctgcttttaattgcctgctgaaaggctcttgcgctctgtctcagctctgcagcagtacttaactggaaggcagcagcccagtaaggcaggtggtgggcaacctccycccctgcacaccatcctgggatgctgagtgtggatgagaccctacccgagagaccaatctgtcccttcagaggccttctgctggtgaaaacagcccagctctcctccctggttgggcactacagaaggggaccaggtcaacagtccatgagaactgacacarctgaartcccatgatacttaagagctggagacctcccagccccatggcattactctttggtggatcagacactaactgtgccctgttaaccagccacattgggcttgcagagctaggctgaagggcacaactgaaaaagatgcatccttaaatggggaaatgagaatatacctcatcttcagcagcagctccctgagaactgggaagagaacaggtttctcctgctggcacacatcagtgagactctagaaaagcttaaatacctgtgtggggttgggaacattactgctgggagctct

SEQ ID NO: 90631 - DNA, 600 bp, Chicken  19866894398891_3
tttgtttatatattacagaaaacattctgcttttaattgcctgctgaaaggctcttgcgctctgtctcagctctgcagcagtacttaactggaaggcagcagcccagtaaggcaggtggtgggcaacctccycccctgcacaccatcctgggatgctgagtgtggatgagaccctacccgagagaccaatctgtcccttcagaggccttctgctggtgaaaacagcccagctctcctccctggttgggcactacagaaggggaccaggtcaacagtccatgagaactgacacarctgaartcccatgatacttaagagctggagacctcccagccccatggcattactctttggtggatcagacactaactgtgccctgttaaccagccacattgggcttgcagagctaggctgaagggcacaactgaaaaagatgcatccttaaatggggaaatgagaatatacctcatcttcagcagcagctccctgagaactgggaagagaacaggtttctcctgctggcacacatcagtgagactctagaaaagcttaaatacctgtgtggggttgggaacattactgctgggagctctgagcaaa

SEQ ID NO: 90632 - DNA, 600 bp, Chicken  19866894398900_1
tgcacctggatccaactctaaaagaaaagctgggtacgtgctaaaatcagtgtaggtgaagctactatgtttgcagaattttcttcctgctgcaagttatcatctcctctgtcatgtccacctgattgttattcaaggtttaaaataggtcagtaaaagtccaagagaatcaagaactgatcatgtacccctaatacatgatgtgattattggagaaaaggtctaatccatgtttacctttctgaatcaccctgctccctttgctccctagatgtcagcagactagaggaggtattgtgraatatttccaaagccaagtggaccagagatgaaaggtgggcaaattcacaaaaattttggatggtatttctcactggagctgaacagttgagatctggccattacagttgaagaagtaaaggaytcaagatttatgtggtgttttggcaagctaagagcctcctgtcttctagaagaatgctgtatgaaaayatttagctcgcttaataaagtgtgccttgttactcctgcacaatagaaaaagtgacacgctcccattgaacctgttgtcctcagagcacagcttcagtgctatgactc

SEQ ID NO: 90633 - DNA, 600 bp, Chicken  19866894398900_2
attgttattcaaggtttaaaataggtcagtaaaagtccaagagaatcaagaactgatcatgtacccctaatacatgatgtgattattggagaaaaggtctaatccatgtttacctttctgaatcaccctgctccctttgctccctagatgtcagcagactagaggaggtattgtgraatatttccaaagccaagtggaccagagatgaaaggtgggcaaattcacaaaaattttggatggtatttctcactggagctgaacagttgagatctggccattacagttgaagaagtaaaggaytcaagatttatgtggtgttttggcaagctaagagcctcctgtcttctagaagaatgctgtatgaaaayatttagctcgcttaataaagtgtgccttgttactcctgcacaatagaaaaagtgacacgctcccattgaacctgttgtcctcagagcacagcttcagtgctatgactcaaaatgaaagactcccatagtggtgattccctcactaatgaaggttaaactcactacaggtgagccaagcttgaaacagcaggcccaggctttctcctgcagggcacagcagatgtatccccac

SEQ ID NO: 90634 - DNA, 600 bp, Chicken  19866894398900_3
aatacatgatgtgattattggagaaaaggtctaatccatgtttacctttctgaatcaccctgctccctttgctccctagatgtcagcagactagaggaggtattgtgraatatttccaaagccaagtggaccagagatgaaaggtgggcaaattcacaaaaattttggatggtatttctcactggagctgaacagttgagatctggccattacagttgaagaagtaaaggaytcaagatttatgtggtgttttggcaagctaagagcctcctgtcttctagaagaatgctgtatgaaaayatttagctcgcttaataaagtgtgccttgttactcctgcacaatagaaaaagtgacacgctcccattgaacctgttgtcctcagagcacagcttcagtgctatgactcaaaatgaaagactcccatagtggtgattccctcactaatgaaggttaaactcactacaggtgagccaagcttgaaacagcaggcccaggctttctcctgcagggcacagcagatgtatccccaccagtgaacccaagcatgccagccccagttgcatcttgcaggtggctttcctgtcctggaggccaggag

SEQ ID NO: 90635 - DNA, 600 bp, Chicken  19866894398903_1
ctctctttgtttcctcccactttccatgtctcagacttaacggcgaggctgacagctggtgggggaaaggcagtatttttgatatacatttgtataatgcttggcaggctggatcctggtgactgtatatgtcaaatcataacagagttgctcccaattctttcaatcctcagctttgtaagcgttttagaacttttcttttaaataactaaaagcaaatcgttattttaattgtattttttcacatcatttgtgttttcctctgacagtcccacccaataatcctcacaaaaactttgyggtgcacctatcattttactggtctaaagcccaagacatgaggatactggagatctgctccagtagtccaaacagatcccacacatctcgacctccaagcactggtgctgcagagggagcaccttgctggctgcagggcagggtgcagagccagcacgcaccttctagcacctggtgtatgccctcagagtcagctgtaatttaacctccagtgctgtcccgtggagtatttacctatctcataagtcttaagggctgcccttgtcttagtgtaggagatgacacaaacttgatgggcgt

SEQ ID NO: 90636 - DNA, 600 bp, Chicken  19866894398907_1
gaatgagttgcttctttggttgcataatgtctatgaagatggagcctgcttcttgaataagccaacatctacagagcatcgcttcagagaggagcaggctcagcagaacaactccaagatgcatcgccttttcttgtcctagacaagaaaagcaaagaggtgactgggtcagcctggagataagtccatgcacagaaatgctgcgtgtgagcagcgaatggagcgtgtggcagcagggtgagtcatggctcctgtcggggctaattggggaatggatgttttccctgcataggttgcctygggctgcttaccagcgctgtggctgcggtcatgcatgaagtcaggcactgcactgcagagacatgggacggttctgtttctttgtgctgtggaatgccacttctaggaatccctgtgctggctgggggacctgatggagacaaattaggctttcccatgcatctttgagagaagccgagcgccagcagaaccccgggacagggaaatgtggctgcttgcagtgtcaggatgcaggcgcacacagagctgattcatccaaactcacacccagacggtccttccagggtgccctgctgccag

SEQ ID NO: 90637 - DNA, 599 bp, Chicken  19866894398910_1
  misc_feature (1)..(15): n is any nucleotide
nnnnnnnnnnnnnnnccccgttccatctttccactgttaacaatacgctttctgttctcttgactgtcctaatgagctatgtaactgtagtcaggtgcttctgcttgttatcaggagccagatctgttttctgcaaggttttcacaaaaccggccgcctgtgtcacaagctggtgcttgaccggtgttcacctttgtttctctttctcctgaagcttgtaaatcccgctactaacttcttcagacgcaggggtaaacagctgagggcagccagccttcctcccagcctgcctttatctgygctattatttatacggctcgatgtgggtgaaagatttgttagaaaataaagctaaacgtgaccgttaaccttgtgcctcaggaggggatttcttgcgttctgtatcttctttagcaagagcagacttgaactattagcgattcttttattaaattattccattaggaaattttggaacgtctgcttgcattattgaagccatcaaggcatcactgcagcgtggagaactgattctgatgtgcactgatgtcctcccacggtatgaaagttgtaaaaagtgatttaaatccagaatgttt

SEQ ID NO: 90638 - DNA, 600 bp, Chicken  19866894398910_2
tactaaaccacaataaaccctccaacaactaacaaatacaactgacgcttctgcttcttaattaccttctacattcgcagatttaattgcatttcagaaatatgcaattcctgcaaatttacctatagaggagttctgaacagacctcactctgatcttttatgatcacattagagtctggttaaaaagaattgtcctcttaaaggaagttttgaatgcaatttaaatattataaataacacaaagccattagtgagtaagtcgttaatattccaaatgcatcacttgccatgacttcasaaataaggtattgttacttagcaccatacacgcccttttatctctgcacgaggagtcttcatgtagtcagatctgatcacaaagagggaagaaagattcctataaatagacgcacagatttaatcctaaaaggaaactattgagagcaatgttcaaatcaagcaccatattttacaagatgcatcttaaatcctgcatggaaactaattacagtgacastcatttgtatctccatacagatagctttgtgttttacttactgaattctactgaatcacctatgaagcacagaaacatttt

SEQ ID NO: 90639 - DNA, 506 bp, Chicken  19866894398910_3
aatttaaatattataaataacacaaagccattagtgagtaagtcgttaatattccaaatgcatcacttgccatgacttcasaaataaggtattgttacttagcaccatacacgcccttttatctctgcacgaggagtcttcatgtagtcagatctgatcacaaagagggaagaaagattcctataaatagacgcacagatttaatcctaaaaggaaactattgagagcaatgttcaaatcaagcaccatattttacaagatgcatcttaaatcctgcatggaaactaattacagtgacastcatttgtatctccatacagatagctttgtgttttacttactgaattctactgaatcacctatgaagcacagaaacattttaatataattcttaatgtctctgtccatagtgctgaggaaaactttttaatgcttcacggtacgtactggaatgtctcttaccctggttatttgccctcatcgaagtttgccaagtaatagtgctg

SEQ ID NO: 90640 - DNA, 600 bp, Chicken  19866894398912_1
ctgtttctatcttctgcctctgtctgtgcttcccatccaaacatctttgcagcctcccctttggcagcccattcccagctccactccagctggagctcttggctttgtctctccttgccctactcttaatccattttcaggtacttacactcctgtgcatatctgtccctttgcatttctatgaataagtactttgaattttagctttggctctggaaatatacaagggctgcttccaaagtaatgcctcccatctttttatgtaggcccatacatccaagacagatgttggcagtatgrcagtagagattgtaccttcccaccaatattccattaccttttgctatgagtccagcataaaggctcttcttcatcagtggcgaaaatgcagagctaatggtggtgaatatgctgaaaaacagtgttttgtagctgaccatttgctctatcaaatagtgttactgtgytctttgtatctgctgtagtttccacagaaataaacaggaggcattactttcagagagaactatgtatttcctcrctctcttgctgctaattaaagctaactcactgaaggctctgatctgcaatctcaggtgg

SEQ ID NO: 90641 - DNA, 592 bp, Chicken  19866894398912_2
cctttgcatttctatgaataagtactttgaattttagctttggctctggaaatatacaagggctgcttccaaagtaatgcctcccatctttttatgtaggcccatacatccaagacagatgttggcagtatgrcagtagagattgtaccttcccaccaatattccattaccttttgctatgagtccagcataaaggctcttcttcatcagtggcgaaaatgcagagctaatggtggtgaatatgctgaaaaacagtgttttgtagctgaccatttgctctatcaaatagtgttactgtgytctttgtatctgctgtagtttccacagaaataaacaggaggcattactttcagagagaactatgtatttcctcrctctcttgctgctaattaaagctaactcactgaaggctctgatctgcaatctcaggtggctcctgtcccttttgtttggtacacagttattttccaggcgattagttaaaagtattttgaagctcttttcataagaaatatttgctaggtacagtgccttaaatccacctatcaaaaccatcctcattatatttttaaaagaaagtaattattaatca

SEQ ID NO: 90642 - DNA, 518 bp, Chicken  19866894398912_3
taatgcctcccatctttttatgtaggcccatacatccaagacagatgttggcagtatgrcagtagagattgtaccttcccaccaatattccattaccttttgctatgagtccagcataaaggctcttcttcatcagtggcgaaaatgcagagctaatggtggtgaatatgctgaaaaacagtgttttgtagctgaccatttgctctatcaaatagtgttactgtgytctttgtatctgctgtagtttccacagaaataaacaggaggcattactttcagagagaactatgtatttcctcrctctcttgctgctaattaaagctaactcactgaaggctctgatctgcaatctcaggtggctcctgtcccttttgtttggtacacagttattttccaggcgattagttaaaagtattttgaagctcttttcataagaaatatttgctaggtacagtgccttaaatccacctatcaaaaccatcctcattatatttttaaaagaaagtaattattaatca

SEQ ID NO: 90643 - DNA, 586 bp, Chicken  19866894398916_1
aaatgtgtcagtggagatccattatgacagcaacaggcatattattctcaatagggattgctctatttgccagtgtgatatgtgtgctcgttattaagacaaaaccagtgaggagagctcagatttaaaggcagctgaaataagagccttgctttacacagcatgataagccttgattttgtaaacactattactttgctttcattacatattcctgctggtattatttcagggcatcagctattttataggcttttatttgtcatcatacaaaatcaggccaacagaacacgcttagcrctttgcagctagaaaaaaagaaatcacacaccttgatttatgagagataaatacttgaatttcaaatacgatctaggcctagatggcccatcaggtggaaaagactacaactaccaagttacaacagccagttgcatacaaggctaacacatctatatgctcgggcatcctgtagcccagtcgagcaggcacccactcactgctggaccactgtaacgcaagtccatctgtgtctatgaacctaaatgacaatttagctgtattcctacctcttattcaaccatct

SEQ ID NO: 90644 - DNA, 600 bp, Chicken  19866894398921_1
tagtctattgattaaaatagtgagtaatacaatgtgctttatttaatatttaattaactgcttcacatttgtgctgaagctttttaattattaatacagagttcattatttaacatagaatataaatttaaattcaaatcaattagataaggtgaaactacacagtgaagaacggtttatcctccagcaataaccttcgacctggagacaatgtaaagagtgaaatctgtatctcttcccccacacatgcatcaaggttttctactgatgtaaagtttctgcagtaaacccaatatcccrcaaaaatctgctggatgaaaaagactttcagmtgtgatttttcagctggcccctggaagaggaaacactttcagtacgagttttctgtaagacatttgtaacacagcacatttttcttcctcttgatgtgtcaaacttcaatttaagcctctaaagataaaattattgtttgcaggaaggaaaagaagagtctatagaaagttgtagatacccagcaattatcatcttggaataactgtctcctaagtattgtttttatcttaatgtggtgggctgatcccagcagacaactaagtgaca

SEQ ID NO: 90645 - DNA, 600 bp, Chicken  19866894398921_2
tgtgctttatttaatatttaattaactgcttcacatttgtgctgaagctttttaattattaatacagagttcattatttaacatagaatataaatttaaattcaaatcaattagataaggtgaaactacacagtgaagaacggtttatcctccagcaataaccttcgacctggagacaatgtaaagagtgaaatctgtatctcttcccccacacatgcatcaaggttttctactgatgtaaagtttctgcagtaaacccaatatcccrcaaaaatctgctggatgaaaaagactttcagmtgtgatttttcagctggcccctggaagaggaaacactttcagtacgagttttctgtaagacatttgtaacacagcacatttttcttcctcttgatgtgtcaaacttcaatttaagcctctaaagataaaattattgtttgcaggaaggaaaagaagagtctatagaaagttgtagatacccagcaattatcatcttggaataactgtctcctaagtattgtttttatcttaatgtggtgggctgatcccagcagacaactaagtgacacacggctgctcacttacttcggcagtctcagc

SEQ ID NO: 90646 - DNA, 600 bp, Chicken  19866894398921_3
cctcttgatgtgtcaaacttcaatttaagcctctaaagataaaattattgtttgcaggaaggaaaagaagagtctatagaaagttgtagatacccagcaattatcatcttggaataactgtctcctaagtattgtttttatcttaatgtggtgggctgatcccagcagacaactaagtgacacacggctgctcacttacttcggcagtctcagcagtattgagtgcagtgaaaaccttatatcattctctgcaagatgagcttctctcatcaaagccattttttagagtgatcacaaaartagaaagtatagtaatgctagtatatctgcaagcatttgtacagagtgtgaagcaataagtacaatacttaattcactaagtactctctaacatgatgatgtttctaaggccttactgcccaaaaatatgtgtattcatatataaaaaaactagctttatgcttacttaaatatccttaaacatcacttgaaatatgtgatgcagaagttctctgaggattagcatatctcttatcaacttcaagagattagattgcaatgttttgtaagaattgctctccatccttcaagtggaagtca

SEQ ID NO: 90647 - DNA, 600 bp, Chicken  19866894398931_1
cacaaaaatctgtcaatataaatcattctgcatgatgtggaccaacctgggcttgtgcagacaaaagccttcactcctcttctcctggtctgagcacattcattcaggtcctgtctctacagaaacctgcctgggctgcagccttcctttaatgctacgggacagtaggtcatcccaggagccaatctgtgagaaaagaggaaacgactcagctacactccgagatacaaaagggagagaagaaaaaaggaagtcagaagggatgatgggggaggaggaggaaagctgatgacgctgcaratcaccagcgtcgcttatcttacactcactgtgcctcggttgtccaatctgtaccacrgaagtaccagctacggtcaggaaagtttctttgcgtagattaagagtgaaaaatcacaggcacatgtccatccagcttacttcagaggacaaagccagcacagaccacacgtaccaccagcgccggatggtaccagtcctgtggtgaatggcacacagagcagtgggcagagcttctgctgtgtgaacttctcggaaaaaaaagcattagctatagtggtttgtggaagatagagcatgctg

SEQ ID NO: 90648 - DNA, 600 bp, Chicken  19866894398931_2
agacaaaagccttcactcctcttctcctggtctgagcacattcattcaggtcctgtctctacagaaacctgcctgggctgcagccttcctttaatgctacgggacagtaggtcatcccaggagccaatctgtgagaaaagaggaaacgactcagctacactccgagatacaaaagggagagaagaaaaaaggaagtcagaagggatgatgggggaggaggaggaaagctgatgacgctgcaratcaccagcgtcgcttatcttacactcactgtgcctcggttgtccaatctgtaccacrgaagtaccagctacggtcaggaaagtttctttgcgtagattaagagtgaaaaatcacaggcacatgtccatccagcttacttcagaggacaaagccagcacagaccacacgtaccaccagcgccggatggtaccagtcctgtggtgaatggcacacagagcagtgggcagagcttctgctgtgtgaacttctcggaaaaaaaagcattagctatagtggtttgtggaagatagagcatgctgcaagaggaaagccatttcaaggtacttcctcctgctccactaatcgcatagtatccaa

SEQ ID NO: 90649 - DNA, 600 bp, Chicken  19866894398931_3
tccatccagcttacttcagaggacaaagccagcacagaccacacgtaccaccagcgccggatggtaccagtcctgtggtgaatggcacacagagcagtgggcagagcttctgctgtgtgaacttctcggaaaaaaaagcattagctatagtggtttgtggaagatagagcatgctgcaagaggaaagccatttcaaggtacttcctcctgctccactaatcgcatagtatccaattagtgtgtttttaatggcccactgcccctctgttgcagctcttcctaaaggggcttcagaaaagycgcacctcacagyacaccaaaggcactgctgtgaccctggggagggcgggcaatgcagtgggtgaagctttctgcagcaccttcccagctgatctttaccagctttgactcagctagccttgcacctctctgtaagacaaattgctgttttgtgaatgaggaaacaagcttttattaagtgatttgctgatggctgtatgggaaggctgtgggagaatcagggaagaatccaagcctggttcagtcctgcctttgtagctacatgcatattcattctccacattctgcctgctttgcttt

SEQ ID NO: 90650 - DNA, 600 bp, Chicken  19866894398931_4
cttcagaggacaaagccagcacagaccacacgtaccaccagcgccggatggtaccagtcctgtggtgaatggcacacagagcagtgggcagagcttctgctgtgtgaacttctcggaaaaaaaagcattagctatagtggtttgtggaagatagagcatgctgcaagaggaaagccatttcaaggtacttcctcctgctccactaatcgcatagtatccaattagtgtgtttttaatggcccactgcccctctgttgcagctcttcctaaaggggcttcagaaaagycgcacctcacagyacaccaaaggcactgctgtgaccctggggagggcgggcaatgcagtgggtgaagctttctgcagcaccttcccagctgatctttaccagctttgactcagctagccttgcacctctctgtaagacaaattgctgttttgtgaatgaggaaacaagcttttattaagtgatttgctgatggctgtatgggaaggctgtgggagaatcagggaagaatccaagcctggttcagtcctgcctttgtagctacatgcatattcattctccacattctgcctgctttgctttcatgtagcttgca

SEQ ID NO: 90651 - DNA, 600 bp, Chicken  19866894398933_1
gccctagtgttgagtttatctggaggaaaagtctagccacatcacctaaaaaaccttttgtgatggttggccatgacaagaggcctcacagctaagctcttcctgtggaagatcctaggtaaccctgcctagtaagtaacatcttctgccctgggtgaaggctatggaaccagaataagcttagaacttttcataactagactctaagatggctgatatttattaaaaggcgctggaagctggtgcccagtttcttacgtggaaaaatccatgtcatagtacctctgatctgagaaaaayctgtgctgcaaatgtccaggtcactcagacacctgccttgaatctatgacatgttacctcttcctccctatgagtagtcacctacaagactcacacagtgaagatgaggtgatgtgagcttcactgtgggctggacaaggttttgaggaacccatctagagctgagatctgagccaccacatcttcatagtcatttgctccagcactagctggactgaagtttgttcaagtgcaggtttattctggaagtccctacaactgcaatactaaaagctcacacagttatgatcccaggtttaa

SEQ ID NO: 90652 - DNA, 600 bp, Chicken  19866894398936_1
gtaggttttattttctaaaataaacataaaactgaagaatatctccattcactgaaagatcctttttccgaacagatgagatctataacagtgattttatgttcacagtaatttatattatttccaattttattttgttgcattaaccaagccaatgacttaaccagaaaaaaaaaaatgacaaaaaaattaaagccaagctctagatgtaatggcttgttttctgaaagtgtgcttttaaaacagatctgtctactaagagatttagtattctttgagaggatgactgaaaactttgtyaacaccttccatttctagctgatggatttgagactgatgagaggtaaagagcattcagatactggtggcaggaggtaggaaatatgatgctaggctagagaactacactaagcaataaaggagaagttgactgtgataagatggaaaacatgtagagctgtctccactacaggcaagtgagcagaacacagaactagaatataaaagagtacaagtgctgaactattgccttaatatagtggcaaatcaatccagccatgaagcagaatattttcagttctaaaaccctatgaaaacagg

SEQ ID NO: 90653 - DNA, 600 bp, Chicken  19866894398938_1
attatatcatagggccattgcaagtggttcagcagcagtaaaacagaaagcacagctgtgtttcaatacaagaggaatccatcaaccagagacagtttttactttttacagtgctgaaagcaaagtctgtgccaggctgaccctgtctgggtgcctgattcccactcagctgttctctcctttctcagcaggacaggaggagaaataacatggacacactcatggataaaagtgaaaaagattacttaccagtttaccagcatgagccaaacagacttgacttgaagattaatccaacayattgattacttaattagagcagaatggtgagaatcaaaggcaaaactagaaaccccatctccccactcccctccttactcccaggctcaacttcagtcctccattcccagctcttctatctcctcccatcacatgtagtgcagaaggaacagggagtcaggggtgaggtcagtccctaactacgtagctatgccaatccttcctcctcacacttttcacctgctccaccatagcattcttccacaggacacagtctttcatgaactgaactctctctaaagtcactgggaacatctaatt

SEQ ID NO: 90654 - DNA, 600 bp, Chicken  19866894398948_1
ggtgtaacatcttaaaataatttatggtactgtcaggcttgaagaagaaaagacttctcttgggaagcagtttcagcagcaacttcaaaaattgtatgtttgataaatagcaccatagctaacaacgttcaaagtgcaaggatcaagggaactttaaataaggaatttagactctcaagttcatacaaaactattatggaggaagacgctatgactgaacaagagatgaacatttagtgtatcaatgaaagcaacaggagagatgtatctactgatcttttgggatctgagttttgaccygtctgtataccaggatgtcgctggcggaaagagggtttttttttaaatataaaataataatattttccaccattgtataacttttgagaatctcaaacagatttctctctcattttgagactcaactttcaacatatgaaaaaacaataataattgtgacacaataataaatatarctttgatcaaaataaatattaccgttacatgattttacagtgcttatcatttaaactttttatcttgttgagctgaattttagctgctattttaaaacagtaagttcttcatctggaaatgktt

SEQ ID NO: 90655 - DNA, 600 bp, Chicken  19866894398948_2
aagttcatacaaaactattatggaggaagacgctatgactgaacaagagatgaacatttagtgtatcaatgaaagcaacaggagagatgtatctactgatcttttgggatctgagttttgaccygtctgtataccaggatgtcgctggcggaaagagggtttttttttaaatataaaataataatattttccaccattgtataacttttgagaatctcaaacagatttctctctcattttgagactcaactttcaacatatgaaaaaacaataataattgtgacacaataataaatatarctttgatcaaaataaatattaccgttacatgattttacagtgcttatcatttaaactttttatcttgttgagctgaattttagctgctattttaaaacagtaagttcttcatctggaaatgktttcaaaattaaatgctgtagtttgtaaatcttggggtttttttaatgtgttttttttttcttttctcttttaaaataaattatacctctgaagaagaaactcatgaaaagtaatacttcctacaaattgacattttccagtgaaaacacctttttggaataaatgtggtattgaaga

SEQ ID NO: 90656 - DNA, 558 bp, Chicken  19866894398948_3
cygtctgtataccaggatgtcgctggcggaaagagggtttttttttaaatataaaataataatattttccaccattgtataacttttgagaatctcaaacagatttctctctcattttgagactcaactttcaacatatgaaaaaacaataataattgtgacacaataataaatatarctttgatcaaaataaatattaccgttacatgattttacagtgcttatcatttaaactttttatcttgttgagctgaattttagctgctattttaaaacagtaagttcttcatctggaaatgktttcaaaattaaatgctgtagtttgtaaatcttggggtttttttaatgtgttttttttttcttttctcttttaaaataaattatacctctgaagaagaaactcatgaaaagtaatacttcctacaaattgacattttccagtgaaaacacctttttggaataaatgtggtattgaagaccacgagtaattttcttcaaaagaattttccatttacccatatactgtaagaacagatggataaatatgctttagaagaa

SEQ ID NO: 90657 - DNA, 599 bp, Chicken  19866894398949_1
  misc_feature (1)..(129): n is any nucleotide
nnnnnnnnnnnnnnnnnnnnnnnnnnnnnnnnnnnnnnnnnnnnnnnnnnnnnnnnnnnnnnnnnnnnnnnnnnnnnnnnnnnnnnnnnnnnnnnnnnnnnnnnnnnnnnnnnnnnnnnnnnnnnnnnnataggatgagacacatgcaagatagctacagaagccttctgatgccaatgccctgagctggctcagctgttctgctggttgctatgatgctgcctttccagttgtatgaatattttgcagatgaagtacacaagggctgctctgctgtgggtgacacgcagttattcactsaaggcctcatttactccygtggtgctacaccaaaacagcagcagtcaccaactgcatgaaagattaaacagagaacctataaatacccactttgggcaaattcataaataaatctcaactggaaagcagtacgtagtatgaattacatttgtgcacacatactgcattggctttcaggagacagaccagagagggcygtaaaagcaggagacaaggaggcacctgcaggcacataacaaggccaacaggggagttgcagcaccacgcatgccaagagacacgaagatggagggcagtat

SEQ ID NO: 90658 - DNA, 599 bp, Chicken  19866894398949_2
  misc_feature (1)..(111): n is any nucleotide
nnnnnnnnnnnnnnnnnnnnnnnnnnnnnnnnnnnnnnnnnnnnnnnnnnnnnnnnnnnnnnnnnnnnnnnnnnnnnnnnnnnnnnnnnnnnnnnnnnnnnnnnnnnnnnnataggatgagacacatgcaagatagctacagaagccttctgatgccaatgccctgagctggctcagctgttctgctggttgctatgatgctgcctttccagttgtatgaatattttgcagatgaagtacacaagggctgctctgctgtgggtgacacgcagttattcactsaaggcctcatttactccygtggtgctacaccaaaacagcagcagtcaccaactgcatgaaagattaaacagagaacctataaatacccactttgggcaaattcataaataaatctcaactggaaagcagtacgtagtatgaattacatttgtgcacacatactgcattggctttcaggagacagaccagagagggcygtaaaagcaggagacaaggaggcacctgcaggcacataacaaggccaacaggggagttgcagcaccacgcatgccaagagacacgaagatggagggcagtatcagaaactgcactgagag

SEQ ID NO: 90659 - DNA, 600 bp, Chicken  19866894398949_3
gttctgctggttgctatgatgctgcctttccagttgtatgaatattttgcagatgaagtacacaagggctgctctgctgtgggtgacacgcagttattcactsaaggcctcatttactccygtggtgctacaccaaaacagcagcagtcaccaactgcatgaaagattaaacagagaacctataaatacccactttgggcaaattcataaataaatctcaactggaaagcagtacgtagtatgaattacatttgtgcacacatactgcattggctttcaggagacagaccagagagggcygtaaaagcaggagacaaggaggcacctgcaggcacataacaaggccaacaggggagttgcagcaccacgcatgccaagagacacgaagatggagggcagtatcagaaactgcactgagagtaaggactacatacaggttgctatgaacagggaaaaacatttgcaagcaatatggtttcagatatatacaggagcaacaatgtcatctctaaggacaaactattagcttaaaggcagcttatcttctagttattaaaaagtaaggaaattaccagctgctgtcgccttggctatgtcctt

SEQ ID NO: 90660 - DNA, 600 bp, Chicken  19866894398953_1
agttctgttctttacctgagttgttgtcacagatttttctttcttgtccttgacagacttcagtgcgcgttaattgcaacattctctgactttgtatacttatgaaggtctctttgggatttcggggccaaatctgttctggttttatcttttgaaagggacttcattttgaaaattttctccttttcagatgacttcatcacactgtctacacctgtacaaccacctttctctggcaactccccttctgagattttctgatgatcttttttgtcagaatgaaattccttctttaacaayggagttcttccagactcttgcatctcttccttcctattaccacttttggaactattaacatcttgtttttcagaggaattaagaggcccatttttttccagttgcggtgaaagtggtttaggttcattattcatcttggattttttgtttgttacagagatatatttgcatacatcttctttatttttctgaatgctattttgaacattttcacaaatcggtgggttttctaccacactgttgttctttattatggcatcagatttgctgttgttttcttgtctccctgcagagttaggg

SEQ ID NO: 90661 - DNA, 513 bp, Chicken  19866894398955_1
tcagggcttagctcttgttgaatcgcatagtatttcatcttgctgctgatttctgtgggaaaaaggaacagatggtcaatctagcatgctacagagaagtaaacattgtggagtacttctatttttgtgaatccagatcatgctggtagcaaaagaaaattttaattatcctacagctccacagtaggtaattattatctttaatccagtcttaaaatgaaacctgcaaataaacactttctggcatacgtagggatctcatcagaagacgatgagattaaacaggcaagggtaatgtgytttatttggcttggcagctgggatcatcttttcattttgagctctgtggcatgtagcagattggggctttcatctgggatcatgtttttaagtgctactgaaaaaaatatgatgtttattaaataacacctgcagcaaggagactaaaataatctctttggccatctgaagaagtttgaggcacctttaagatataatatatggcttcttata

SEQ ID NO: 90662 - DNA, 599 bp, Chicken  19866894398959_1
  misc_feature (1)..(3): n is any nucleotide
nnntactacacatttcatgtgtatttgttctgattacgtagcaagaaaagggaaagaaagaaatagagcaatgaagttcaagaattcatttattttgtagtcactggaatacagataacagtagtaaatttttcaactcatcagaattttgtatgaagagatacaaagtactaattaaggttgaggaattcaaggttcagttatacataaactatgcagatgaaaattagaaaagcatctgttaaagctgggacattgacagtgcataaagcagttaagtgtgcaaataactaaatactyagtagacattgcaagattttgaaagttataaactgtaatctgtgaattacagaatttaggttacaagaatcactggagaaaaatcttgtttcattgtaattatgaacatatcaagtcattagaaaactattctraagcacaaaaagaaaaatcatagattaaaacaaacatacaaaaaaaccacacaaacatcacatttgtggataatctctaacataatctctaacaaacagactagcttttttgaataaccaataaaattcatacacaaaattaaatttgctgtcatgtgttagaaa

SEQ ID NO: 90663 - DNA, 600 bp, Chicken  19866894398959_2
aactcatcagaattttgtatgaagagatacaaagtactaattaaggttgaggaattcaaggttcagttatacataaactatgcagatgaaaattagaaaagcatctgttaaagctgggacattgacagtgcataaagcagttaagtgtgcaaataactaaatactyagtagacattgcaagattttgaaagttataaactgtaatctgtgaattacagaatttaggttacaagaatcactggagaaaaatcttgtttcattgtaattatgaacatatcaagtcattagaaaactattctraagcacaaaaagaaaaatcatagattaaaacaaacatacaaaaaaaccacacaaacatcacatttgtggataatctctaacataatctctaacaaacagactagcttttttgaataaccaataaaattcatacacaaaattaaatttgctgtcatgtgttagaaatttttcaaagaaaatgtaagtatcatattgaaatagacttattgtgggtgaagtaccattttactataaaatacgcttttcaagaaaagcactaacatagtataggtactacagatgtataatgattacacacac

SEQ ID NO: 90664 - DNA, 600 bp, Chicken  19866894398963_1
gttctgactcccctttcttctcgtcctccaataacactgaagttcactgtgtagttaggtttagcttgtgtactagatttagcttgggactgccatgtttgtggttttgtgggtttctgccactgacctcctgacttctgagatggaacagttttctgagcaaacccactagtggagaatccacctgtggaggaacctaaagataaaaactaaattagttgctcagcttgatatctgtcacctgtttaatgtaaataagacattttggccttaacatctaaccacacagtttacagtgaygccaccacacatgagaaagcattaaaagattttcttctcattaacaacctgtatagcaggagccagagccattattaaaagttttccagtcttacactaagatcccaagtactagttyataccaaaagcattcactgcatctgaatgtgtacttgccagaaaatagttcagtagtgacagcagtaatggctgyaaatttgttgtacttcagtgtctgttaacagtggatgccccaaccctgaaggcattcaaggccaggctggatgtggctctgggcagcctggtctggtggttggcgac

SEQ ID NO: 90665 - DNA, 600 bp, Chicken  19866894398963_2
gccactgacctcctgacttctgagatggaacagttttctgagcaaacccactagtggagaatccacctgtggaggaacctaaagataaaaactaaattagttgctcagcttgatatctgtcacctgtttaatgtaaataagacattttggccttaacatctaaccacacagtttacagtgaygccaccacacatgagaaagcattaaaagattttcttctcattaacaacctgtatagcaggagccagagccattattaaaagttttccagtcttacactaagatcccaagtactagttyataccaaaagcattcactgcatctgaatgtgtacttgccagaaaatagttcagtagtgacagcagtaatggctgyaaatttgttgtacttcagtgtctgttaacagtggatgccccaaccctgaaggcattcaaggccaggctggatgtggctctgggcagcctggtctggtggttggcgaccctgcacatagcaggggggttgaaactagatgatctttgagaccttttcagcccagaccattctatgatcctatgataatagacattgaaaactaataatactaatcaagaagatgta

SEQ ID NO: 90666 - DNA, 600 bp, Chicken  19866894398963_3
aacctaaagataaaaactaaattagttgctcagcttgatatctgtcacctgtttaatgtaaataagacattttggccttaacatctaaccacacagtttacagtgaygccaccacacatgagaaagcattaaaagattttcttctcattaacaacctgtatagcaggagccagagccattattaaaagttttccagtcttacactaagatcccaagtactagttyataccaaaagcattcactgcatctgaatgtgtacttgccagaaaatagttcagtagtgacagcagtaatggctgyaaatttgttgtacttcagtgtctgttaacagtggatgccccaaccctgaaggcattcaaggccaggctggatgtggctctgggcagcctggtctggtggttggcgaccctgcacatagcaggggggttgaaactagatgatctttgagaccttttcagcccagaccattctatgatcctatgataatagacattgaaaactaataatactaatcaagaagatgtaatatattgaggatattttcaaatgaacgctttcagtctccttagtggtctcytgcacaactgcttragaaaacaa

SEQ ID NO: 90667 - DNA, 600 bp, Chicken  19866894398963_4
gtagtgacagcagtaatggctgyaaatttgttgtacttcagtgtctgttaacagtggatgccccaaccctgaaggcattcaaggccaggctggatgtggctctgggcagcctggtctggtggttggcgaccctgcacatagcaggggggttgaaactagatgatctttgagaccttttcagcccagaccattctatgatcctatgataatagacattgaaaactaataatactaatcaagaagatgtaatatattgaggatattttcaaatgaacgctttcagtctccttagtggtctcytgcacaactgcttragaaaacaarttaatgttacagtggcattatcaacaaatgttacagagaacaggaaaaaaacagtaaatcctgtacaasacaatgtaatgaaccatctgtaaactataggcccatgtcttatcaacctaatattgtcctgagtttttaggattcaatttcctttcttttagctggtatagacagctgcttagcagcctcattagctacacattatgggaagaacacccaacacctcttttccagtctacaatactcatttataaataagttaagctgaataaaaaa

SEQ ID NO: 90668 - DNA, 600 bp, Chicken  19866894398963_5
aatggctgyaaatttgttgtacttcagtgtctgttaacagtggatgccccaaccctgaaggcattcaaggccaggctggatgtggctctgggcagcctggtctggtggttggcgaccctgcacatagcaggggggttgaaactagatgatctttgagaccttttcagcccagaccattctatgatcctatgataatagacattgaaaactaataatactaatcaagaagatgtaatatattgaggatattttcaaatgaacgctttcagtctccttagtggtctcytgcacaactgcttragaaaacaarttaatgttacagtggcattatcaacaaatgttacagagaacaggaaaaaaacagtaaatcctgtacaasacaatgtaatgaaccatctgtaaactataggcccatgtcttatcaacctaatattgtcctgagtttttaggattcaatttcctttcttttagctggtatagacagctgcttagcagcctcattagctacacattatgggaagaacacccaacacctcttttccagtctacaatactcatttataaataagttaagctgaataaaaaactccagcctttaaa

SEQ ID NO: 90669 - DNA, 600 bp, Chicken  19866894398963_6
aatttgttgtacttcagtgtctgttaacagtggatgccccaaccctgaaggcattcaaggccaggctggatgtggctctgggcagcctggtctggtggttggcgaccctgcacatagcaggggggttgaaactagatgatctttgagaccttttcagcccagaccattctatgatcctatgataatagacattgaaaactaataatactaatcaagaagatgtaatatattgaggatattttcaaatgaacgctttcagtctccttagtggtctcytgcacaactgcttragaaaacaarttaatgttacagtggcattatcaacaaatgttacagagaacaggaaaaaaacagtaaatcctgtacaasacaatgtaatgaaccatctgtaaactataggcccatgtcttatcaacctaatattgtcctgagtttttaggattcaatttcctttcttttagctggtatagacagctgcttagcagcctcattagctacacattatgggaagaacacccaacacctcttttccagtctacaatactcatttataaataagttaagctgaataaaaaactccagcctttaaaatacattatt

SEQ ID NO: 90670 - DNA, 600 bp, Chicken  19866894398963_7
atgtggctctgggcagcctggtctggtggttggcgaccctgcacatagcaggggggttgaaactagatgatctttgagaccttttcagcccagaccattctatgatcctatgataatagacattgaaaactaataatactaatcaagaagatgtaatatattgaggatattttcaaatgaacgctttcagtctccttagtggtctcytgcacaactgcttragaaaacaarttaatgttacagtggcattatcaacaaatgttacagagaacaggaaaaaaacagtaaatcctgtacaasacaatgtaatgaaccatctgtaaactataggcccatgtcttatcaacctaatattgtcctgagtttttaggattcaatttcctttcttttagctggtatagacagctgcttagcagcctcattagctacacattatgggaagaacacccaacacctcttttccagtctacaatactcatttataaataagttaagctgaataaaaaactccagcctttaaaatacattatttagctttttgtctaattcattataagcttttttgtctcatttgtctaatgagaatgaattctagatgca

SEQ ID NO: 90671 - DNA, 600 bp, Chicken  19866894398967_1
aatctttaagaatattaccaacttactaagtagggagtctaatacacagttatcagcactgaaacgtcctttacctccccacacaaaaccaacctcatccatcagtctcaaagtttttgttcaatactccattgccaggaactgttttcaaattcagatgaggggaaaaaacaacaaccatagtaaataaatgattcaatactttacttcataaataagaaagacattcgatcagcgtagggtccttgatttgtaccagaaatgcagctgtacagcagtaaaagagggcagagtgcatcrggatctgtctggcagggtgttgtgttcctccacatgcactgaatagtcagatatcagagcggaggagattattatgacagtgaaggtttggctggggtggctttttgatcaagttcactgctaggccaggtgcaaaacagctctatttggtctgccaaataaataatggtggctctttcagagtggtgaatgcagttgaataggtgcagatgtttgtgaagatccagggcaacaaactggctttcctctcagctcagtatgtactcagtagtgtcttgagatcatttcacccttggtgat

SEQ ID NO: 90672 - DNA, 600 bp, Chicken  19866894398967_2
tcatgcagggacagagacattgaagggttttctgagctattgattttcccatgtgttcaagggagcacaacaggggaacagattttgggtcagttcaggttacctggcaatttcagtaatatgccacccagcccagctgctagattgactgaacctggttaacaccgcttaataacctgcacaaacaatctgcgaagccagtgattacatgttcaaagaaaacagctccaaaccctcattaaaggggtttttatctaaactggccatatgatgcatttcctgtgaatgctgtcatgtgtrtatcaagatgcatagcaagaggaatccagcgttggctgtcaactgggactgcaatgctccagctgtgtggccctttctgcaggtgggagtcgtgtgccaatgaggtgctgcagttgctctcggccagctttcctccttgatgcctgtggatcgaagatcctctcacaattcttaaagtggagttgggggcacaagttggcagcccttttcacattagtctccaagaagcatctgcatccagggccagttcagaacctggctctgcctctccttgggtaactctctctgctgctcactcag

SEQ ID NO: 90673 - DNA, 512 bp, Chicken  19866894398979_1
agtgcttgttagattccacagagaatcaagaccaagagctgggcattgctagaccgagtttcagaacctgtaattatttaatatagttaggcccatgactaaggaagaagtctcatgctatgatgcagtgttagcacacagagtcagcagtgaatggagcttgcttattttcttcaaaaccaaagaaaatacgtatatatccagctccactagaacttgggtgtaagggtacattgaaatcaactcactgttcacatgaacttcagttcttccctgctagtatgttagggaatcactagyattccctgcagtatttcatacgtatgtccctgtcctccctttctgaactgaaactcaaaaatctgaccatatgtgtcaaaagagttactgcaggtattgagtcaacattgagcagctcatttaagaaatagtgatgttaacgttgctgcaagggtaagttagtaaaactcattggcttctttattctttgtgcaaggaaggccaacagaaat

SEQ ID NO: 90674 - DNA, 600 bp, Chicken  19866894398981_1
gatgagcttgggatgtctgtcagctatgaaggaagggactggggggttcattgcagcctgtcctctcctggtagtttgcttgggagcagttagtggaagtggaaacctgctgctgtactagatggaagccatctgtactcagagtacataggaacaagacacagcattgagattaaccaaaaggaaaaagtaaaaataactgaaaacttattacatggaaaaagaaaatccacaaccagggcactactgagatacagtagaatatttcaaggattatgtgtgaacataatgtgttacatstgttaccaccttctactttctttttcattgtatttgaaatattatttatcaactgatttgaatagtgtagaaagtcttaattgtttctagatcatgaattttcactacacaagaaattctaaaaatgcaattttttgttaagcaagcaactgagtttttagtgtatctcactctgctggactgcaatggtcttcttttcttgttatttgtacttatttgactggtagaaagctcagtgacacatgacagtgacatattggaatcattcagtctggcccagaactggttgtgttggtaata

SEQ ID NO: 90675 - DNA, 600 bp, Chicken  19866894398989_1
ttctgtttattagtaatggagaatgctgctatgctgtgctgtgcaacatttggcacttgaaacagaagaaaaccaatctattctgtgcatagctatgtaactggaaggagatgccgttttacatattttaaagcagaggaattttaattcaactgcagagtattccaagatgagtcactgacctctcggtctcctatggaaaagatgcgtattctgttagttttccttccccagaaatgtaacctatggcatgtgcattcactgaagtggaaataactgtaagttagcttttaaaatatwttataaaaatccatactgtgaggaattcctggacaacacaaaccatcatgcaaaaatccctgagtatagattacatcacaagccattattgtgtcaaaatatgtaaagattagctcttaacggcccctggatcaataacaagcatttgaaatgtccctgaatgcatattcacaagatactgttctgcagacttacagagctcttacccaaaggtgatggaagctgattaattacaattaaccataatcctgtttagaaagcacaagtcatccaataatatatcatgtgcttcccagggaa

SEQ ID NO: 90676 - DNA, 600 bp, Chicken  19866894398993_1
gtaactggattcttagtgatagataaaagaattgtgagagaattctttctaccacagaatcaccccaactgtcttactacttcagcaatttgaattctgtggttagaattgcctcacaatccagttcactgagtcatagaagtaatatcagaaaaaggattaggaataatcctttgtggcccaagtaatcaggtatgtaaacacaaaaaaataaatctggtactactaatcagatcagtgagttcgtgggtaataaaataagaaagatgtgttttctgcttgctcattgcattttcctaygtagaccatggaaattacagctgtggagttgtatccttttataatttacatcaacttttactcttttggacactttgcctgtttgctctattttgctgtacatctgtctgtattaaagctcatttaatacaccagggctcatacttcagtctagaatcctttcaagtctcccttattgtttgttccacagcctctgctgctccaaatttagtttcatcagcaactaactagttcactctctctgtcagtcatgtatatagattaggcaccgtctatgttcaaggactacccctttgggag

SEQ ID NO: 90677 - DNA, 600 bp, Chicken  19866894398997_1
ggtgagtagttcaagttacatctataatctgtgttaatttctttggatacagaaagtaaactagtatctcactgaatgaaagaccatgagtaagcatgtttcccgttacttatatcacagaatctgtacatcattgttttaatgtcttgtatctacttatgttggcaataaatttgtccctaaattttgattatgcacaaagaaaaatgacaataggtgtaaaattttgcataaaaatggcaaggtccatcatatgagatatgagtattaatattcaaatgctctagttctaatactttyacataactctttttttggaaggtggtatcttgtttaagatttgccttcttcttttgcctaaaatgtatgtttagttgtggttttcgttcacagtacttgggaaagcatttgcattttagaacagaagtagaaaacatgtacgataataatgattttggcttagacaccaaatacagagttacagacttgcaaagcgaaaagcagtatttgtagcaacttgagttaagtgcacaaattgtgtatccagtaattgtaagtaattgtactgtctgtgatcattacaccacaaatctgtcaaat

SEQ ID NO: 90678 - DNA, 600 bp, Chicken  19866894398998_1
atgataccaaaaagccacaggaacaggagcataagatatgatttctgcttgcattcctggaggagatgtatctttccaggttctgtgcacataagctattgttttacttgttacatccacgtagatgctcatgctagtctcactgcaatgaaaaaaaagtcatccacttaactgataaaactctgcatgcttacaaagaggcttattttgagagttaattgagaatttccccaacaatttaattctctggttgattgttttagaaaactggtgctactcttttaaaggaaaaagaaaggyatcgttgattaatggtttgcacctgcttttctcatactccatgtaaaagtgagaacagctgataatggtratgtctgggrtgtcagtcagtggatgtaccaagcaaattcttagggatgtgagcttgaggaggatgtgaagggttgggagggggaaaggatgactgcccacagtaggaaatatcacaggaggcagcaagggagggaatgatgcagtatgtgtcaggaaaaccagtggctgctactgcgtgtactcctctgatcactccacaataaaataacgctcaggaacacggcttgg

SEQ ID NO: 90679 - DNA, 600 bp, Chicken  19866894398998_2
tctttccaggttctgtgcacataagctattgttttacttgttacatccacgtagatgctcatgctagtctcactgcaatgaaaaaaaagtcatccacttaactgataaaactctgcatgcttacaaagaggcttattttgagagttaattgagaatttccccaacaatttaattctctggttgattgttttagaaaactggtgctactcttttaaaggaaaaagaaaggyatcgttgattaatggtttgcacctgcttttctcatactccatgtaaaagtgagaacagctgataatggtratgtctgggrtgtcagtcagtggatgtaccaagcaaattcttagggatgtgagcttgaggaggatgtgaagggttgggagggggaaaggatgactgcccacagtaggaaatatcacaggaggcagcaagggagggaatgatgcagtatgtgtcaggaaaaccagtggctgctactgcgtgtactcctctgatcactccacaataaaataacgctcaggaacacggcttgggaaggctgaagatgcyaaggaggacaactgagagcaggcacagagctcgccttgctctgtgtctctgaag

SEQ ID NO: 90680 - DNA, 600 bp, Chicken  19866894398998_3
ttctgtgcacataagctattgttttacttgttacatccacgtagatgctcatgctagtctcactgcaatgaaaaaaaagtcatccacttaactgataaaactctgcatgcttacaaagaggcttattttgagagttaattgagaatttccccaacaatttaattctctggttgattgttttagaaaactggtgctactcttttaaaggaaaaagaaaggyatcgttgattaatggtttgcacctgcttttctcatactccatgtaaaagtgagaacagctgataatggtratgtctgggrtgtcagtcagtggatgtaccaagcaaattcttagggatgtgagcttgaggaggatgtgaagggttgggagggggaaaggatgactgcccacagtaggaaatatcacaggaggcagcaagggagggaatgatgcagtatgtgtcaggaaaaccagtggctgctactgcgtgtactcctctgatcactccacaataaaataacgctcaggaacacggcttgggaaggctgaagatgcyaaggaggacaactgagagcaggcacagagctcgccttgctctgtgtctctgaagaaagaaacta

SEQ ID NO: 90681 - DNA, 600 bp, Chicken  19866894398998_4
ttgcacctgcttttctcatactccatgtaaaagtgagaacagctgataatggtratgtctgggrtgtcagtcagtggatgtaccaagcaaattcttagggatgtgagcttgaggaggatgtgaagggttgggagggggaaaggatgactgcccacagtaggaaatatcacaggaggcagcaagggagggaatgatgcagtatgtgtcaggaaaaccagtggctgctactgcgtgtactcctctgatcactccacaataaaataacgctcaggaacacggcttgggaaggctgaagatgcyaaggaggacaactgagagcaggcacagagctcgccttgctctgtgtctctgaagaaagaaactaagctgcctgcttctgaactttgccattgtacaaatacatctctgtacagatgaagaatcaaggctgataatgagcattgccacctgcacagcttctcatcaatgttggccacatcataaatcccctgagtccactgcactcttcagttctcatatgccaccccaggcatgtattcgagctggctgtgcctccaacaagttgcttttgggctcatttgggctatgttgcactgctga

SEQ ID NO: 90682 - DNA, 600 bp, Chicken  19866894399000_1
gttgttttgatcaataattgtttttttacttataagtgctaaaaagactatctaccagttctatattttattcctgtctttgagcaatcagtaaaatactgtgttactccctctgctcaaaaaatagatctgatacttctcacagtcttacgtcacttaattcctggtattagtgaaaacaaatatttctggtttcagctgatacagtgttaatagcacactcatatttagttgttgctgaggggcagggacacacctgggatcaggccaggttgcttgacaggaagagccactgccttyatggaacagcagcagtgggcagggcagagctgaaacaggacaggagcctgaattaggtcaagggctgttccatactgtgtgacatcctgcagaaggccataaagttgaggggagtttgctagggacagctgctgctcaggggttgtagggtgttggccagtggatggtgagacattgtgttgctggtgggctgccactagggcagttgtatagttagctgggcatcagttagctggtagtgagtaattgcattgggggtgtatataagyatgcacagttaccttcacgcttttgtgtcca

SEQ ID NO: 90683 - DNA, 600 bp, Chicken  19866894399000_2
aggttgcttgacaggaagagccactgccttyatggaacagcagcagtgggcagggcagagctgaaacaggacaggagcctgaattaggtcaagggctgttccatactgtgtgacatcctgcagaaggccataaagttgaggggagtttgctagggacagctgctgctcaggggttgtagggtgttggccagtggatggtgagacattgtgttgctggtgggctgccactagggcagttgtatagttagctgggcatcagttagctggtagtgagtaattgcattgggggtgtatataagyatgcacagttaccttcacgcttttgtgtccatttttttcttttagccttagaaaatatttttttaatctcaactcatgagttttattttctttccagttctctccctcatcccacctgaggggaaatgagtgaaaggctgtgtgrtgctaagttgctgccaggttaaaccacaacgcayaaataaataaatcctgctgaaagcccacacttcaaatcttaactttgaataatatggttgaaaaggctatcaagcagggtagttattatatattgaattacttaataaacaaggtcaactt

SEQ ID NO: 90684 - DNA, 600 bp, Chicken  19866894399000_3
tttgctagggacagctgctgctcaggggttgtagggtgttggccagtggatggtgagacattgtgttgctggtgggctgccactagggcagttgtatagttagctgggcatcagttagctggtagtgagtaattgcattgggggtgtatataagyatgcacagttaccttcacgcttttgtgtccatttttttcttttagccttagaaaatatttttttaatctcaactcatgagttttattttctttccagttctctccctcatcccacctgaggggaaatgagtgaaaggctgtgtgrtgctaagttgctgccaggttaaaccacaacgcayaaataaataaatcctgctgaaagcccacacttcaaatcttaactttgaataatatggttgaaaaggctatcaagcagggtagttattatatattgaattacttaataaacaaggtcaacttcagaaggcaaaacagaaagtggagtcaaactctggttgtggcaatattagacaccatccacatctaagggcaaattcagcacaaaaatgacgaagtcagactttcaaaaataaacatgagttaggtcctaaatattctatctcca

SEQ ID NO: 90685 - DNA, 571 bp, Chicken  19866894399000_4
ggtgttggccagtggatggtgagacattgtgttgctggtgggctgccactagggcagttgtatagttagctgggcatcagttagctggtagtgagtaattgcattgggggtgtatataagyatgcacagttaccttcacgcttttgtgtccatttttttcttttagccttagaaaatatttttttaatctcaactcatgagttttattttctttccagttctctccctcatcccacctgaggggaaatgagtgaaaggctgtgtgrtgctaagttgctgccaggttaaaccacaacgcayaaataaataaatcctgctgaaagcccacacttcaaatcttaactttgaataatatggttgaaaaggctatcaagcagggtagttattatatattgaattacttaataaacaaggtcaacttcagaaggcaaaacagaaagtggagtcaaactctggttgtggcaatattagacaccatccacatctaagggcaaattcagcacaaaaatgacgaagtcagactttcaaaaataaacatgagttaggtcctaaatattctatctccaaagta

SEQ ID NO: 90686 - DNA, 599 bp, Chicken  19866894399002_1
  misc_feature (1)..(55): n is any nucleotide
nnnnnnnnnnnnnnnnnnnnnnnnnnnnnnnnnnnnnnnnnnnnnnnnnnnnnnnccaaaccccacccccatccccaactctgcccccatcttcaaatctctatcctcaaacccatccccactcatgtccccatcctcaaccccatcatcatccccattcccaaccttgtccccaaccccaaacccatccccagtgccattcccatccctggtgccattcccatccctaccctatccccagtccttcctccatttccaatcctgaccccatcctcaaccccatccccacgccctccccawacccatgggtacattttcctggtgccaggactgcctgtccctcccctgccctgcctggggtataygtgggctgggctgggtccctccagctcctaaagctgctccgattggcgtctgctcgtagcacggaggaaataattgagtcgtatatcagaatagataatagatggaagggcgggtggataattggaaaagacaaatggccggggcccaacatcacagcaacattaattttatttaaggacagcaaattagagggagcacttcgcttcctatcacctaattattttaggtaatgg

SEQ ID NO: 90687 - DNA, 600 bp, Chicken  19866894399002_2
cccccatccccaactctgcccccatcttcaaatctctatcctcaaacccatccccactcatgtccccatcctcaaccccatcatcatccccattcccaaccttgtccccaaccccaaacccatccccagtgccattcccatccctggtgccattcccatccctaccctatccccagtccttcctccatttccaatcctgaccccatcctcaaccccatccccacgccctccccawacccatgggtacattttcctggtgccaggactgcctgtccctcccctgccctgcctggggtataygtgggctgggctgggtccctccagctcctaaagctgctccgattggcgtctgctcgtagcacggaggaaataattgagtcgtatatcagaatagataatagatggaagggcgggtggataattggaaaagacaaatggccggggcccaacatcacagcaacattaattttatttaaggacagcaaattagagggagcacttcgcttcctatcacctaattattttaggtaatggaaatgcttaatgtactgtgaatacagtgcgctgcagaataaataaatacgaggaccccacccttgg

SEQ ID NO: 90688 - DNA, 599 bp, Chicken  19866894399003_1
  misc_feature (1)..(97): n is any nucleotide
nnnnnnnnnnnnnnnnnnnnnnnnnnnnnnnnnnnnnnnnnnnnnnnnnnnnnnnnnnnnnnnnnnnnnnnnnnnnnnnnnnnnnnnnnnnnnnnnntgtctgtgcttgtttgggggagtttgtcaatacttgtgtgctgtaccactgcatgctaggtcccagccttgcatgtagtatgcacacaattgtatataccacacagtaatgatttgctgttagactacaggcaatagctttgactgtagttgaaacagactttttactgagtgaagaagagcaggaaaaatgtcctatagacrgtgaagaaaggctgcaaaaatgagagggtagctaaagttagaaatctgaagagtttaaaatagttcatgtttctttaaaaaaggaagagtttagtgaactgtgattaaagaattgccttaacctgcttcacctcctttttggagatggatattccatctaacctgaccagtcacctggaaggactcactgcagtgcagctggctgggctggaatatccctcagagatacacttggccctgtctgagcagaaaggcagggaacagcataaagtagctgcaagaactcaaaccgtcagcca

SEQ ID NO: 90689 - DNA, 591 bp, Chicken  19866894399003_2
ctgagcagaaaggcagggaacagcataaagtagctgcaagaactcaaaccgtcagccaaacaaatgttacatacatgccaaatgaatttgagccatgattttgagggttctgtaagagttgaatccaaacacaagaaattgaacatcgtttgaagttgcttacttgattgaatgaacagcagctaaggaaacttcattgaagcaaacaggcaagtcatgaagaagcactttaaaagggagggtgtgtgtgacctgtaaagagaagcatccgtaagcatagaatttgtcagaagtctcctmtgacattcggggcatctctgggaatattctcctcaaataaaccatggtgtagtgatacaatacctgaaaatagtaaggtagtgtctttaaaatgaaaataattataattattgtaagtaggtactgacaactttaatattgtgtttgaatatactgagaatggtgaaagctaatatttcaagatagaatgtggtttctttcactggaggagtcaggaatacttattgctgcactcataactgtgcattcagctccctgcgttcctctcgggtgctgactctgctaaccatt

SEQ ID NO: 90690 - DNA, 600 bp, Chicken  19866894399010_1
cttccttgtgtgctcatataaatcatcaacctgatatgttcttgccattcttaacatatagaggcttggattgttcctaatactccatggccactggggagcacagggtgggatggggcagtgggaggaaatccatttcttcaactgtaactgcgtgttgatctatatctgtacaaaacatgggcctgcctgacaaactttaccagttgtaaacactcaccagtgtggccacttgcaatcagcaagatgctgtaaaacatcaagatcactctaagtaagctctgatagtgattctaaggyacgctatttactccagaaaaaagccaagaaatgtgttcaggccacctggaaggtcttgaaaagcaggcaagaccttatctgaagtcttagagaaagctgttgactttagtaaggaggaacttggaagcagaattctatacatrtggtaaggagcaatctcaagacagttctgtaaaaggaaattacaaattctgattttactagaaattactagactgattgtctgtctctggtaagtgtgagcagttatacagaaaaccactgaagtgatctgaactggaggacagatggtatttgtgc

SEQ ID NO: 90691 - DNA, 600 bp, Chicken  19866894399010_2
actgtaactgcgtgttgatctatatctgtacaaaacatgggcctgcctgacaaactttaccagttgtaaacactcaccagtgtggccacttgcaatcagcaagatgctgtaaaacatcaagatcactctaagtaagctctgatagtgattctaaggyacgctatttactccagaaaaaagccaagaaatgtgttcaggccacctggaaggtcttgaaaagcaggcaagaccttatctgaagtcttagagaaagctgttgactttagtaaggaggaacttggaagcagaattctatacatrtggtaaggagcaatctcaagacagttctgtaaaaggaaattacaaattctgattttactagaaattactagactgattgtctgtctctggtaagtgtgagcagttatacagaaaaccactgaagtgatctgaactggaggacagatggtatttgtgctttagattactgagggggaaccagacctggcactcttcccacaaagcaagcatctgtagtggtgctagttgctgagctctggcatgatggaagtgctgtatcaggaagagaaagatctgtggtatggaccacacaatggggtt

SEQ ID NO: 90692 - DNA, 600 bp, Chicken  19866894399014_1
tctttccccctcctgttagattttaaaataacagacttatgatgaataaccaaaaatcaccccaggcccacatctacacttatatgggctctgtccagcagcaaacacctgcttgaaacagtcttcgtgctttattgtggcccatactgagacaactgagccctggtcaacattgcccacactctctgcaagatgaggtacacagacagccgcctgccttgagctcccacatcctacaagccctgtatgtacacagcatcctgttactacattactttgatgacactccctcatgcatarcgtgtctgtgattacttgccagaggcaagaagcagaagccactcctctcctctgctccttaaatagttaaatgctttggtcagctgggagcaagcctgacagctggaagaggtgctgctcccaggactgagctaaggctgcatgtaagtaagctgtctgggcaggtacaacgtttcatagctgttgttttgacttcctctatgtagtaataaataggcactgcttcaaatttaatttctccaatattttggatacactcactggatctttttttttcccctaaaatgctgtcctcttcaa

SEQ ID NO: 90693 - DNA, 600 bp, Chicken  19866894399016_1
gacagtactgggacacaatgataaagtcaaacaagctgaaataaatactacaatcagcaataaaaacaattcaaactttgctctaagcaaataaaactgtgccatatgttataaaaattaatgaatataaagagacatcaattatctgacctgactcagaaacatagagtttagcttccatttgaaagaacaattactgttttagttatcttgcaaaagtaaatctctgaatgggaatcaacagaataccatcaagcaaacagattataacaaccaattgttaagtcaaacactgattayccagtttatggggaagggtgatacaaaatacaattsatctatgttggttccagcttataagtatcaagacaagtagaaagcagaatacgaagagtcacagctcaaagcaagaacaataatcagatctatctacattaagaaacaggtacaactcttaaaagaaaagacacattttaacttgaatggttttttgatcatgaaagccacacagatggactcttttcccaaccaaatccctctgtcagctgcacaaggtaagtgcacttcaactctgaatgtggtcaattttagaaaactgga

SEQ ID NO: 90694 - DNA, 600 bp, Chicken  19866894399016_2
tgaaataaatactacaatcagcaataaaaacaattcaaactttgctctaagcaaataaaactgtgccatatgttataaaaattaatgaatataaagagacatcaattatctgacctgactcagaaacatagagtttagcttccatttgaaagaacaattactgttttagttatcttgcaaaagtaaatctctgaatgggaatcaacagaataccatcaagcaaacagattataacaaccaattgttaagtcaaacactgattayccagtttatggggaagggtgatacaaaatacaattsatctatgttggttccagcttataagtatcaagacaagtagaaagcagaatacgaagagtcacagctcaaagcaagaacaataatcagatctatctacattaagaaacaggtacaactcttaaaagaaaagacacattttaacttgaatggttttttgatcatgaaagccacacagatggactcttttcccaaccaaatccctctgtcagctgcacaaggtaagtgcacttcaactctgaatgtggtcaattttagaaaactggatacaatttattcaagagttgattctgaaataaaaca

SEQ ID NO: 90695 - DNA, 600 bp, Chicken  19866894399022_1
acttggggcagcttcctttatacagacagcttgcaatatcgagttctctcctcaataagcactggcagctctcactgtcaattcccccgatcgatgctcaccctgcctgccctctctgctgatctgggctctgatgctcctttctacatctagcagctgcaggacagccaggagtgagggtggctgtgtggcctggaggggttaggagggctgaagttgtgccaggtacagttttagtactgcacagacaataatgatcctgcttctggattaagcccagatgggtgtaaaaccaacagygtgagggcaggcagggagttggagcatcagccccttcggatggcaccatggtgttcctccaaggaagggtgctcacaggtcgctgcacggcgctgacctcctccctatgggatgagggcctccagcacagactgccaaccatccccagcattttggtcagtggtcggaggagaacaactcccatttagggttttatatttagagctcgtacagctcaagttgtgttgccttttctcggaggctgcagcgtgagaaccagtgaatgtgtcacaccacaatgattcacatcccgtgggagtt

SEQ ID NO: 90696 - DNA, 600 bp, Chicken  19866894399025_1
ggttaaatttccattccatgtagaaatggcaggttgcttgtacaaaaacaaaagagtagaactgagtataagtacaaatcaaatgcagattggattttgacccagagcggggttacttgggataaccagagtaaatcccataagcagatggtatcctggtgtttatctagcataagcaagagtttccagccttccttataatccagaaggaagagctttgaatccagtagaagttttggggggaggaatttaactctcaaggggcatttgcattccatgacttgaataatctctctctcycccttgctacagtgatactctgtacaaagtcagcatctgaaatccagaacctttttcagtttgtttctgtaacacgcctacttcacttactttgtgagctcctgtctgggagctgcagaaataagcagtgtgaaagcagctgcagccagaggcctatttcacagtactgcagcaggtgcataatccaattggccactcttggtcagactaaacactcatctttgaacaggaactgttcaaaaatgaagaatcaacaaaacctttatcacttccactaatttagttcatctgtgggcctca

SEQ ID NO: 90697 - DNA, 600 bp, Chicken  19866894399025_2
tactgaggcattgctctctgacatgatctgactcaactgcacctacaacatcacttaccaccaagttagacaggacaaaggagtgtcccttcaaagagaagttaatgagaaagagaaatagccctacatacaccccagaagtccagctgtactacatctccatcatatgtggagttattctacaggttggtctgttgagatgggtataataagataatgtcacattcaagggattttgcagatggatcatttattgtctaacagcaaacaaacagtgtgggcaattttctactagtacgytaattctaaattaagtgtttgcccagccgtatgggccccctgtattcacagagcagccatatgggcactgtattcccagctgcgcttgccagaatgttccatttgtgttgtgccgggttacacagctcccatcrctggataaaagcaatgctttgtgcatacagtgtcattcatatttagaggactagatctcaagtatttatgtttgcactgttcacaatttgaaatttcattgaaaaaataaacccccaccccataaaatattttcatggactttacataagtttacagatacttcta

SEQ ID NO: 90698 - DNA, 600 bp, Chicken  19866894399025_3
ccagaagtccagctgtactacatctccatcatatgtggagttattctacaggttggtctgttgagatgggtataataagataatgtcacattcaagggattttgcagatggatcatttattgtctaacagcaaacaaacagtgtgggcaattttctactagtacgytaattctaaattaagtgtttgcccagccgtatgggccccctgtattcacagagcagccatatgggcactgtattcccagctgcgcttgccagaatgttccatttgtgttgtgccgggttacacagctcccatcrctggataaaagcaatgctttgtgcatacagtgtcattcatatttagaggactagatctcaagtatttatgtttgcactgttcacaatttgaaatttcattgaaaaaataaacccccaccccataaaatattttcatggactttacataagtttacagatacttctagtctgaataaagaaataaaacatttttatgtacagaaatatacagtttatcaaaagaataggtatttggataagagaagaaaaattgattcaacattctttgccagaagtaacatcttttgcctsccccaaaaa

SEQ ID NO: 90699 - DNA, 554 bp, Chicken  19866894399025_4
ctcccatcrctggataaaagcaatgctttgtgcatacagtgtcattcatatttagaggactagatctcaagtatttatgtttgcactgttcacaatttgaaatttcattgaaaaaataaacccccaccccataaaatattttcatggactttacataagtttacagatacttctagtctgaataaagaaataaaacatttttatgtacagaaatatacagtttatcaaaagaataggtatttggataagagaagaaaaattgattcaacattctttgccagaagtaacatcttttgcctsccccaaaaattcaaatacagaaatacttatgtgaacgcagggtctggagtcattagtcacctcagcagttcccactgtagtgagtctctgcagctactcacaaagcctgcaagactagattcacaatgtcaaaatgaaaataatatcaccagagaagtttatcaaccatatattgttttaggagctgggctaaggggagtgattcattcctctaataagagcaatattgcaatatatcctgcctctgccagaga

SEQ ID NO: 90700 - DNA, 600 bp, Chicken  19866894399030_1
agatacttagaacacagacagtgtcggactactaaagctgtccagtggtgaccagtgctttaaagatgcctttgagactaacatgtttctgactacctatgaaatggattgcccgaggctagtgaggaatttcccttcaccaaacaggaaaatggttttgttgagatttttcatgttcttactcagccttttatttattttttttttaattttttttcaatgtatacaatgcttatgaaagtcaagatttttagcaagtgaatcttttctcatttctcactttccacttactggaataaygaagaggaaaacctgtacagcttaatttgcatgaggcaatactctgtgattgcagggtcacagctagctgcaagtgggtaactacctgtgtcccagctatgataccagataaaactagctgtggtggtgctggttatttttcctgccaaaagcatcttctccaagctgaactgagaattctcacttcacaatagccaatgaataggaattacaagcggtttattataaattccttacacatgcaaagctaccactgacttaagaggattttttgtgtgccaggaaatgtacgaacaggtt

SEQ ID NO: 90701 - DNA, 599 bp, Chicken  19866894399037_1
  misc_feature (1)..(146): n is any nucleotide
nnnnnnnnnnnnnnnnnnnnnnnnnnnnnnnnnnnnnnnnnnnnnnnnnnnnnnnnnnnnnnnnnnnnnnnnnnnnnnnnnnnnnnnnnnnnnnnnnnnnnnnnnnnnnnnnnnnnnnnnnnnnnnnnnnnnnnnnnnnnnnnnnnctttcgacagctttcctaagagttaattttaccctgccgtaagggagagatggagaggaacattccctgctacgctgccagtcaaaaaaaccccaacacctttgctggcaatatggctattgttaaatccctgtcacataaatgtgaaagaagmaaactctttccttcttagaagctgttggtgtagtaccacttctctgtattactctttacacttwgccacacactttcagggcaatgtagctgtcgagctgtgtttaacagaagccagtttagccacaatacaggaaaattctgccccagaagtcagatatattagttaataattgaaggagtgaagaaacaagcctgacaagaaacttccgaatgatgtcactgggacaagggctcatctcagcatgatcccagcaggagaaaccatgagagaaatcaccrcataacatgcaatggttt

SEQ ID NO: 90702 - DNA, 599 bp, Chicken  19866894399037_2
  misc_feature (1)..(82): n is any nucleotide
nnnnnnnnnnnnnnnnnnnnnnnnnnnnnnnnnnnnnnnnnnnnnnnnnnnnnnnnnnnnnnnnnnnnnnnnnnnnnnnnnnctttcgacagctttcctaagagttaattttaccctgccgtaagggagagatggagaggaacattccctgctacgctgccagtcaaaaaaaccccaacacctttgctggcaatatggctattgttaaatccctgtcacataaatgtgaaagaagmaaactctttccttcttagaagctgttggtgtagtaccacttctctgtattactctttacacttwgccacacactttcagggcaatgtagctgtcgagctgtgtttaacagaagccagtttagccacaatacaggaaaattctgccccagaagtcagatatattagttaataattgaaggagtgaagaaacaagcctgacaagaaacttccgaatgatgtcactgggacaagggctcatctcagcatgatcccagcaggagaaaccatgagagaaatcaccrcataacatgcaatggtttgctgcagacaaacccttcagcatgacaggcgggagcagagcagagaaggactttacactgcctg

SEQ ID NO: 90703 - DNA, 517 bp, Chicken  19866894399037_3
acataaatgtgaaagaagmaaactctttccttcttagaagctgttggtgtagtaccacttctctgtattactctttacacttwgccacacactttcagggcaatgtagctgtcgagctgtgtttaacagaagccagtttagccacaatacaggaaaattctgccccagaagtcagatatattagttaataattgaaggagtgaagaaacaagcctgacaagaaacttccgaatgatgtcactgggacaagggctcatctcagcatgatcccagcaggagaaaccatgagagaaatcaccrcataacatgcaatggtttgctgcagacaaacccttcagcatgacaggcgggagcagagcagagaaggactttacactgcctggaggagacgtgaatttctgatcattaataaaagaaggatgactgacaactgatgaaatcaatttcctttatcacagttgggaggtctcacaattagcaaagctttgggcaattacaggacttaaatctcttcctt

SEQ ID NO: 90704 - DNA, 600 bp, Chicken  19866894399040_1
gccttgtgtgctcatcgacagcgtgctgagtgatggttggcggtatcaaagatcaaagaaagcattggaaaattctctctttcttcagcaaacattcaaagaccaaggtagacattgccaaacatgaaatacagtgaacaacaacctctgtgtctcactcctttctgaaccgtgctttaacttttgcactgggtgcacttgaattctaaatgtagagaaacgtgtttgtgtgcctttcgcttttcattagcactgaagtatgtttagggagcgctattttgaattgtgaccaatttagastgactctgttggttttggtttgaagttttgcagcgtttcaaaacgaagaaaagtaattaagccacagtgctgctcctgttcctattgttacttacacgctaagctgtaccaactataagaatgtgattagaatcagagaaagcaaagactccatttctgtgatgcggtccccttgcttaggtgcatcacctgaccagctctttaagcagctcttgcttctcaaacattaataagtcattcctgtcatcccatgacagaagtccttatttagctggaaatgaagacagacccaaacttttt

SEQ ID NO: 90705 - DNA, 600 bp, Chicken  19866894399040_2
atgtggccgcctaagaaagtttacaaatgccaatccaaccctgcaacaacaattccaaacagaactggaaatgagaatcattcaaccagatcgtcccactgtaagaatattatatttcagttctgcataaacacagacccccgtgttctctcgcgctttagaggtttgtcacgtcccacggaatacagcatatgtttatttccctgttacttttttccttccatttccttatttacatttaaaacactatctaatctgttccattgacatttttctgccctttgggcttttctagtctcrattctatcctcatcccaggagatcctcccctcctcccccctgcttctaaaagagttttttgtttgtttgattatttccattttgttctttttcacctacaggtaaatatcctaccaaaaagaacagaaacaagcagaatgggaacaacagtgggagttatcaggacatttgcaagccataactttgagtagtaacttcaacagctacactctttttgatagaagaatgtcatgcttttttttttcttaatatatatttgataatatttgacatacttgataatatgtctactataaacat

SEQ ID NO: 90706 - DNA, 600 bp, Chicken  19866894399048_1
ccacccctcttccctctcctcccctaccaagcatcacacagctccaccgcactgccaacttgcacagaaatgcctccagggtaaggaattgtctcgtaccattttcctactgctgcaggcaggccggcgcacccagctgcggagagcatcggggtggtgctggcgggacatggcagggacctccaacaccagtcagtgaagatgaagggccagatctgaagactttggcatgcatgcacattgcatcgtgtggcagtaaataacttcagcattgctcacatggtatatacatatatccawtatatatgtatatattgaggtttggctgcggtactttactaagtgtgttatgaggctccagggaggagatgcatgaaatgatccatttctacaacggaaagcttccctgtgatctgtctgggaaaacgcatggcaatttggacaaagatgattttaaaactgacgatgactctccgtggcttgacttgttccctttgctccaacggagaacctaaggacaaatccttaaactaactgtgcagtgcagtccgttgtggcactgagatgcttcggtgacatgtaagcagaggcaggtgtagc

SEQ ID NO: 90707 - DNA, 600 bp, Chicken  19866894399051_1
gtctccagcaatttcaaaactagctctggtttctggaaaagagctctgtttttcacaaggcagtcaacccagtcctttgaaaagacccaggtcttttcagaagcaaaaatggagcacacctccatgtgccgctgcagcttttgctcaatgattgtcatggcaaccgaagatgaaaggctggtgtccaaatccttgctcttctgggtggtgctgatctccttgagaaagtcatcaattgtctgtgccagttctaacgcaacacgcatctcatcctcactcaggtctccagtctcagagaarcaaaccaggctcttcctgaaggtgggaagagtatcaaggagccagtagctctcatagcactgattctccragctgttcaggacaccccgcagctcctctccccaggcacgcagcaagcagtgcagaaagtccaaaccagctatgagttcttcacgcgacagcttggccatggatgcgaagctcatggtcctctcggcttccttcactttctcatccagcccgctgtggtggtgttggctttcagtgtcactgctccacaggctgaccaccgagctgaccttggccaggtactctgcaaca

SEQ ID NO: 90708 - DNA, 600 bp, Chicken  19866894399051_2
agtcctttgaaaagacccaggtcttttcagaagcaaaaatggagcacacctccatgtgccgctgcagcttttgctcaatgattgtcatggcaaccgaagatgaaaggctggtgtccaaatccttgctcttctgggtggtgctgatctccttgagaaagtcatcaattgtctgtgccagttctaacgcaacacgcatctcatcctcactcaggtctccagtctcagagaarcaaaccaggctcttcctgaaggtgggaagagtatcaaggagccagtagctctcatagcactgattctccragctgttcaggacaccccgcagctcctctccccaggcacgcagcaagcagtgcagaaagtccaaaccagctatgagttcttcacgcgacagcttggccatggatgcgaagctcatggtcctctcggcttccttcactttctcatccagcccgctgtggtggtgttggctttcagtgtcactgctccacaggctgaccaccgagctgaccttggccaggtactctgcaacagggagggggccgccctgtggctccagctcggtgaacacagacagcagctccaccaggttgcccagggcgt

SEQ ID NO: 90709 - DNA, 599 bp, Chicken  19866894399070_1
  misc_feature (1)..(57): n is any nucleotide
nnnnnnnnnnnnnnnnnnnnnnnnnnnnnnnnnnnnnnnnnnnnnnnnnnnnnnnnnctgcagtttttgacagagtgtgacagagtgtagcttggcaacaatatcagccagcttcttcaggactctggaatgtgtgtcatctggccccatagacttatgcacatccattgacatgcagtgatgtttgctgaatgtttatggaagtcaaactgtgcatgtgagcacagtgaaacagtgggtggtgcatttcagcagtgctgggagtgacatgaaagacaagtcaagttccagatagccatrcacagttgtcacaccacagaatgaagagcatcttgatcagctcwcccatgcaaattggtgaattataaccagagaactgtgtacagagctgaatatcatcttcagtgtgttggaaacaacagtggcaatgttggaatatcacaaactttgcaccaagtgagttccacaaatgctcacacagggtatacaagcttttatacaggatggggtatacaggtttgtcagggcctgctgaaccaatttgtggctgcaagtatcagttttctggattgcatcattaccagtgataagatrtggtc

SEQ ID NO: 90710 - DNA, 599 bp, Chicken  19866894399070_2
  misc_feature (1)..(13): n is any nucleotide
nnnnnnnnnnnnnctgcagtttttgacagagtgtgacagagtgtagcttggcaacaatatcagccagcttcttcaggactctggaatgtgtgtcatctggccccatagacttatgcacatccattgacatgcagtgatgtttgctgaatgtttatggaagtcaaactgtgcatgtgagcacagtgaaacagtgggtggtgcatttcagcagtgctgggagtgacatgaaagacaagtcaagttccagatagccatrcacagttgtcacaccacagaatgaagagcatcttgatcagctcwcccatgcaaattggtgaattataaccagagaactgtgtacagagctgaatatcatcttcagtgtgttggaaacaacagtggcaatgttggaatatcacaaactttgcaccaagtgagttccacaaatgctcacacagggtatacaagcttttatacaggatggggtatacaggtttgtcagggcctgctgaaccaatttgtggctgcaagtatcagttttctggattgcatcattaccagtgataagatrtggtctatgagctggagtcaagacagctgtccatggaatggcaacatat

SEQ ID NO: 90711 - DNA, 600 bp, Chicken  19866894399070_3
gccatrcacagttgtcacaccacagaatgaagagcatcttgatcagctcwcccatgcaaattggtgaattataaccagagaactgtgtacagagctgaatatcatcttcagtgtgttggaaacaacagtggcaatgttggaatatcacaaactttgcaccaagtgagttccacaaatgctcacacagggtatacaagcttttatacaggatggggtatacaggtttgtcagggcctgctgaaccaatttgtggctgcaagtatcagttttctggattgcatcattaccagtgataagatrtggtctatgagctggagtcaagacagctgtccatggaatggcaacatatgaattccgatattccctaaattcaagatgcagccctgagtataaagtgatatgcactgtcttttgggataggaaagggagaattcttttgagtttcctggaacctgaagccatcaagtctgaccgctacatcacgatgctgactgagctgaaggcttgaacttccggagtcatgccagagaagacaacctttctcttgcaacacaataacgccaggccccataccagtttgaaggccatggagcacattgc

SEQ ID NO: 90712 - DNA, 435 bp, Chicken  19866894399071_1
tcccctctctccagcctcgaacccgtcctccgcagcccgctctcgcgagactccgcgaggtgtcctccacgcggccgttccccacgccccgcccctttcggttcctcccccctcccggccccgcccccttcgcctcatgccccgccccgctcggcccgcaggcgcggcgcggcccggccatgccggccaagaggaagccggtgctgccggccctcaccatcactcccagccccgccgagggacccgggcccggcggttccgcagagtgagtgagcggcggtggggcccgtccggtcactrcgtcggtgctgggggtggttgtgtgccgggcctgggagcggaacggggcaccggagagggacgggaacggggcttggggagagaatggagggctgggatgggccccgcctggatggggtctgtgtgggaaccggg

SEQ ID NO: 90713 - DNA, 600 bp, Chicken  19866894399082_1
catctaacactgattaacatctgacgtcatggatttctgggctgtgttgcaccagctgaatttagctattcaagtggcatgatgactcctctgtaatattaaacttttctggcatcatttaccatccctcattcatttgtgcatatgctcagcgcatggtcccaaagcttgcacgatgactttcccatacataaaagacacactgacctttcatcaataagatttgtatcgttatttgacaagaacaatgtgctcaaagaacaggctcacaatagcttctatcaatcaagtgctctgtgraaaataaaaaatgacaatggaacctacagcattaaataacccagagtgctggaaattaatcaggaatctggtgtgcttgaaaaactaatgtgttcttaataaattggatttgagtatcgcttataagccatagattaccagctgagtggaggctgttttgatttgcactgataaactccaagggagcttgcccttgtatatattcaaacctctgaggctactataaacctgctgcgcttggtgacatttaagctacatggacactattcttttaataccagcagaacacacgcttataaa

SEQ ID NO: 90714 - DNA, 600 bp, Chicken  19866894399087_1
aaaatttgctccagtacatttatacagggaattaaagaaaaaaaaaaaaagtgctgtatgtttcacagattatttggaatgcttcatagaactttataaatatgacagaagacaaatatctgagaaaaacagaatattctgtatttccctaatgacatttccagattagtgtgtaatgtagtttctaagagtcgatgtgtatgtgacagctagggatagaaattatattaattctgaaatttagtcaattttgatcatctcgagacgatcctccttgacgaaggaaagatcaagaccacraaataaagttttgtttgtgtggctcagatcatttatcagtgtgcaagaaaataactattaaattgcaaaataataattagataatattatgaagactgctccaaaaataatgccttctattttattatgttggtccacaatgtcagaggcggatggtggtggtatggcagtaaaggttgaaccttcctaccaatatttcattacattttgttgccatgtgacagatagcagctctggggaagtctgacaaaatagtttctgacatggaactatgttataaaatgtgtttataagtgtgtc

SEQ ID NO: 90715 - DNA, 560 bp, Chicken  19866894399095_1
gagaaaactgcatacaaattcagggaagcaaaaatgcaaacattaaaactgaagcacatatctattttaagacacgtaagtagagaattaaataccagactgttttattccgcagagttaatcttcacttctatcacatttctttcaccacacaaattaattttatacaattttcttttctcattacactctttgacgagtatagtcatatgtccgttcccaaatgagcagatactttcagaattcggaataatcttgtctccaattcacatacagagtaaatccagaacatattaaaaraattatctttgtatctgaatcaccacgcagctgagtagatatttttatatagcaacagaaagaagtttctcttctattttggtggctagcactgctcctattttgatgctaagatacagttgaatattaccttctgataaccaaatgctctttcagacattttcattatgtttcagttcttggtcactgcctgatcccataaacacatttatcttcaaaaagtgatttcatgactttacaatctcaagtaagcagaagaa

SEQ ID NO: 90716 - DNA, 600 bp, Chicken  19866894399096_1
tgcatggtttcaaacagactaaatttagccagttctgttcatcagaggaatgctgtgtgtcagctacatcaaagcccaagggcagcctgataaacactgaatacaggtcacgtagctctgtagctaacaaactctaagagagcttgtactcgggggcattcaaagcagttttgtcatcaacaatctagtatcccctgagcccccatgtcgttccagttgctaagcaacgctggtgttaatgtcttagaggagaaaaacttaccaggcatctggccgttcatctggttctgcatgtgtggygcaggagggcccccacctaccagtccatctgaagacatgttgtgcgagcgcgggggcggaggggggccgctctgactcatccctcctggacccataggcatattctgtgtgggtggctggaaggagacagtttagtcaaacaagagaagcagttaggctgacaaatatattatatgtacatatggtaaggcagttgcctatatcgctaagcggcgtatgaaaaagcactgaaaaagcatttcttgccttttccactatgtttaactcagtattaatttgggcaaaacatttaggatttcc

SEQ ID NO: 90717 - DNA, 599 bp, Chicken  19866894399099_1
  misc_feature (1)..(166): n is any nucleotide
nnnnnnnnnnnnnnnnnnnnnnnnnnnnnnnnnnnnnnnnnnnnnnnnnnnnnnnnnnnnnnnnnnnnnnnnnnnnnnnnnnnnnnnnnnnnnnnnnnnnnnnnnnnnnnnnnnnnnnnnnnnnnnnnnnnnnnnnnnnnnnnnnnnnnnnnnnnnnnnnnnnnnngtgagcccagagatctactgagaggaagagtgatcacaggtctgatcagacgttccccaatgaatgctcaaatacttatttttcttggaacagcatcatatggccaggatatgagcagcaaattcactccatarccattgcacacagggtcctgtcacatgccagaggagtagaagggatttataggcagctggactctgactcgctcttgcrgtagcatggttctacatgccaaaactacctccaatgctgttgacacacagacttggagcaggaaaatcatgatgctctaggtatgctgtagayggagagtctaccacaaaagatatgtgaaatttgtgtaaattcctattacctctgtctctgctacccatattctttagacaaaagatacgctttggaactaactataattgtgctgctcagctcctcg

SEQ ID NO: 90718 - DNA, 599 bp, Chicken  19866894399099_2
  misc_feature (1)..(87): n is any nucleotide
nnnnnnnnnnnnnnnnnnnnnnnnnnnnnnnnnnnnnnnnnnnnnnnnnnnnnnnnnnnnnnnnnnnnnnnnnnnnnnnnnnnnnnngtgagcccagagatctactgagaggaagagtgatcacaggtctgatcagacgttccccaatgaatgctcaaatacttatttttcttggaacagcatcatatggccaggatatgagcagcaaattcactccatarccattgcacacagggtcctgtcacatgccagaggagtagaagggatttataggcagctggactctgactcgctcttgcrgtagcatggttctacatgccaaaactacctccaatgctgttgacacacagacttggagcaggaaaatcatgatgctctaggtatgctgtagayggagagtctaccacaaaagatatgtgaaatttgtgtaaattcctattacctctgtctctgctacccatattctttagacaaaagatacgctttggaactaactataattgtgctgctcagctcctcgttagttttggcatctttcagaagcactgcagacagaagcaaatctgactgttggaacagtgcagaggagacatcaggca

SEQ ID NO: 90719 - DNA, 600 bp, Chicken  19866894399099_3
ccagagatctactgagaggaagagtgatcacaggtctgatcagacgttccccaatgaatgctcaaatacttatttttcttggaacagcatcatatggccaggatatgagcagcaaattcactccatarccattgcacacagggtcctgtcacatgccagaggagtagaagggatttataggcagctggactctgactcgctcttgcrgtagcatggttctacatgccaaaactacctccaatgctgttgacacacagacttggagcaggaaaatcatgatgctctaggtatgctgtagayggagagtctaccacaaaagatatgtgaaatttgtgtaaattcctattacctctgtctctgctacccatattctttagacaaaagatacgctttggaactaactataattgtgctgctcagctcctcgttagttttggcatctttcagaagcactgcagacagaagcaaatctgactgttggaacagtgcagaggagacatcaggcaaagcatgcacaccacagaagactgtgccaaaacagatgagtttataaagatcactttgctacatagtctatttgaacattgtacatgccatgtc

SEQ ID NO: 90720 - DNA, 600 bp, Chicken  19866894399108_1
aacaagaccaaaccccaggcatcagtacaggcttggggcagagtggccggaaacctgcgtggaagaaagggatctgggggtgttggttaacacttggctaaacatgagccagcagtgtgcctgggtgacttgtatcagaaatagtgttgccagcaggaggacggaagtggttgtcactctgttcttcacactgatagaggtcatgcctcaagcatggcgtttagttttgagcccctcactatgagaaagacactgaggccctgaagtgtatccagagaagggcaacaaagctatgagggrtctggagcacaaggcttatggggagcagctgagggaactgggattgttcagtctggagaagaggaggctyggaggactttattgccctctataactccctgaagggaggttryggtgaggtgggggtcagcatcgtctcctgcataagtagtgataggatgagaaggaatagcttcaagttgtaacagaggagatttaggctagtctccgaaagagtggtgagatgctacaacgagctgcccagggaggtggtagaatcactatccccaggagtactcaagaaacgttgagatgttgcac

SEQ ID NO: 90721 - DNA, 600 bp, Chicken  19866894399108_2
gatctgggggtgttggttaacacttggctaaacatgagccagcagtgtgcctgggtgacttgtatcagaaatagtgttgccagcaggaggacggaagtggttgtcactctgttcttcacactgatagaggtcatgcctcaagcatggcgtttagttttgagcccctcactatgagaaagacactgaggccctgaagtgtatccagagaagggcaacaaagctatgagggrtctggagcacaaggcttatggggagcagctgagggaactgggattgttcagtctggagaagaggaggctyggaggactttattgccctctataactccctgaagggaggttryggtgaggtgggggtcagcatcgtctcctgcataagtagtgataggatgagaaggaatagcttcaagttgtaacagaggagatttaggctagtctccgaaagagtggtgagatgctacaacgagctgcccagggaggtggtagaatcactatccccaggagtactcaagaaacgttgagatgttgcactaaggaacgtggtttagtggggaaatattggcmgtagatggatagttggactggatgatctttggaagtc

SEQ ID NO: 90722 - DNA, 600 bp, Chicken  19866894399108_3
cagtgtgcctgggtgacttgtatcagaaatagtgttgccagcaggaggacggaagtggttgtcactctgttcttcacactgatagaggtcatgcctcaagcatggcgtttagttttgagcccctcactatgagaaagacactgaggccctgaagtgtatccagagaagggcaacaaagctatgagggrtctggagcacaaggcttatggggagcagctgagggaactgggattgttcagtctggagaagaggaggctyggaggactttattgccctctataactccctgaagggaggttryggtgaggtgggggtcagcatcgtctcctgcataagtagtgataggatgagaaggaatagcttcaagttgtaacagaggagatttaggctagtctccgaaagagtggtgagatgctacaacgagctgcccagggaggtggtagaatcactatccccaggagtactcaagaaacgttgagatgttgcactaaggaacgtggtttagtggggaaatattggcmgtagatggatagttggactggatgatctttggaagtcttttccaatctcggtgattctatgaaaatggatggtctgccc

SEQ ID NO: 90723 - DNA, 600 bp, Chicken  19866894399108_4
agtgtgcctgggtgacttgtatcagaaatagtgttgccagcaggaggacggaagtggttgtcactctgttcttcacactgatagaggtcatgcctcaagcatggcgtttagttttgagcccctcactatgagaaagacactgaggccctgaagtgtatccagagaagggcaacaaagctatgagggrtctggagcacaaggcttatggggagcagctgagggaactgggattgttcagtctggagaagaggaggctyggaggactttattgccctctataactccctgaagggaggttryggtgaggtgggggtcagcatcgtctcctgcataagtagtgataggatgagaaggaatagcttcaagttgtaacagaggagatttaggctagtctccgaaagagtggtgagatgctacaacgagctgcccagggaggtggtagaatcactatccccaggagtactcaagaaacgttgagatgttgcactaaggaacgtggtttagtggggaaatattggcmgtagatggatagttggactggatgatctttggaagtcttttccaatctcggtgattctatgaaaatggatggtctgccct

SEQ ID NO: 90724 - DNA, 600 bp, Chicken  19866894399108_5
ggaactgggattgttcagtctggagaagaggaggctyggaggactttattgccctctataactccctgaagggaggttryggtgaggtgggggtcagcatcgtctcctgcataagtagtgataggatgagaaggaatagcttcaagttgtaacagaggagatttaggctagtctccgaaagagtggtgagatgctacaacgagctgcccagggaggtggtagaatcactatccccaggagtactcaagaaacgttgagatgttgcactaaggaacgtggtttagtggggaaatattggcmgtagatggatagttggactggatgatctttggaagtcttttccaatctcggtgattctatgaaaatggatggtctgcccttttaggtagtattagtggtgtgcatatggtggttttttttttgtttgtttgttttttgttgttcttttaactaaatttcacctgactgacttgttaaccaaaattacccttgtcactaccttactcattaacacctcagagctgatagcatttttgtaatagaggtgagccattgtggaattcaacttctgtgattgtctttatctaatgtacttgtttg

SEQ ID NO: 90725 - DNA, 599 bp, Chicken  19866894399119_1
  misc_feature (1)..(81): n is any nucleotide
nnnnnnnnnnnnnnnnnnnnnnnnnnnnnnnnnnnnnnnnnnnnnnnnnnnnnnnnnnnnnnnnnnnnnnnnnnnnnnnnnctttctcttcttcaggctgaagaaccccagctctctcagcttgtcctcacaggggaggtctttagccctctgaacatctttgtggccttcctctggacatgctccaccaactcagtgaccttctcgccttgggagctccagggctggacacagtactccaggtgggatctcatgagagaagagtagaggggcagaatcacctccctcgacctgctggtsaaaattctcttgatgcaacccagcgtatgattggcctgggctgcaagcatgcattgccagctcatgttgaatctttcatcaaccaacactcccaaatccttctccttagggctgctctcaagccattctccatccaacctgtgcttggggttgccctgacccagacgcaggaccttgcacttggccgtgttgaccttcatgaggttggcataggcccacctctcaagcctgtccaggtccctctggataacatcccctctcctctattgtgtcaactgcactaccagattggtgttatc

SEQ ID NO: 90726 - DNA, 498 bp, Chicken  19866894399119_2
tcttgatgcaacccagcgtatgattggcctgggctgcaagcatgcattgccagctcatgttgaatctttcatcaaccaacactcccaaatccttctccttagggctgctctcaagccattctccatccaacctgtgcttggggttgccctgacccagacgcaggaccttgcacttggccgtgttgaccttcatgaggttggcataggcccacctctcaagcctgtccaggtccctctggataacatcccctctcctctattgtgtcaactgcactaccagattggtgttatctgcaaatktgttgagggtgcactcaatctcactgtcaaagtcatctacaaagatgtcaaataactccggacgcaacaccaatccctcaggaacaccattcatcaccagtctccacttgggacgttgaatcactgagtgcaactctgagtgccaccatccagacaattccttatccagtgagtggtccatccattacatgcattttc

SEQ ID NO: 90727 - DNA, 599 bp, Chicken  19866894399120_1
  misc_feature (1)..(135): n is any nucleotide
nnnnnnnnnnnnnnnnnnnnnnnnnnnnnnnnnnnnnnnnnnnnnnnnnnnnnnnnnnnnnnnnnnnnnnnnnnnnnnnnnnnnnnnnnnnnnnnnnnnnnnnnnnnnnnnnnnnnnnnnnnnnnnnnnnnnnnncaagcagcagcagggactgattcaaaatgccaactttgagacctgctgatgcaaggtatagctttaggggtgaacaagagagaaacaactttcttgctgttgccttcttgttcctgatgcagtgttactgcccactcagactccctccacgttctgatgctcaawatagttattattccactctcagcaaggcttccgtgtccatctctgagaagagcaggggttgctttgtctgctgcagagatcttgcactgctccacaacgcacaggaatgcatgctgccagacctcactgggccatattgcgcaaaccagaactcaaaaagcttctgcattccccaccttagaacacagggaaagcctggagggaagagaagctgccagctgttctctactctacactgatgctttttacacttcccagtcacccactccaagccccataaatacctgcagggtcaaagc

SEQ ID NO: 90728 - DNA, 600 bp, Chicken  19866894399126_1
gtgcaggagaggtacagcagggccctgggggttggaggagcccaatgcgtggggaggaaactagcagctgggaggcgtggggatccccagcaacaggaggcagcagcccagccaagagctgggatgatttacttttaagctgcacccactaattcctgtcaagtggcgtcagtcacgtgtctcctctttccttttaggaaaacaagattctcactattctgtttttcttttacatcaccatgtgctcagaagcaatgagcaggttttccgtgaacaggaaataaaaatgaagaagttttyccacttttactccctgaaaaatcacttgaactgctgatgtcccccactgttttgtcacacattttgtttagttgcactaagggttagaaaactccatttttttcccctcctcctgaacttccctgctttccctctgctgtggggaaagtccttctgttgcagacgtgaatccctgcagagctgtgggggcgctctgcagagctgtgagcgcagcgccccgtctgcaggaacaggagcatttcagaggggggtttggaggagagggactgccattctggggatgggcgttcacccaggggg

SEQ ID NO: 90729 - DNA, 600 bp, Chicken  19866894399133_1
ggagttgagataaaagtagccagcccagaagtcctgcatgctatcttaagccacactttccagtcagtaggaaacagcactggatattattgtgacagtaatgggataggaaaacttaagagtggaagaaaagctcaagaaacaggccagcaaacagattcttcttttaaagtgattcccaggtgcatatattgagctatatcatatttggtattgcatcatgcaatagggtgcacactgaactccttccaggctgtgctagcactctgttactagtgggttacatgacaaactctgcartgatgacctctcaaactaggcagtgttcagtgtgcaggactgcactgctggctttgcaactggcacaaggcaattttcaaaatggcttctctgtcctcggctgtctaattgcactcagggcactgacaaaaaggacaacccaagacttgtctctcgtcagctgctttctacttagcwcartgtaggccttctctcasttgataattcttggtatgctgggagaaaattaaataagaaatattcataattctacagatctcaccacttcagagttgtctttactgtgctaggacactagag

SEQ ID NO: 90730 - DNA, 600 bp, Chicken  19866894399133_2
cccaggtgcatatattgagctatatcatatttggtattgcatcatgcaatagggtgcacactgaactccttccaggctgtgctagcactctgttactagtgggttacatgacaaactctgcartgatgacctctcaaactaggcagtgttcagtgtgcaggactgcactgctggctttgcaactggcacaaggcaattttcaaaatggcttctctgtcctcggctgtctaattgcactcagggcactgacaaaaaggacaacccaagacttgtctctcgtcagctgctttctacttagcwcartgtaggccttctctcasttgataattcttggtatgctgggagaaaattaaataagaaatattcataattctacagatctcaccacttcagagttgtctttactgtgctaggacactagagcactgggctttgggcaaatgctgcacaggagtggaactrtcagcatgccaagtgaagaatgtgttttacaccatctccaaaattaagagtcataaaaccagcaggagacgaagactcacagtgttaaaattagggcatttacaagtgctttgaagttcagatgtacatttgaaaagc

SEQ ID NO: 90731 - DNA, 600 bp, Chicken  19866894399133_3
aggtgcatatattgagctatatcatatttggtattgcatcatgcaatagggtgcacactgaactccttccaggctgtgctagcactctgttactagtgggttacatgacaaactctgcartgatgacctctcaaactaggcagtgttcagtgtgcaggactgcactgctggctttgcaactggcacaaggcaattttcaaaatggcttctctgtcctcggctgtctaattgcactcagggcactgacaaaaaggacaacccaagacttgtctctcgtcagctgctttctacttagcwcartgtaggccttctctcasttgataattcttggtatgctgggagaaaattaaataagaaatattcataattctacagatctcaccacttcagagttgtctttactgtgctaggacactagagcactgggctttgggcaaatgctgcacaggagtggaactrtcagcatgccaagtgaagaatgtgttttacaccatctccaaaattaagagtcataaaaccagcaggagacgaagactcacagtgttaaaattagggcatttacaagtgctttgaagttcagatgtacatttgaaaagctta

SEQ ID NO: 90732 - DNA, 600 bp, Chicken  19866894399133_4
tatatcatatttggtattgcatcatgcaatagggtgcacactgaactccttccaggctgtgctagcactctgttactagtgggttacatgacaaactctgcartgatgacctctcaaactaggcagtgttcagtgtgcaggactgcactgctggctttgcaactggcacaaggcaattttcaaaatggcttctctgtcctcggctgtctaattgcactcagggcactgacaaaaaggacaacccaagacttgtctctcgtcagctgctttctacttagcwcartgtaggccttctctcasttgataattcttggtatgctgggagaaaattaaataagaaatattcataattctacagatctcaccacttcagagttgtctttactgtgctaggacactagagcactgggctttgggcaaatgctgcacaggagtggaactrtcagcatgccaagtgaagaatgtgttttacaccatctccaaaattaagagtcataaaaccagcaggagacgaagactcacagtgttaaaattagggcatttacaagtgctttgaagttcagatgtacatttgaaaagcttaagaacccctaagctcat

SEQ ID NO: 90733 - DNA, 600 bp, Chicken  19866894399133_5
ctgcactgctggctttgcaactggcacaaggcaattttcaaaatggcttctctgtcctcggctgtctaattgcactcagggcactgacaaaaaggacaacccaagacttgtctctcgtcagctgctttctacttagcwcartgtaggccttctctcasttgataattcttggtatgctgggagaaaattaaataagaaatattcataattctacagatctcaccacttcagagttgtctttactgtgctaggacactagagcactgggctttgggcaaatgctgcacaggagtggaactrtcagcatgccaagtgaagaatgtgttttacaccatctccaaaattaagagtcataaaaccagcaggagacgaagactcacagtgttaaaattagggcatttacaagtgctttgaagttcagatgtacatttgaaaagcttaagaacccctaagctcatcacttctctcttcattcataattcttattatttatggaatattgtattttattttttgaaatctctctactttgtgaacacagataaatccaaagttaccccatagaaactccattagcatccaaccccttttgaatctcag

SEQ ID NO: 90734 - DNA, 600 bp, Chicken  19866894399135_1
gtttacagagtcctttctctgtataggaggataaataatcaaaaatacaacagtcctgagacaagacacagatggttgcccaactctttgacgctgatccatgaagttaccttattctcattttttcagtgacagttctgaagtcctgcatcaatacatttcataggtatgacataggtctttgactgggaaaatgtgactttcatatttattttcctgcatttaaatatatatatagaatccagagatatattttactctgtagcatcaggatttaattcattattgtttgtaaagtargagtaccatgcaattatgaaatatcatatttttattcaaatttggtggcattttagagaaaatttaatggaagtagtatgcagttcctgctgagaactactatgtgctgcttaactctttttgcttcttaaatactcacggtcagtatctttccaacatatcagtagaccttaaaaaagcactattttagtgyaaaagtagaacacatgtaaataaaagaatttttgatctttagcaaccaacacaaaacatctcttcaacctaccttttttctagtgctaagaaactgggaatatgtca

SEQ ID NO: 90735 - DNA, 600 bp, Chicken  19866894399135_2
atgtgactttcatatttattttcctgcatttaaatatatatatagaatccagagatatattttactctgtagcatcaggatttaattcattattgtttgtaaagtargagtaccatgcaattatgaaatatcatatttttattcaaatttggtggcattttagagaaaatttaatggaagtagtatgcagttcctgctgagaactactatgtgctgcttaactctttttgcttcttaaatactcacggtcagtatctttccaacatatcagtagaccttaaaaaagcactattttagtgyaaaagtagaacacatgtaaataaaagaatttttgatctttagcaaccaacacaaaacatctcttcaacctaccttttttctagtgctaagaaactgggaatatgtcaactacttcagttgtctggcaaatacaagataaattgacccatttatttacagattgaacaaggccaatccatttcwtgctgcagtgctgacccttaacacagatactgtgaatgagctgtccattacaatatgtacaagtgacctttaattgcattaatggctttgttgcatgttcttccactgcgacaacac

SEQ ID NO: 90736 - DNA, 600 bp, Chicken  19866894399135_3
tatgcagttcctgctgagaactactatgtgctgcttaactctttttgcttcttaaatactcacggtcagtatctttccaacatatcagtagaccttaaaaaagcactattttagtgyaaaagtagaacacatgtaaataaaagaatttttgatctttagcaaccaacacaaaacatctcttcaacctaccttttttctagtgctaagaaactgggaatatgtcaactacttcagttgtctggcaaatacaagataaattgacccatttatttacagattgaacaaggccaatccatttcwtgctgcagtgctgacccttaacacagatactgtgaatgagctgtccattacaatatgtacaagtgacctttaattgcattaatggctttgttgcatgttcttccactgcgacaacacaattatggaataaatatttctaaacaacataattatttaaatgcaaacatataggagcttagactactggcaaggaactgcagaggtattatgatttaaacgttaaagttctgaaaaattgaatgaaaccctcatgttacgcttgtataatgtcaaacaacccataaaacaaatgtagtttat

SEQ ID NO: 90737 - DNA, 599 bp, Chicken  19866894399146_1
  misc_feature (1)..(119): n is any nucleotide
nnnnnnnnnnnnnnnnnnnnnnnnnnnnnnnnnnnnnnnnnnnnnnnnnnnnnnnnnnnnnnnnnnnnnnnnnnnnnnnnnnnnnnnnnnnnnnnnnnnnnnnnnnnnnnnnnnnnnnnctttcgcttctgatcacttgaatgtggaaacatttctcagctctgtacattttgaaagagattacatatgaacacaagaagcaatattcaaagtggaaaatttcagcctgacttttaaaagtgtttggcaagggacagtcagtgacttaaaagggctgggagttccagacggaaggaacarggtatgcaaatattcaattagcagcgctatgagggtgagactttggaataaacagaacaatctagagatgaatctctgggagaattggcaggaatttaggtgacaaggaagtcttataaatcatgtcatgaaagaagcatggaatgtttgatagcaaggaacgaaatgtcatgtaaaaacagtgcagtgcattacccaattagaagcaaatgcaatgagaatatttcagggtaatgcagggatcgccttacttctaggcaagagtccagctyacgcattttagaatggctaccgtggaa

SEQ ID NO: 90738 - DNA, 600 bp, Chicken  19866894399146_2
ggctgggagttccagacggaaggaacarggtatgcaaatattcaattagcagcgctatgagggtgagactttggaataaacagaacaatctagagatgaatctctgggagaattggcaggaatttaggtgacaaggaagtcttataaatcatgtcatgaaagaagcatggaatgtttgatagcaaggaacgaaatgtcatgtaaaaacagtgcagtgcattacccaattagaagcaaatgcaatgagaatatttcagggtaatgcagggatcgccttacttctaggcaagagtccagctyacgcattttagaatggctaccgtggaaccaaaatttgtataggaaagtgggtgtgaagatgattaaaataaccagacctgctcatgattgcatgggatgaagacagtataattaacttggctaaaggagtgtcttatccttgcgatatatgtaaactgataagaggctaaacaagtggaggcagccgaaaattgaatgagatggaactgagacttcagaacagctccaagaaacttgactcactttgttgctgtaaaacatgtccatttgatctgcagcatggaaagatcatggggtttg

SEQ ID NO: 90739 - DNA, 499 bp, Chicken  19866894399148_1
gagcaagatttagaacagttattccgaatgctaaaagtttctgactatcttcatacttctttctaaaacagacaaaacaccacctgattgaagtatttcttttgtttctcgaaaccattttagatgaagaaccaagcttgttctgccacagttcttaaatttgaaagtttggaacattcagtgctgctaaatgctgatagaatcgttgttactgccaatctccaatggattgtatcagctctataacgtatggagctctgctaatatttgctgggatgaactgagtagctctaaatgctygcagagctgatttgtgcgtggaaataagcttaggaggcattcttataaatccttattcattcacttgagacaaatgctcaagtggccgtgcacagtatgttctagtgatttatggctataaagtgagcatcttaggtgagcagccattcttttgaagtcatgaaatggtttattaatgggtgaaatgtgttcttttgag

SEQ ID NO: 90740 - DNA, 600 bp, Chicken  19866894399151_1
tacccactagacaaaactgtaaattaaatgctagtaaggctactctactaataagagcctgctgcctgataggcgtgggcttgatacctgttttcttctcaagcttcaaatgctcagagggcatctgttaagggagctgcagcttttaagagtgtcacccgttgatttgaaaatcagtgctaaaaggaagtgaatcctatgccagtgatgttattcagtttgaaaccatttcttttgttttgcttgtagatgatttttgtgcgttggtttgtatttagagtatcatgcaatcacagcgcmattcagaattgatgagtctgtgtgtatctgcattcagatacttcttcmtattttaggcagtgttacattgttggctctggcaaatcttaggcagcastatgcttcatatattgcttctttaggtgaggcgttcaacagatgacatggtcacagggaagctaacagcccattacatataaaagcttagcgaggcactttcattgggccagaaactgttatcacttgagtgttggatctgctcttaggagtctgcccgtgagcagctcctgctgcactgtgcttataatggaaacgataaga

SEQ ID NO: 90741 - DNA, 600 bp, Chicken  19866894399151_2
taataagagcctgctgcctgataggcgtgggcttgatacctgttttcttctcaagcttcaaatgctcagagggcatctgttaagggagctgcagcttttaagagtgtcacccgttgatttgaaaatcagtgctaaaaggaagtgaatcctatgccagtgatgttattcagtttgaaaccatttcttttgttttgcttgtagatgatttttgtgcgttggtttgtatttagagtatcatgcaatcacagcgcmattcagaattgatgagtctgtgtgtatctgcattcagatacttcttcmtattttaggcagtgttacattgttggctctggcaaatcttaggcagcastatgcttcatatattgcttctttaggtgaggcgttcaacagatgacatggtcacagggaagctaacagcccattacatataaaagcttagcgaggcactttcattgggccagaaactgttatcacttgagtgttggatctgctcttaggagtctgcccgtgagcagctcctgctgcactgtgcttataatggaaacgataagaggcttgctgctactcacaactgtaccagcggctcatttctctctttct

SEQ ID NO: 90742 - DNA, 600 bp, Chicken  19866894399151_3
ctcaagcttcaaatgctcagagggcatctgttaagggagctgcagcttttaagagtgtcacccgttgatttgaaaatcagtgctaaaaggaagtgaatcctatgccagtgatgttattcagtttgaaaccatttcttttgttttgcttgtagatgatttttgtgcgttggtttgtatttagagtatcatgcaatcacagcgcmattcagaattgatgagtctgtgtgtatctgcattcagatacttcttcmtattttaggcagtgttacattgttggctctggcaaatcttaggcagcastatgcttcatatattgcttctttaggtgaggcgttcaacagatgacatggtcacagggaagctaacagcccattacatataaaagcttagcgaggcactttcattgggccagaaactgttatcacttgagtgttggatctgctcttaggagtctgcccgtgagcagctcctgctgcactgtgcttataatggaaacgataagaggcttgctgctactcacaactgtaccagcggctcatttctctctttcttgccctgctcccttttagctgtgtctgagtgcagctatttttttgcctt

SEQ ID NO: 90743 - DNA, 600 bp, Chicken  19866894399152_1
aaagaaagaaagaaagaaaaagtcttctgagtgaccactgataagcacctattcagctatggcaacacaataacctagtatactttagtatacttagtaatacatggcagaagagaagaaaactcatactcaaaaaagtcagcaaaatatgagactgtgccttcaaacaaacaaacaaacaacaacaacagaacacaacatatttttatcttaaatatgtgtgttactccaaaattaagtcctcctttttatttacacagaagctacaacagatacaaagaatgcaatgacactgtttgraagaacaaatgttagctacaaaacattatttttcaacacagtcagcactattagctatgcattttcaccagtgatgaatgaagagcgtgcatgccatgcttgtaacaatgtgcaccagtggatgtgactcactgtcactgttgccactgcagaaatgcaccacccaccacctcactayactcatatccactgtttggtctccataaacatacagcaagtgccagtgatggtgagtgccatttttttctgcacagaggaatttattggcacatctttacttcatacacactttcatattag

SEQ ID NO: 90744 - DNA, 600 bp, Chicken  19866894399152_2
acaacaacaacagaacacaacatatttttatcttaaatatgtgtgttactccaaaattaagtcctcctttttatttacacagaagctacaacagatacaaagaatgcaatgacactgtttgraagaacaaatgttagctacaaaacattatttttcaacacagtcagcactattagctatgcattttcaccagtgatgaatgaagagcgtgcatgccatgcttgtaacaatgtgcaccagtggatgtgactcactgtcactgttgccactgcagaaatgcaccacccaccacctcactayactcatatccactgtttggtctccataaacatacagcaagtgccagtgatggtgagtgccatttttttctgcacagaggaatttattggcacatctttacttcatacacactttcatattagacaccttcttgtcagactgcccctttgctgccatctgtcacacgacaagaaaatgtaaaggaatattgttgggaagattcagcctctactgccataccaccaacagctgactctgatgtcatgagccaatgtaataagcaggcattatcttcagtgcagccctcagagatgttgtttc

SEQ ID NO: 90745 - DNA, 600 bp, Chicken  19866894399157_1
aatggtagcatctcacaatatattgcatttattttaattacatttatctcctcactcttgtcgaccaactgaagcatcactttttttttatcctttcagttactatctgagcataaacaacgcttattggactttaggacgagacgtgccaaaggaactgtgccagctctccccacaaaggttgcagtgccagaacaggatggccaggagctgccaggggagacaggaactgccctgggatgatctaaggatagaagtcatacacattgtaaggctcctctcaggcatgtggagattgcycraaccatttcaatgctgcaggagagtttcttycaggattaagatgtccatagatagaggagcctggagtttttgctgctgcattcatatgtaatgcatacagctgggagacaaggctgctgagatctaccaagacgctcttttttactgaattcactgctgacctcacattgttttatggtgggacccatcagatgcagtgagggcagcagctcacccacatctttcagcattgagtaaaccgagctggacaggcatggggcagcttgtatgggatgtttcacaccaccggtgtgagca

SEQ ID NO: 90746 - DNA, 600 bp, Chicken  19866894399157_2
tggtagcatctcacaatatattgcatttattttaattacatttatctcctcactcttgtcgaccaactgaagcatcactttttttttatcctttcagttactatctgagcataaacaacgcttattggactttaggacgagacgtgccaaaggaactgtgccagctctccccacaaaggttgcagtgccagaacaggatggccaggagctgccaggggagacaggaactgccctgggatgatctaaggatagaagtcatacacattgtaaggctcctctcaggcatgtggagattgcycraaccatttcaatgctgcaggagagtttcttycaggattaagatgtccatagatagaggagcctggagtttttgctgctgcattcatatgtaatgcatacagctgggagacaaggctgctgagatctaccaagacgctcttttttactgaattcactgctgacctcacattgttttatggtgggacccatcagatgcagtgagggcagcagctcacccacatctttcagcattgagtaaaccgagctggacaggcatggggcagcttgtatgggatgtttcacaccaccggtgtgagcacc

SEQ ID NO: 90747 - DNA, 600 bp, Chicken  19866894399157_3
ttaattacatttatctcctcactcttgtcgaccaactgaagcatcactttttttttatcctttcagttactatctgagcataaacaacgcttattggactttaggacgagacgtgccaaaggaactgtgccagctctccccacaaaggttgcagtgccagaacaggatggccaggagctgccaggggagacaggaactgccctgggatgatctaaggatagaagtcatacacattgtaaggctcctctcaggcatgtggagattgcycraaccatttcaatgctgcaggagagtttcttycaggattaagatgtccatagatagaggagcctggagtttttgctgctgcattcatatgtaatgcatacagctgggagacaaggctgctgagatctaccaagacgctcttttttactgaattcactgctgacctcacattgttttatggtgggacccatcagatgcagtgagggcagcagctcacccacatctttcagcattgagtaaaccgagctggacaggcatggggcagcttgtatgggatgtttcacaccaccggtgtgagcaccagcagcgatcgccatactgggaaaccaaagt

SEQ ID NO: 90748 - DNA, 600 bp, Chicken  19866894399162_1
tgatgtggcttggacatgaagaaacaaatttaaatagtgccaaaactgtgatatactgaaacagggtacgcagaatctcttatagtggactctttttcctttttggggggaaaaaaaaaaatggagtaagcactcgattcagattctcttttattgcaaagattcagattctcttttactgcaaagactagatcctatcttgaagtccctccctgccctacacctgagatccttattctactggcaggtccctaccaaaggctgaagatcttcagctccaagtctttcagaattgagaakggtgactgacagaagcaaggggcattttcaactcacagcactccatgtaccaacccatctccaccagtgcagtgagcaggcactgggctgatgggtggcagcgagagtaacactgccagagacactgccctctgcccagctctgctgtgcaaaccccttgtcaccggaacacacctgggatgctgccagctccttcggttaccctcaccaagattcaggtctcctccacagctatgcgctcagaccctcaaagctacagtaaaacaaagtcactgaatcccccaaatttccctttgtaaa

SEQ ID NO: 90749 - DNA, 600 bp, Chicken  19866894399162_2
ctacagtaaaacaaagtcactgaatcccccaaatttccctttgtaaaacaacagaacaagataagatggtctgcaaacatcagccgtcccgtaaccaaaaatactttctcctgtcctgaacaccacacagaccgaagccatccagccagaggcatttgcccagggaggtgcaggggctcaatgggcagatcacaccatcccttggccaggcatccctttaactccagactgtgttcgtgacaggattagaccttgaaaatggctgagaacagctctcctacaggaagggaagccactgcracacaacgtcaggatttgtaccaccaccacatgtgtgtgaagatgcaaagaatacacatagcacaaygactgctctctgcagcccagcaatgacagacagcagcacaaaccggactcttctgtgatatggctgccaaaaagttaacaacttttggaaatcaatctggaaaagaaaacacaactgatgcaacaggtccacttcttccttagttccccctgctcagagcccgggtctgccctaagtaacacctgggagggtctctgagccagagagatcccagctagaggcagagacatatg

SEQ ID NO: 90750 - DNA, 600 bp, Chicken  19866894399162_3
ggtctgcaaacatcagccgtcccgtaaccaaaaatactttctcctgtcctgaacaccacacagaccgaagccatccagccagaggcatttgcccagggaggtgcaggggctcaatgggcagatcacaccatcccttggccaggcatccctttaactccagactgtgttcgtgacaggattagaccttgaaaatggctgagaacagctctcctacaggaagggaagccactgcracacaacgtcaggatttgtaccaccaccacatgtgtgtgaagatgcaaagaatacacatagcacaaygactgctctctgcagcccagcaatgacagacagcagcacaaaccggactcttctgtgatatggctgccaaaaagttaacaacttttggaaatcaatctggaaaagaaaacacaactgatgcaacaggtccacttcttccttagttccccctgctcagagcccgggtctgccctaagtaacacctgggagggtctctgagccagagagatcccagctagaggcagagacatatggcaaatggcacatgcaggcctctgaaagcaagctgcaggtatgggttcacctttctccagtaacata

SEQ ID NO: 90751 - DNA, 599 bp, Chicken  19866894399169_1
  misc_feature (1)..(39): n is any nucleotide
nnnnnnnnnnnnnnnnnnnnnnnnnnnnnnnnnnnnnnntgtgttcagtaagtcctgtctctttaatgttgtcaacagtacttctccaattgaaaattttcaagttatcagaataagtgtggtgaaggatgagattcactcaggtctgatgttccttgatgctttttatttgtgtatttgttactttcatatagttggatcctgttaaacatagttagcttagtttaaaaatctgacatttgtagtgcttggtttagagatgacactggtgtacctctaacgtttatcttccttaagccycaaagcatgctcagagccctgacttaatgtagtagctctttgtcttaatgattagaactaagctttttctgtcatgggcttttcctccagctttcttggtycatgaagcagaaaagtgctcaacatttcactaatccttatatatgttgtggggactrttcattsctatscatctcctacmtcactgcatgctagtaatctgtcatctcattctgcagcattttactgatgaaagtgtagtgataaaaagattttctatgtgtatatctacttgtggtcaatatgaaaatctctggtac

SEQ ID NO: 90752 - DNA, 600 bp, Chicken  19866894399169_2
aagttatcagaataagtgtggtgaaggatgagattcactcaggtctgatgttccttgatgctttttatttgtgtatttgttactttcatatagttggatcctgttaaacatagttagcttagtttaaaaatctgacatttgtagtgcttggtttagagatgacactggtgtacctctaacgtttatcttccttaagccycaaagcatgctcagagccctgacttaatgtagtagctctttgtcttaatgattagaactaagctttttctgtcatgggcttttcctccagctttcttggtycatgaagcagaaaagtgctcaacatttcactaatccttatatatgttgtggggactrttcattsctatscatctcctacmtcactgcatgctagtaatctgtcatctcattctgcagcattttactgatgaaagtgtagtgataaaaagattttctatgtgtatatctacttgtggtcaatatgaaaatctctggtacactgttcccttttggtcaataatatcatgtggatctgcaagagcagtggggtgggcatgcttgaggagttcgtaacactgcagcgtcagtccagtgtagcaa

SEQ ID NO: 90753 - DNA, 600 bp, Chicken  19866894399169_3
atgctttttatttgtgtatttgttactttcatatagttggatcctgttaaacatagttagcttagtttaaaaatctgacatttgtagtgcttggtttagagatgacactggtgtacctctaacgtttatcttccttaagccycaaagcatgctcagagccctgacttaatgtagtagctctttgtcttaatgattagaactaagctttttctgtcatgggcttttcctccagctttcttggtycatgaagcagaaaagtgctcaacatttcactaatccttatatatgttgtggggactrttcattsctatscatctcctacmtcactgcatgctagtaatctgtcatctcattctgcagcattttactgatgaaagtgtagtgataaaaagattttctatgtgtatatctacttgtggtcaatatgaaaatctctggtacactgttcccttttggtcaataatatcatgtggatctgcaagagcagtggggtgggcatgcttgaggagttcgtaacactgcagcgtcagtccagtgtagcaataataataatgaaaccttgaaactatctgcaaaccattgcataccctgccaattttg

SEQ ID NO: 90754 - DNA, 600 bp, Chicken  19866894399169_4
ttatttgtgtatttgttactttcatatagttggatcctgttaaacatagttagcttagtttaaaaatctgacatttgtagtgcttggtttagagatgacactggtgtacctctaacgtttatcttccttaagccycaaagcatgctcagagccctgacttaatgtagtagctctttgtcttaatgattagaactaagctttttctgtcatgggcttttcctccagctttcttggtycatgaagcagaaaagtgctcaacatttcactaatccttatatatgttgtggggactrttcattsctatscatctcctacmtcactgcatgctagtaatctgtcatctcattctgcagcattttactgatgaaagtgtagtgataaaaagattttctatgtgtatatctacttgtggtcaatatgaaaatctctggtacactgttcccttttggtcaataatatcatgtggatctgcaagagcagtggggtgggcatgcttgaggagttcgtaacactgcagcgtcagtccagtgtagcaataataataatgaaaccttgaaactatctgcaaaccattgcataccctgccaattttgtctgctg

SEQ ID NO: 90755 - DNA, 600 bp, Chicken  19866894399169_5
tgtgtatttgttactttcatatagttggatcctgttaaacatagttagcttagtttaaaaatctgacatttgtagtgcttggtttagagatgacactggtgtacctctaacgtttatcttccttaagccycaaagcatgctcagagccctgacttaatgtagtagctctttgtcttaatgattagaactaagctttttctgtcatgggcttttcctccagctttcttggtycatgaagcagaaaagtgctcaacatttcactaatccttatatatgttgtggggactrttcattsctatscatctcctacmtcactgcatgctagtaatctgtcatctcattctgcagcattttactgatgaaagtgtagtgataaaaagattttctatgtgtatatctacttgtggtcaatatgaaaatctctggtacactgttcccttttggtcaataatatcatgtggatctgcaagagcagtggggtgggcatgcttgaggagttcgtaacactgcagcgtcagtccagtgtagcaataataataatgaaaccttgaaactatctgcaaaccattgcataccctgccaattttgtctgctgtgtat

SEQ ID NO: 90756 - DNA, 600 bp, Chicken  19866894399169_6
tactttcatatagttggatcctgttaaacatagttagcttagtttaaaaatctgacatttgtagtgcttggtttagagatgacactggtgtacctctaacgtttatcttccttaagccycaaagcatgctcagagccctgacttaatgtagtagctctttgtcttaatgattagaactaagctttttctgtcatgggcttttcctccagctttcttggtycatgaagcagaaaagtgctcaacatttcactaatccttatatatgttgtggggactrttcattsctatscatctcctacmtcactgcatgctagtaatctgtcatctcattctgcagcattttactgatgaaagtgtagtgataaaaagattttctatgtgtatatctacttgtggtcaatatgaaaatctctggtacactgttcccttttggtcaataatatcatgtggatctgcaagagcagtggggtgggcatgcttgaggagttcgtaacactgcagcgtcagtccagtgtagcaataataataatgaaaccttgaaactatctgcaaaccattgcataccctgccaattttgtctgctgtgtatcagaatcttgt

SEQ ID NO: 90757 - DNA, 600 bp, Chicken  19866894399175_1
ttaatcatgaataacgatttattagtctgtaccaaagctacaggatctcagcatcccacctctggtcatggcccagaaaaggcataagaacaaggcacagatgcagtcatttttcctcagaacacttcaccatgttccaggaagttgtttgaaagctcttgaagtcaccagtaagaatgcattaatttaacaggttttaactgttccctccattaaattatctggctgttcccccctcactattagtaccagtgtttgacaaaataccaaattaagatatcagaatttcttaatgtactwctctgaactgcacatcaaaattttggtgtttcgtttacctcagmatcttgaaatgcasagagattcaacagctggatcacagctgaaagatttagtgccttccatatgycaccaaggtatttctgcataaaacaattgccatttgaaagctwtttttcctacattcaggttgtataaccttacacattcagatgtcacgctcctatgatggtacaactgttccctttggagcagactatgagacattcagattaattagaaaaaactactgatttatgatcttttcaagtagaagttcat

SEQ ID NO: 90758 - DNA, 600 bp, Chicken  19866894399175_2
atctcagcatcccacctctggtcatggcccagaaaaggcataagaacaaggcacagatgcagtcatttttcctcagaacacttcaccatgttccaggaagttgtttgaaagctcttgaagtcaccagtaagaatgcattaatttaacaggttttaactgttccctccattaaattatctggctgttcccccctcactattagtaccagtgtttgacaaaataccaaattaagatatcagaatttcttaatgtactwctctgaactgcacatcaaaattttggtgtttcgtttacctcagmatcttgaaatgcasagagattcaacagctggatcacagctgaaagatttagtgccttccatatgycaccaaggtatttctgcataaaacaattgccatttgaaagctwtttttcctacattcaggttgtataaccttacacattcagatgtcacgctcctatgatggtacaactgttccctttggagcagactatgagacattcagattaattagaaaaaactactgatttatgatcttttcaagtagaagttcatttaagaaatcctcatttgtcagaattcgacttccaccagttgat

SEQ ID NO: 90759 - DNA, 600 bp, Chicken  19866894399175_3
cctctggtcatggcccagaaaaggcataagaacaaggcacagatgcagtcatttttcctcagaacacttcaccatgttccaggaagttgtttgaaagctcttgaagtcaccagtaagaatgcattaatttaacaggttttaactgttccctccattaaattatctggctgttcccccctcactattagtaccagtgtttgacaaaataccaaattaagatatcagaatttcttaatgtactwctctgaactgcacatcaaaattttggtgtttcgtttacctcagmatcttgaaatgcasagagattcaacagctggatcacagctgaaagatttagtgccttccatatgycaccaaggtatttctgcataaaacaattgccatttgaaagctwtttttcctacattcaggttgtataaccttacacattcagatgtcacgctcctatgatggtacaactgttccctttggagcagactatgagacattcagattaattagaaaaaactactgatttatgatcttttcaagtagaagttcatttaagaaatcctcatttgtcagaattcgacttccaccagttgatgagattgagccata

SEQ ID NO: 90760 - DNA, 600 bp, Chicken  19866894399175_4
tttttcctcagaacacttcaccatgttccaggaagttgtttgaaagctcttgaagtcaccagtaagaatgcattaatttaacaggttttaactgttccctccattaaattatctggctgttcccccctcactattagtaccagtgtttgacaaaataccaaattaagatatcagaatttcttaatgtactwctctgaactgcacatcaaaattttggtgtttcgtttacctcagmatcttgaaatgcasagagattcaacagctggatcacagctgaaagatttagtgccttccatatgycaccaaggtatttctgcataaaacaattgccatttgaaagctwtttttcctacattcaggttgtataaccttacacattcagatgtcacgctcctatgatggtacaactgttccctttggagcagactatgagacattcagattaattagaaaaaactactgatttatgatcttttcaagtagaagttcatttaagaaatcctcatttgtcagaattcgacttccaccagttgatgagattgagccatacgttttaatcaagagttgattaatgtttcttctctctcctctttcaataaa

SEQ ID NO: 90761 - DNA, 600 bp, Chicken  19866894399175_5
aagctcttgaagtcaccagtaagaatgcattaatttaacaggttttaactgttccctccattaaattatctggctgttcccccctcactattagtaccagtgtttgacaaaataccaaattaagatatcagaatttcttaatgtactwctctgaactgcacatcaaaattttggtgtttcgtttacctcagmatcttgaaatgcasagagattcaacagctggatcacagctgaaagatttagtgccttccatatgycaccaaggtatttctgcataaaacaattgccatttgaaagctwtttttcctacattcaggttgtataaccttacacattcagatgtcacgctcctatgatggtacaactgttccctttggagcagactatgagacattcagattaattagaaaaaactactgatttatgatcttttcaagtagaagttcatttaagaaatcctcatttgtcagaattcgacttccaccagttgatgagattgagccatacgttttaatcaagagttgattaatgtttcttctctctcctctttcaataaaggctcaataatatgttctgcccaatgaccctatactctattag

SEQ ID NO: 90762 - DNA, 600 bp, Chicken  19866894399175_6
ttaattagaaaaaactactgatttatgatcttttcaagtagaagttcatttaagaaatcctcatttgtcagaattcgacttccaccagttgatgagattgagccatacgttttaatcaagagttgattaatgtttcttctctctcctctttcaataaaggctcaataatatgttctgcccaatgaccctatactctattagttccaattgagacagatgaagtcatgctctctttagacagcctgatttcccaagaacacatctgctgatcacctgctatgttgtcttgtagcaaaaatktttattatctataaaagtttctatttagcatacctgaagtatatgattaaagcctgaggtaatcgcattgctagaaattcacactgaaatagtggtttgcctaaaaggactaataagcaattcacttgtaacactggtgccaaaagtaagcaaaagctctatgcaggaaacaagattgcaagggacgaccagcagatgacagcacacacttaayrttaagttgcttccacccttaaatctcgcttagtttttccacttcccaacctacatgaatacacctacaactcattaggtacatct

SEQ ID NO: 90763 - DNA, 451 bp, Chicken  19866894399175_7
agatgaagtcatgctctctttagacagcctgatttcccaagaacacatctgctgatcacctgctatgttgtcttgtagcaaaaatktttattatctataaaagtttctatttagcatacctgaagtatatgattaaagcctgaggtaatcgcattgctagaaattcacactgaaatagtggtttgcctaaaaggactaataagcaattcacttgtaacactggtgccaaaagtaagcaaaagctctatgcaggaaacaagattgcaagggacgaccagcagatgacagcacacacttaayrttaagttgcttccacccttaaatctcgcttagtttttccacttcccaacctacatgaatacacctacaactcattaggtacatctgatagcaaaacacatgtaagcactttgaagtatgctcatacctaaagcatctcggcacaattaaa

SEQ ID NO: 90764 - DNA, 450 bp, Chicken  19866894399175_8
gatgaagtcatgctctctttagacagcctgatttcccaagaacacatctgctgatcacctgctatgttgtcttgtagcaaaaatktttattatctataaaagtttctatttagcatacctgaagtatatgattaaagcctgaggtaatcgcattgctagaaattcacactgaaatagtggtttgcctaaaaggactaataagcaattcacttgtaacactggtgccaaaagtaagcaaaagctctatgcaggaaacaagattgcaagggacgaccagcagatgacagcacacacttaayrttaagttgcttccacccttaaatctcgcttagtttttccacttcccaacctacatgaatacacctacaactcattaggtacatctgatagcaaaacacatgtaagcactttgaagtatgctcatacctaaagcatctcggcacaattaaa

SEQ ID NO: 90765 - DNA, 599 bp, Chicken  19866894399186_1
  misc_feature (1)..(184): n is any nucleotide
nnnnnnnnnnnnnnnnnnnnnnnnnnnnnnnnnnnnnnnnnnnnnnnnnnnnnnnnnnnnnnnnnnnnnnnnnnnnnnnnnnnnnnnnnnnnnnnnnnnnnnnnnnnnnnnnnnnnnnnnnnnnnnnnnnnnnnnnnnnnnnnnnnnnnnnnnnnnnnnnnnnnnnnnnnnnnnnnnnnnnnnnaagagaaattaattggaatttggcataaatgattcttcggcgaacagaagagggccagctgctaacatactgctgcctcgctcccttccattaccacatatacaatttgcaccgcrgggagagccaggggctgcctatagccttgcccagcagataagggaatgctccgtgctgcrgctcagcagcagagaggttttggatgcctcattctgggggaactgcagcagcaaaaccgccttcagggatgctttgttgtccccagcctggcacagccctgcactgtgtccccaggttcccccacagccagacccctctgtgggagctgcccccaactctgcacatccatccatccatcgccctgcagcccatttccctgctttatctcgggggaatctttcccaaaccacagtgcagc

SEQ ID NO: 90766 - DNA, 599 bp, Chicken  19866894399186_2
  misc_feature (1)..(124): n is any nucleotide
nnnnnnnnnnnnnnnnnnnnnnnnnnnnnnnnnnnnnnnnnnnnnnnnnnnnnnnnnnnnnnnnnnnnnnnnnnnnnnnnnnnnnnnnnnnnnnnnnnnnnnnnnnnnnnnnnnnnnnnnnnnnaagagaaattaattggaatttggcataaatgattcttcggcgaacagaagagggccagctgctaacatactgctgcctcgctcccttccattaccacatatacaatttgcaccgcrgggagagccaggggctgcctatagccttgcccagcagataagggaatgctccgtgctgcrgctcagcagcagagaggttttggatgcctcattctgggggaactgcagcagcaaaaccgccttcagggatgctttgttgtccccagcctggcacagccctgcactgtgtccccaggttcccccacagccagacccctctgtgggagctgcccccaactctgcacatccatccatccatcgccctgcagcccatttccctgctttatctcgggggaatctttcccaaaccacagtgcagcacagcctggkgaatgccctgaaggcaggaaaagctctctggccaattcctgtacagtgct

SEQ ID NO: 90767 - DNA, 600 bp, Chicken  19866894399186_3
aggggctgcctatagccttgcccagcagataagggaatgctccgtgctgcrgctcagcagcagagaggttttggatgcctcattctgggggaactgcagcagcaaaaccgccttcagggatgctttgttgtccccagcctggcacagccctgcactgtgtccccaggttcccccacagccagacccctctgtgggagctgcccccaactctgcacatccatccatccatcgccctgcagcccatttccctgctttatctcgggggaatctttcccaaaccacagtgcagcacagcctggkgaatgccctgaaggcaggaaaagctctctggccaattcctgtacagtgctgcagttccccgaagcactcccccagcttttgcttttgctttaagctctgtcccactcttccttacaaacatgcagcccacatggagtgggatgtggtagagttggacacggggcgcttctcaacgatgcatttgcgtttggtccaaccagctctgcagcttcctggcttctgagcagagagcgcaggagttgggtagcacgcatgggaaggacccttggcagggacccattgcagaggcgctgagcacca

SEQ ID NO: 90768 - DNA, 600 bp, Chicken  19866894399192_1
tgcttcaacaagtaaagctgagtttgtaaaatatggtatgcaagcatgctttgaagagccaaagccatgaaagtcttcagtggtagaagcaaaacatgtattttcagtgttcttgtatgaaatgtaaatatgtccgtttctgggtcctgagcaatagaacaatctctattgttgaaaaatgagaaagagaggatgccactatgctggaagatgttgaaacttagatgctatcatcaagctaccacagaaaaaatctgagggagcaaagttgttctgaggcaattttggaatttgaaagartaatttgaaawatcaattcttgaactgccaaagtctttctgatcagcgttaaacaagatatgttgtaatcaaggagaaataagtgaccaagaaggacaactgaaaattaagtaataggactggacttaacagtgaaactatggaacaaaaggaaattaatttaatattttggacatgtcatgcaggaagaacttgtggattttagatgttttggataaaaacaacataaggctttacaccaggagaagatacttggagtgaatgttttcacgattctacatctggtcagtgaactaagag

SEQ ID NO: 90769 - DNA, 600 bp, Chicken  19866894399192_2
gtaaagctgagtttgtaaaatatggtatgcaagcatgctttgaagagccaaagccatgaaagtcttcagtggtagaagcaaaacatgtattttcagtgttcttgtatgaaatgtaaatatgtccgtttctgggtcctgagcaatagaacaatctctattgttgaaaaatgagaaagagaggatgccactatgctggaagatgttgaaacttagatgctatcatcaagctaccacagaaaaaatctgagggagcaaagttgttctgaggcaattttggaatttgaaagartaatttgaaawatcaattcttgaactgccaaagtctttctgatcagcgttaaacaagatatgttgtaatcaaggagaaataagtgaccaagaaggacaactgaaaattaagtaataggactggacttaacagtgaaactatggaacaaaaggaaattaatttaatattttggacatgtcatgcaggaagaacttgtggattttagatgttttggataaaaacaacataaggctttacaccaggagaagatacttggagtgaatgttttcacgattctacatctggtcagtgaactaagagctaataaagta

SEQ ID NO: 90770 - DNA, 599 bp, Chicken  19866894399195_1
  misc_feature (1)..(107): n is any nucleotide
nnnnnnnnnnnnnnnnnnnnnnnnnnnnnnnnnnnnnnnnnnnnnnnnnnnnnnnnnnnnnnnnnnnnnnnnnnnnnnnnnnnnnnnnnnnnnnnnnnnnnnnnnnntcatggttccctaaagttttagcttaactaatatgaagatctgtggtttggataacttttgtattgctttacattgtaaaatattcatcacattatagaacttttcatcatctaagatataataatagaaatgaagtgaaacaactctctaatcagaaagagcaaaacttgttattcctgtgctgcattcaaratgtgcttcggataccttctctagaggagttcaaacaatggctttactctgctagctcayttgcgagcaggctgatccctcatgatgttaaagcatcattttccctgtactggcttatgactgaaagcaattgctctagcagctgactgaaattatgcagaccactaawacagtgtcttccaccttgattaaagtgtcttttctatgggcaaaacacaaggttatatcagaacaacttaagtcaatttaatgaagtaataaaacagtaactgctgcctgctttcagagcttttcctctg

SEQ ID NO: 90771 - DNA, 599 bp, Chicken  19866894399195_2
  misc_feature (1)..(47): n is any nucleotide
nnnnnnnnnnnnnnnnnnnnnnnnnnnnnnnnnnnnnnnnnnnnnnntcatggttccctaaagttttagcttaactaatatgaagatctgtggtttggataacttttgtattgctttacattgtaaaatattcatcacattatagaacttttcatcatctaagatataataatagaaatgaagtgaaacaactctctaatcagaaagagcaaaacttgttattcctgtgctgcattcaaratgtgcttcggataccttctctagaggagttcaaacaatggctttactctgctagctcayttgcgagcaggctgatccctcatgatgttaaagcatcattttccctgtactggcttatgactgaaagcaattgctctagcagctgactgaaattatgcagaccactaawacagtgtcttccaccttgattaaagtgtcttttctatgggcaaaacacaaggttatatcagaacaacttaagtcaatttaatgaagtaataaaacagtaactgctgcctgctttcagagcttttcctctggcaagatcatgatggctcaagggagacatagagccctacagtgataccatgcagcacaat

SEQ ID NO: 90772 - DNA, 600 bp, Chicken  19866894399195_3
attgctttacattgtaaaatattcatcacattatagaacttttcatcatctaagatataataatagaaatgaagtgaaacaactctctaatcagaaagagcaaaacttgttattcctgtgctgcattcaaratgtgcttcggataccttctctagaggagttcaaacaatggctttactctgctagctcayttgcgagcaggctgatccctcatgatgttaaagcatcattttccctgtactggcttatgactgaaagcaattgctctagcagctgactgaaattatgcagaccactaawacagtgtcttccaccttgattaaagtgtcttttctatgggcaaaacacaaggttatatcagaacaacttaagtcaatttaatgaagtaataaaacagtaactgctgcctgctttcagagcttttcctctggcaagatcatgatggctcaagggagacatagagccctacagtgataccatgcagcacaatgcaacctgcrcttacaagagacaaataaaagggtctggaagtggggactaagtgcagcaacataaatttccagttctactaaactatacaaaagtgaaagttctgcataa

SEQ ID NO: 90773 - DNA, 540 bp, Chicken  19866894399195_4
ggctgatccctcatgatgttaaagcatcattttccctgtactggcttatgactgaaagcaattgctctagcagctgactgaaattatgcagaccactaawacagtgtcttccaccttgattaaagtgtcttttctatgggcaaaacacaaggttatatcagaacaacttaagtcaatttaatgaagtaataaaacagtaactgctgcctgctttcagagcttttcctctggcaagatcatgatggctcaagggagacatagagccctacagtgataccatgcagcacaatgcaacctgcrcttacaagagacaaataaaagggtctggaagtggggactaagtgcagcaacataaatttccagttctactaaactatacaaaagtgaaagttctgcataatcaccttaagtttttatcagtaattaattttgcattaaacacctttttttctaaaacagagttaacatcttttcttatgtttggtaaatcgtcacacttgcattcagcagtcaaataactacagaacagaagataatatt

SEQ ID NO: 90774 - DNA, 600 bp, Chicken  19866894399196_1
tggccaccaatacacataaaagatgacattgctatttatctccacattcccagtttgtatgaccactaagtgagctctgacctttgcaccttctccacacactaaggcattaattccaagttcttcccaagtaaccactgctttctccttctgtatactgcctttttatttgaactgtgttgggaatgccctgttcatcaatactggctgtctgccacaagcagttgacctattgcacattgcaatggaccattcttgtgcttcaaggaatctgtccttgaagatcactcagctaccttygacactcacattaagccctccagccctgtttaccataggatcctaacaagcagatacctaaataagccaaaaatgtgctcttctgaagtcaaacatcacaattcaggtatttgtctcgtactcccactacttgactagcataccggaacagacaggtttcttaagtatgtatttgtagtgaggacctctggtgaatatgagttgttagataacagaaggaaagaaatatggagggtgaaaagaggcacattcctttttcctttgcttattgcactctaagaacctcagacataattcaat

SEQ ID NO: 90775 - DNA, 593 bp, Chicken  19866894399198_1
atcagccacttgttagaaaactagacaattttcttccccaaagagtaaatgcacataaaatacgtgggctgctccgaaagtaatgcctcctacttgcacccactgacattcatcaaagcttgctaagcatttatggaaaccaagtcgtggatgtgagcacagtgagacggtgggtggtgcatttcagcagtgacgtgaaaaaccatctgtgttctggatggccagacaagtttttacaagtgcagcaagcaggcttgtgcttattactggtgaaaatgcataggtaatggaagcaactaygttaaaaaatagggatttgtagatgagaatttgctctatcaaacagcgttattgtgcactttgtacctgttgtagtttccatggaaacaaataggaggcattgctttcagagcaaccctatgcatatttaattttacacacaagtcacctcattccaaccaaaacctcaggcaattccccatgggcactggctaaattagacataatattttgacggttggagttaaatgaaaaatgattaccttggagctcagttctcactccagccaccagtgcctctgaagcacgccaaa

SEQ ID NO: 90776 - DNA, 599 bp, Chicken  19866894399202_1
  misc_feature (1)..(227): n is any nucleotide
nnnnnnnnnnnnnnnnnnnnnnnnnnnnnnnnnnnnnnnnnnnnnnnnnnnnnnnnnnnnnnnnnnnnnnnnnnnnnnnnnnnnnnnnnnnnnnnnnnnnnnnnnnnnnnnnnnnnnnnnnnnnnnnnnnnnnnnnnnnnnnnnnnnnnnnnnnnnnnnnnnnnnnnnnnnnnnnnnnnnnnnnnnnnnnnnnnnnnnnnnnnnnnnnnnnnnnnnnnnnnnnnnnnatctgagcagacacctgtctagcctctgtctgcactgttaggtgctgcagggctgatttgtggcttttccctycccagccagcctcggaacaatcccttgctgtgtgatggctcgagcggtggcttttccttgctcagtgcattgctcccggtgtggtggggctgaggtgagcgctgcaaggagagctgtgcaggacaagcctgcaggactggtgggcatggatgcacctggctggctgcaggggctgggtgctattcctgccactgcctctcgcctgcttgctcagcttggccacgctgctccttccagtgcttccatttatcttgtaagtggtgagagcaacattgatcttgtttttctaaagcgcttgg

SEQ ID NO: 90777 - DNA, 386 bp, Chicken  19866894399202_2
ctgggtgctattcctgccactgcctctcgcctgcttgctcagcttggccacgctgctccttccagtgcttccatttatcttgtaagtggtgagagcaacattgatcttgtttttctaaagcgcttggagggctgaggatgggaaaatggcaaggcgaggtgatagctatccacaagtgctaggcaaatggaactggaataacgtggatgcgaccttttaaaaaggacagtgctttcagcaggcgtgcttactgctagcatgcgggagtggagcagcactcgtgcacctctctgaccaccraagggccactcagagcgaggcttgcttctccttgcacataaggcagaggctgaggaaccttgtggaaataaccccaagtcttggtt

SEQ ID NO: 90778 - DNA, 599 bp, Chicken  19866894399219_1
  misc_feature (1)..(21): n is any nucleotide
nnnnnnnnnnnnnnnnnnnnntagggaaggccttaacgctctctacagctgcctgaaaggaggctgtggcaagatgggggtcagccttttctcccacataacaagcagtaggacaagggggaacggcctcaagttgtgtcagagaaggtttaggttggatatcaggaaagacttctatcaaagcgtggtcaggtgctagcacagactgctcagggaggtggcagagtcacggccccagatgtgttcaagaaacgtttagacattgtactaaaggggcacgctttagtgaggcaatattgrtggtaggtggatggttggtctagataacctttggaggttttctcaaccttgatgattctacaattcaataacctaattaatctcttggattccgaaattaacaaatttgtttgcttttttttcaaaaaggggtgcttgggggaacatccaaagaaagccttttggagatagtggaagaggaaaggaagtgcttaggaagacgctccaggaaacaactgaatcaatgatgccaaaatcaaacatcagactgaatgacagatgattagagaacgctgctgtgcagactggacagtaaggtt

SEQ ID NO: 90779 - DNA, 600 bp, Chicken  19866894399219_2
ggtggatggttggtctagataacctttggaggttttctcaaccttgatgattctacaattcaataacctaattaatctcttggattccgaaattaacaaatttgtttgcttttttttcaaaaaggggtgcttgggggaacatccaaagaaagccttttggagatagtggaagaggaaaggaagtgcttaggaagacgctccaggaaacaactgaatcaatgatgccaaaatcaaacatcagactgaatgacagatgattagagaacgctgctgtgcagactggacagtaaggttagcttytaaacagtamacatttttcaacattygtagtctcaactgatgtttaaagttttcaacacaacatttttcctagcagaaaatgacaactgccaaagcttatttctttcataaaataattgttgattttgacaaatttcccatatgagtttcaaaagaatgattctaagatatcagaacacttttgcccaaaaggcaacactgccattaatcataggcaaatgactattcagttaacccttatggttaaccaaacccatttggggaacagaagcatgggaatctgtgtttcacaaaagattt

SEQ ID NO: 90780 - DNA, 600 bp, Chicken  19866894399219_3
tggtctagataacctttggaggttttctcaaccttgatgattctacaattcaataacctaattaatctcttggattccgaaattaacaaatttgtttgcttttttttcaaaaaggggtgcttgggggaacatccaaagaaagccttttggagatagtggaagaggaaaggaagtgcttaggaagacgctccaggaaacaactgaatcaatgatgccaaaatcaaacatcagactgaatgacagatgattagagaacgctgctgtgcagactggacagtaaggttagcttytaaacagtamacatttttcaacattygtagtctcaactgatgtttaaagttttcaacacaacatttttcctagcagaaaatgacaactgccaaagcttatttctttcataaaataattgttgattttgacaaatttcccatatgagtttcaaaagaatgattctaagatatcagaacacttttgcccaaaaggcaacactgccattaatcataggcaaatgactattcagttaacccttatggttaaccaaacccatttggggaacagaagcatgggaatctgtgtttcacaaaagatttcaaggcatca

SEQ ID NO: 90781 - DNA, 600 bp, Chicken  19866894399219_4
tggaggttttctcaaccttgatgattctacaattcaataacctaattaatctcttggattccgaaattaacaaatttgtttgcttttttttcaaaaaggggtgcttgggggaacatccaaagaaagccttttggagatagtggaagaggaaaggaagtgcttaggaagacgctccaggaaacaactgaatcaatgatgccaaaatcaaacatcagactgaatgacagatgattagagaacgctgctgtgcagactggacagtaaggttagcttytaaacagtamacatttttcaacattygtagtctcaactgatgtttaaagttttcaacacaacatttttcctagcagaaaatgacaactgccaaagcttatttctttcataaaataattgttgattttgacaaatttcccatatgagtttcaaaagaatgattctaagatatcagaacacttttgcccaaaaggcaacactgccattaatcataggcaaatgactattcagttaacccttatggttaaccaaacccatttggggaacagaagcatgggaatctgtgtttcacaaaagatttcaaggcatcaattttacattcaaatt

SEQ ID NO: 90782 - DNA, 574 bp, Chicken  19866894399221_1
atagatcttatgcttgtattacttattccagtgagtttctccatgcatatagtctttgcatcatttggcagagaacatgaaaatactaggatcagattttccagactacgctattaaaatgtctattaacagaaaagacatgcagttaaatcacttcatattaaatcagcaacattcttaaccctgaagcatggcttcttattatttattgactctgctcttgactcgttggactcctcatatctcatgaggctgattagctatatatctgatggttatgttttctcctctctcaacatwcctttgcttaatctgtgcaggtcattttacttaacccactttctccaaatttgtgatactcgttggtaccctcagagcctacctttcagtgttgctatagcttaacactggccagtctccaggctttctctgccacaaacaaaaagctgaatactcccattccttatctgggagggacagctgcagctgttcttcctagttcaattttaactgtatatttctgaaagattaagtgctaaatacaaaattcaaagtgaatcttttgaaaaaaata

SEQ ID NO: 90783 - DNA, 600 bp, Chicken  19866894399224_1
tgcaatcctcagacccagctgtgaaaaattctccttccaaataacctttggtacaacacctatatattgaagttggggccacatcaaatatttgttcaagaatgactgcggaaagccacaaaaaataaaaagcatacattacaaaacttggggtagttatttcctctgcaatgatgagaaggaagaataggattgtcactgacacggagaagtgaaaaaggatcttcaagaaatgacacaagttgagacagaaaaaaagaaaaatatatgattaaaaaaaaaaacagtataaaaataggwatgtagaggagaaagactgtagcatgcagcctaaagccacaggcagagtgaagcttgaggcaatgcataccacctgctgcttggcaattgggtctcaaggcccaactgaaaagccaacacccatttcagacagcaactttagttacagaaagtacagagattagatgaagtctgtctgaaataattaaaatgtaagctaaccagggtgcatacaaccactttagctcctgagctggaagaaaggactgaatttatgatgggcagtgaaagctacagtaaaacatgacggctgcaggaata

SEQ ID NO: 90784 - DNA, 600 bp, Chicken  19866894399226_1
gtctgggagtgtatagagtcacctgccagcaagagtggtctgaaatgtgtctaggagtgccttagaggagtaccctgtcatacagagggtaattaaaatctggaactgattggcagataaattaattaacaccaaaacttggggcaagtaaatggagaacaggtctgtcaggagttacaactgatgataaagaaagacttcagcaggaatattaaacatcccaggttggggatgaagccttcccctgacacctggagctgtgacacgtggggcatgctgttgggcatctgcctctccccraagcctcagcactcctggagcagccaaaggcttctcatgtgctgcccagcagaacagctgctgtgcatgaccacacatccacctgagaaacagaacatttattaagggctgtgtacactatccctttcccccatcataacaggagatgtacctttctgtatttccacagctgtagactataaactcttctcattttgtaggatcgcagaaactcagactgagaataggactgccctttgtagttgcctgcagcagaggatacaaagggagaagaacttattgtatctgtcgttgtcagtg

SEQ ID NO: 90785 - DNA, 599 bp, Chicken  19866894399227_1
  misc_feature (1)..(41): n is any nucleotide
nnnnnnnnnnnnnnnnnnnnnnnnnnnnnnnnnnnnnnnnncatccattcattgccttgaactgaaaataccttttttgccgttgaggttctggcttgtttttcctgcacaactgagcacagacacagcttcttcttaacactttatgtaaaagcaactcccttagaaaatgagtttattttaactgtgtttaagttagttttgcttaagcatgcagctctcttgcctgaacacacacaatatacgcacctataattttcttgtgactaatttgccctcatagttgtgggtgattaaacrgctttgccatttttggtctgcaaagagctaagcaccatttaagtatattataacagagctctttttttgactagccttgtgggagtcttggttaacacctttcttggcacagacttcagggacacgcaaatgtaaaattcctctgatttttgttttgctttgtaaagcaragctaattaatacttggagcgtaaccgagttaagtaggagaatcacagctcataaatkaagataagaaaattataacaggtstgactgatatatatgtaattacctgctgaggtggcagcctcacctgg

SEQ ID NO: 90786 - DNA, 533 bp, Chicken  19866894399227_2
tgagtttattttaactgtgtttaagttagttttgcttaagcatgcagctctcttgcctgaacacacacaatatacgcacctataattttcttgtgactaatttgccctcatagttgtgggtgattaaacrgctttgccatttttggtctgcaaagagctaagcaccatttaagtatattataacagagctctttttttgactagccttgtgggagtcttggttaacacctttcttggcacagacttcagggacacgcaaatgtaaaattcctctgatttttgttttgctttgtaaagcaragctaattaatacttggagcgtaaccgagttaagtaggagaatcacagctcataaatkaagataagaaaattataacaggtstgactgatatatatgtaattacctgctgaggtggcagcctcacctggaagaaccagagtgtatttggggggcaggaaatcctgtgttgtaatcctcattgcaccactgactcctgttactgtaggcaaactactccaccttttctttacta

SEQ ID NO: 90787 - DNA, 475 bp, Chicken  19866894399227_3
gaacacacacaatatacgcacctataattttcttgtgactaatttgccctcatagttgtgggtgattaaacrgctttgccatttttggtctgcaaagagctaagcaccatttaagtatattataacagagctctttttttgactagccttgtgggagtcttggttaacacctttcttggcacagacttcagggacacgcaaatgtaaaattcctctgatttttgttttgctttgtaaagcaragctaattaatacttggagcgtaaccgagttaagtaggagaatcacagctcataaatkaagataagaaaattataacaggtstgactgatatatatgtaattacctgctgaggtggcagcctcacctggaagaaccagagtgtatttggggggcaggaaatcctgtgttgtaatcctcattgcaccactgactcctgttactgtaggcaaactactccaccttttctttacta

SEQ ID NO: 90788 - DNA, 451 bp, Chicken  19866894399227_4
taattttcttgtgactaatttgccctcatagttgtgggtgattaaacrgctttgccatttttggtctgcaaagagctaagcaccatttaagtatattataacagagctctttttttgactagccttgtgggagtcttggttaacacctttcttggcacagacttcagggacacgcaaatgtaaaattcctctgatttttgttttgctttgtaaagcaragctaattaatacttggagcgtaaccgagttaagtaggagaatcacagctcataaatkaagataagaaaattataacaggtstgactgatatatatgtaattacctgctgaggtggcagcctcacctggaagaaccagagtgtatttggggggcaggaaatcctgtgttgtaatcctcattgcaccactgactcctgttactgtaggcaaactactccaccttttctttacta

SEQ ID NO: 90789 - DNA, 600 bp, Chicken  19866894399228_1
ctgtggtttctaacccttttcagtcttttcccaggtacattgtctaggggactgtcatagggacagatggtatatctgtttcctttgcattttatggcctgtattcatttaccaagctgggctgatcttaaaacatgcatttgccttccattcattccactatgcatcaccactttgggccaagatactgtttttgtcagcttactatttttaaaaggagagagacacacatattaaaagccaccttctgggttaatctcagccacagacatgcctttgaagctttgggtttgaagggakgtgctatcagtgatcttgacaaacatctcagtttgcccactgccatgcagggactgtgcacacaagtttgcttttactgactgcagaaatacaagcagaacagacttacagtaggtatataaacaagaaggtcacaaggttaatgtttgactctaatcctaacgacttttttcagccacgcacaaagcatgacaccagaaagaattcactaacaacgaagtaaagataaacaagtacaagagcacaaccctctcctttgtacaccaccttcagaagttgcacaaaagtatttaaagtaca

SEQ ID NO: 90790 - DNA, 600 bp, Chicken  19866894399231_1
aacagagaaagaacgagagggaatgggaacacgaagcaacaggtgaggctcaggttaaatattaggagaaatttcttcttggagagagtgatcagtcactgggacaggctggccagggaggtggctgagtctccttccctggaggtgttcaaggaaagggtggatgtagtaattaggacacagttcattgggaaatactggcggtaggtggatggttggactagacagtcttagagatcttttccaaccttaatgcttctatgattctatgtatgattaataatggtggaaataaaaccygtcaacaagtcagaggctaccatggaattgccttgggtcgccaccaggagctaagaaggagtagaaaaatggtgtgcagtcaagcaggacttgaatggggcattcaggaaacagaaggaacatttgcagggatcctctctgtgggagcagtgagatgtgatcctaatgtgaggagagagtgatgctgggaagaattccttgtcagggcagtggtgaccgcaggcactgtcctcaggagacttgtctcctgaaagcactgggctgcccacccacctattcaggtttgtcctttttcagtca

SEQ ID NO: 90791 - DNA, 600 bp, Chicken  19866894399233_1
gtgctggtggctggctgtcccatagcagcagcttttcaactgtttcctacggttactgaatcccagtctagttgtgggaatgtcccctcactggttcatggctcagcagtggcccagcagcatagaaggtgagcacttctgtatttctatacttaattttgcaaatcttgcatcaggtttgttgtttttttttattttttaaatgctttaaaaattttgcatcatcatcattttatgtgtggaggtggagaggctgaacccagacttgctgggttgcagaccacaaaggcacagtgacaygtggaggtggtgtgggaccgcttcctgcctgcagaatgcacagggagggggacaggtacaggcaggggtgccttgagccacgactgccctcagcagcactcatgcactcaccctgcacaacagcagctcctgctgctaccagtgagtaattcagggctgcaaagatgcttgtctgagttttccaatcgaggatttctttttaacacaaaacaaccaaaaggaacaaccagcacagttatcatacaagctttctatcacacctccaagctcagcctggagtacctgcacttcagatcagtg

SEQ ID NO: 90792 - DNA, 600 bp, Chicken  19866894399235_1
atcctgggtctgggctaggaatagtatctacagaagaaggagcttctgcccacagcctggggtcaggtggctgagggatctagcaatgcaaagatggaatggatctgtgtttgagtctctttggtgtcatctggagcactgattctcatgagcatccattcctctggcagctaattgctgaagcatttgaatcacgctttctggggagacctgctgttcataacactcttaaaagtgatgttcatccattcaaggggcagaaatcatgatgttcttcagaaaagcaactcagcccaatcmctgggatttgtacatcttacagtcaacaaattggtctatttataaataattttgtaagtaattaatttttaataatttcacatttgaaatcatgagcatctccttggcaggatcagattttattctatgaaagacygcaacttgaaggggcagartttcttccctcactccccatgcatcctgcacctggcagcaggagcagccccatccccacaggccaaggcacagagtaatcacaacrcagaggaagcgaaaggatcaattcttcacttcagcacttgcgtcgttccccagctggcc

SEQ ID NO: 90793 - DNA, 600 bp, Chicken  19866894399235_2
cactgattctcatgagcatccattcctctggcagctaattgctgaagcatttgaatcacgctttctggggagacctgctgttcataacactcttaaaagtgatgttcatccattcaaggggcagaaatcatgatgttcttcagaaaagcaactcagcccaatcmctgggatttgtacatcttacagtcaacaaattggtctatttataaataattttgtaagtaattaatttttaataatttcacatttgaaatcatgagcatctccttggcaggatcagattttattctatgaaagacygcaacttgaaggggcagartttcttccctcactccccatgcatcctgcacctggcagcaggagcagccccatccccacaggccaaggcacagagtaatcacaacrcagaggaagcgaaaggatcaattcttcacttcagcacttgcgtcgttccccagctggcccatgcccagtaccatctccagatcgttttccttcccagatctgttttatccttcaggggaaaaataaagatggtacttttttagagctccatctggggcttcaatggatagacttacaccatcctttttctttttc

SEQ ID NO: 90794 - DNA, 600 bp, Chicken  19866894399235_3
ccattcctctggcagctaattgctgaagcatttgaatcacgctttctggggagacctgctgttcataacactcttaaaagtgatgttcatccattcaaggggcagaaatcatgatgttcttcagaaaagcaactcagcccaatcmctgggatttgtacatcttacagtcaacaaattggtctatttataaataattttgtaagtaattaatttttaataatttcacatttgaaatcatgagcatctccttggcaggatcagattttattctatgaaagacygcaacttgaaggggcagartttcttccctcactccccatgcatcctgcacctggcagcaggagcagccccatccccacaggccaaggcacagagtaatcacaacrcagaggaagcgaaaggatcaattcttcacttcagcacttgcgtcgttccccagctggcccatgcccagtaccatctccagatcgttttccttcccagatctgttttatccttcaggggaaaaataaagatggtacttttttagagctccatctggggcttcaatggatagacttacaccatcctttttctttttctttttttttttctgggcct

SEQ ID NO: 90795 - DNA, 600 bp, Chicken  19866894399235_4
tcatccattcaaggggcagaaatcatgatgttcttcagaaaagcaactcagcccaatcmctgggatttgtacatcttacagtcaacaaattggtctatttataaataattttgtaagtaattaatttttaataatttcacatttgaaatcatgagcatctccttggcaggatcagattttattctatgaaagacygcaacttgaaggggcagartttcttccctcactccccatgcatcctgcacctggcagcaggagcagccccatccccacaggccaaggcacagagtaatcacaacrcagaggaagcgaaaggatcaattcttcacttcagcacttgcgtcgttccccagctggcccatgcccagtaccatctccagatcgttttccttcccagatctgttttatccttcaggggaaaaataaagatggtacttttttagagctccatctggggcttcaatggatagacttacaccatcctttttctttttctttttttttttctgggcctctggtacccatctgtgctcaggccccctgcgtggcattcagcagagtgatgcttccctgtgggagagactgctatcaagtatggga

SEQ ID NO: 90796 - DNA, 600 bp, Chicken  19866894399240_1
cctaattattctcattcccttgcgagtttcgacttgaaattaaccttgcaaaacacaatcttttgtggactattaacataaagaagaagaaaatgttactgctgtgttcatcagctaaaatcttctagctcaaagacattccacagaagaatagagatgtaataaaaatgcccacacagtcatcccggtattgaaagccatacagactgtacttctgagtcctgcgaccctggaagcttttttttgctgttgaggtagccggtgtacttcttgataatgtagacgtctcaatttctcatrtctgctctcttaatacacactgggaaagattgctctgtactattgccattacatatgaaattacaatactttccatttagggagttgactttcagggccttttggagtgaaaatgctcttgtaaataaaacccatattaacttaaacaagatgagaagaccagggttaaaaacacgtctgttatgacaattttcatactgaatagagtgaatatgtgacttgtctggagtcagtctcctgaagagatcaagcaaacaaccatacagctgtgaatatcaaamtcctttccctcaaagaata

SEQ ID NO: 90797 - DNA, 533 bp, Chicken  19866894399240_2
gacgtctcaatttctcatrtctgctctcttaatacacactgggaaagattgctctgtactattgccattacatatgaaattacaatactttccatttagggagttgactttcagggccttttggagtgaaaatgctcttgtaaataaaacccatattaacttaaacaagatgagaagaccagggttaaaaacacgtctgttatgacaattttcatactgaatagagtgaatatgtgacttgtctggagtcagtctcctgaagagatcaagcaaacaaccatacagctgtgaatatcaaamtcctttccctcaaagaataatcttgatgtttaaaacttcaggaatccatgactctctgcaatgcccagaggggaagctgatgggcatttttgtaaatctttcaattgggtaatcagctaggtaatagttctgctagaaggtgtgctatatgaattaatagagatgatcttaaaaactttcactctggagattctcatgagaactgaatctgttccttattttcattttcacat

SEQ ID NO: 90798 - DNA, 600 bp, Chicken  19866894399241_1
tttttcattgaagaatagaatgtggaaattacatttcagcctttgacatactgtcacaataccattcttctctttgactattgacaatgtgttaattacatcattgttaaccttacattcaaaaaaagtcatgcaaaaaggtcatacctgggcccagctgccttcttcagactctttctgtattatcagcaggaagcaattagtaaagcaggtaaaaagacaataaaaatgagttaaaaagaagatgtggctttcatgcatatgacaatcttactatgaatgaaaacatatgtgtagaaygtactgttaamatttctaaactcaagttactgccactgccttgggatgagctgccagaaggattacaaagattaaaaccatawaatcttagcagggcaaatctacctgtscttaagatataaaatctttacagtttagtgaaactctacagcattatctcaaatactttctatggttcacgatcaaaacacaagcatttcctctccaaaactgggtgttagaaatgccrttatttgtttcctgctagatcttgcaacattcacaataaaatctgtgttcttctgagtggaacgaacagtg

SEQ ID NO: 90799 - DNA, 600 bp, Chicken  19866894399241_2
agaatagaatgtggaaattacatttcagcctttgacatactgtcacaataccattcttctctttgactattgacaatgtgttaattacatcattgttaaccttacattcaaaaaaagtcatgcaaaaaggtcatacctgggcccagctgccttcttcagactctttctgtattatcagcaggaagcaattagtaaagcaggtaaaaagacaataaaaatgagttaaaaagaagatgtggctttcatgcatatgacaatcttactatgaatgaaaacatatgtgtagaaygtactgttaamatttctaaactcaagttactgccactgccttgggatgagctgccagaaggattacaaagattaaaaccatawaatcttagcagggcaaatctacctgtscttaagatataaaatctttacagtttagtgaaactctacagcattatctcaaatactttctatggttcacgatcaaaacacaagcatttcctctccaaaactgggtgttagaaatgccrttatttgtttcctgctagatcttgcaacattcacaataaaatctgtgttcttctgagtggaacgaacagtgcttttcacaca

SEQ ID NO: 90800 - DNA, 600 bp, Chicken  19866894399241_3
acaatgtgttaattacatcattgttaaccttacattcaaaaaaagtcatgcaaaaaggtcatacctgggcccagctgccttcttcagactctttctgtattatcagcaggaagcaattagtaaagcaggtaaaaagacaataaaaatgagttaaaaagaagatgtggctttcatgcatatgacaatcttactatgaatgaaaacatatgtgtagaaygtactgttaamatttctaaactcaagttactgccactgccttgggatgagctgccagaaggattacaaagattaaaaccatawaatcttagcagggcaaatctacctgtscttaagatataaaatctttacagtttagtgaaactctacagcattatctcaaatactttctatggttcacgatcaaaacacaagcatttcctctccaaaactgggtgttagaaatgccrttatttgtttcctgctagatcttgcaacattcacaataaaatctgtgttcttctgagtggaacgaacagtgcttttcacacagcatttttatggcaaaaatatattgttctggctgacsacttaaacaggatgaactctacctctggtcaattg

SEQ ID NO: 90801 - DNA, 600 bp, Chicken  19866894399241_4
ccttacattcaaaaaaagtcatgcaaaaaggtcatacctgggcccagctgccttcttcagactctttctgtattatcagcaggaagcaattagtaaagcaggtaaaaagacaataaaaatgagttaaaaagaagatgtggctttcatgcatatgacaatcttactatgaatgaaaacatatgtgtagaaygtactgttaamatttctaaactcaagttactgccactgccttgggatgagctgccagaaggattacaaagattaaaaccatawaatcttagcagggcaaatctacctgtscttaagatataaaatctttacagtttagtgaaactctacagcattatctcaaatactttctatggttcacgatcaaaacacaagcatttcctctccaaaactgggtgttagaaatgccrttatttgtttcctgctagatcttgcaacattcacaataaaatctgtgttcttctgagtggaacgaacagtgcttttcacacagcatttttatggcaaaaatatattgttctggctgacsacttaaacaggatgaactctacctctggtcaattgagtgttgttatgtttatttttaccaac

SEQ ID NO: 90802 - DNA, 600 bp, Chicken  19866894399241_5
tgagttaaaaagaagatgtggctttcatgcatatgacaatcttactatgaatgaaaacatatgtgtagaaygtactgttaamatttctaaactcaagttactgccactgccttgggatgagctgccagaaggattacaaagattaaaaccatawaatcttagcagggcaaatctacctgtscttaagatataaaatctttacagtttagtgaaactctacagcattatctcaaatactttctatggttcacgatcaaaacacaagcatttcctctccaaaactgggtgttagaaatgccrttatttgtttcctgctagatcttgcaacattcacaataaaatctgtgttcttctgagtggaacgaacagtgcttttcacacagcatttttatggcaaaaatatattgttctggctgacsacttaaacaggatgaactctacctctggtcaattgagtgttgttatgtttatttttaccaacagcactaaaacttcagtgacttcattatttcactgaacgaagtttcacgttggcaggaaaaaagcaatgtaaaacttctatgtttaggttctcagaatctttgtgattacaacaccgtt

SEQ ID NO: 90803 - DNA, 600 bp, Chicken  19866894399241_6
agctgccagaaggattacaaagattaaaaccatawaatcttagcagggcaaatctacctgtscttaagatataaaatctttacagtttagtgaaactctacagcattatctcaaatactttctatggttcacgatcaaaacacaagcatttcctctccaaaactgggtgttagaaatgccrttatttgtttcctgctagatcttgcaacattcacaataaaatctgtgttcttctgagtggaacgaacagtgcttttcacacagcatttttatggcaaaaatatattgttctggctgacsacttaaacaggatgaactctacctctggtcaattgagtgttgttatgtttatttttaccaacagcactaaaacttcagtgacttcattatttcactgaacgaagtttcacgttggcaggaaaaaagcaatgtaaaacttctatgtttaggttctcagaatctttgtgattacaacaccgtttgaaatttcttttgctgagaaacaacagaattgctctttctactggcatgcttgggaagcagcctgcagaagctgctttgagtactgcggtaatgcttacatgcaaagggaaggactaa

SEQ ID NO: 90804 - DNA, 599 bp, Chicken  19866894399244_1
  misc_feature (1)..(50): n is any nucleotide
nnnnnnnnnnnnnnnnnnnnnnnnnnnnnnnnnnnnnnnnnnnnnnnnnncctgcactgacacagctggtctgaggtgtctgctggaagcccgagcctgcctaaggaaagctttcttcctggagcctagaggaagttaaggatgagccaaggcttgtaatgttctatcacagtaactataatttaatccttagacattgtttccaacatctgtagcccagaagcagagtgtgctggggattcacaggtgtgataagtcattctgatggtcctgcagctccaggacatacttcatctttcrcrtgtatgtcctggaggactgcatgcaggtggcatggctgggctggagctgtgctgctgctgtgctgtgcaytgtgggtgaaggtgatycaggtcttcctgtgccagacatggagagttgyaaggtgggtgatgatagggcatggaaatgtgctctcagcctcctttttctacttggcttcttcctcattgcyagcttccttctggcttctcctggtcttcatcccttctgacctcaggagaatcccttggttttggtgctatctgccttgtggagccttctgcttgctgcttgcactc

SEQ ID NO: 90805 - DNA, 599 bp, Chicken  19866894399244_2
  misc_feature (1)..(48): n is any nucleotide
nnnnnnnnnnnnnnnnnnnnnnnnnnnnnnnnnnnnnnnnnnnnnnnncctgcactgacacagctggtctgaggtgtctgctggaagcccgagcctgcctaaggaaagctttcttcctggagcctagaggaagttaaggatgagccaaggcttgtaatgttctatcacagtaactataatttaatccttagacattgtttccaacatctgtagcccagaagcagagtgtgctggggattcacaggtgtgataagtcattctgatggtcctgcagctccaggacatacttcatctttcrcrtgtatgtcctggaggactgcatgcaggtggcatggctgggctggagctgtgctgctgctgtgctgtgcaytgtgggtgaaggtgatycaggtcttcctgtgccagacatggagagttgyaaggtgggtgatgatagggcatggaaatgtgctctcagcctcctttttctacttggcttcttcctcattgcyagcttccttctggcttctcctggtcttcatcccttctgacctcaggagaatcccttggttttggtgctatctgccttgtggagccttctgcttgctgcttgcactcgt

SEQ ID NO: 90806 - DNA, 600 bp, Chicken  19866894399244_3
gaggtgtctgctggaagcccgagcctgcctaaggaaagctttcttcctggagcctagaggaagttaaggatgagccaaggcttgtaatgttctatcacagtaactataatttaatccttagacattgtttccaacatctgtagcccagaagcagagtgtgctggggattcacaggtgtgataagtcattctgatggtcctgcagctccaggacatacttcatctttcrcrtgtatgtcctggaggactgcatgcaggtggcatggctgggctggagctgtgctgctgctgtgctgtgcaytgtgggtgaaggtgatycaggtcttcctgtgccagacatggagagttgyaaggtgggtgatgatagggcatggaaatgtgctctcagcctcctttttctacttggcttcttcctcattgcyagcttccttctggcttctcctggtcttcatcccttctgacctcaggagaatcccttggttttggtgctatctgccttgtggagccttctgcttgctgcttgcactcgtgcaggtagggcaaacgatgctttgcgtagaatgagaaactctaattttgcaaacttcttttctaagtttgc

SEQ ID NO: 90807 - DNA, 600 bp, Chicken  19866894399244_4
cccgagcctgcctaaggaaagctttcttcctggagcctagaggaagttaaggatgagccaaggcttgtaatgttctatcacagtaactataatttaatccttagacattgtttccaacatctgtagcccagaagcagagtgtgctggggattcacaggtgtgataagtcattctgatggtcctgcagctccaggacatacttcatctttcrcrtgtatgtcctggaggactgcatgcaggtggcatggctgggctggagctgtgctgctgctgtgctgtgcaytgtgggtgaaggtgatycaggtcttcctgtgccagacatggagagttgyaaggtgggtgatgatagggcatggaaatgtgctctcagcctcctttttctacttggcttcttcctcattgcyagcttccttctggcttctcctggtcttcatcccttctgacctcaggagaatcccttggttttggtgctatctgccttgtggagccttctgcttgctgcttgcactcgtgcaggtagggcaaacgatgctttgcgtagaatgagaaactctaattttgcaaacttcttttctaagtttgcaaacttctaagaaaaag

SEQ ID NO: 90808 - DNA, 600 bp, Chicken  19866894399244_5
gagcctagaggaagttaaggatgagccaaggcttgtaatgttctatcacagtaactataatttaatccttagacattgtttccaacatctgtagcccagaagcagagtgtgctggggattcacaggtgtgataagtcattctgatggtcctgcagctccaggacatacttcatctttcrcrtgtatgtcctggaggactgcatgcaggtggcatggctgggctggagctgtgctgctgctgtgctgtgcaytgtgggtgaaggtgatycaggtcttcctgtgccagacatggagagttgyaaggtgggtgatgatagggcatggaaatgtgctctcagcctcctttttctacttggcttcttcctcattgcyagcttccttctggcttctcctggtcttcatcccttctgacctcaggagaatcccttggttttggtgctatctgccttgtggagccttctgcttgctgcttgcactcgtgcaggtagggcaaacgatgctttgcgtagaatgagaaactctaattttgcaaacttcttttctaagtttgcaaacttctaagaaaaagatgagaatggctgaggctatggatacagagtg

SEQ ID NO: 90809 - DNA, 600 bp, Chicken  19866894399244_6
acattgtttccaacatctgtagcccagaagcagagtgtgctggggattcacaggtgtgataagtcattctgatggtcctgcagctccaggacatacttcatctttcrcrtgtatgtcctggaggactgcatgcaggtggcatggctgggctggagctgtgctgctgctgtgctgtgcaytgtgggtgaaggtgatycaggtcttcctgtgccagacatggagagttgyaaggtgggtgatgatagggcatggaaatgtgctctcagcctcctttttctacttggcttcttcctcattgcyagcttccttctggcttctcctggtcttcatcccttctgacctcaggagaatcccttggttttggtgctatctgccttgtggagccttctgcttgctgcttgcactcgtgcaggtagggcaaacgatgctttgcgtagaatgagaaactctaattttgcaaacttcttttctaagtttgcaaacttctaagaaaaagatgagaatggctgaggctatggatacagagtggcactgtttgggtgttgggggctcagcacagccttccacccactctgctctgaattctgcagcagttcctca

SEQ ID NO: 90810 - DNA, 600 bp, Chicken  19866894399246_1
gaatgtactggcatggcaagttttaattttggccactttccttctgtagcaggctgtatcaaaccaatggtcgtgcaagcagttgtgtgttaatcgcaccctgtagcaaacgtgttccatttagcataaccttgaatgagtgcctgttttctaagaaatcaatcatacagtgctagccatgtgcacacaatcttggaagacattttacaaaggctgcattaaaatgatacactatcctgtctggatgcaaacagttaaagaaaatggtgtgcagttctaaagccacattgattattctayattttatcctgaaaggggccaggcrtgttttatattctgcagcttagtgtygcttacacttccccaaagaattcagttcccttgtctgtcagacaacagtgtagaaggcaaagtagtgaaccacatgagaaatcataatgtacatgaattagaaatcagaataattttatttggtttgtccctatgctgaatgcaaaataatgaagatctagttctgaaaaaagcaacataaagtttgcagaggaagtgtaaacaagtaactgagagctcttttatgccctttcagttgtattaaaagaa

SEQ ID NO: 90811 - DNA, 600 bp, Chicken  19866894399246_2
attttggccactttccttctgtagcaggctgtatcaaaccaatggtcgtgcaagcagttgtgtgttaatcgcaccctgtagcaaacgtgttccatttagcataaccttgaatgagtgcctgttttctaagaaatcaatcatacagtgctagccatgtgcacacaatcttggaagacattttacaaaggctgcattaaaatgatacactatcctgtctggatgcaaacagttaaagaaaatggtgtgcagttctaaagccacattgattattctayattttatcctgaaaggggccaggcrtgttttatattctgcagcttagtgtygcttacacttccccaaagaattcagttcccttgtctgtcagacaacagtgtagaaggcaaagtagtgaaccacatgagaaatcataatgtacatgaattagaaatcagaataattttatttggtttgtccctatgctgaatgcaaaataatgaagatctagttctgaaaaaagcaacataaagtttgcagaggaagtgtaaacaagtaactgagagctcttttatgccctttcagttgtattaaaagaaaaaaaaaaaarcaggatgagaagcc

SEQ ID NO: 90812 - DNA, 600 bp, Chicken  19866894399246_3
ggctgtatcaaaccaatggtcgtgcaagcagttgtgtgttaatcgcaccctgtagcaaacgtgttccatttagcataaccttgaatgagtgcctgttttctaagaaatcaatcatacagtgctagccatgtgcacacaatcttggaagacattttacaaaggctgcattaaaatgatacactatcctgtctggatgcaaacagttaaagaaaatggtgtgcagttctaaagccacattgattattctayattttatcctgaaaggggccaggcrtgttttatattctgcagcttagtgtygcttacacttccccaaagaattcagttcccttgtctgtcagacaacagtgtagaaggcaaagtagtgaaccacatgagaaatcataatgtacatgaattagaaatcagaataattttatttggtttgtccctatgctgaatgcaaaataatgaagatctagttctgaaaaaagcaacataaagtttgcagaggaagtgtaaacaagtaactgagagctcttttatgccctttcagttgtattaaaagaaaaaaaaaaaarcaggatgagaagcccacttgattaacatcttaattgagag

SEQ ID NO: 90813 - DNA, 600 bp, Chicken  19866894399246_4
attttatcctgaaaggggccaggcrtgttttatattctgcagcttagtgtygcttacacttccccaaagaattcagttcccttgtctgtcagacaacagtgtagaaggcaaagtagtgaaccacatgagaaatcataatgtacatgaattagaaatcagaataattttatttggtttgtccctatgctgaatgcaaaataatgaagatctagttctgaaaaaagcaacataaagtttgcagaggaagtgtaaacaagtaactgagagctcttttatgccctttcagttgtattaaaagayaaaaaaaaaarcaggatgagaagcccacttgattaacatcttaattgagaggccctatctcaattcagttcaaactggggatgattcagtctcactactgactggattttgtgggaatgtgtacaagctttttgcctttcactgtgaaagatatgggatgtttgcaggatttaatgtgactttaaggaaccagagtgcatccatactgtatcctatttttaagcaaccccagacatttttggctggtaaaatatacatcgtcatcatcagtctcaacaaaacccatctttttatctcatt

SEQ ID NO: 90814 - DNA, 600 bp, Chicken  19866894399246_5
aaaggggccaggcrtgttttatattctgcagcttagtgtygcttacacttccccaaagaattcagttcccttgtctgtcagacaacagtgtagaaggcaaagtagtgaaccacatgagaaatcataatgtacatgaattagaaatcagaataattttatttggtttgtccctatgctgaatgcaaaataatgaagatctagttctgaaaaaagcaacataaagtttgcagaggaagtgtaaacaagtaactgagagctcttttatgccctttcagttgtattaaaagaaaaaaaaaaaarcaggatgagaagcccacttgattaacatcttaattgagaggccctatctcaattcagttcaaactggggatgattcagtctcactactgactggattttgtgggaatgtgtacaagctttttgcctttcactgtgaaagatatgggatgtttgcaggatttaatgtgactttaaggaaccagagtgcatccatactgtatcctatttttaagcaaccccagacatttttggctggtaaaatatacatcgtcatcatcagtctcaacaaaacccatctttttatctcattgctctaagatt

SEQ ID NO: 90815 - DNA, 600 bp, Chicken  19866894399246_6
tatgtgtagcaaggtaagggtgatgtggttctgtgtaaccacaggacctgcttattaatttcttaagtctcagtgcagagcaattgtttcaattgctttagtcttctgtaattagtactttgtcagtattcaagctttgtagctaataaggttagactgaggtttttttcttgcaccttgtgcaatattagacctttccttccaggtcataacctgggaatggtagtgtaaaaactcctcaatagttgcagccaacatgcagtaagatttaatctccgtaacaaaggattgtataaatamctcaagctgtatttctacgtagagaatttagcacacagtctccttatattgcatttaaggtatcaaagaatascagcatcttttctgagtcactgatatccctgatgatggttgttctataatgctcggaatacgccctaggagtagcagtgctgacacagggttttttttcagcttgtcaaaggtcacttaaatcacaatagactccagcagtgctttctgtcttctaggaatccattacagcatttaagtcagggttcatcaatgtgtgtaaatcacacaaggagtcttggtgtagta

SEQ ID NO: 90816 - DNA, 600 bp, Chicken  19866894399246_7
tgcagagcaattgtttcaattgctttagtcttctgtaattagtactttgtcagtattcaagctttgtagctaataaggttagactgaggtttttttcttgcaccttgtgcaatattagacctttccttccaggtcataacctgggaatggtagtgtaaaaactcctcaatagttgcagccaacatgcagtaagatttaatctccgtaacaaaggattgtataaatamctcaagctgtatttctacgtagagaatttagcacacagtctccttatattgcatttaaggtatcaaagaatascagcatcttttctgagtcactgatatccctgatgatggttgttctataatgctcggaatacgccctaggagtagcagtgctgacacagggttttttttcagcttgtcaaaggtcacttaaatcacaatagactccagcagtgctttctgtcttctaggaatccattacagcatttaagtcagggttcatcaatgtgtgtaaatcacacaaggagtcttggtgtagtagtagaagtattactaggtagtttataggtttattaagatactgtttcttaaatgatgctgtttccaggaaaga

SEQ ID NO: 90817 - DNA, 599 bp, Chicken  19866894399247_1
  misc_feature (1)..(150): n is any nucleotide
nnnnnnnnnnnnnnnnnnnnnnnnnnnnnnnnnnnnnnnnnnnnnnnnnnnnnnnnnnnnnnnnnnnnnnnnnnnnnnnnnnnnnnnnnnnnnnnnnnnnnnnnnnnnnnnnnnnnnnnnnnnnnnnnnnnnnnnnnnnnnnnnnnnnnnacatcatctttctgctccttaattcctattcttataagccttagaatctgaattcagaagaagaaacaagtctctcataaaggattttgtatgttaaagatatttccaacatcagctacaagatataaaagtcagtatcgaccacacacrccaccactcmattcattcaaattgtttttcatgtttactccaaatccgggacttgcagacattttcaagaataaatttaagcaataaagttacactcaccatgtatgaaggtaatgttttcagcattcctggttctggttcatgtgtaaaaggatcttcgagcactcctcgtttcagcatgtggagcaaaagctttgcatatgagttccgattcctccttcccgctatccctgtacccgctcctgagggctcacacagttttttaacccacagtgcacacctttggcgttctgaaaaga

SEQ ID NO: 90818 - DNA, 599 bp, Chicken  19866894399247_2
  misc_feature (1)..(140): n is any nucleotide
nnnnnnnnnnnnnnnnnnnnnnnnnnnnnnnnnnnnnnnnnnnnnnnnnnnnnnnnnnnnnnnnnnnnnnnnnnnnnnnnnnnnnnnnnnnnnnnnnnnnnnnnnnnnnnnnnnnnnnnnnnnnnnnnnnnnnnnnnnnnacatcatctttctgctccttaattcctattcttataagccttagaatctgaattcagaagaagaaacaagtctctcataaaggattttgtatgttaaagatatttccaacatcagctacaagatataaaagtcagtatcgaccacacacrccaccactcmattcattcaaattgtttttcatgtttactccaaatccgggacttgcagacattttcaagaataaatttaagcaataaagttacactcaccatgtatgaaggtaatgttttcagcattcctggttctggttcatgtgtaaaaggatcttcgagcactcctcgtttcagcatgtggagcaaaagctttgcatatgagttccgattcctccttcccgctatccctgtacccgctcctgagggctcacacagttttttaacccacagtgcacacctttggcgttctgaaaagatagacatatg

SEQ ID NO: 90819 - DNA, 600 bp, Chicken  19866894399248_1
tgtcttaagcaaaagatggattatttgtaaacatgatattacaacatacctgacaaccagaagaacaactcaaaatgcagttctttcttctgcttcacagttcaatttggtattgttgaatcactacatcaagaaacctagctgcatcttgaagaacatattgttacttgcactgctttatgtcaaattaaacatgtagacaatttcaaatggaaagaatgttggacagtatagtaacaactcagagtcaggactaaaagcaaaattagttgctctcgcacaagcttttggcttgttatkgaagaagatgattactgtaattagtgacactgaagatgtacaattctcttcatgaaatagttgtggatgaagtccaaaaaattattatgctggctgtttggccagaaaatatcaaaaggggacacctgtgttccagatagaaacagctgtaaatatgttgttacataagcactcgctctgctcccacatactgtgtcttgctgttgtcaacctaagcttgagaactggttccatttgaagggaaagaaaaagcatagagatatacagtatttaagagaagatccccgttccttcattttt

SEQ ID NO: 90820 - DNA, 600 bp, Chicken  19866894399249_1
catcagacatcagggtacgttcccaacagaaacagccagctgtaagagaaaccacacttctgagatctgcgcacctgagaagataaattggaaatgaccgggcaccctgcttctagatctcttaatagctgcagaaaagcaagagctgtgcattttcactgcagctttaaagcgacagagaaaaaaagctcccgattgaaaaccaaaatgaaaaatgagtgacaattgtctaattatttgcaggctccaaacatccaatctttgaagcgctcgccttagcaaataactactcacttcatsctcacttatgcttacgctgctttttgaaatccaagattactctgaggatacaggaaatagggaaaaatcraactcagccatacgttctgccactcctctgctactccagaaaatttcactgcttccctattgtaaaattccctatcgcgtgtaggaagcttctcaagcacacttattttactctgagccatcacgcttttcatttcccacaccacattttaagaatttaaatcctgtttctctcattaaattacacatcattggttatgatccactaaatccccttctgggcaaagcttc

SEQ ID NO: 90821 - DNA, 600 bp, Chicken  19866894399249_2
gcacctgagaagataaattggaaatgaccgggcaccctgcttctagatctcttaatagctgcagaaaagcaagagctgtgcattttcactgcagctttaaagcgacagagaaaaaaagctcccgattgaaaaccaaaatgaaaaatgagtgacaattgtctaattatttgcaggctccaaacatccaatctttgaagcgctcgccttagcaaataactactcacttcatsctcacttatgcttacgctgctttttgaaatccaagattactctgaggatacaggaaatagggaaaaatcraactcagccatacgttctgccactcctctgctactccagaaaatttcactgcttccctattgtaaaattccctatcgcgtgtaggaagcttctcaagcacacttattttactctgagccatcacgcttttcatttcccacaccacattttaagaatttaaatcctgtttctctcattaaattacacatcattggttatgatccactaaatccccttctgggcaaagcttcatccgactttatagagcgaagagctaccaccgtacctagcgggaaagcgacaattcctggattatcccca

SEQ ID NO: 90822 - DNA, 600 bp, Chicken  19866894399252_1
tattgattcttgaactttccgtattttaaattgactcccttgtgaagatttaaattacatcctttcccttccccatttttcattccaggctaatacttccatgggaacatatgagaggggaaatagatgcctatgatgaagagatatttgttgatggaattccttgtaagtagaagaatgaaatacaaaataattacccatcattatttttatgcattattgccactataaaatatctatttttgcaactactagatagatgtaatttgcttcaactgtttaggtatcttaaagggaagytgaataataaaatcagcctgtaaaaaaaaactcttgagagaataagragcctaatatttaaaatacttatctttaagtccaccaatattcctaaaagccatataattcaagagaaatgtgattactcatacatatttcatgttcttttaagattattttagtttttaaatctttgagatctacttacccttacttctccaattatataaaattagatttagtagcagggaagccaaatcagattaaataaatatcagctagtttttatctcacacttaagcgaaatccttctgaagaggc

SEQ ID NO: 90823 - DNA, 600 bp, Chicken  19866894399252_2
atttaaattacatcctttcccttccccatttttcattccaggctaatacttccatgggaacatatgagaggggaaatagatgcctatgatgaagagatatttgttgatggaattccttgtaagtagaagaatgaaatacaaaataattacccatcattatttttatgcattattgccactataaaatatctatttttgcaactactagatagatgtaatttgcttcaactgtttaggtatcttaaagggaagytgaataataaaatcagcctgtaaaaaaaaactcttgagagaataagragcctaatatttaaaatacttatctttaagtccaccaatattcctaaaagccatataattcaagagaaatgtgattactcatacatatttcatgttcttttaagattattttagtttttaaatctttgagatctacttacccttacttctccaattatataaaattagatttagtagcagggaagccaaatcagattaaataaatatcagctagtttttatctcacacttaagcgaaatccttctgaagaggcaataaataaataaataaataaataaataaatattctgattcctaaat

SEQ ID NO: 90824 - DNA, 600 bp, Chicken  19866894399266_1
ggaagtgaataatagcctaggaatcagcactgtaagaaaagagctgacttcaaactgaataggagccagggcctcaatgcatgggttgtggtgaaggaggaaaaccctgctctgcgctgtagcaacagcgttccatgtgtcttgcgtgtgttgtgtatgtgatatacacaactggcacatacacaacttatacacaacttatactggcatcctcaacacagaaaaccagtgcaccacagcttatagaagatgcagccccattcccaaactaatctcaggaagatagcaagaaatttgaayaacagttgggaaaaataggacttgtgaaaaggtttaaaatttgcatacrctgagttgagaaaaagaagtccagattttattaacaagtgtaataggaagagtggtgatcwacttattttcttagtttccgagggcagctgaaggcacagtaaactttctttgaagcaagaggaattcagcttacaagcaaatcaaacttctagtataaggtgggtgaagtattggaagagacaactgacagaaacagtgaaatctgcacttttgaagcttttaagataaggttagcgagtaggctactgg

SEQ ID NO: 90825 - DNA, 600 bp, Chicken  19866894399266_2
tcaaactgaataggagccagggcctcaatgcatgggttgtggtgaaggaggaaaaccctgctctgcgctgtagcaacagcgttccatgtgtcttgcgtgtgttgtgtatgtgatatacacaactggcacatacacaacttatacacaacttatactggcatcctcaacacagaaaaccagtgcaccacagcttatagaagatgcagccccattcccaaactaatctcaggaagatagcaagaaatttgaayaacagttgggaaaaataggacttgtgaaaaggtttaaaatttgcatacrctgagttgagaaaaagaagtccagattttattaacaagtgtaataggaagagtggtgatcwacttattttcttagtttccgagggcagctgaaggcacagtaaactttctttgaagcaagaggaattcagcttacaagcaaatcaaacttctagtataaggtgggtgaagtattggaagagacaactgacagaaacagtgaaatctgcacttttgaagcttttaagataaggttagcgagtaggctactggaagttgttctggtggcttttgatcttgtatcagaagcaaaagacagaag

SEQ ID NO: 90826 - DNA, 600 bp, Chicken  19866894399266_3
tctgcgctgtagcaacagcgttccatgtgtcttgcgtgtgttgtgtatgtgatatacacaactggcacatacacaacttatacacaacttatactggcatcctcaacacagaaaaccagtgcaccacagcttatagaagatgcagccccattcccaaactaatctcaggaagatagcaagaaatttgaayaacagttgggaaaaataggacttgtgaaaaggtttaaaatttgcatacrctgagttgagaaaaagaagtccagattttattaacaagtgtaataggaagagtggtgatcwacttattttcttagtttccgagggcagctgaaggcacagtaaactttctttgaagcaagaggaattcagcttacaagcaaatcaaacttctagtataaggtgggtgaagtattggaagagacaactgacagaaacagtgaaatctgcacttttgaagcttttaagataaggttagcgagtaggctactggaagttgttctggtggcttttgatcttgtatcagaagcaaaagacagaaggaagttaggaaagtcctatatttctgtgacccccaaacatacaaaatcacatcttacaatg

SEQ ID NO: 90827 - DNA, 599 bp, Chicken  19866894399275_1
  misc_feature (1)..(16): n is any nucleotide
nnnnnnnnnnnnnnnncagaattgccatcctggaaactttaattgggcaaatctggggaaaggtctcaagctgagatgacattaaaagcctttttaaaacaaacctatgaaacagttaacaacagatcaacaggaccagatggcactcacacaggagctcctgagaagctccaatatgaaactgcctaactattaactgtgatgaagaatttagtgcttggattggctctgcttaaattagcctcaaggtcacagggactgggacacgtgatgcccacttctaaagtggtccctaagagracccagggaactgcatrctcatacatttaattttcatttgaggggcatttgtgagaagcattataaaaagragaattagtagacatattcaaaaacacaaaataaaggagaggacttcacacagcttggaaaccacagctcagaagtctacttttttttcttctctgagaatcagtgtgcatgtagataaagctaatccagtagatactgtgtacttggaattctcaaagcttctgatggagtttcttccttaaatcaactgagttgtcacaaaggtgaaggtttgttttgtggatcaa

SEQ ID NO: 90828 - DNA, 600 bp, Chicken  19866894399275_2
agaattgccatcctggaaactttaattgggcaaatctggggaaaggtctcaagctgagatgacattaaaagcctttttaaaacaaacctatgaaacagttaacaacagatcaacaggaccagatggcactcacacaggagctcctgagaagctccaatatgaaactgcctaactattaactgtgatgaagaatttagtgcttggattggctctgcttaaattagcctcaaggtcacagggactgggacacgtgatgcccacttctaaagtggtccctaagagracccagggaactgcatrctcatacatttaattttcatttgaggggcatttgtgagaagcattataaaaagragaattagtagacatattcaaaaacacaaaataaaggagaggacttcacacagcttggaaaccacagctcagaagtctacttttttttcttctctgagaatcagtgtgcatgtagataaagctaatccagtagatactgtgtacttggaattctcaaagcttctgatggagtttcttccttaaatcaactgagttgtcacaaaggtgaaggtttgttttgtggatcaaagaccaatttaaagacaa

SEQ ID NO: 90829 - DNA, 600 bp, Chicken  19866894399275_3
tgagatgacattaaaagcctttttaaaacaaacctatgaaacagttaacaacagatcaacaggaccagatggcactcacacaggagctcctgagaagctccaatatgaaactgcctaactattaactgtgatgaagaatttagtgcttggattggctctgcttaaattagcctcaaggtcacagggactgggacacgtgatgcccacttctaaagtggtccctaagagracccagggaactgcatrctcatacatttaattttcatttgaggggcatttgtgagaagcattataaaaagragaattagtagacatattcaaaaacacaaaataaaggagaggacttcacacagcttggaaaccacagctcagaagtctacttttttttcttctctgagaatcagtgtgcatgtagataaagctaatccagtagatactgtgtacttggaattctcaaagcttctgatggagtttcttccttaaatcaactgagttgtcacaaaggtgaaggtttgttttgtggatcaaagaccaatttaaagacaaaaagtgtcagtttttacaaccaggcagggtcccacttcaggtcataaatggatg

SEQ ID NO: 90830 - DNA, 599 bp, Chicken  19866894399289_1
  misc_feature (1)..(131): n is any nucleotide
nnnnnnnnnnnnnnnnnnnnnnnnnnnnnnnnnnnnnnnnnnnnnnnnnnnnnnnnnnnnnnnnnnnnnnnnnnnnnnnnnnnnnnnnnnnnnnnnnnnnnnnnnnnnnnnnnnnnnnnnnnnnnnnnnnngaagaattttattcccatgtgataatgggtgtttctagttcatttttccaaggcaaccattttgaaacaccgcagtttcagcaaaatactttgtaccttcattaatttaggagtcttcttgctcagtttatagcttttccccagctgtctgtttcacagcaccaaatcrtcatagtattaacccagctatttcatctaatgtgatgtttcttgcaatcagagacytgagaaagctgcatatagctttgaaagacaggaagcaataaaatgatataataggatgctcactgtaataccacttgtcaagtgagtctgagatgacatgtctggcagacatagtttaatattttttccttgtacatttagcaaggaggcaaaaaaaaattcctgtataatctggggattatggaaattacawgatgttttgtaatttagttttgatgtgatgtgtatttttactctccttaa

SEQ ID NO: 90831 - DNA, 599 bp, Chicken  19866894399289_2
  misc_feature (1)..(75): n is any nucleotide
nnnnnnnnnnnnnnnnnnnnnnnnnnnnnnnnnnnnnnnnnnnnnnnnnnnnnnnnnnnnnnnnnnnnnnnnnnngaagaattttattcccatgtgataatgggtgtttctagttcatttttccaaggcaaccattttgaaacaccgcagtttcagcaaaatactttgtaccttcattaatttaggagtcttcttgctcagtttatagcttttccccagctgtctgtttcacagcaccaaatcrtcatagtattaacccagctatttcatctaatgtgatgtttcttgcaatcagagacytgagaaagctgcatatagctttgaaagacaggaagcaataaaatgatataataggatgctcactgtaataccacttgtcaagtgagtctgagatgacatgtctggcagacatagtttaatattttttccttgtacatttagcaaggaggcaaaaaaaaattcctgtataatctggggattatggaaattacawgatgttttgtaatttagttttgatgtgatgtgtatttttactctccttaaatctgacaaacrctacagagagcttaagacaggttcgtgttctttgaaatcaaatt

SEQ ID NO: 90832 - DNA, 600 bp, Chicken  19866894399289_3
ccaaggcaaccattttgaaacaccgcagtttcagcaaaatactttgtaccttcattaatttaggagtcttcttgctcagtttatagcttttccccagctgtctgtttcacagcaccaaatcrtcatagtattaacccagctatttcatctaatgtgatgtttcttgcaatcagagacytgagaaagctgcatatagctttgaaagacaggaagcaataaaatgatataataggatgctcactgtaataccacttgtcaagtgagtctgagatgacatgtctggcagacatagtttaataytttttccttgtacatttagcaaggaggcaaaaaaaaattcctgtataatctggggattatggaaattacawgatgttttgtaatttagttttgatgtgatgtgtatttttactctccttaaatctgacaaacrctacagagagcttaagacaggttcgtgttctttgaaatcaaattgcagaagcawtaaatttggcctatttgtttctttcccctagcacacttattctgccattttatatgctaggaggctggttaattttctccattattctggagcgtcttgttaaaatgtatgtc

SEQ ID NO: 90833 - DNA, 600 bp, Chicken  19866894399289_4
ttgctcagtttatagcttttccccagctgtctgtttcacagcaccaaatcrtcatagtattaacccagctatttcatctaatgtgatgtttcttgcaatcagagacytgagaaagctgcatatagctttgaaagacaggaagcaataaaatgatataataggatgctcactgtaataccacttgtcaagtgagtctgagatgacatgtctggcagacatagtttaatattttttccttgtacatttagcaaggaggcaaaaaaaaattcctgtataatctggggattatggaaattacawgatgttttgtaatttagttttgatgtgatgtgtatttttactctccttaaatctgacaaacrctacagagagcttaagacaggttcgtgttctttgaaatcaaattgcagaagcawtaaatttggcctatttgtttctttcccctagcacacttattctgccattttatatgctaggaggctggttaattttctccattattctggagcgtcttgttaaaatgtatgtctgcatctggctattygagtaccatgccctttgcctgctgctcagcagcagcaagtattgctttagtacaga

SEQ ID NO: 90834 - DNA, 600 bp, Chicken  19866894399289_5
acccagctatttcatctaatgtgatgtttcttgcaatcagagacytgagaaagctgcatatagctttgaaagacaggaagcaataaaatgatataataggatgctcactgtaataccacttgtcaagtgagtctgagatgacatgtctggcagacatagtttaatattttttccttgtacatttagcaaggaggcaaaaaaaaattcctgtataatctggggattatggaaattacawgatgttttgtaatttagttttgatgtgatgtgtatttttactctccttaaatctgacaaacrctacagagagcttaagacaggttcgtgttctttgaaatcaaattgcagaagcawtaaatttggcctatttgtttctttcccctagcacacttattctgccattttatatgctaggaggctggttaattttctccattattctggagcgtcttgttaaaatgtatgtctgcatctggctattygagtaccatgccctttgcctgctgctcagcagcagcaagtattgctttagtacagaattgtctgtcaattatttccttcctagatattagtaaaacatctgtcaggtcactagatgta

SEQ ID NO: 90835 - DNA, 600 bp, Chicken  19866894399289_6
tgcatatagctttgaaagacaggaagcaataaaatgatataataggatgctcactgtaataccacttgtcaagtgagtctgagatgacatgtctggcagacatagtttaatattttttccttgtacatttagcaaggaggcaaaaaaaaattcctgtataatctggggattatggaaattacawgatgttttgtaatttagttttgatgtgatgtgtatttttactctccttaaatctgacaaacrctacagagagcttaagacaggttcgtgttctttgaaatcaaattgcagaagcawtaaatttggcctatttgtttctttcccctagcacacttattctgccattttatatgctaggaggctggttaattttctccattattctggagcgtcttgttaaaatgtatgtctgcatctggctattygagtaccatgccctttgcctgctgctcagcagcagcaagtattgctttagtacagaattgtctgtcaattatttccttcctagatattagtaaaacatctgtcaggtcactagatgtaatgcaagtgctgaataactgtattccttactttctgctgaagtcatagtgcagt

SEQ ID NO: 90836 - DNA, 600 bp, Chicken  19866894399289_7
ttagcaaggaggcaaaaaaaaattcctgtataatctggggattatggaaattacawgatgttttgtaatttagttttgatgtgatgtgtatttttactctccttaaatctgacaaacrctacagagagcttaagacaggttcgtgttctttgaaatcaaattgcagaagcawtaaatttggcctatttgtttctttcccctagcacacttattctgccattttatatgctaggaggctggttaattttctccattattctggagcgtcttgttaaaatgtatgtctgcatctggctattygagtaccatgccctttgcctgctgctcagcagcagcaagtattgctttagtacagaattgtctgtcaattatttccttcctagatattagtaaaacatctgtcaggtcactagatgtaatgcaagtgctgaataactgtattccttactttctgctgaagtcatagtgcagttgtgtttcagctgtgtaatcagagccttcaggtttgtgaacatggttgttgttaaagaggggaaaacatcatttgagtgggaacctactttactaaataaagaagctcctgtttctttcattaatttt

SEQ ID NO: 90837 - DNA, 600 bp, Chicken  19866894399292_1
aggaatttacataatctttttttttgctattatcaactacttaggagctgaactgaatgcctcaactgcatcttcaatatttttggtgaaaccgaagtcagagggtgcctaaatagtggctgcattattgctctacaccagcttgggaacaataaggtgtaagcactcagccttccttttacaaaacaattttctgttttatcagaatgatgcattattaacttcttaaaggcattgtatgcagtggtgtctttgttatgtatagacgtgggaatacttacaatttcataaaaaacacarggcaggctctccgttccatctctcaaaagaaaattcttggctccgtatgctccagatgtgaccgcagaatcaagcgtgcctacagcacgtaacaaaagcaagccacaatgtaaacatcagagcagtactaaacatgatatcaagatatcatgacagcatttcctccacaaaagcacaaaggtgtatcaatcagcatcagtttcctgtcacaatttgtgctggcagccctcgaaattccaatatgttatgggcttcacatactcttctaatagtaaaactgggtttaaaatctgcctaact

SEQ ID NO: 90838 - DNA, 600 bp, Chicken  19866894399293_1
attttattagcactacggtaaggcacagagaaaatgatacttggctcatcccactcacagctttctgtgtaactgagctctgatgctaacgatagtgctacagtgatgttctaagtggtcactcttgcgtgctatgaaatgcgagagtttacaagaacaatctagtgggaaaacctgagagttgcaaatgaaaatgcaagggggaaagctttacattttctttttttccaggcacgtcttctgcctgtaagtatcagatggtgacaaaacatacaagaaacctgaaacctggcaggtaaygaacacaccaccaattaaattttcagtgcctttatatatattttttttaaacaaaaatcactgtttgcttgaaattkcttttttacagtaataytgcaatttgtgtgaatcaaaccctgaattacttggttactaattagtaatttcctactttttaactacagctctcatttggtgcttttttttttttttttaattagttgcataccctgtgaggtgctgacagtaccacagtgaatttccccactggcatgtgtgtctgctagcaaacccgaccgatgtgctgctgcaatgctgggg

SEQ ID NO: 90839 - DNA, 600 bp, Chicken  19866894399293_2
ttggctcatcccactcacagctttctgtgtaactgagctctgatgctaacgatagtgctacagtgatgttctaagtggtcactcttgcgtgctatgaaatgcgagagtttacaagaacaatctagtgggaaaacctgagagttgcaaatgaaaatgcaagggggaaagctttacattttctttttttccaggcacgtcttctgcctgtaagtatcagatggtgacaaaacatacaagaaacctgaaacctggcaggtaaygaacacaccaccaattaaattttcagtgcctttatatatyttttttttaaacaaaaatcactgtttgcttgaaattkcttttttacagtaataytgcaatttgtgtgaatcaaaccctgaattacttggttactaattagtaatttcctactttttaactacagctctcatttggtgcttttttttttttttttaattagttgcataccctgtgaggtgctgacagtaccacagtgaatttccccactggcatgtgtgtctgctagcaaacccgaccgatgtgctgctgcaatgctggggctcaactggggtaagctggggcagggctatggctcaggac

SEQ ID NO: 90840 - DNA, 600 bp, Chicken  19866894399293_3
ctctgatgctaacgatagtgctacagtgatgttctaagtggtcactcttgcgtgctatgaaatgcgagagtttacaagaacaatctagtgggaaaacctgagagttgcaaatgaaaatgcaagggggaaagctttacattttctttttttccaggcacgtcttctgcctgtaagtatcagatggtgacaaaacatacaagaaacctgaaacctggcaggtaaygaacacaccaccaattaaattttcagtgcctttatatatattttttttaaacaaaaatcactgtttgcttgaaattkcttttttacagtaataytgcaatttgtgtgaatcaaaccctgaattacttggttactaattagtaatttcctactttttaactacagctctcatttggtgcttttttttttttttttaattagttgcataccctgtgaggtgctgacagtaccacagtgaatttccccactggcatgtgtgtctgctagcaaacccgaccgatgtgctgctgcaatgctggggctcaactggggtaagctggggcagggctatggctcaggaccaccaatttaacagcttttaatctttcagtggaagtg

SEQ ID NO: 90841 - DNA, 600 bp, Chicken  19866894399293_4
gtgctacagtgatgttctaagtggtcactcttgcgtgctatgaaatgcgagagtttacaagaacaatctagtgggaaaacctgagagttgcaaatgaaaatgcaagggggaaagctttacattttctttttttccaggcacgtcttctgcctgtaagtatcagatggtgacaaaacatacaagaaacctgaaacctggcaggtaaygaacacaccaccaattaaattttcagtgcctttatatatattttttttaaacaaaaatcactgtttgcttgaaattkcttttttacagtaataytgcaatttgtgtgaatcaaaccctgaattacttggttactaattagtaatttcctactttttaactacagctctcatttggtgcttttttttttttttttaattagttgcataccctgtgaggtgctgacagtaccacagtgaatttccccactggcatgtgtgtctgctagcaaacccgaccgatgtgctgctgcaatgctggggctcaactggggtaagctggggcagggctatggctcaggaccaccaatttaacagcttttaatctttcagtggaagtgatttcctttctttccct

SEQ ID NO: 90842 - DNA, 600 bp, Chicken  19866894399301_1
ggaggcagaaatgcttttgatacatctctgagcgttctaaagaataattaaaactggcaagaatccaaaggctgggtttggcttgcttttgattttttctttgtctacctctcagctttgaggtaatcttattaaatgggttgtatggaggtgtgtcaactgcataatgtttgatggcacatatctttcacaatactgatagcagaaactattactgtagcagcgcttgttgcagtgttgtttcaccgtcagtggagtttggatccttctgggcaaagcagagaaatcttttcaacaccwgtctgctttcttcttcttctccccaacttgcctttctgactrgctagggatgtgcccaggtgactttccacacratgaaagcaccatctgggaccccatgtactcctttayggctatgtagctttgttacctcctgtcttgttcacacctgagctggaattgttgaggccctgctggcacatgcccagagcatggcccagcccragttttgtgaagggacgggacctggaacagrggctgtacaattactgccactcacttgggtagctgttaagggtagaagcacggtgtttgagtagc

SEQ ID NO: 90843 - DNA, 600 bp, Chicken  19866894399301_2
aataattaaaactggcaagaatccaaaggctgggtttggcttgcttttgattttttctttgtctacctctcagctttgaggtaatcttattaaatgggttgtatggaggtgtgtcaactgcataatgtttgatggcacatatctttcacaatactgatagcagaaactattactgtagcagcgcttgttgcagtgttgtttcaccgtcagtggagtttggatccttctgggcaaagcagagaaatcttttcaacaccwgtctgctttcttcttcttctccccaacttgcctttctgactrgctagggatgtgcccaggtgactttccacacratgaaagcaccatctgggaccccatgtactcctttayggctatgtagctttgttacctcctgtcttgttcacacctgagctggaattgttgaggccctgctggcacatgcccagagcatggcccagcccragttttgtgaagggacgggacctggaacagrggctgtacaattactgccactcacttgggtagctgttaagggtagaagcacggtgtttgagtagcacaaagtacaaaatacaaaatggcatcctgccattgctgcag

SEQ ID NO: 90844 - DNA, 600 bp, Chicken  19866894399301_3
ggtttggcttgcttttgattttttctttgtctacctctcagctttgaggtaatcttattaaatgggttgtatggaggtgtgtcaactgcataatgtttgatggcacatatctttcacaatactgatagcagaaactattactgtagcagcgcttgttgcagtgttgtttcaccgtcagtggagtttggatccttctgggcaaagcagagaaatcttttcaacaccwgtctgctttcttcttcttctccccaacttgcctttctgactrgctagggatgtgcccaggtgactttccacacratgaaagcaccatctgggaccccatgtactcctttayggctatgtagctttgttacctcctgtcttgttcacacctgagctggaattgttgaggccctgctggcacatgcccagagcatggcccagcccragttttgtgaagggacgggacctggaacagrggctgtacaattactgccactcacttgggtagctgttaagggtagaagcacggtgtttgagtagcacaaagtacaaaatacaaaatggcatcctgccattgctgcagaattcacttgttatcactttacatcattatct

SEQ ID NO: 90845 - DNA, 600 bp, Chicken  19866894399301_4
tcagctttgaggtaatcttattaaatgggttgtatggaggtgtgtcaactgcataatgtttgatggcacatatctttcacaatactgatagcagaaactattactgtagcagcgcttgttgcagtgttgtttcaccgtcagtggagtttggatccttctgggcaaagcagagaaatcttttcaacaccwgtctgctttcttcttcttctccccaacttgcctttctgactrgctagggatgtgcccaggtgactttccacacratgaaagcaccatctgggaccccatgtactcctttayggctatgtagctttgttacctcctgtcttgttcacacctgagctggaattgttgaggccctgctggcacatgcccagagcatggcccagcccragttttgtgaagggacgggacctggaacagrggctgtacaattactgccactcacttgggtagctgttaagggtagaagcacggtgtttgagtagcacaaagtacaaaatacaaaatggcatcctgccattgctgcagaattcacttgttatcactttacatcattatctatgaggtaatggtggctcatgcttacataatgtacca

SEQ ID NO: 90846 - DNA, 592 bp, Chicken  19866894399301_5
gaaactattactgtagcagcgcttgttgcagtgttgtttcaccgtcagtggagtttggatccttctgggcaaagcagagaaatcttttcaacaccwgtctgctttcttcttcttctccccaacttgcctttctgactrgctagggatgtgcccaggtgactttccacacratgaaagcaccatctgggaccccatgtactcctttayggctatgtagctttgttacctcctgtcttgttcacacctgagctggaattgttgaggccctgctggcacatgcccagagcatggcccagcccragttttgtgaagggacgggacctggaacagrggctgtacaattactgccactcacttgggtagctgttaagggtagaagcacggtgtttgagtagcacaaagtacaaaatacaaaatggcatcctgccattgctgcagaattcacttgttatcactttacatcattatctatgaggtaatggtggctcatgcttacataatgtaccataggagagaatccaaattttgggctaactctagcttgttgttcctgtgtatcctaagttatgttgactaccattttcacagcagt

SEQ ID NO: 90847 - DNA, 561 bp, Chicken  19866894399301_6
tgttgtttcaccgtcagtggagtttggatccttctgggcaaagcagagaaatcttttcaacaccwgtctgctttcttcttcttctccccaacttgcctttctgactrgctagggatgtgcccaggtgactttccacacratgaaagcaccatctgggaccccatgtactcctttayggctatgtagctttgttacctcctgtcttgttcacacctgagctggaattgttgaggccctgctggcacatgcccagagcatggcccagcccragttttgtgaagggacgggacctggaacagrggctgtacaattactgccactcacttgggtagctgttaagggtagaagcacggtgtttgagtagcacaaagtacaaaatacaaaatggcatcctgccattgctgcagaattcacttgttatcactttacatcattatctatgaggtaatggtggctcatgcttacataatgtaccataggagagaatccaaattttgggctaactctagcttgttgttcctgtgtatcctaagttatgttgactaccattttcacagcagt

SEQ ID NO: 90848 - DNA, 600 bp, Chicken  19866894399309_1
ttcctgttgaaaactaatacctaacctaatatcagtcatctttttatacatgtatgggtttttttgtttgtttgtttttgtttgttttttctaaacatacttgttcctctgcttctaatcacggctctgacaagtaatcatgaaacagagaaaaaggacttatctaatatttggactgttccagatttgaaaatctcattcctaccactatcggggcatttgcttactcatgaaaatctgttctaaggttcatgacctcattctgccattggcttgctgtccggtatcagcatcctcctytacagcaaaacagccttttgagaaagtagagcacaatctaattggaaaagtcataattttgtcttctccttcttaaacagagctttgaagcattagcaaaagctgtgactgcactgatgcattaatcatcccttacatcccaataaaatacaaaatatttagcgaatagaaatttgattggcaagtttcagaagtataggatgcaactccccctgacactgctgacacagccacctgaaagcaacttccacaatgcaatgttctgccacacttccattttacagagttcccagtcctgct

SEQ ID NO: 90849 - DNA, 599 bp, Chicken  19866894399310_1
  misc_feature (1)..(191): n is any nucleotide
nnnnnnnnnnnnnnnnnnnnnnnnnnnnnnnnnnnnnnnnnnnnnnnnnnnnnnnnnnnnnnnnnnnnnnnnnnnnnnnnnnnnnnnnnnnnnnnnnnnnnnnnnnnnnnnnnnnnnnnnnnnnnnnnnnnnnnnnnnnnnnnnnnnnnnnnnnnnnnnnnnnnnnnnnnnnnnnnnnnnnnnnnnnnnnncttacctaggcctgctgtcctggggaaaatctgttcatctcatgatataaaaaaaataaggattgaagaggtttattaatttattaatagtgtataattaaaaaaaaamcaatcataatttagaatcattgtcagcaacgcaacagaaaaaagacaataacaataaaaggcatttacagaatgttagtaagctattacagatttttaaatctaacaatttttaaacatcccttaactcataacaagaagtactaacacacaggatttagaactgttggtcaatctcagttcacatttacacattcttagggttgcaggcacacacttgctcttgcagaggtgggtaattcatacctcctctggaagtgcaggttccccagttcacacacacctcctggagatggaaat

SEQ ID NO: 90850 - DNA, 599 bp, Chicken  19866894399313_1
  misc_feature (1)..(212): n is any nucleotide
nnnnnnnnnnnnnnnnnnnnnnnnnnnnnnnnnnnnnnnnnnnnnnnnnnnnnnnnnnnnnnnnnnnnnnnnnnnnnnnnnnnnnnnnnnnnnnnnnnnnnnnnnnnnnnnnnnnnnnnnnnnnnnnnnnnnnnnnnnnnnnnnnnnnnnnnnnnnnnnnnnnnnnnnnnnnnnnnnnnnnnnnnnnnnnnnnnnnnnnnnnnnnnnnnnnncaagaaaacaaacaaaatgtatcctaccctgagcagttaagtgttctaacataaagaacaatgaaagaacagatttcttatcaagagragacagaatgaacaggcaaggaactaataatatagttcaagactcactgcagcagcagcagctgttcaagctatccctgataaaaaaaattccaccttgcagcactgtaaataacatgaagaaagccagaatgggccaagagcaacttggtggtattttttgtttgtattttattatagaataatctattgaattcttgtttagaagaaaaaagaaactataagcaagtatgatgtttctgtaggatatataatacttgaaatactcaacttggaattcagcattcaaagatccacttt

SEQ ID NO: 90851 - DNA, 599 bp, Chicken  19866894399322_1
  misc_feature (1)..(195): n is any nucleotide
nnnnnnnnnnnnnnnnnnnnnnnnnnnnnnnnnnnnnnnnnnnnnnnnnnnnnnnnnnnnnnnnnnnnnnnnnnnnnnnnnnnnnnnnnnnnnnnnnnnnnnnnnnnnnnnnnnnnnnnnnnnnnnnnnnnnnnnnnnnnnnnnnnnnnnnnnnnnnnnnnnnnnnnnnnnnnnnnnnnnnnnnnnnnnnnnnnnttgaagcatcttttggctcatacaacaattattctttgaaaacttctaccaccagattctcatttcctatggggttctgttccagcttgtaactgtagacaacaygaatgataaatcaataacagcagtttgcagaycagaatcrtgcagatctattcatgttggcacatctcacttgcaatcaaagactaaaaatctgcttggatrgatgtacagtatctgaagatcttctttgagtgcaagctcatccttttaggcatacagtctttactacttcctcaacacagcataggttagaggtttctggtagttttaacacatttgatttaatgaggctgaattgctcagaatacctttgacrtaaattaccagctcttttcattcaacttgccccttagcaatca

SEQ ID NO: 90852 - DNA, 599 bp, Chicken  19866894399322_2
  misc_feature (1)..(163): n is any nucleotide
nnnnnnnnnnnnnnnnnnnnnnnnnnnnnnnnnnnnnnnnnnnnnnnnnnnnnnnnnnnnnnnnnnnnnnnnnnnnnnnnnnnnnnnnnnnnnnnnnnnnnnnnnnnnnnnnnnnnnnnnnnnnnnnnnnnnnnnnnnnnnnnnnnnnnnnnnnnnnnnnnnnttgaagcatcttttggctcatacaacaattattctttgaaaacttctaccaccagattctcatttcctatggggttctgttccagcttgtaactgtagacaacaygaatgataaatcaataacagcagtttgcagaycagaatcrtgcagatctattcatgttggcacatctcacttgcaatcaaagactaaaaatctgcttggatrgatgtacagtatctgaagatcttctttgagtgcaagctcatccttttaggcatacagtctttactacttcctcaacacagcataggttagaggtttctggtagttttaacacatttgatttaatgaggctgaattgctcagaatacctttgacrtaaattaccagctcttttcattcaacttgccccttagcaatcaagaaatttagtgacaagaygctcctttatttt

SEQ ID NO: 90853 - DNA, 599 bp, Chicken  19866894399322_3
  misc_feature (1)..(155): n is any nucleotide
nnnnnnnnnnnnnnnnnnnnnnnnnnnnnnnnnnnnnnnnnnnnnnnnnnnnnnnnnnnnnnnnnnnnnnnnnnnnnnnnnnnnnnnnnnnnnnnnnnnnnnnnnnnnnnnnnnnnnnnnnnnnnnnnnnnnnnnnnnnnnnnnnnnnnnnnnnnttgaagcatcttttggctcatacaacaattattctttgaaaacttctaccaccagattctcatttcctatggggttctgttccagcttgtaactgtagacaacaygaatgataaatcaataacagcagtttgcagaycagaatcrtgcagatctattcatgttggcacatctcacttgcaatcaaagactaaaaatctgcttggatrgatgtacagtatctgaagatcttctttgagtgcaagctcatccttttaggcatacagtctttactacttcctcaacacagcataggttagaggtttctggtagttttaacacatttgatttaatgaggctgaattgctcagaatacctttgacrtaaattaccagctcttttcattcaacttgccccttagcaatcaagaaatttagtgacaagaygctcctttatttttccttctg

SEQ ID NO: 90854 - DNA, 599 bp, Chicken  19866894399322_4
  misc_feature (1)..(93): n is any nucleotide
nnnnnnnnnnnnnnnnnnnnnnnnnnnnnnnnnnnnnnnnnnnnnnnnnnnnnnnnnnnnnnnnnnnnnnnnnnnnnnnnnnnnnnnnnnnnnttgaagcatcttttggctcatacaacaattattctttgaaaacttctaccaccagattctcatttcctatggggttctgttccagcttgtaactgtagacaacaygaatgataaatcaataacagcagtttgcagaycagaatcrtgcagatctattcatgttggcacatctcacttgcaatcaaagactaaaaatctgcttggatrgatgtacagtatctgaagatcttctttgagtgcaagctcatccttttaggcatacagtctttactacttcctcaacacagcataggttagaggtttctggtagttttaacacatttgatttaatgaggctgaattgctcagaatacctttgacrtaaattaccagctcttttcattcaacttgccccttagcaatcaagaaatttagtgacaagaygctcctttatttttccttctgttttaatttcaaatcagttaacgtatgttttcttcacccagggttattttctaggagcagct

SEQ ID NO: 90855 - DNA, 600 bp, Chicken  19866894399322_5
atttcctatggggttctgttccagcttgtaactgtagacaacaygaatgataaatcaataacagcagtttgcagaycagaatcrtgcagatctattcatgttggcacatctcacttgcaatcaaagactaaaaatctgcttggatrgatgtacagtatctgaagatcttctttgagtgcaagctcatccttttaggcatacagtctttactacttcctcaacacagcataggttagaggtttctggtagttttaacacatttgatttaatgaggctgaattgctcagaatacctttgacrtaaattaccagctcttttcattcaacttgccccttagcaatcaagaaatttagtgacaagaygctcctttatttttccttctgttttaatttcaaatcagttaacgtatgttttcttcacccagggttattttctaggagcagctcttctgtaatgtcttcattaactgccaaattggtatctgaaataatactgccccagttcagtgataatttggtggaaattaaatctgcttccatgtctagaaatatactggggcatgatcttagataatatttgttctgaggagcacttgccctt

SEQ ID NO: 90856 - DNA, 600 bp, Chicken  19866894399322_6
agcagtttgcagaycagaatcrtgcagatctattcatgttggcacatctcacttgcaatcaaagactaaaaatctgcttggatrgatgtacagtatctgaagatcttctttgagtgcaagctcatccttttaggcatacagtctttactacttcctcaacacagcataggttagaggtttctggtagttttaacacatttgatttaatgaggctgaattgctcagaatacctttgacrtaaattaccagctcttttcattcaacttgccccttagcaatcaagaaatttagtgacaagaygctcctttatttttccttctgttttaatttcaaatcagttaacgtatgttttcttcacccagggttattttctaggagcagctcttctgtaatgtcttcattaactgccaaattggtatctgaaataatactgccccagttcagtgataatttggtggaaattaaatctgcttccatgtctagaaatatactggggcatgatcttagataatatttgttctgaggagcacttgcccttctcaagcagcatctggaattacattctatctcccttgcagaagctgctttccaaaataattt

SEQ ID NO: 90857 - DNA, 600 bp, Chicken  19866894399332_1
cactttcaggaatggggcattcacagcttctcaggactacctgtaccagtgcctcactaccctcatagtaaacaattccctcctaatatctaatctaagcctaccctcttttagtggaaaaccattactccttgtcctatcattaacaaaatcatagaatggaatcatgttgcactgatacggtgttcacctgctaatgttgctaggtgtttccaatgaatatcactaaatatatatcctaaaggattttgaaagactgtgttgtgaaaataactttttccctttaaatagtgcatcctytttggggtaaaatttcttcattatctttttcttcttttcatgatattttcttccaaggcctgttattcatctaataattacattaatcatgtaactgatttgtctacagcaatgaaattcttgtttcccatagttcaagacgaggttagagttctggaatgtttcytccaaacaatttctcatgctaaatattttcacttccagctataaaatcatatgatcctaattattctcgccaagatgggaatttagaattgtggacttgttctccttagagatttttaaggccagatcatggag

SEQ ID NO: 90858 - DNA, 600 bp, Chicken  19866894399332_2
atgttgcactgatacggtgttcacctgctaatgttgctaggtgtttccaatgaatatcactaaatatatatcctaaaggattttgaaagactgtgttgtgaaaataactttttccctttaaatagtgcatcctytttggggtaaaatttcttcattatctttttcttcttttcatgatattttcttccaaggcctgttattcatctaataattacattaatcatgtaactgatttgtctacagcaatgaaattcttgtttcccatagttcaagacgaggttagagttctggaatgtttcytccaaacaatttctcatgctaaatattttcacttccagctataaaatcatatgatcctaattattctcgccaagatgggaatttagaattgtggacttgttctccttagagatttttaaggccagatcatggagtgtctcacagaatattctcggccaagtgctaattatattgatagttttctataacatcactgtgtaagctgagagtgaaagaagtttctgagactcaaaagagtaggtcttcacaaaataaataatgacactactcaacattccctagtacataaaatacacagcc

SEQ ID NO: 90859 - DNA, 600 bp, Chicken  19866894399339_1
tgaatgcaaagtcctgcacctgggcagaactaacttcctgtgccagtatacactgggggccaaccagctggggagcagctcagaagataaggaccggggagccccagtgacctcaatgctatgccttcatgggagtgaaagataagcatgtatttgctgtatcaacaaatgcataggcagcaggttgaagaaagtggctattctacacagaacttgtgagactactacatctggaatactgtgtcctgttccaggcctcattcaaatgtaaagaaaatgtcttacaatgagagattgagyactggcacaggttacccatagaagatgttggatctccatccctggaggtactaaaaatacagttgtacaaggtgctgagcaacctgatctgacatcaaagctagctctgctttgagctgaaggctggactacaagctctgtggatgtctcttccaacctgaatttttccataattctatgatttatgatagctcttagcaaatcttgtgccattatgttgttgaaaaaaatggtctatacttttataagcggaatacaggaatacttcctattgacaccttggcaactgcatgcatcaat

SEQ ID NO: 90860 - DNA, 600 bp, Chicken  19866894399348_1
gcgcagagcattgccctaacgactgcagctcattgcttcctacttcccaagcccaaatcctggagcgtgaccctggtaattgaacgctaattaaggagggaaaacaagcagcaccctgcatttgcaatccgccgaagtaacataaatgagatctaaatggtgacctttttaccgaagcaggggtgttaaccaagcatgacaaatggaagggaaaaggggaaaaaaaaaaagacaaaacactgctgcatttggtaatcccagctcctctgtgcacagctgtggtggggacaccgctgtgtrggggctgcaggatgtccccatgcagtgctggggctttgctgcttccccccacccctcacaccgacaccctgcagcagctggaaattcagtccccacattgcttgctgctgcagtcacaaatgcaaaaggagtttgccttcaagttctcactgggttgtagggttggactcggtggtccctatgggggccttccaactcgggttcttctggcacctcatctccttcccatcatcactgactgtgccccccaggagcgatgctgtgcccctgctgctgttttgggtgcgcagagcacagctt

SEQ ID NO: 90861 - DNA, 600 bp, Chicken  19866894399355_1
tgcacaccaggtactgcagaggagaaaaaacaacatgactgttacaagccactcctatcccagccagtactagattaaacagtctacagtttctcatggagaagatggaagacaactcactgcacagaatgaaactcagttacaaatcttcttagcttattgttaatcactgaaaagaaatttgttatttcagagtcatgaaaatccatttgcaaggccacacactgtcctgattaccgtgagtcacaacatttagcaattcatatttccactcttttccctcatatatagtagtatgaraaatctcacaatttggcctgaaagcccaggaatgttgctggaagaagcctttgcaaatgcccttttctagttgattccacaagagccagctctgctagctaccagcacttcccacctcattctctctgccctccctctcctgcccactaccagcgatgtcctctggactcatgcttcctccaagcaatgaaagagggccctgttatggccaaaagagcagtatgagtggctaccaaaaagtacctgagtcaactttagtgcgtaccctataggcagtgacaaaagaaattacttcattgc

SEQ ID NO: 90862 - DNA, 600 bp, Chicken  19866894399370_1
catttcctcaaacctgcagtgctggtggaagacgtcccgtgtcttcatctttcatcttgtttttcaccagctccccatggggcaggtgacaccagatgtgccgtgagaagggaagacctggaatagcttcttagcaccagctgcttccagtggcaaacagccactcttaggggatagatcagagtcctgggggatagatcagagaaatatcagatgctcttgtccatcctgctaaccaacacaggttgtagtggcccacttctcagccctgcactgcttttacctatttttctgaattcytgaatgatttctaaattacttcccttactcaaaactcatatcaacatgcatttctgatctgaggtcagcaggaagcaccggctattagggaccctgggagtaacactctgtacttacctttcaatgcaataaaaaaaaactgtcctccactttctctctgctattaatctgtttgggatcctcaggtgtgcttccatgctggatgaggtctgcttctccccagcaggattggctgggggaccatgggtgtcaccagcgggactgtgaatcacgatgtccaaatggatgctcacccctcag

SEQ ID NO: 90863 - DNA, 600 bp, Chicken  19866894399382_1
tttattctaacaatatcaaacaaattctattgtgttagatttttcacttggctattagaaacattaacactgaaagacatctactacctgcacatgcgtagaagatataatatgcaatgttcttgcatggtggctaattaattacactttaaatttactacatatgccctatagcagcttggtaaataggattttatacacacagaaaataatcaatatggtttacttgccatttgaacatgtacaagaaagtaaaagtttattcattcccttcccaaccaaatgttcccgtattaaaaygactgtacctttcatgcatatagttgactccaagcaacaactgtataaaccactctattatttgcctytgtgtgaatgacttcccacattctttgtactcttgaattttatagtctagatctccaccctgaaaaacatcacaacagatttgtacatttaaagtaagtttttaaaatgtcttctcctttgtgaaaacacaggactccattttcttacaccttcaaggctccatagcacatagtcagtaaaattaatgcttgcacatgaattttgaactctcacagcaccaaaagcatacag

SEQ ID NO: 90864 - DNA, 600 bp, Chicken  19866894399382_2
actgaaagacatctactacctgcacatgcgtagaagatataatatgcaatgttcttgcatggtggctaattaattacactttaaatttactacatatgccctatagcagcttggtaaataggattttatacacacagaaaataatcaatatggtttacttgccatttgaacatgtacaagaaagtaaaagtttattcattcccttcccaaccaaatgttcccgtattaaaaygactgtacctttcatgcatatagttgactccaagcaacaactgtataaaccactctattatttgcctytgtgtgaatgacttcccacattctttgtactcttgaattttatagtctagatctccaccctgaaaaacatcacaacagatttgtacatttaaagtaagtttttaaaatgtcttctcctttgtgaaaacacaggactccattttcttacaccttcaaggctccatagcacatagtcagtaaaattaatgcttgcacatgaattttgaactctcacagcaccaaaagcatacagaactgaggactcaaatgagatcaagcagtctggctgcctagggaaagtaggtcagttctcgcttagtg

SEQ ID NO: 90865 - DNA, 600 bp, Chicken  19866894399393_1
cagtggcaggatcccaacaatgctctctctactgcagaagcaaggggcactttgccacctagcccaaaagcccaggattttccttctggaaggcagcagtgaatccatgccacagggtctccttcacagtcccttgggaagctccagaggaggagagcttggcctttttcggacacatgctaccattcactggggacagaagtctcttcaggatggcgccccttgaccaagcacgcagtgacaagcaaatcacagaatggtttgtgggggaaaggaccataaagcccatccagttccacycccctgccatasgctggttgccccccaccagatcagcctgccaagggtcccattcaacccagctttgagcacctccaggaatggggcaccacagctgctctggaaagtctgtgctagtgcctcactgccttctgagtaaagaatttcctcctaacatctaacctaagtctctgcagggacatccagttttcaaattccacatccctcctcaccagctttctgcagcaaagatgcttttaaaaacaaataacaaacaaacaaaaaaattaaagtaattcatcccagtagtaaccctgtcat

SEQ ID NO: 90866 - DNA, 600 bp, Chicken  19866894399393_2
cccaacaatgctctctctactgcagaagcaaggggcactttgccacctagcccaaaagcccaggattttccttctggaaggcagcagtgaatccatgccacagggtctccttcacagtcccttgggaagctccagaggaggagagcttggcctttttcggacacatgctaccattcactggggacagaagtctcttcaggatggcgccccttgaccaagcacgcagtgacaagcaaatcacagaatggtttgtgggggaaaggaccataaagcccatccagttccacycccctgccatasgctggttgccccccaccagatcagcctgccaagggtcccattcaacccagctttgagcacctccaggaatggggcaccacagctgctctggaaagtctgtgctagtgcctcactgccttctgagtaaagaatttcctcctaacatctaacctaagtctctgcagggacatccagttttcaaattccacatccctcctcaccagctttctgcagcaaagatgcttttaaaaacaaataacaaacaaacaaaaaaattaaagtaattcatcccagtagtaaccctgtcatagacagaaaatg

SEQ ID NO: 90867 - DNA, 600 bp, Chicken  19866894399396_1
ttgcagtccagaaggccagtggcatcctgggctacatcaaaagagggatggcagcagggagagggaggggattgtccccctctgctttgcccttgtgaggccccagctggagtgctacatgcaggcctggagcccccagcacaagaaggaaatggagctgttggagtggttccagagtagagccatgaggatactcagagggctggaacacctctcctatgaggaaaggttgagagcgttggacttgtttagtgtggagaagagaaggctccaaggagacctcattgtgacctttcagtrcttgaggggagtttataagcacgagggggaccaactttttacgtggtctaatagtgatagaacaagagtttgaactaaaagaatggagatttcagttagatgttaggaggaaattctttacacagagggtggcaaggcactagcagaggctgcccagagaagctgtgggtgccccatcactggaggcactcaaggccagttttaatggggccctgggcagctgagctggtgggtggcagccttgtccacagcagatggtttggaactagatggtctttaaggtctcctccaacgtaagcc

SEQ ID NO: 90868 - DNA, 505 bp, Chicken  19866894399410_1
tttgctgatactggtcatgagcatagaagaactctacctagaaactgagcatgtgttatgaaacaggaattctaaatgagagacaactgccagcaatcagcagtagctgtaatagacaagtcaaggagatactgctttccttccatgacattagcagtgaagacagcaagcatgcagggtgccacagtactaacgggggtgaaactatctccttcgtgaatctgctcctgcctttcctagagcacaaccagcctcaaacctcacttcacccagcagaaggctctttccctctcctacccyatagcaagaatgagtcctgaaaatcttggaagatcagtgtgggcctcaaaaatggctatggatttcactgggctgttcttattttctccagatattgggattaatttctttttagaagggactgagtaagcaaccattaaagaatgaaaaacatccgtgtcttgatttatagtgagggaaacaaataacagcacagtactttctt

SEQ ID NO: 90869 - DNA, 599 bp, Chicken  19866894399422_1
  misc_feature (1)..(133): n is any nucleotide
nnnnnnnnnnnnnnnnnnnnnnnnnnnnnnnnnnnnnnnnnnnnnnnnnnnnnnnnnnnnnnnnnnnnnnnnnnnnnnnnnnnnnnnnnnnnnnnnnnnnnnnnnnnnnnnnnnnnnnnnnnnnnnnnnnnnnttaacgccctaaggaagctgcaaatccagctgagagactgtgctttctgttcactttccccctcgttcttctcccctttctcctttctagtgatgattagagagaagctgacacttcccctctgacattctgccatgtggtcagacaggacctggacctattaaatycccattcaaacttcacagctcatttctcctgttgggtacctgcagagaagactaaaaggacatctcagaaaaattattttatgaagctactactcagttttgaagcaggctattatgcagatggtcaattttgaaatgatagtgtgatttttatggccaagaaatggaaagcagtccaggacaaaggatgagacctccaccatcttcgcttaatcaaaagtggagaattctttcacaatccctggcctcttcgttgctatgaatcatcacagctgtcactggtgttctggaaaagggaa

SEQ ID NO: 90870 - DNA, 599 bp, Chicken  19866894399427_1
  misc_feature (1)..(14): n is any nucleotide
nnnnnnnnnnnnnncttgaacacttccagcttccacataattactgtgggctacagttatgttcccctgaagccatctctgctccaggctgaacaagaccatatctctcacccactcctcatgatgcaagtgttccagttcccatcatcctggtggccctgcctcattttatcagtacctttgctgtactggggtcccaaaactggacacagtgtctagatgtgatcacgcaacatttttttactattcaattttctgtctgaccagactgcagtagcccaacctgatataagagtattyggggagacagggatgaaacaacctttaaaaaaaacaaacaaacatacaaacaaacaaacaccttgaaataacgatcctacaatctgtaaaacctcatcacttttttcatttgtcttgaaatgtaattcaaggacattgacttcatgatctttccagggaccaaagtaagtctgagcaacctgttgtttcatggattattctttagacttcctttgaaaatacatacaatatttgcgtttatcacctctgtaaatgtccttgacctttcaaacctgatactggtccctttctgggacatc

SEQ ID NO: 90871 - DNA, 600 bp, Chicken  19866894399428_1
gtctcctgataaacttttaacatgtataaatctcccaaaagcctacagcattactcagagacgttagtcatactttcaagagcggtgaccttttgattattgttaccagacaaaatgacagaatctgttactactgtctgaggtgatacttgttgtgaattttgcagtacagttgcagtaaactttaggagatctgtttgttttagcatagccctttgcagtctaataatttgaggctaagagaaacaggaatttcattaaatcactgaatttattatagggcagaaggcaatagatagmaatggaactgttcaaaattgtctgataccatttagaaycttgaatccaaaaagatcgcttcagattattacgttctgccagctgattaagagggctggtacacatttccttgacttctgaatatgagtgaatgagaaaactttagtgtgcgcacactgtatgtagtagcaagaaaactgctggtattcctctcatcttacagatgctaaattgaagactctttaacttaatttaaaaaaacaaaccaaccaacagcaaaacccaacaatcgacttaaaaccaccatcactaaaagaatat

SEQ ID NO: 90872 - DNA, 600 bp, Chicken  19866894399428_2
aagcctacagcattactcagagacgttagtcatactttcaagagcggtgaccttttgattattgttaccagacaaaatgacagaatctgttactactgtctgaggtgatacttgttgtgaattttgcagtacagttgcagtaaactttaggagatctgtttgttttagcatagccctttgcagtctaataatttgaggctaagagaaacaggaatttcattaaatcactgaatttattatagggcagaaggcaatagatagmaatggaactgttcaaaattgtctgataccatttagaaycttgaatccaaaaagatcgcttcagattattacgttctgccagctgattaagagggctggtacacatttccttgacttctgaatatgagtgaatgagaaaactttagtgtgcgcacactgtatgtagtagcaagaaaactgctggtattcctctcatcttacagatgctaaattgaagactctttaacttaatttaaaaaaacaaaccaaccaacagcaaaacccaacaatcgacttaaaaccaccatcactaaaagaatatccataatctatagattgggtgaaaattgatcatagcag

SEQ ID NO: 90873 - DNA, 599 bp, Chicken  19866894399429_1
  misc_feature (1)..(229): n is any nucleotide
nnnnnnnnnnnnnnnnnnnnnnnnnnnnnnnnnnnnnnnnnnnnnnnnnnnnnnnnnnnnnnnnnnnnnnnnnnnnnnnnnnnnnnnnnnnnnnnnnnnnnnnnnnnnnnnnnnnnnnnnnnnnnnnnnnnnnnnnnnnnnnnnnnnnnnnnnnnnnnnnnnnnnnnnnnnnnnnnnnnnnnnnnnnnnnnnnnnnnnnnnnnnnnnnnnnnnnnnnnnnnnnnnnnnncacaaagaaatgctcacgcagaagggtggccttcaggatatataatatcccgaatattcaaataacatcgyttttttattactgaacgtcagtaacttttggaataatctggatgcgatggaattaaaaagttacaaccaygtgtagtaaaggcagaaaaatgctgcaggtccctcttctgtgcaacgtatctccagcagtcctcccagatacacctcacacacatctctgcatgacggaatgaagaaaagggatctctttaggctgcgtacgaaatagctactggcagaattcacagcgacagggctgcttaggaaagccaagttgtgctttgctggtgcagtgcagtacactgaaacaattttcgacc

SEQ ID NO: 90874 - DNA, 599 bp, Chicken  19866894399429_2
  misc_feature (1)..(159): n is any nucleotide
nnnnnnnnnnnnnnnnnnnnnnnnnnnnnnnnnnnnnnnnnnnnnnnnnnnnnnnnnnnnnnnnnnnnnnnnnnnnnnnnnnnnnnnnnnnnnnnnnnnnnnnnnnnnnnnnnnnnnnnnnnnnnnnnnnnnnnnnnnnnnnnnnnnnnnnnnnnnnnncacaaagaaatgctcacgcagaagggtggccttcaggatatataatatcccgaatattcaaataacatcgyttttttattactgaacgtcagtaacttttggaataatctggatgcgatggaattaaaaagttacaaccaygtgtagtaaaggcagaaaaatgctgcaggtccctcttctgtgcaacgtatctccagcagtcctcccagatacacctcacacacatctctgcatgacggaatgaagaaaagggatctctttaggctgcgtacgaaatagctactggcagaattcacagcgacagggctgcttaggaaagccaagttgtgctttgctggtgcagtgcagtacactgaaacaattttcgaccatttctcctcctaaaatgaatgatctaagagggcagagtatttaatagcaggtagtacatctactgmacg

SEQ ID NO: 90875 - DNA, 600 bp, Chicken  19866894399429_3
ccaygtgtagtaaaggcagaaaaatgctgcaggtccctcttctgtgcaacgtatctccagcagtcctcccagatacacctcacacacatctctgcatgacggaatgaagaaaagggatctctttaggctgcgtacgaaatagctactggcagaattcacagcgacagggctgcttaggaaagccaagttgtgctttgctggtgcagtgcagtacactgaaacaattttcgaccatttctcctcctaaaatgaatgatctaagagggcagagtatttaatagcaggtagtacatctactgmacggaggttcggcaaaaggaaaggacaaggagctgtatttgggaagcaatctttatactgggaatgcgtatctctattctgattctggacaatgccctaagaatgtccgaggtcccacattcatcctgataggaacctgctttagtttgatggggggaggggggggggtaaagaagaagtgatcatttcctaaattccaaggagatgctgcatgccagtgctgaatgaaaggctctttttgtyttccttacagaaatactttccaagatcaagcaacacaaaagtgctgtgtgctgtgtt

SEQ ID NO: 90876 - DNA, 600 bp, Chicken  19866894399429_4
ctaaaatgaatgatctaagagggcagagtatttaatagcaggtagtacatctactgmacggaggttcggcaaaaggaaaggacaaggagctgtatttgggaagcaatctttatactgggaatgcgtatctctattctgattctggacaatgccctaagaatgtccgaggtcccacattcatcctgataggaacctgctttagtttgatggggggaggggggggggtaaagaagaagtgatcatttcctaaattccaaggagatgctgcatgccagtgctgaatgaaaggctctttttgtyttccttacagaaatactttccaagatcaagcaacacaaaagtgctgtgtgctgtgttttaaagtgaaagcaatagtygtgtatctgtgagaaaaagtgcaaatgcaaggtggaaaaaaaatcaacgcagacactcattcagtattaaaatagatatatttttatgtgtccttgaaatacaaaaatcacttcagatgttagattactaaaataatgaagtttcaattttcttgcttaggaattcacaacgtatcttattcgacctaagagccttaatgatggatattaactattaaggtaa

SEQ ID NO: 90877 - DNA, 600 bp, Chicken  19866894399429_5
aaggacaaggagctgtatttgggaagcaatctttatactgggaatgcgtatctctattctgattctggacaatgccctaagaatgtccgaggtcccacattcatcctgataggaacctgctttagtttgatggggggaggggggggggtaaagaagaagtgatcatttcctaaattccaaggagatgctgcatgccagtgctgaatgaaaggctctttttgtyttccttacagaaatactttccaagatcaagcaacacaaaagtgctgtgtgctgtgttttaaagtgaaagcaatagtygtgtatctgtgagaaaaagtgcaaatgcaaggtggaaaaaaaatcaacgcagacactcattcagtattaaaatagatatatttttatgtgtccttgaaatacaaaaatcacttcagatgttagattactaaaataatgaagtttcaattttcttgcttaggaattcacaacgtatcttattcgacctaagagccttaatgatggatattaactattaaggtaaagcctaaccattgtccacccatatacaaaacgtcagtttttgcaattaagagcaattcacaatcttctgaatgacag

SEQ ID NO: 90878 - DNA, 600 bp, Chicken  19866894399433_1
atggaaacgatgcagacagagtcactgcttgtgaagagcactgcaggggaactgtgaggtctgcgctgcgccgtgcagctcggtgcgcctctgaccagagctgggagtcctttgtttgctcccagacactaaataatggtagccataaagagaaaaacagagtgaggtgggaagaataggctgctgcactgcctacaagcgatgcagtgcaggactgtctgtgtagctgagtttggcaaagtcctctggttcctaagcatcctaagtgttcctactgtgctccccagccctagctgcccwcggctctcttacaccttccagaagcactccctatgttgctgacttgaattccccttttcttaaaccaatcctatttctttggtggggtttctctgctttgctctgctgggattgttcagggaggggacagtgcgagtgttggcacaatggttacatattggctgtaggtaattaagtaactgtaatccctcttagaaaagagctttacatcaactttagaggaggagaacattgctacagtttcattgtcagagtcattgttactgagttgtctctacgggaacataattagaattaaaa

SEQ ID NO: 90879 - DNA, 600 bp, Chicken  19866894399434_1
ccttgtttccagcttcccttaactacagttgggccctcactgttatgtgcacctcggaaaaagggagagcagccccggccgctcttggctgctgtgggagcgcactgcagaggcggctcctgaagcagagctgctcactgctctgcctcacagccctcatcagcactgctccccggcatgctcattcctgtgcatacttcaccaggagctgaggtacagcacggggacgtgtctcatgtacgtccctttcgtgttgcgcactgtcgaaagttgtgtgttgagatgtgcagggtttcgtgkcttcccgtcctgctggagtcgcacagccgcgctgtgggtgatgctgtgtcaggtgaggacggggcgctgagccctgcagtgctgctggagccgccccaygtcccaccagccccagctggcacccggccccaccgtggtgtccccacgtggtttggggtcccgagatgtctcagagggactgtgggaagccggggctcagtgcaggcttacagcgtttccacgagttgcactgggagatgtaggcgttttcagtgaacgcttctgaggcaattaatagtaagatactttcagtgcggtcgt

SEQ ID NO: 90880 - DNA, 600 bp, Chicken  19866894399434_2
gcgcactgcagaggcggctcctgaagcagagctgctcactgctctgcctcacagccctcatcagcactgctccccggcatgctcattcctgtgcatacttcaccaggagctgaggtacagcacggggacgtgtctcatgtacgtccctttcgtgttgcgcactgtcgaaagttgtgtgttgagatgtgcagggtttcgtgkcttcccgtcctgctggagtcgcacagccgcgctgtgggtgatgctgtgtcaggtgaggacggggcgctgagccctgcagtgctgctggagccgccccaygtcccaccagccccagctggcacccggccccaccgtggtgtccccacgtggtttggggtcccgagatgtctcagagggactgtgggaagccggggctcagtgcaggcttacagcgtttccacgagttgcactgggagatgtaggcgttttcagtgaacgcttctgaggcaattaatagtaagatactttcagtgcggtcgtgctaattagctctaagcatatttccatccttcgtgtctctgctgccgtgtgaagtgctggccgtcagcccacaggtcagggctgggtgctttccgagca

SEQ ID NO: 90881 - DNA, 599 bp, Chicken  19866894399437_1
  misc_feature (1)..(117): n is any nucleotide
nnnnnnnnnnnnnnnnnnnnnnnnnnnnnnnnnnnnnnnnnnnnnnnnnnnnnnnnnnnnnnnnnnnnnnnnnnnnnnnnnnnnnnnnnnnnnnnnnnnnnnnnnnnnnnnnnnnnntgctagctgtagttactggagaaaattttagagattagtatatacttacaggttcccctctgagtgatgcagagatgtgctgtcatactgcagtctgagagtaaacttttggtcttcctgagttaccttttccttttgtaactaaattttgcagtgtaagggcttactgacccacagctctgrtatgaaagactgggtggcagaaagaacaggaatatcttttcctcatctgcgcagcgaagactttctttccatgtgcaggttttaycagttttctgtggtaccagattgaattcctgcagatggcttcacacagagctgtccttgaaaatcaccaaaaaatttcagccagtggatgttttgactgtcagacttcccacaagcacagcaccaaattaaaagcacaggaacttctagtgaaattccgcatcctgttagttacagtcgaatgcagtagatgtgtgtagttaccctgtgttcaa

SEQ ID NO: 90882 - DNA, 599 bp, Chicken  19866894399437_2
  misc_feature (1)..(32): n is any nucleotide
nnnnnnnnnnnnnnnnnnnnnnnnnnnnnnnntgctagctgtagttactggagaaaattttagagattagtatatacttacaggttcccctctgagtgatgcagagatgtgctgtcatactgcagtctgagagtaaacttttggtcttcctgagttaccttttccttttgtaactaaattttgcagtgtaagggcttactgacccacagctctgrtatgaaagactgggtggcagaaagaacaggaatatcttttcctcatctgcgcagcgaagactttctttccatgtgcaggttttaycagttttctgtggtaccagattgaattcctgcagatggcttcacacagagctgtccttgaaaatcaccaaaaaatttcagccagtggatgttttgactgtcagacttcccacaagcacagcaccaaattaaaagcacaggaacttctagtgaaattccgcatcctgttagttacagtcgaatgcagtagatgtgtgtagttaccctgtgttcaaaccatgtagccaaggtagcatctctacctccacacttccacgatggaagtccctgcctggtgagtccagccagagatattcatac

SEQ ID NO: 90883 - DNA, 599 bp, Chicken  19866894399442_1
  misc_feature (1)..(170): n is any nucleotide
nnnnnnnnnnnnnnnnnnnnnnnnnnnnnnnnnnnnnnnnnnnnnnnnnnnnnnnnnnnnnnnnnnnnnnnnnnnnnnnnnnnnnnnnnnnnnnnnnnnnnnnnnnnnnnnnnnnnnnnnnnnnnnnnnnnnnnnnnnnnnnnnnnnnnnnnnnnnnnnnnnnnnnnnnntgactctggttagaagagagagctctgtgaggagcctcggagatggcctttgcttttcagttgccttgtggagaggggacaggtttttccctgtctcccaggcatgctgtgccacagggagcagaggtgrggctcggggtgatatgcagaccctcaataagcatctccttggtactattcttgttttatgagaaggagatatatctgaagaaccgtgactacactgatggagacagacaatcccacagaggaatttaaagcgaagagtttttttgttagctctccagtggagtgaagaataactgcccctggggaattcaagtccctttcctcttctaaaatggggttcttgtttgtttgctttggttctttgttgtattaaaactaatccaagagaaagctgcggtgaaaaattgaggcaggctccag

SEQ ID NO: 90884 - DNA, 600 bp, Chicken  19866894399446_1
gggcactgctacatagaagaccaccccatagtaaagctcagggcagtcagacatcagctgatgagataaggaaagtgtttcccaggatatgggagagccaggcactaccaggcacatgatggactttgccctgttgtagtgcctcatattcacaaaaaaagcatatccctccaaacaacactcacaacaacccaagaggagggtgggataggtgcagcctgatagcagtggagggaaggaagaggtcacaggggtgaagcactgaggtggggttggataattttggggaaggaaaagcaraawtgtttggtgccattcaccagcattacttgcacaaactgggttttgcccaactagaaagtgttaaaaactttgcagggaaacagagcactcaggagagagccatggtgaccccacagaacctttctgactgccttaaggcatgaatcaattaaagcaatcacggagcaaaggttaatcagtagcaagtacatcttaagaaataggcagtcatttaaaaagcaattgctcttgccaattctgccaactctatcccactcccccctctgcttttctaaagtgtcttttatttctcaaact

SEQ ID NO: 90885 - DNA, 600 bp, Chicken  19866894399446_2
cactgctacatagaagaccaccccatagtaaagctcagggcagtcagacatcagctgatgagataaggaaagtgtttcccaggatatgggagagccaggcactaccaggcacatgatggactttgccctgttgtagtgcctcatattcacaaaaaaagcatatccctccaaacaacactcacaacaacccaagaggagggtgggataggtgcagcctgatagcagtggagggaaggaagaggtcacaggggtgaagcactgaggtggggttggataattttggggaaggaaaagcaraawtgtttggtgccattcaccagcattacttgcacaaactgggttttgcccaactagaaagtgttaaaaactttgcagggaaacagagcactcaggagagagccatggtgaccccacagaacctttctgactgccttaaggcatgaatcaattaaagcaatcacggagcaaaggttaatcagtagcaagtacatcttaagaaataggcagtcatttaaaaagcaattgctcttgccaattctgccaactctatcccactcccccctctgcttttctaaagtgtcttttatttctcaaactccg

SEQ ID NO: 90886 - DNA, 600 bp, Chicken  19866894399446_3
tgttaaaaactttgcagggaaacagagcactcaggagagagccatggtgaccccacagaacctttctgactgccttaaggcatgaatcaattaaagcaatcacggagcaaaggttaatcagtagcaagtacatcttaagaaataggcagtcatttaaaaagcaattgctcttgccaattctgccaactctatcccactcccccctctgcttttctaaagtgtcttttatttctcaaactccggaggctttccaaaacaagtccaggattaggagcaggaagggaccagccagaatcatgytccaatcctgactcaaaacatttctacacaagcaatgagactccagcctcatgcatgcagggatgtccttccttcctattgcacccattagtacagatgacatcaaagccacccccgtgggcatattgcaccattgtcacagctgacttcctgcccctgtcactttgccatgcaagcactggcttaagaactgagctggtgtgctatggtggctccaagggctgtctcttgccgctgtggatgacaagtccaaggacaaggtttctcatctctcttcctacaccatcatatgtactacct

SEQ ID NO: 90887 - DNA, 526 bp, Chicken  19866894399446_4
tcctattgcacccattagtacagatgacatcaaagccacccccgtgggcatattgcaccattgtcacagctgacttcctgcccctgtcactttgccatgcaagcactggcttaagaactgagctggtgtgctatggtggctccaagggctgtctcttgccgctgtggatgacaagtccaaggacaaggtttctcatctctcttcctacaccatcatatgtactacctagaccacaaccacccaagcgccagaaaggatgtgagctgggaggatggagaatccatccagacccttagagcyrgtccttgtcatgcttaacacagcacctgtggacagcacaaaggcctgtagggcaattaggggcaggagagaaggactggtatgaggccagcatctgggtaggataaggccatagaatcatagaatcatgaaggttggaatgaccgataagatcatccagtccaaccatcaactcatgcttgtgaccactctagatcatgtcactcagtgtgacatccaccctttt

SEQ ID NO: 90888 - DNA, 525 bp, Chicken  19866894399446_5
cctattgcacccattagtacagatgacatcaaagccacccccgtgggcatattgcaccattgtcacagctgacttcctgcccctgtcactttgccatgcaagcactggcttaagaactgagctggtgtgctatggtggctccaagggctgtctcttgccgctgtggatgacaagtccaaggacaaggtttctcatctctcttcctacaccatcatatgtactacctagaccacaaccacccaagcgccagaaaggatgtgagctgggaggatggagaatccatccagacccttagagcyrgtccttgtcatgcttaacacagcacctgtggacagcacaaaggcctgtagggcaattaggggcaggagagaaggactggtatgaggccagcatctgggtaggataaggccatagaatcatagaatcatgaaggttggaatgaccgataagatcatccagtccaaccatcaactcatgcttgtgaccactctagatcatgtcactcagtgtgacatccaccctttt

SEQ ID NO: 90889 - DNA, 599 bp, Chicken  19866894399452_1
  misc_feature (1)..(124): n is any nucleotide
nnnnnnnnnnnnnnnnnnnnnnnnnnnnnnnnnnnnnnnnnnnnnnnnnnnnnnnnnnnnnnnnnnnnnnnnnnnnnnnnnnnnnnnnnnnnnnnnnnnnnnnnnnnnnnnnnnnnnnnnnnnntaggtttttggtgctttgccagcatcaactatgttatgtaaagaaatatcattcaagatgggtaggccacaatactgcctaagttggctagcagtggtctcagaaaagaaacaacacagaggtctctcccttgacagtgagtgttcatttaacttctgtatggagaaagaggaacygaaaatcaaggcagacagccctccagctagattgctaagattctatgaacaggactagaatggctctatctatagtacagattattcacatcctgtagtgagctataaagtccagccaagaaacccacctgctttcagggggtttgagacattagtaccagagaagacagtttgccacagacctttttcccccatctcatcagagggatacagcaycatctacctctgctgctggcaatcactacctggaggctgagaaaagagatggttgaaaaggagggrctcattctcctcccagt

SEQ ID NO: 90890 - DNA, 600 bp, Chicken  19866894399452_2
agtggtctcagaaaagaaacaacacagaggtctctcccttgacagtgagtgttcatttaacttctgtatggagaaagaggaacygaaaatcaaggcagacagccctccagctagattgctaagattctatgaacaggactagaatggctctatctatagtacagattattcacatcctgtagtgagctataaagtccagccaagaaacccacctgctttcagggggtttgagacattagtaccagagaagacagtttgccacagacctttttcccccatctcatcagagggatacagcaycatctacctctgctgctggcaatcactacctggaggctgagaaaagagatggttgaaaaggagggrctcattctcctcccagtaattggagggttacggaggagaaaggtccagttctagcaggatttgaaaagtcaaaatggaattaaacagaaataataaccttagaaatttataagaatagactgcaatcagaagaatgagyttctttatttttactcggaaaacgtcatgttgacttgattacccataggcacatataacaatgtaaaaatcaagcacttagcttcatttattact

SEQ ID NO: 90891 - DNA, 600 bp, Chicken  19866894399452_3
tatggagaaagaggaacygaaaatcaaggcagacagccctccagctagattgctaagattctatgaacaggactagaatggctctatctatagtacagattattcacatcctgtagtgagctataaagtccagccaagaaacccacctgctttcagggggtttgagacattagtaccagagaagacagtttgccacagacctttttcccccatctcatcagagggatacagcaycatctacctctgctgctggcaatcactacctggaggctgagaaaagagatggttgaaaaggagggrctcattctcctcccagtaattggagggttacggaggagaaaggtccagttctagcaggatttgaaaagtcaaaatggaattaaacagaaataataaccttagaaatttataagaatagactgcaatcagaagaatgagyttctttatttttactcggaaaacgtcatgttgacttgattacccataggcacatataacaatgtaaaaatcaagcacttagcttcatttattacttctttggactaatataaggtagttctgtgccactgcagggcacctactgtacttcagaacccatat

SEQ ID NO: 90892 - DNA, 600 bp, Chicken  19866894399452_4
cygaaaatcaaggcagacagccctccagctagattgctaagattctatgaacaggactagaatggctctatctatagtacagattattcacatcctgtagtgagctataaagtccagccaagaaacccacctgctttcagggggtttgagacattagtaccagagaagacagtttgccacagacctttttcccccatctcatcagagggatacagcaycatctacctctgctgctggcaatcactacctggaggctgagaaaagagatggttgaaaaggagggrctcattctcctcccartaattggagggttacggaggagaaaggtccagttctagcaggatttgaaaagtcaaaatggaattaaacagaaataataaccttagaaatttataagaatagactgcaatcagaagaatgagyttctttatttttactcggaaaacgtcatgttgacttgattacccataggcacatataacaatgtaaaaatcaagcacttagcttcatttattacttctttggactaatataaggtagttctgtgccactgcagggcacctactgtacttcagaacccatattaagttcatctatgtt

SEQ ID NO: 90893 - DNA, 600 bp, Chicken  19866894399452_5
aacccacctgctttcagggggtttgagacattagtaccagagaagacagtttgccacagacctttttcccccatctcatcagagggatacagcaycatctacctctgctgctggcaatcactacctggaggctgagaaaagagatggttgaaaaggagggrctcattctcctcccagtaattggagggttacggaggagaaaggtccagttctagcaggatttgaaaagtcaaaatggaattaaacagaaataataaccttagaaatttataagaatagactgcaatcagaagaatgagyttctttatttttactcggaaaacgtcatgttgacttgattacccataggcacatataacaatgtaaaaatcaagcacttagcttcatttattacttctttggactaatataaggtagttctgtgccactgcagggcacctactgtacttcagaacccatattaagttcatctatgttatgcaaattttcagaagttttggatggttgctcacttccagacatctttctgatgcttctgattcagtgataggcaatgaatagagccctgtggtctttagtctaaagtcggtgaaataaagc

SEQ ID NO: 90894 - DNA, 600 bp, Chicken  19866894399456_1
cggtgtttctaccccaacgtgtgatgatttgcgttggcattttttccctcccttcagatgaataatacaacttcttttaaaggagcaaacctgggtatgacagcatgccatccaaaaacatgaagaaaggcaagtgaggaattttccatcaaaaaccaactttggtccaaaatccgagagtgcaataaaaccaacacaggctgcgcactgcagtgacgctgggatgaggacaacgtccctggcctcagctggaggcttggatctgccacagagcccaaagccacaggagctcgctgggamcggcggctgctcagctcctggctggggcatcctcaggagacagaggcagctgttcctctgttctgcaccaggggaaataaagaataggaacggtttgatttttcccaggcgttcttttccctttctctgcctcccckcagattttccttttgggggagaagggaaattactcatttctgctgccagaccaaacttctggaaatgtcaggatttcttgcagaatagatgtcctgtgtctgaaccatttctcggcagagacatttctcaccgaggcatctgcagcatgctcagtttccctag

SEQ ID NO: 90895 - DNA, 600 bp, Chicken  19866894399456_2
ggaattttccatcaaaaaccaactttggtccaaaatccgagagtgcaataaaaccaacacaggctgcgcactgcagtgacgctgggatgaggacaacgtccctggcctcagctggaggcttggatctgccacagagcccaaagccacaggagctcgctgggamcggcggctgctcagctcctggctggggcatcctcaggagacagaggcagctgttcctctgttctgcaccaggggaaataaagaataggaacggtttgatttttcccaggcgttcttttccctttctctgcctcccckcagattttccttttgggggagaagggaaattactcatttctgctgccagaccaaacttctggaaatgtcaggatttcttgcagaatagatgtcctgtgtctgaaccatttctcggcagagacatttctcaccgaggcatctgcagcatgctcagtttccctagttacgtgccatatgcatccaggtagaaagggcaagggtatgacacagctaacacagcattttagagcatctgagtcctgccttggcttttagagtagcacagagactgtgcctacagccaggaaggcagcgacaagg

SEQ ID NO: 90896 - DNA, 600 bp, Chicken  19866894399461_1
aacagcaactgaaaaagaagcttaacaggatattgagaagaggagtgatgacagagacctgtcttcggtactttatacctgggaaaagctgtctggataggtgctcaccctgcagcactcacagaacatgactcttctcagttagaggatcactttctttgctagcagcaaagagagcctggcataagggatcagtctgcaagtctcctgctgcatcagctatcaggtcactctaaatcctattagccaaaagtgtctgttttagtcaggtatgctaacttcacttaaatgccagacagygttaaggaaacacaacacagcagtaagcaattctacaaaccaaacccacagatcagtctccagttgtgataggtaacagctggcaagtctcaagaaaaacagttcatagagagcagtcactcactggcatctttgtgaacagccacagtggcagaactaatcaaagcctggggaactccaggatttcctacaggagagcaaccgagtgcagagaaggctgcaacctcagtgcagccagagagcttgatgtggcgcctagatgaagggccatataagagaagactccacctcagatttgaa

SEQ ID NO: 90897 - DNA, 600 bp, Chicken  19866894399462_1
ttaaacagactggcttgtgatgcagccagcaaggtatttacctttggcatcactggagatgaactcaccaatgtaagcaaatctcaaaataggggtcttgacttcaaaaaaaagctgaaatcttgcagaaaagatcataccgtccaacatttccaggtcgaagcacttatacctttccatcctctctgcctgtgaatgggtatgacagtttctgttggctgtggacaatgttctacaggccagttgaggcaccatcccctaaatatttcctcagagcacacccagctgtatgggaagtargcagaagataaaccacgggaaaagagcagaggaccagagcattgctcaaagcctttctaatgcaatggtaggcattactgattagctgaaaggacaccggtgccctttcttttctaacagttctgtggtgggaatgtgattctgcgcactgcgtgaaaggtaaaaatacmaaggaaaaagaagaatggcttcatttagcccaaaagcatctgagaaagaaatgataccaagaaaaayaaaacaaaggcttaaggcaaaggactacttagctctaagtgtgacagcttatatgtaattctc

SEQ ID NO: 90898 - DNA, 600 bp, Chicken  19866894399462_2
acctttccatcctctctgcctgtgaatgggtatgacagtttctgttggctgtggacaatgttctacaggccagttgaggcaccatcccctaaatatttcctcagagcacacccagctgtatgggaagtargcagaagataaaccacgggaaaagagcagaggaccagagcattgctcaaagcctttctaatgcaatggtaggcattactgattagctgaaaggacaccggtgccctttcttttctaacagttctgtggtgggaatgtgattctgcgcactgcgtgaaaggtaaaaatacmaaggaaaaagaagaatggcttcatttagcccaaaagcatctgagaaagaaatgataccaagaaaaayaaaacaaaggcttaaggcaaaggactacttagctctaagtgtgacagcttatatgtaattctcacccagaaaatgcaagatgctgcatcctatgtgctttcgcatcaacatgctaaacagttgaagattagacccctgtaaacgtgcttgcttgtacatatgcatgcctccagtgaaaagagctactgatttgtgaggccacttccccctctgattttctgaatctctgctga

SEQ ID NO: 90899 - DNA, 600 bp, Chicken  19866894399462_3
ggccagttgaggcaccatcccctaaatatttcctcagagcacacccagctgtatgggaagtargcagaagataaaccacgggaaaagagcagaggaccagagcattgctcaaagcctttctaatgcaatggtaggcattactgattagctgaaaggacaccggtgccctttcttttctaacagttctgtggtgggaatgtgattctgcgcactgcgtgaaaggtaaaaatacmaaggaaaaagaagaatggcttcatttagcccaaaagcatctgagaaagaaatgataccaagaaaaayaaaacaaaggcttaaggcaaaggactacttagctctaagtgtgacagcttatatgtaattctcacccagaaaatgcaagatgctgcatcctatgtgctttcgcatcaacatgctaaacagttgaagattagacccctgtaaacgtgcttgcttgtacatatgcatgcctccagtgaaaagagctactgatttgtgaggccacttccccctctgattttctgaatctctgctgatttccccttgtggcgtcctcagatggtgtccttacagaaatggaagcccaatgctccccaggaccct

SEQ ID NO: 90900 - DNA, 407 bp, Chicken  19866894399465_1
aaccacagggtgtcccaggctggaagaggcccacgaggaccgtggagcgcagctcccggctccgcacagcaccgccccaccgtgtgagcgtaaataaagaagcgggaacgtaaccgaagtccttcgaataaaagaaaccgaacgggtttgctccccgaaccgacccaagggcaggagcgaatttgtctctaaagcttctaaactcaaaacggggtccgggagcgctgcaggggcggcagcgcgctgctgggatcactgaagagcacccgcggagctgcccgtgcatcagcggcactcggkcagtgcatatatacacgctgcgtgacaaacgcgtattcaatacgaaaataaaatgaaataaaataaatgtacagaggagatctcgctttgccccgaaggagatccgg

SEQ ID NO: 90901 - DNA, 600 bp, Chicken  19866894399467_1
aatgcaattttctgggcggccaaagggtgccaagcgcgctggcccaggcagattgcagatttctgcatggaaaacagcaaaaaaacacaaatgcgttgggcgggggccgggcctgcagctcctcctggcgctgcacagaccttgggatccttgcagcactgctggggccccacagcccgcaggaacgcggccatatttaggcatgttctccagccccttctcccagccctgcctgctgagctgctgccggggaggagagcggggctgcaggctgaagccaaagtaaaagcttactgcccygggtgcggtgcagagggggacgcacgaggctgctgccaaactgcagtggagcccctgactgtgggaggggaaagcttggaagmcatttgmgtgcatccttcagcaggtagggtgcccaaaaaaggcggctgcagtgcccaatgatggccacgtcactgcacaaagccagtgtcgctgtagggtcatcacccagactccctgacactgatttttagaggcatagggtatcctttctcccaggttccccttctccttctcattgggtgtcccagctgtacccctgcctttcttttgcatctg

SEQ ID NO: 90902 - DNA, 600 bp, Chicken  19866894399467_10
tacaggatgtttccctggatacagcaggagcaaagagcaggaagcgtgtttctttaatcacagctctaagagctgtttcctttccccacatcaagacatcacttcacccaaaagtgaattcaggggaagttcrggttggatattagggaaaatttcttccctcagagcggtgctgcagtggcacaggctgcacagggaggtggtggggtcaccgttcctggaggtgttccagagccgtgtggatgtggcactgaggacgtggtcagtgggcacggtgggggtgggctggtggttggaccrggtsatcttagaggtcttttccaactttcaggattccatgaaaagtagggctcagcctgcttcaggcgcagctgcacagcgtgccctctggctgtgttgcttggcactgtgctgcttccaggcacacctccccgctgggcacttccaccccatcaactgtctgcagagccccacttcaggccagccttaagtcaggtatgggagttgtgtctccctccctaagaacagggtttaggagagcgatccacttatcctgagtgatgcaccctgtcagaacaccctcttgagtgaggtttccat

SEQ ID NO: 90903 - DNA, 600 bp, Chicken  19866894399467_11
ggatgtttccctggatacagcaggagcaaagagcaggaagcgtgtttctttaatcacagctctaagagctgtttcctttccccacatcaagacatcacttcacccaaaagtgaattcaggggaagttcrggttggatattagggaaaatttcttccctcagagcggtgctgcagtggcacaggctgcacagggaggtggtggggtcaccgttcctggaggtgttccagagccgtgtggatgtggcactgaggacgtggtcagtgggcacggtgggggtgggctggtggttggaccrggtsatcttagaggtcttttccaactttcaggattccatgaaaagtagggctcagcctgcttcaggcgcagctgcacagcgtgccctctggctgtgttgcttggcactgtgctgcttccaggcacacctccccgctgggcacttccaccccatcaactgtctgcagagccccacttcaggccagccttaagtcaggtatgggagttgtgtctccctccctaagaacagggtttaggagagcgatccacttatcctgagtgatgcaccctgtcagaacaccctcttgagtgaggtttccatcaaa

SEQ ID NO: 90904 - DNA, 600 bp, Chicken  19866894399467_2
aacacaaatgcgttgggcgggggccgggcctgcagctcctcctggcgctgcacagaccttgggatccttgcagcactgctggggccccacagcccgcaggaacgcggccatatttaggcatgttctccagccccttctcccagccctgcctgctgagctgctgccggggaggagagcggggctgcaggctgaagccaaagtaaaagcttactgcccygggtgcggtgcagagggggacgcacgaggctgctgccaaactgcagtggagcccctgactgtgggaggggaaagcttggaagmcatttgmgtgcatccttcagcaggtagggtgcccaaaaaaggcggctgcagtgcccaatgatggccacgtcactgcacaaagccagtgtcgctgtagggtcatcacccagactccctgacactgatttttagaggcatagggtatcctttctcccaggttccccttctccttctcattgggtgtcccagctgtacccctgcctttcttttgcatctgaccgcagcgctcggcttgcgctgtttgctcagcttaatcacaatacctgcacaatggactttaccctggataatacccacaca

SEQ ID NO: 90905 - DNA, 600 bp, Chicken  19866894399467_3
atgcgttgggcgggggccgggcctgcagctcctcctggcgctgcacagaccttgggatccttgcagcactgctggggccccacagcccgcaggaacgcggccatatttaggcatgttctccagccccttctcccagccctgcctgctgagctgctgccggggaggagagcggggctgcaggctgaagccaaagtaaaagcttactgcccygggtgcggtgcagagggggacgcacgaggctgctgccaaactgcagtggagcccctgactgtgggaggggaaagcttggaagmcatttgmgtgcatccttcagcaggtagggtgcccaaaaaaggcggctgcagtgcccaatgatggccacgtcactgcacaaagccagtgtcgctgtagggtcatcacccagactccctgacactgatttttagaggcatagggtatcctttctcccaggttccccttctccttctcattgggtgtcccagctgtacccctgcctttcttttgcatctgaccgcagcgctcggcttgcgctgtttgctcagcttaatcacaatacctgcacaatggactttaccctggataatacccacacagtgccaa

SEQ ID NO: 90906 - DNA, 600 bp, Chicken  19866894399467_4
ccagtgtcgctgtagggtcatcacccagactccctgacactgatttttagaggcatagggtatcctttctcccaggttccccttctccttctcattgggtgtcccagctgtacccctgcctttcttttgcatctgaccgcagcgctcggcttgcgctgtttgctcagcttaatcacaatacctgcacaatggactttaccctggataatacccacacagtgccaacctacatccgtgcagctctacacacacacgtgtaaggggccactcagctgcaaagcaacttggcagaaaggtccyggggtgctggtggatgccacgctgaacatgagccagcaatgtgctggaacagaagcccaggtggatgagtgctctgggaagcttctcagcctgccatgcaggcgggagtaaccttctgcagggctctccttcacggtatgaggcacatggccagaagaaggtgcaactgctctacctcycccttacaaacrctcagatttagaatagtagaatgtcttggcttgggagggccctaaaagatgaccccgttctaactcctctgctgtgggcaggttgggtctggtctggcatcacgaacgt

SEQ ID NO: 90907 - DNA, 600 bp, Chicken  19866894399467_5
acctgcacaatggactttaccctggataatacccacacagtgccaacctacatccgtgcagctctacacacacacgtgtaaggggccactcagctgcaaagcaacttggcagaaaggtccyggggtgctggtggatgccacgctgaacatgagccagcaatgtgctggaacagaagcccaggtggatgagtgctctgggaagcttctcagcctgccatgcaggcgggagtaaccttctgcagggctctccttcacggtatgaggcacatggccagaagaaggtgcaactgctctacctcycccttacaaacrctcagatttagaatagtagaatgtcttggcttgggagggccctaaaagatgaccccgttctaactcctctgctgtgggcaggttgggtctggtctggcatcacgaacgtggccctgtgcccctctcagccccctgcactgcatggggaagtgctgaggaggaactgaaagcagcttcggacacgcgcccatcagctggccccgggaggctgcagcatctcacagggcccagtggcttggccagggctctctcctgctccttgagcaataggaaaatgggctcaggagg

SEQ ID NO: 90908 - DNA, 600 bp, Chicken  19866894399467_6
gactttaccctggataatacccacacagtgccaacctacatccgtgcagctctacacacacacgtgtaaggggccactcagctgcaaagcaacttggcagaaaggtccyggggtgctggtggatgccacgctgaacatgagccagcaatgtgctggaacagaagcccaggtggatgagtgctctgggaagcttctcagcctgccatgcaggcgggagtaaccttctgcagggctctccttcacggtatgaggcacatggccagaagaaggtgcaactgctctacctcycccttacaaacrctcagatttagaatagtagaatgtcttggcttgggagggccctaaaagatgaccccgttctaactcctctgctgtgggcaggttgggtctggtctggcatcacgaacgtggccctgtgcccctctcagccccctgcactgcatggggaagtgctgaggaggaactgaaagcagcttcggacacgcgcccatcagctggccccgggaggctgcagcatctcacagggcccagtggcttggccagggctctctcctgctccttgagcaataggaaaatgggctcaggagggaagaggtggcc

SEQ ID NO: 90909 - DNA, 600 bp, Chicken  19866894399467_7
gggccctaaaagatgaccccgttctaactcctctgctgtgggcaggttgggtctggtctggcatcacgaacgtggccctgtgcccctctcagccccctgcactgcatggggaagtgctgaggaggaactgaaagcagcttcggacacgcgcccatcagctggccccgggaggctgcagcatctcacagggcccagtggcttggccagggctctctcctgctccttgagcaataggaaaatgggctcaggagggaagaggtggccccagtgccttggagcatgttgtaggagggatgcctyccctgctgcagcacctggagcactcagtgccaggaactgtggaggaaaaagtggaaggtgggctccgcgctgygtgatgctgctttgtaaggcagcatacaggatgtttccctggatacagcaggagcaaagagcaggaagcgtgtttctttaatcacagctctaagagctgtttcctttccccacatcaagacatcacttcacccaaaagtgaattcaggggaagttcrggttggatattagggaaaatttcttccctcagagcggtgctgcagtggcacaggctgcacagggaggtgg

SEQ ID NO: 90910 - DNA, 600 bp, Chicken  19866894399467_8
ggccctgtgcccctctcagccccctgcactgcatggggaagtgctgaggaggaactgaaagcagcttcggacacgcgcccatcagctggccccgggaggctgcagcatctcacagggcccagtggcttggccagggctctctcctgctccttgagcaataggaaaatgggctcaggagggaagaggtggccccagtgccttggagcatgttgtaggagggatgcctyccctgctgcagcacctggagcactcagtgccaggaactgtggaggaaaaagtggaaggtgggctccgcgctgygtgatgctgctttgtaaggcagcatacaggatgtttccctggatacagcaggagcaaagagcaggaagcgtgtttctttaatcacagctctaagagctgtttcctttccccacatcaagacatcacttcacccaaaagtgaattcaggggaagttcrggttggatattagggaaaatttcttccctcagagcggtgctgcagtggcacaggctgcacagggaggtggtggggtcaccgttcctggaggtgttccagagccgtgtggatgtggcactgaggacgtggtcagtgggcacggt

SEQ ID NO: 90911 - DNA, 600 bp, Chicken  19866894399467_9
ataggaaaatgggctcaggagggaagaggtggccccagtgccttggagcatgttgtaggagggatgcctyccctgctgcagcacctggagcactcagtgccaggaactgtggaggaaaaagtggaaggtgggctccgcgctgygtgatgctgctttgtaaggcagcatacaggatgtttccctggatacagcaggagcaaagagcaggaagcgtgtttctttaatcacagctctaagagctgtttcctttccccacatcaagacatcacttcacccaaaagtgaattcaggggaagttcrggttggatattagggaaaatttcttccctcagagcggtgctgcagtggcacaggctgcacagggaggtggtggggtcaccgttcctggaggtgttccagagccgtgtggatgtggcactgaggacgtggtcagtgggcacggtgggggtgggctggtggttggaccrggtsatcttagaggtcttttccaactttcaggattccatgaaaagtagggctcagcctgcttcaggcgcagctgcacagcgtgccctctggctgtgttgcttggcactgtgctgcttccaggcacacctcccc

SEQ ID NO: 90912 - DNA, 599 bp, Chicken  19866894399472_1
  misc_feature (1)..(138): n is any nucleotide
nnnnnnnnnnnnnnnnnnnnnnnnnnnnnnnnnnnnnnnnnnnnnnnnnnnnnnnnnnnnnnnnnnnnnnnnnnnnnnnnnnnnnnnnnnnnnnnnnnnnnnnnnnnnnnnnnnnnnnnnnnnnnnnnnnnnnnnnnnccttcaatataaatcttgctggtacttctcccatcaatcgtgatttcccaatggctgccaattaagtcatctttctgccaatcaggctcagtaaattggcaggcctacctgctctacttcccttttttttaactcaaagttcatctcctaataccaagcaaygaattttccagctctccagtgattaaagtcactcagcctacagccctgtgcattgtaacacccccaaaagtgctgcctgctgcattttttgcttaaacacagccagcaggggcatctttggaatgtgcattcaaaacaaggctgctaattaacaatcatcagcagctatcccaactcatgttgctccattttctgtggaactgatcagtcttcacctggaaggacaaagcagagaacaacagctccactctccaactgtcccttcccatcttgctgtcttattgaaacagtgmaatgtg

SEQ ID NO: 90913 - DNA, 529 bp, Chicken  19866894399472_2
aagcaaygaattttccagctctccagtgattaaagtcactcagcctacagccctgtgcattgtaacacccccaaaagtgctgcctgctgcattttttgcttaaacacagccagcaggggcatctttggaatgtgcattcaaaacaaggctgctaattaacaatcatcagcagctatcccaactcatgttgctccattttctgtggaactgatcagtcttcacctggaaggacaaagcagagaacaacagctccactctccaactgtcccttcccatcttgctgtcttattgaaacagtgmaatgtgtgtgtgataagaggttagcttcctatcttatagtactttcaaaagtgaagtactcttactgactactaggtgtacatttaaactatgcctgtaaatgaactggtataagagaggtgtgtattagccttatgtattcttagcccttggagagaccaggagccggttatgccttcaggtatcatttcctatctgaatttgcttcttcatcttggagaggtcatga

SEQ ID NO: 90914 - DNA, 599 bp, Chicken  19866894399479_1
  misc_feature (1)..(1): n is any nucleotide
naaatatacttcagatggactggatattctatgcagttttagtcatgggctccctgtaaaactttcttataataccaacagcactgtgtgtataaatacaatcttttaatggatactgcttttacagtgcgattcaaggcgactagagtggtgaacatttacctcagtattgctcttaatattaaaattaattatgctcattataatttcgataccccctggcacactttttctatattgtcggagtagattttgtatcataaaatattaatttttattaagtttctttttttaaaatayatattatgatatracagtttagayttacagcttcaggtctgtctaattctgtaggtcatattcagccttgccctatcactgctctatccagcaaagatttaaaatatatctgaagtttgaagatttgagctgtagagatccactcaactggaatttgcttgcagtaagaagaaagcaataaggaaaaatatgagaattctactgaaatagtcactaagttcatgacactcaaggatacataaaagccttagactggtagcctgtgggccagctgtagtttgcaaagccatcaaaaaaaa

SEQ ID NO: 90915 - DNA, 600 bp, Chicken  19866894399479_2
gatggactggatattctatgcagttttagtcatgggctccctgtaaaactttcttataataccaacagcactgtgtgtataaatacaatcttttaatggatactgcttttacagtgcgattcaaggcgactagagtggtgaacatttacctcagtattgctcttaatattaaaattaattatgctcattataatttcgataccccctggcacactttttctatattgtcggagtagattttgtatcataaaatattaatttttattaagtttctttttttaaaatayatattatgatatracagtttagayttacagcttcaggtctgtctaattctgtaggtcatattcagccttgccctatcactgctctatccagcaaagatttaaaatatatctgaagtttgaagatttgagctgtagagatccactcaactggaatttgcttgcagtaagaagaaagcaataaggaaaaatatgagaattctactgaaatagtcactaagttcatgacactcaaggatacataaaagccttagactggtagcctgtgggccagctgtagtttgcaaagccatcaaaaaaaaaaaattaatcagac

SEQ ID NO: 90916 - DNA, 600 bp, Chicken  19866894399479_3
tattctatgcagttttagtcatgggctccctgtaaaactttcttataataccaacagcactgtgtgtataaatacaatcttttaatggatactgcttttacagtgcgattcaaggcgactagagtggtgaacatttacctcagtattgctcttaatattaaaattaattatgctcattataatttcgataccccctggcacactttttctatattgtcggagtagattttgtatcataaaatattaatttttattaagtttctttttttaaaatayatattatgatatracagtttagayttacagcttcaggtctgtctaattctgtaggtcatattcagccttgccctatcactgctctatccagcaaagatttaaaatatatctgaagtttgaagatttgagctgtagagatccactcaactggaatttgcttgcagtaagaagaaagcaataaggaaaaatatgagaattctactgaaatagtcactaagttcatgacactcaaggatacataaaagccttagactggtagcctgtgggccagctgtagtttgcaaagccatcaaaaaaaaaaaattaatcagactagaattattg

SEQ ID NO: 90917 - DNA, 600 bp, Chicken  19866894399482_1
ggtataaatgataagagcctgattcagaaagcttttttttttcctccccaatggcagcttgacgagaaagcttcatagtcacgtcacagtaaccctgaagataatctattgtttgagtctttgtgaaactgctcgcttttatataggggagaagtgagattttttgagcccatggttagggtgcctgaacctctcttgctgtcacaggatttttgcttctttttgtattttattccttttaccagacataggatgccaaggcaaaagtagatacctgctatgacagcctgtgctgtgatygtggcagtctaactgaagttcagaatgtaacagrtagttgaatggagaacatctggtggtcggagcaaaggaggaatgagagatgcatcgatgagctttgttatagyttttgggcttgtttcccaaactgatcatttggatgtaccatgcgtgcttcgtgtgcacatcaaatctccctgaatttggcatcaccatagagtagcgtggacagatgagaggagggtcaggatgaagtcatgttagagctggactgtttacaagtattatttatactgtggcaagacacacagtctccattta

SEQ ID NO: 90918 - DNA, 600 bp, Chicken  19866894399482_2
ttttttttcctccccaatggcagcttgacgagaaagcttcatagtcacgtcacagtaaccctgaagataatctattgtttgagtctttgtgaaactgctcgcttttatataggggagaagtgagattttttgagcccatggttagggtgcctgaacctctcttgctgtcacaggatttttgcttctttttgtattttattccttttaccagacataggatgccaaggcaaaagtagatacctgctatgacagcctgtgctgtgatygtggcagtctaactgaagttcagaatgtaacagrtagttgaatggagaacatctggtggtcggagcaaaggaggaatgagagatgcatcgatgagctttgttatagyttttgggcttgtttcccaaactgatcatttggatgtaccatgcgtgcttcgtgtgcacatcaaatctccctgaatttggcatcaccatagagtagcgtggacagatgagaggagggtcaggatgaagtcatgttagagctggactgtttacaagtattatttatactgtggcaagacacacagtctccatttagaaccagggggtgatggcgctggctcttccctag

SEQ ID NO: 90919 - DNA, 600 bp, Chicken  19866894399482_3
attgtttgagtctttgtgaaactgctcgcttttatataggggagaagtgagattttttgagcccatggttagggtgcctgaacctctcttgctgtcacaggatttttgcttctttttgtattttattccttttaccagacataggatgccaaggcaaaagtagatacctgctatgacagcctgtgctgtgatygtggcagtctaactgaagttcagaatgtaacagrtagttgaatggagaacatctggtggtcggagcaaaggaggaatgagagatgcatcgatgagctttgttatagyttttgggcttgtttcccaaactgatcatttggatgtaccatgcgtgcttcgtgtgcacatcaaatctccctgaatttggcatcaccatagagtagcgtggacagatgagaggagggtcaggatgaagtcatgttagagctggactgtttacaagtattatttatactgtggcaagacacacagtctccatttagaaccagggggtgatggcgctggctcttccctagtacataggaagtcctggtgcctgccccaaagaccttaccacccataaagagaaatggcaaatgcaggatttgt

SEQ ID NO: 90920 - DNA, 599 bp, Chicken  19866894399487_1
  misc_feature (1)..(10): n is any nucleotide
nnnnnnnnnncctgcaaccttactgttgtgatgttgctacttgctgcacaagttgtttacaaagtagagaagatcatttgaaaataatgcgttcactaaaaacaaaatggtgcttctgctttcacttcccacattctgacacaaggctgagatagcccagatagaatggcaggtgaatgttatgccatatgaacctgcacagttttctgaaatatcatcaaaattcaccataaagtggcaataaggaagctgatgggtcaaagataactgtaatatactacataactttcttgctgcacrcaacccacagcttaccaagacccagcactggcttcagggagaaagtgatctcatatctgcagaggggaacagcaagggctcacttctaagtttccttcttagtttgcccttcttaggacaaccatctactgaagagtgattttattggagcagagccttgggaatggaagcacagtgtctgaggtggtggaaatcagcaacgatcagtgctgtgaagacagactggctggccctcctatgacttttgacctatgacatgtcttcattttttccctccagcctgcaatttcacagaagca

SEQ ID NO: 90921 - DNA, 600 bp, Chicken  19866894399487_2
aagcacagtgtctgaggtggtggaaatcagcaacgatcagtgctgtgaagacagactggctggccctcctatgacttttgacctatgacatgtcttcattttttccctccagcctgcaatttcacagaagcataagatttacacacttccatttttggacatgatgattacaatcaatgttgcacatggcagaactgtttgctgaaggaacataaagtgaactcctattgctcaaggtgctgttcaaacacaagcacagaatagtagcttttacccaaagaggatgaaatagaagtctgwgactgtgtgtggacacatgcagtctatgccttttgcacagtgaggtgatgtaaggacccaatgcgaccctgcaggtcagtgtaaaagtgaatcgtcataaacacatattgggtatttcctctgyctaagaagacacatctacatccaagttagtaatctatactttctctattgtccagaaaaaaagcaaggcatgtctcctaagataggaacctttggcaagtcagagggtttccgcatccagaactggctctttctccccactgactgcaaaggggcttaaaccacaggcttagatgt

SEQ ID NO: 90922 - DNA, 600 bp, Chicken  19866894399487_3
cagaagcataagatttacacacttccatttttggacatgatgattacaatcaatgttgcacatggcagaactgtttgctgaaggaacataaagtgaactcctattgctcaaggtgctgttcaaacacaagcacagaatagtagcttttacccaaagaggatgaaatagaagtctgwgactgtgtgtggacacatgcagtctatgccttttgcacagtgaggtgatgtaaggacccaatgcgaccctgcaggtcagtgtaaaagtgaatcgtcataaacacatattgggtatttcctctgyctaagaagacacatctacatccaagttagtaatctatactttctctattgtccagaaaaaaagcaaggcatgtctcctaagataggaacctttggcaagtcagagggtttccgcatccagaactggctctttctccccactgactgcaaaggggcttaaaccacaggcttagatgttgagtatttcatacaacaccatacatatttgctgttcctgaatatacacatttggcttattcagaatagcatgtacaacatagagggtagcatgattctttcagtccaagaggaatactgtagt

SEQ ID NO: 90923 - DNA, 563 bp, Chicken  19866894399487_4
ggcatgtctcctaagataggaacctttggcaagtcagagggtttccgcatccagaactggctctttctccccactgactgcaaaggggcttaaaccacaggcttagatgttgagtatttcatacaacaccatacatatttgctgttcctgaatatacacatttggcttattcagaatagcatgtacaacatagagggtagcatgattctttcagtccaagaggaatactgtagtcagcctacctttcagatgaagaaataaagtgggagggaatggtgatttcatcttgctcttctctayagtaaaaagcttctttcagttcctaataaacacattctccttgkgcagcccttaggaaaaaacacmaccattttccttccacccatactgctgggtctcactacctgtgcctcctgggacattcctaactggcagagtgagctcaggtaagatgatgagtgcatgkcatgaacttcccgtcctttggaagggcctgtacatactatttcatctggtcttgagactgtgctgttgtcttacaaaggccacatccataggtaagt

SEQ ID NO: 90924 - DNA, 519 bp, Chicken  19866894399487_5
ccgcatccagaactggctctttctccccactgactgcaaaggggcttaaaccacaggcttagatgttgagtatttcatacaacaccatacatatttgctgttcctgaatatacacatttggcttattcagaatagcatgtacaacatagagggtagcatgattctttcagtccaagaggaatactgtagtcagcctacctttcagatgaagaaataaagtgggagggaatggtgatttcatcttgctcttctctayagtaaaaagcttctttcagttcctaataaacacattctccttgkgcagcccttaggaaaaaacacmaccattttccttccacccatactgctgggtctcactacctgtgcctcctgggacattcctaactggcagagtgagctcaggtaagatgatgagtgcatgkcatgaacttcccgtcctttggaagggcctgtacatactatttcatctggtcttgagactgtgctgttgtcttacaaaggccacatccataggtaagt

SEQ ID NO: 90925 - DNA, 497 bp, Chicken  19866894399487_6
ctccccactgactgcaaaggggcttaaaccacaggcttagatgttgagtatttcatacaacaccatacatatttgctgttcctgaatatacacatttggcttattcagaatagcatgtacaacatagagggtagcatgattctttcagtccaagaggaatactgtagtcagcctacctttcagatgaagaaataaagtgggagggaatggtgatttcatcttgctcttctctayagtaaaaagcttctttcagttcctaataaacacattctccttgkgcagcccttaggaaaaaacacmaccattttccttccacccatactgctgggtctcactacctgtgcctcctgggacattcctaactggcagagtgagctcaggtaagatgatgagtgcatgkcatgaacttcccgtcctttggaagggcctgtacatactatttcatctggtcttgagactgtgctgttgtcttacaaaggccacatccataggtaagt

SEQ ID NO: 90926 - DNA, 397 bp, Chicken  19866894399487_7
ttattcagaatagcatgtacaacatagagggtagcatgattctttcagtccaagaggaatactgtagtcagcctacctttcagatgaagaaataaagtgggagggaatggtgatttcatcttgctcttctctayagtaaaaagcttctttcagttcctaataaacacattctccttgkgcagcccttaggaaaaaacacmaccattttccttccacccatactgctgggtctcactacctgtgcctcctgggacattcctaactggcagagtgagctcaggtaagatgatgagtgcatgkcatgaacttcccgtcctttggaagggcctgtacatactatttcatctggtcttgagactgtgctgttgtcttacaaaggccacatccataggtaagt

SEQ ID NO: 90927 - DNA, 600 bp, Chicken  19866894399500_1
ttttgagatacaaaggcagttgcagaaatagtctaagagactctctgttagcactgagaaattgttcactagataacagtaattcatatggctatctgcagagatgttttggccagctgcccatattcacttcatcacacatttaaatttaattagactttgtagactgatggactaaaaagccaaaaggaggctactgggcaatcaaactgaccttttttcaacaacagccagcgaactttgctgaataaatccctgttccaagaacaaaagtcttttcagcaaggtatccacctgtaytgtaaaatccatggtgatgagtttcagtgcttattacttttggctgttggtgcatgctaagtcctgttggggtctcctgtgctgtggagaaatacctgcctgtgccctctgggctgctctgccgctcctgtgtgccaggttgggagcagcctgtgatgaaactacttttcttgatttttcttctatttcataccctcataaatgaggatttgcaaatcagccttcctggggcagagctggtgtcattacagcatcgggcaggttggaagtgtggggtggaactgccaccaccatgaccga

SEQ ID NO: 90928 - DNA, 600 bp, Chicken  19866894399505_1
actgaaaataacaaaccttaagatcagatttatttcatcttccttggtccactcagtccccccactttgtttccagttgagatagttgagccatttagagcggcactgtttttcagagcgtgttccgacccgttctgctacagcagcccatgatacaccttgtgtgacaatgtcacctggttctgtgctagtaagctcatgaactacttctgctagtctcttttcttcttcttccgtccactttcctgaaagagagaaaagccctccaacttaaccagcagcagatgacctctgttctayctgtgatgtcaactgatacatttgtcttcatcacttaacaccgtattccagatgcaagtacggacttgcaaagaaggtatgactattctcatgtaccaacaatttagaatataatccattcttaactaatagggttagggttcataattcatttttgccatgctgytgtcaagtcttatcctctcttcttgcagacgaatgaagccacacagaatgtatcaaaataccaaagcaaactggtccaagctacatgacttatatgagttgaagtaaattaaacacataaaactctagcttaca

SEQ ID NO: 90929 - DNA, 600 bp, Chicken  19866894399505_2
acaatgtcacctggttctgtgctagtaagctcatgaactacttctgctagtctcttttcttcttcttccgtccactttcctgaaagagagaaaagccctccaacttaaccagcagcagatgacctctgttctayctgtgatgtcaactgatacatttgtcttcatcacttaacaccgtattccagatgcaagtacggacttgcaaagaaggtatgactattctcatgtaccaacaatttagaatataatccattcttaactaatagggttagggttcataattcatttttgccatgctgytgtcaagtcttatcctctcttcttgcagacgaatgaagccacacagaatgtatcaaaataccaaagcaaactggtccaagctacatgacttatatgagttgaagtaaattaaacacataaaactctagcttacaacaactacatgaggactgattaagtttttcttccatttgaatatataaattacaaaatgaacaatgctttactccgtaagtgctcctgtctcttaattgacataaagacagtgtatgtctataaacactcaatacaaggcaaagtatttttatccacttcaataaa

SEQ ID NO: 90930 - DNA, 599 bp, Chicken  19866894399506_1
  misc_feature (1)..(22): n is any nucleotide
nnnnnnnnnnnnnnnnnnnnnngctgaaggggctgtgcccttggcttgtgttaattggcctaacttcactaaacctggtagaggattgatccacagctgctgtaatcctcaagttaaatcccagccccactgggagttttatcgttgccttcaaagaggagggatttcaacctgcctgttttgttatccaattgcctagtgaagctcctagcagcaaggagttcagccttagcaccattcccctgcaggagacatggcttcaggctgctttatcaaccagagatactgagctagcttttyggaaaatggacaaaaatccyttgaataagactgtctcattttggtaatccatgtttttccaaaggtattatcccaaagtgyaaaactgccaacttttctaatccaagccaggtgaaaaattcaggttttcacttcattcctaataagggctttgagacaatggagagttttgttccatgtagtcgtggcagaccactgagctattgctaagcaaacacaggagcgtgtgcagcaatctcatttttaccgcgtggcacatgtgaaaagcaagcatcaatccttgcttatcacggggtagg

SEQ ID NO: 90931 - DNA, 599 bp, Chicken  19866894399506_2
  misc_feature (1)..(2): n is any nucleotide
nngctgaaggggctgtgcccttggcttgtgttaattggcctaacttcactaaacctggtagaggattgatccacagctgctgtaatcctcaagttaaatcccagccccactgggagttttatcgttgccttcaaagaggagggatttcaacctgcctgttttgttatccaattgcctagtgaagctcctagcagcaaggagttcagccttagcaccattcccctgcaggagacatggcttcaggctgctttatcaaccagagatactgagctagcttttyggaaaatggacaaaaatccyttgaataagactgtctcattttggtaatccatgtttttccaaaggtattatcccaaagtgyaaaactgccaacttttctaatccaagccaggtgaaaaattcaggttttcacttcattcctaataagggctttgagacaatggagagttttgttccatgtagtcgtggcagaccactgagctattgctaagcaaacacaggagcgtgtgcagcaatctcatttttaccgcgtggcacatgtgaaaagcaagcatcaatccttgcttatcacggggtaggttcacaggagacaaaggctg

SEQ ID NO: 90932 - DNA, 600 bp, Chicken  19866894399506_3
aggattgatccacagctgctgtaatcctcaagttaaatcccagccccactgggagttttatcgttgccttcaaagaggagggatttcaacctgcctgttttgttatccaattgcctagtgaagctcctagcagcaaggagttcagccttagcaccattcccctgcaggagacatggcttcaggctgctttatcaaccagagatactgagctagcttttyggaaaatggacaaaaatccyttgaataagactgtctcattttggtaatccatgtttttccaaaggtattatcccaaagtgyaaaactgccaacttttctaatccaagccaggtgaaaaattcaggttttcacttcattcctaataagggctttgagacaatggagagttttgttccatgtagtcgtggcagaccactgagctattgctaagcaaacacaggagcgtgtgcagcaatctcatttttaccgcgtggcacatgtgaaaagcaagcatcaatccttgcttatcacggggtaggttcacaggagacaaaggctgtaagtcatgaaatgggctggctgattcttttgggtctaatgagagctactggtaagaacaag

SEQ ID NO: 90933 - DNA, 453 bp, Chicken  19866894399506_4
ttctaatccaagccaggtgaaaaattcaggttttcacttcattcctaataagggctttgagacaatggagagttttgttccatgtagtcgtggcagaccactgagctattgctaagcaaacacaggagcgtgtgcagcaatctcatttttaccgcgtggcacatgtgaaaagcaagcatcaatccttgcttatcacggggtaggttcacaggagacaaaggctgtaagtcatgaaatgggctggctgattcttttgggtctaatgagagctactggtaagaacaagtacagccccaagcyggaatagatctccacctgatggagtcaatcacatggtgatttcagaactgaaatctcagagctaccacagggcaggccatgcaaattctaaagaacaggaaaatagtgtaggtaagctcctatttttccttcctttacatttttattttttaa

SEQ ID NO: 90934 - DNA, 599 bp, Chicken  19866894399513_1
  misc_feature (1)..(3): n is any nucleotide
nnnccttgccctactttctttaaacttgtgccgtacccgaagcattatcccttgatgaccagctcagattcttttacttggcacaaaccagaagctaccataaaatttcaaaagagcaataaagagaggcactgagcagcactgtttcatctgatgaacagtttagaaaactgatctattctgaaagcagctgctgctgtttgagctctgcactgcaaaaccacaagcaggctggatcagttactctaatcctcagcacacttagtgaaccagaccagccaaagtcctaggagaagtaastgaaagcaaaccaagcaaaggagtttcaaactgcagttacacagaatttagctagtgctgaagatagcaatactccgcaaataagcccccaaagcattctgcatcagtgaaactgaacagccctggcaacacgcacrgcagggaaggcagaggccccagcccactcagcccagctgctttccgttcagtcggtgtcagcagcagcttgacaatgcagcacgacctgtgcctttctacacggcgttctgataaatttaggccaaagcggaaataattacagaccagttctaactaccttt

SEQ ID NO: 90935 - DNA, 600 bp, Chicken  19866894399513_2
agcactgtttcatctgatgaacagtttagaaaactgatctattctgaaagcagctgctgctgtttgagctctgcactgcaaaaccacaagcaggctggatcagttactctaatcctcagcacacttagtgaaccagaccagccaaagtcctaggagaagtaastgaaagcaaaccaagcaaaggagtttcaaactgcagttacacagaatttagctagtgctgaagatagcaatactccgcaaataagcccccaaagcattctgcatcagtgaaactgaacagccctggcaacacgcacrgcagggaaggcagaggccccagcccactcagcccagctgctttccgttcagtcggtgtcagcagcagcttgacaatgcagcacgacctgtgcctttctacacggcgttctgataaatttaggccaaagcggaaataattacagaccagttctaactacctttaccttaaataatrcaaaactaccctcaagtctactcagaagtcagctcagtctctaactggaacttaccagttaaaggagtcaaatccaactgatcacacatccttgaaattccgcaatgcttcagagaagaaaggcc

SEQ ID NO: 90936 - DNA, 600 bp, Chicken  19866894399513_3
aagcaaaggagtttcaaactgcagttacacagaatttagctagtgctgaagatagcaatactccgcaaataagcccccaaagcattctgcatcagtgaaactgaacagccctggcaacacgcacrgcagggaaggcagaggccccagcccactcagcccagctgctttccgttcagtcggtgtcagcagcagcttgacaatgcagcacgacctgtgcctttctacacggcgttctgataaatttaggccaaagcggaaataattacagaccagttctaactacctttaccttaaataatrcaaaactaccctcaagtctactcagaagtcagctcagtctctaactggaacttaccagttaaaggagtcaaatccaactgatcacacatccttgaaattccgcaatgcttcagagaagaaaggccctgaccacaattcccacagaaggcccaacacgccaccaggagcagagccttctattccagattaaaagctaagaagtgactcgcctggccacgacaacggcaaacaggaaagttattagaaatgcaggatgcatttacatccacttcatcaacctcagctgtgctttgcaacgag

SEQ ID NO: 90937 - DNA, 600 bp, Chicken  19866894399514_1
aagagggtgactagaaacagccagcataggtttgccaagggcaaactgtgaccaaccaaccaacctgaaaacttgctctggtgagatgactgtcctgatggaggaggggaaagcagctggtgttgcctaccttgatcttagcaacatttttgacacagtaatctacagcatccttgaagccaaactgctgagatctaaaagattaggtggaatacgaattgggtagataatcagaaggacaaagtagcttgaccaaggaatcagcaattgccaagtacagctgttgcctagttactactrgtgttccccaagttccccaacctggggtctatactgctaaaaatctgcactagtaatccttaccatgtttgcctgtgccattcaattctggaaaattgtccttatgcagcagagttgtctttcagagggatctcagcaggatagagaaatatgcaggcaagaaccccatgaggttcagggacaacaaatggaaattcctgcacctgacttggagtaacctcatgcatcagtccagaccagtagcaccctggctaagcagcagcactgcakaaaaagacttggcatcctagtaggcagcag

SEQ ID NO: 90938 - DNA, 600 bp, Chicken  19866894399514_2
ccaagtacagctgttgcctagttactactrgtgttccccaagttccccaacctggggtctatactgctaaaaatctgcactagtaatccttaccatgtttgcctgtgccattcaattctggaaaattgtccttatgcagcagagttgtctttcagagggatctcagcaggatagagaaatatgcaggcaagaaccccatgaggttcagggacaacaaatggaaattcctgcacctgacttggagtaacctcatgcatcagtccagaccagtagcaccctggctaagcagcagcactgcakaaaaagacttggcatcctagtaggcagcaggctaaaygtgaatcagctgtytgcccttgcagaaagtgaatgttccccttcattaagctactgtgaaactgcagcwrgagtactgtgttcggttttgagctccttcaatgaaagagaaggatcgacaaacttggagcgcagtgaaggtgaacaggatggtccacaacagccacagtgaggcaggggaactgggtttgtttagtctggagactggagactactaacgggggttctaatatctccaggtatctaaaagtggctggaaggaag

SEQ ID NO: 90939 - DNA, 600 bp, Chicken  19866894399514_3
ccaagttccccaacctggggtctatactgctaaaaatctgcactagtaatccttaccatgtttgcctgtgccattcaattctggaaaattgtccttatgcagcagagttgtctttcagagggatctcagcaggatagagaaatatgcaggcaagaaccccatgaggttcagggacaacaaatggaaattcctgcacctgacttggagtaacctcatgcatcagtccagaccagtagcaccctggctaagcagcagcactgcakaaaaagacttggcatcctagtaggcagcaggctaaaygtgaatcagctgtytgcccttgcagaaagtgaatgttccccttcattaagctactgtgaaactgcagcwrgagtactgtgttcggttttgagctccttcaatgaaagagaaggatcgacaaacttggagcgcagtgaaggtgaacaggatggtccacaacagccacagtgaggcaggggaactgggtttgtttagtctggagactggagactactaacgggggttctaatatctccaggtatctaaaagtggctggaaggaagatggaaccatactcttcttcacagtgcacagcaaaaa

SEQ ID NO: 90940 - DNA, 600 bp, Chicken  19866894399514_4
ctggggtctatactgctaaaaatctgcactagtaatccttaccatgtttgcctgtgccattcaattctggaaaattgtccttatgcagcagagttgtctttcagagggatctcagcaggatagagaaatatgcaggcaagaaccccatgaggttcagggacaacaaatggaaattcctgcacctgacttggagtaacctcatgcatcagtccagaccagtagcaccctggctaagcagcagcactgcakaaaaagacttggcatcctagtaggcagcaggctaaaygtgaatcagctgtytgcccttgcagaaagtgaatgttccccttcattaagctactgtgaaactgcagcwrgagtactgtgttcggttttgagctccttcaatgaaagagaaggatcgacaaacttggagcgcagtgaaggtgaacaggatggtccacaacagccacagtgaggcaggggaactgggtttgtttagtctggagactggagactactaacgggggttctaatatctccaggtatctaaaagtggctggaaggaagatggaaccatactcttcttcacagtgcacagcaaaaagaaaaagggcaaaa

SEQ ID NO: 90941 - DNA, 600 bp, Chicken  19866894399514_5
gccattcaattctggaaaattgtccttatgcagcagagttgtctttcagagggatctcagcaggatagagaaatatgcaggcaagaaccccatgaggttcagggacaacaaatggaaattcctgcacctgacttggagtaacctcatgcatcagtccagaccagtagcaccctggctaagcagcagcactgcakaaaaagacttggcatcctagtaggcagcaggctaaaygtgaatcagctgtytgcccttgcagaaagtgaatgttccccttcattaagctactgtgaaactgcagcwrgagtactgtgttcggttttgagctccttcaatgaaagagaaggatcgacaaacttggagcgcagtgaaggtgaacaggatggtccacaacagccacagtgaggcaggggaactgggtttgtttagtctggagactggagactactaacgggggttctaatatctccaggtatctaaaagtggctggaaggaagatggaaccatactcttcttcacagtgcacagcaaaaagaaaaagggcaaaaatcagaagttgtagcaagtctgactttggcctgttatgaaggcaatatggatgtg

SEQ ID NO: 90942 - DNA, 600 bp, Chicken  19866894399514_6
ccattcaattctggaaaattgtccttatgcagcagagttgtctttcagagggatctcagcaggatagagaaatatgcaggcaagaaccccatgaggttcagggacaacaaatggaaattcctgcacctgacttggagtaacctcatgcatcagtccagaccagtagcaccctggctaagcagcagcactgcakaaaaagacttggcatcctagtaggcagcaggctaaaygtgaatcagctgtytgcccttgcagaaagtgaatgttccccttcattaagctactgtgaaactgcagcwrgagtactgtgttcggttttgagctccttcaatgaaagagaaggatcgacaaacttggagcgcagtgaaggtgaacaggatggtccacaacagccacagtgaggcaggggaactgggtttgtttagtctggagactggagactactaacgggggttctaatatctccaggtatctaaaagtggctggaaggaagatggaaccatactcttcttcacagtgcacagcaaaaagaaaaagggcaaaaatcagaagttgtagcaagtctgactttggcctgttatgaaggcaatatggatgtgt

SEQ ID NO: 90943 - DNA, 600 bp, Chicken  19866894399521_1
catgcagtgaggtttctgttggaggcgttacactgaacaacccaggtgatgccagcagacagcatgcactgcaaaacgcacactgaccgtcttcacaaagcaatagtgtccagagcaggctgctcctgtgtctcacttggacatattcctattgattttgcagcatcaaatgagcactaaaagcatgctggcacctccgatcagacatcgcggcccatctgctaagtcagcattttgcctcacacccaattactccaatcagcctgcaatttaaatgaatgtaagcacggtacctcctcratgatgtccccgttttcagcgtgcacttgggctatggcccccaggtctcgaataatgcagaatatttcatacatctgccaagagagaacaggcacccaacatcagacaaacgatggattctgctcacggggggtcactgcttccactgcacagcagctgcctgcattacctgggcgtcggtgcactgcagtctgtccttgtaggccataaaaaccaggaaggagttcacaccttgggaagagaaaacragaagtgcagtgaytgccaaagctcagagcccggcacagctgagctctgggt

SEQ ID NO: 90944 - DNA, 600 bp, Chicken  19866894399521_2
attactccaatcagcctgcaatttaaatgaatgtaagcacggtacctcctcratgatgtccccgttttcagcgtgcacttgggctatggcccccaggtctcgaataatgcagaatatttcatacatctgccaagagagaacaggcacccaacatcagacaaacgatggattctgctcacggggggtcactgcttccactgcacagcagctgcctgcattacctgggcgtcggtgcactgcagtctgtccttgtaggccataaaaaccaggaaggagttcacaccttgggaagagaaaacragaagtgcagtgaytgccaaagctcagagcccggcacagctgagctctgggtgggctcagctgagagcagaccaacacgggcctctcttatttctaagcactgctcctcagtgcgctttcattggagaaacaggcacacggtgctttgcacacagcagtgcacacagcccctcttgtccctattgaatgcagaacacaattcatggagctcagagtcaaagcctgagaactgccaacatattttatgcggataaaggcaatgacttattccaaactacgactgaatcacaaacaaactgt

SEQ ID NO: 90945 - DNA, 600 bp, Chicken  19866894399521_3
cctgcaatttaaatgaatgtaagcacggtacctcctcratgatgtccccgttttcagcgtgcacttgggctatggcccccaggtctcgaataatgcagaatatttcatacatctgccaagagagaacaggcacccaacatcagacaaacgatggattctgctcacggggggtcactgcttccactgcacagcagctgcctgcattacctgggcgtcggtgcactgcagtctgtccttgtaggccataaaaaccaggaaggagttcacaccttgggaagagaaaacragaagtgcagtgaytgccaaagctcagagcccggcacagctgagctctgggtgggctcagctgagagcagaccaacacgggcctctcttatttctaagcactgctcctcagtgcgctttcattggagaaacaggcacacggtgctttgcacacagcagtgcacacagcccctcttgtccctattgaatgcagaacacaattcatggagctcagagtcaaagcctgagaactgccaacatattttatgcggataaaggcaatgacttattccaaactacgactgaatcacaaacaaactgtatttcatgagaagg

SEQ ID NO: 90946 - DNA, 600 bp, Chicken  19866894399523_1
cagtactggagcttaggcaacttcaaattataattccggccttgccttgttctgataaatataatctaacaattattattttagacattgatgtatccatctttctgtctattaaaatatagcatgacgtttaaaacccattttagcaatcatgcctcaggcattttcttttctagtggggcacaggaattttcacttgtccttgagataaatgacactggtacggatttggcatctctaagtcttctttcagtacctatggcaccaaagcattgctggaaatcttggaatgatacagaraaactgacactgcttagactaagccaaatcatttatccctgtttctcttgcttcttacacttccctactgacagggagagaataatctctgcttcatctcagctattttaataggattcagaacacatgatcacattagatactgtacctgaggcaatctgtgtttagactggtgataattacatgcaaaagtcattcaacaatgaggcaattaatgctgatgaactttaataaagtcagctgtcagcaatagatattgctggcaagtttcctaatcctatatttataatgctttgaaat

SEQ ID NO: 90947 - DNA, 600 bp, Chicken  19866894399526_1
cccagctttgtgctgaggaacatcctgtgtccaaggctggaggccctatggggagcctgcacttcataacctgtagtggtgttttgtattgaaaattaaacagctcataatttcctttgacgtttataactgactgttatgtacagctgcactgctactgtataattctgatttgatttgtgtggttttataatgccatgtcttgtgttgttttgaaaatagatcctagtattcgttgtgtgttttggactgctgttgagccatgagttagtgtccagaaaataacaacatgactgcatrtttttcatgaatgattactaaggtagagcgcagtactgagctctgcagtgtttgtagttttttcttctctgtgtgcaatactttggatttattgatgttgaaatccacctgacatctcattgtgtagtcacagarggtagtaagcttttagattttggtatagtctggaactctgtaaaatcatcaccagctgtcaccttgctgcctgctcctttgtcttaatgcttgttgcacacagtgcagacctgtgtgatgtatctgttgttaattaattctytacagttgtgcccgttacgttca

SEQ ID NO: 90948 - DNA, 600 bp, Chicken  19866894399526_2
gttatgtacagctgcactgctactgtataattctgatttgatttgtgtggttttataatgccatgtcttgtgttgttttgaaaatagatcctagtattcgttgtgtgttttggactgctgttgagccatgagttagtgtccagaaaataacaacatgactgcatrtttttcatgaatgattactaaggtagagcgcagtactgagctctgcagtgtttgtagttttttcttctctgtgtgcaatactttggatttattgatgttgaaatccacctgacatctcattgtgtagtcacagarggtagtaagcttttagattttggtatagtctggaactctgtaaaatcatcaccagctgtcaccttgctgcctgctcctttgtcttaatgcttgttgcacacagtgcagacctgtgtgatgtatctgttgttaattaattctytacagttgtgcccgttacgttcatatccttccttttctgtattttgtatgtgatgacaaaggctgcttcttcttctggcttaactattcaatttctgcaagtgcctttggtggaggatcttgtcaaaarctatttaacagtctttcctttccctctcc

SEQ ID NO: 90949 - DNA, 600 bp, Chicken  19866894399526_3
gaaaataacaacatgactgcatrtttttcatgaatgattactaaggtagagcgcagtactgagctctgcagtgtttgtagttttttcttctctgtgtgcaatactttggatttattgatgttgaaatccacctgacatctcattgtgtagtcacagarggtagtaagcttttagattttggtatagtctggaactctgtaaaatcatcaccagctgtcaccttgctgcctgctcctttgtcttaatgcttgttgcacacagtgcagacctgtgtgatgtatctgttgttaattaattctytacagttgtgcccgttacgttcatatccttccttttctgtattttgtatgtgatgacaaaggctgcttcttcttctggcttaactattcaatttctgcaagtgcctttggtggaggatcttgtcaaaarctatttaacagtctttcctttccctctccttgcccccttgttctcctgctcattttcttcatcctgaaaagaagtctaatgtctgtatgatggacatcttccatctccaagaaatatgtcttcagccaagtgctcccaagcccacacattagtcttccattttgcctacac

SEQ ID NO: 90950 - DNA, 557 bp, Chicken  19866894399526_4
acctgacatctcattgtgtagtcacagarggtagtaagcttttagattttggtatagtctggaactctgtaaaatcatcaccagctgtcaccttgctgcctgctcctttgtcttaatgcttgttgcacacagtgcagacctgtgtgatgtatctgttgttaattaattctytacagttgtgcccgttacgttcatatccttccttttctgtattttgtatgtgatgacaaaggctgcttcttcttctggcttaactattcaatttctgcaagtgcctttggtggaggatcttgtcaaaarctatttaacagtctttcctttccctctccttgcccccttgttctcctgctcattttcttcatcctgaaaagaagtctaatgtctgtatgatggacatcttccatctccaagaaatatgtcttcagccaagtgctcccaagcccacacattagtcttccattttgcctacacagcatggtttgcacataagggtcttcaatttctaggattaaatgtgatgtctgctttaaaaacactatgtgatgttttagcatttt

SEQ ID NO: 90951 - DNA, 600 bp, Chicken  19866894399527_1
ttaggttaagaaattgtaacttactttgttaccccaaggcggcagagtgtgacactcagatgctcacttgccagtattgagtctcacagcttgctgggactcactgcatgagcagttcccaggcagtgctttgtcaagtcttctctcttagtgggagaaggaatgaatcattttgaccgaagcccctggatccctgtgtgatagcttccctttttgcaacagtgaagtagtggaatagctctgccaaataatttccttcagcaaagcatctttgccatgctggactgtgtttttcctgaygtggaggatgagcctgtgagagcctgggactgctcttagctctggtgtgggaatttcaggtgmcaagacaggcaagggtaygagcaagatctcttattttaaatgcttaaataaaatatttaaatagaagagggctttccaatggatgtgctggtctgcttggttccgtggcaaataattgccacttaaaataccttacaggagaggagggaagataaggggtcgggacagcaaatgccagcaatcgtggtgctgcctgatcttgggaagttgagtatgaggcagatttacaggtactca

SEQ ID NO: 90952 - DNA, 600 bp, Chicken  19866894399527_2
tcacttgccagtattgagtctcacagcttgctgggactcactgcatgagcagttcccaggcagtgctttgtcaagtcttctctcttagtgggagaaggaatgaatcattttgaccgaagcccctggatccctgtgtgatagcttccctttttgcaacagtgaagtagtggaatagctctgccaaataatttccttcagcaaagcatctttgccatgctggactgtgtttttcctgaygtggaggatgagcctgtgagagcctgggactgctcttagctctggtgtgggaatttcaggtgmcaagacaggcaagggtaygagcaagatctcttattttaaatgcttaaataaaatatttaaatagaagagggctttccaatggatgtgctggtctgcttggttccgtggcaaataattgccacttaaaataccttacaggagaggagggaagataaggggtcgggacagcaaatgccagcaatcgtggtgctgcctgatcttgggaagttgagtatgaggcagatttacaggtactcaaactattttcacaccacactgtgctatgcgggaaagccttttgtttcttgggatgcttctacc

SEQ ID NO: 90953 - DNA, 600 bp, Chicken  19866894399527_3
tctcacagcttgctgggactcactgcatgagcagttcccaggcagtgctttgtcaagtcttctctcttagtgggagaaggaatgaatcattttgaccgaagcccctggatccctgtgtgatagcttccctttttgcaacagtgaagtagtggaatagctctgccaaataatttccttcagcaaagcatctttgccatgctggactgtgtttttcctgaygtggaggatgagcctgtgagagcctgggactgctcttagctctggtgtgggaatttcaggtgmcaagacaggcaagggtaygagcaagatctcttattttaaatgcttaaataaaatatttaaatagaagagggctttccaatggatgtgctggtctgcttggttccgtggcaaataattgccacttaaaataccttacaggagaggagggaagataaggggtcgggacagcaaatgccagcaatcgtggtgctgcctgatcttgggaagttgagtatgaggcagatttacaggtactcaaactattttcacaccacactgtgctatgcgggaaagccttttgtttcttgggatgcttctacctgcatctggtgtcacggg

SEQ ID NO: 90954 - DNA, 599 bp, Chicken  19866894399535_1
  misc_feature (1)..(2): n is any nucleotide
nnggacgggacttagttttcccactttgagaaaggtacatctcaccaggcagtagcagacctagtgctgtgtagaccatcccatgatcaaagcacaaaattttgcccataatgcccagccacaaaatcaattattagtaagcttggttttcctgtttcttccagtatcgttccctgcaactggaaggatagatgaaaacactacctgtgttcctgatcctttaatcaattgttcaaaggctttgaaatatcttttgaccacccttggacttatttctttgctgcctacaagaaaaaaaarcaaagcataagaatctgagggccacacctgtgcctttaacccaagcagtcagcaatttccctaagaggtggatctagtcagcatattgagacttgctaccctcagaagggagtcattgttgacaatagcccatatgattttttttcttattagaggctgtcatgatacaaaggatagactgatggtagataggctatcgtcaacctagatggaccatcacctccatctttgttcaggttccagagcctcatacacattgtataagggcatctgggaagctgagataggcaggaaggtga

SEQ ID NO: 90955 - DNA, 600 bp, Chicken  19866894399540_1
agcatttaaaaatgttgacgtctgtcgagtagcccttccttaaaaaaaggggagaattataaagaagacaggaaaaagattcctggcagcaatccttatcctcacttgactggctataaagaaacaatggcaaaatgcttcaaaccctactcaattacaacaagtacacgtttgcagcttatcacagtctgttccctcaagtttcctgttggcaacaccaacctttagttatactttagttattttgctatttaattctaattaaaattcaccaaaaaaggccaaaggaatcagagcatwcrtacatagttttctgaaggactctcagtgaccaccagtatccctcagatgcctgggtttgtttccattgggtttccatttcacttaggtgccaagatgccttacagtatgtggtttgcatcagtcctcaactaagggcacagaaaccattattcttcccacaatgactgcagtaaccacttgccagctgcccttttgattgcaattgcttatcagtctggcaaaaaaaggcaatccatttactcactgcctgaagttccyttcatatcccttgggaaaaaaaatgagcagggaggacac

SEQ ID NO: 90956 - DNA, 600 bp, Chicken  19866894399540_2
catttaaaaatgttgacgtctgtcgagtagcccttccttaaaaaaaggggagaattataaagaagacaggaaaaagattcctggcagcaatccttatcctcacttgactggctataaagaaacaatggcaaaatgcttcaaaccctactcaattacaacaagtacacgtttgcagcttatcacagtctgttccctcaagtttcctgttggcaacaccaacctttagttatactttagttattttgctatttaattctaattaaaattcaccaaaaaaggccaaaggaatcagagcatwcrtacatagttttctgaaggactctcagtgaccaccagtatccctcagatgcctgggtttgtttccattgggtttccatttcacttaggtgccaagatgccttacagtatgtggtttgcatcagtcctcaactaagggcacagaaaccattattcttcccacaatgactgcagtaaccacttgccagctgcccttttgattgcaattgcttatcagtctggcaaaaaaaggcaatccatttactcactgcctgaagttccyttcatatcccttgggaaaaaaaatgagcagggaggacactt

SEQ ID NO: 90957 - DNA, 600 bp, Chicken  19866894399540_3
ttaaaattcaccaaaaaaggccaaaggaatcagagcatwcrtacatagttttctgaaggactctcagtgaccaccagtatccctcagatgcctgggtttgtttccattgggtttccatttcacttaggtgccaagatgccttacagtatgtggtttgcatcagtcctcaactaagggcacagaaaccattattcttcccacaatgactgcagtaaccacttgccagctgcccttttgattgcaattgcttatcagtctggcaaaaaaaggcaatccatttactcactgcctgaagttccyttcatatcccttgggaaaaaaaatgagcagggaggacacttactaccatcccagagcctccgtactaagaagtttttaaccaaagttattagtaagctgataacctcataataacttctactcttagaaaaaacacttaaaaaaaattaaaccatctgcagtaataccctttatgccaagacggaaaatctgaacatctggaatatctgacacctgaaggacgctccgggggtaaagcacaacagctacttgccaggcagggccaaacactagagagaacatccaaattcagttgccaac

SEQ ID NO: 90958 - DNA, 600 bp, Chicken  19866894399550_1
tggctacactgttgactgtttcaattacatcaataatgttccctctcttcactagtcagctaagctttaaatggaaaccacatttactttttatcctataacaaacagaataagagcagttttattcaattaaaatgaacaacccaggactgtgtttttgtgcttgctaaattgccttcattcctagccaaaacagcttgacacaaatcataagttaagatatatatatatatatatatatccatttaaggagaaagaataatatcacatctttttctaacaggaaaaaaataagttacwtgaatgcctaaataaataacaagttatctcctactgtttcctgaggaaagtgggaagtgccaaactttgtcaaagtggttgcaatgactaatctatatattacataaactaaaaaataatttcaattgcctgttacagctatgcattttattcattttctagttaagcaaattttaattatctgatacgaagcaagccccagtctttcagggaaaacaacacaaagcatttctagaaagcctttaaatatcataaatgaatccctaaagcttcaaatcatattgctcgaaacctcgtttc

SEQ ID NO: 90959 - DNA, 600 bp, Chicken  19866894399553_1
gaagaagatgctgcccgtatccatgtgtgggcagaggctgctggatgcatctgggcaagagggagatattttccagtaaaaagggctgtggaggtgggaaatggggctttgctctgcagaaagcaaggttattgcctatgctggctggctgagtgcttgcacttcaagtaccatgtaagagacgggtgtcctagggcaggtggagggtcccatggtccactcttcatgggcaagcatcaccaaatcatcccctgccccctcaccttgctgccacagtatgggaacatgggggcttccagyaccccatggcaccgcctaatggagaccactttggaggacacactgatgatggtggcttctgcagcacagcccctgtgtccctatgtccttcactgccaaagagtcagagatacggaggaagtttgactcaggataggggatatgggaatcactgaagttrgagaagtaaacaagtccaacctaatttacccaatcccatcactgaactgtgtctccaagagcctcatccacacatctccttaatatctcagtgatggggagtccaccactttcctggtcagcccattgcaatgtttgact

SEQ ID NO: 90960 - DNA, 447 bp, Chicken  19866894399553_2
acttcaagtaccatgtaagagacgggtgtcctagggcaggtggagggtcccatggtccactcttcatgggcaagcatcaccaaatcatcccctgccccctcaccttgctgccacagtatgggaacatgggggcttccagyaccccatggcaccgcctaatggagaccactttggaggacacactgatgatggtggcttctgcagcacagcccctgtgtccctatgtccttcactgccaaagagtcagagatacggaggaagtttgactcaggataggggatatgggaatcactgaagttrgagaagtaaacaagtccaacctaatttacccaatcccatcactgaactgtgtctccaagagcctcatccacacatctccttaatatctcagtgatggggagtccaccactttcctggtcagcccattgcaatgtttgactagcctct

SEQ ID NO: 90961 - DNA, 600 bp, Chicken  19866894399566_1
gtggtgagacactggcacaagttgcccagcgaggttgtaggtgcccccaccctggaagcattcaaggccaggctggatggggctataagcaacctggtctagagggaggtgcccctgcctatagaaggggggctggaattaaatgatcttaaaggtcccttccaaaccaaaccattctgtgattctatgaaggttttccttccaatattttaacactaatctcttgcgtgtttaaagccaagaggttgtgcaaaatgtacagaatgaagaatataaataattaaaaggcagttcatttasctatttcacttctgattaaaccgctgtgtcttttgagtagggccagacatagctattactgctgttttcttctgttgcagaaacataaattgacatttgattagraatgcttccttcctcagcctgtgctgatttctttgtatttccatgcggtgtacgctgttggctttacgcaaaagcaaggaagctctgcttttaaagcaaaagcaaatcaaaacctctttacataattaatttagtctccttaatcttgtgagaattttataggtctcatcttamgtaatttctgtaagaataaaa

SEQ ID NO: 90962 - DNA, 600 bp, Chicken  19866894399566_2
gaggtgcccctgcctatagaaggggggctggaattaaatgatcttaaaggtcccttccaaaccaaaccattctgtgattctatgaaggttttccttccaatattttaacactaatctcttgcgtgtttaaagccaagaggttgtgcaaaatgtacagaatgaagaatataaataattaaaaggcagttcatttasctatttcacttctgattaaaccgctgtgtcttttgagtagggccagacatagctattactgctgttttcttctgttgcagaaacataaattgacatttgattagraatgcttccttcctcagcctgtgctgatttctttgtatttccatgcggtgtacgctgttggctttacgcaaaagcaaggaagctctgcttttaaagcaaaagcaaatcaaaacctctttacataattaatttagtctccttaatcttgtgagaattttataggtctcatcttamgtaatttctgtaagaataaaaatacaactgcacaagcaagtgttgtgttgttgcttcatagcaaagtactttctgraagctgaaattaagattgtgcattcaaatgtattagaatttaaacattgt

SEQ ID NO: 90963 - DNA, 600 bp, Chicken  19866894399566_3
attaaaaggcagttcatttasctatttcacttctgattaaaccgctgtgtcttttgagtagggccagacatagctattactgctgttttcttctgttgcagaaacataaattgacatttgattagraatgcttccttcctcagcctgtgctgatttctttgtatttccatgcggtgtacgctgttggctttacgcaaaagcaaggaagctctgcttttaaagcaaaagcaaatcaaaacctctttacataattaatttagtctccttaatcttgtgagaattttataggtctcatcttamgtaatttctgtaagaataaaaatacaactgcacaagcaagtgttgtgttgttgcttcatagcaaagtactttctgraagctgaaattaagattgtgcattcaaatgtattagaatttaaacattgtagatagggttgatatatcttgctgttctggcaatttttttattttttattttttttcaattgactggtatcaagtaatgtttctgaatggctgtatctctggatgtatccctatctccagctaagtacttgtagttgcatgctataccaggggtgaggaggatgcactcccatt

SEQ ID NO: 90964 - DNA, 600 bp, Chicken  19866894399566_4
ttactgctgttttcttctgttgcagaaacataaattgacatttgattagraatgcttccttcctcagcctgtgctgatttctttgtatttccatgcggtgtacgctgttggctttacgcaaaagcaaggaagctctgcttttaaagcaaaagcaaatcaaaacctctttacataattaatttagtctccttaatcttgtgagaattttataggtctcatcttamgtaatttctgtaagaataaaaatacaactgcacaagcaagtgttgtgttgttgcttcatagcaaagtactttctgraagctgaaattaagattgtgcattcaaatgtattagaatttaaacattgtagatagggttgatatatcttgctgttctggcaatttttttattttttattttttttcaattgactggtatcaagtaatgtttctgaatggctgtatctctggatgtatccctatctccagctaagtacttgtagttgcatgctataccaggggtgaggaggatgcactcccattgcaaccgggtgcgaactgatccttctctcacttcatgtttggttcagcctgtcataggaactgcacaaaatgaaga

SEQ ID NO: 90965 - DNA, 600 bp, Chicken  19866894399568_1
ccactgcctggctcaagcacctttctgtctggtgtactgtctctgaatcatctcattattctgttcctaacacaacgtttgccttacttgaatgattttggcatgatctcaaagatctggactctacgtcaactgccatcactcagtgacactcaagagtcaaattcatgcataatctcaaatggtctgtagatataacctaattcacacagaaaatctgtaaagaagcaatcagctctttcagactgacactcagttttctttagaaagcatttgtaaagactgaatagcaaacatacragaagtgagactgactatagaaaatcatctctgaaataggcatgcagatttaaaagtaagtttcagatttctagattccagatagttcaatttctttgccttcaaggagatatgaaggttcttccaaatatttatgagagaaaatgtttccattcccatagtactgattccttatgcttaaaactagcctgggccacatcatttagagggagaagatgtccaattgaagttattttggaatcaccctttttgttaatttagaaggaaaaaaacccaactcagttgactatttcacttgga

SEQ ID NO: 90966 - DNA, 599 bp, Chicken  19866894399569_1
  misc_feature (1)..(141): n is any nucleotide
nnnnnnnnnnnnnnnnnnnnnnnnnnnnnnnnnnnnnnnnnnnnnnnnnnnnnnnnnnnnnnnnnnnnnnnnnnnnnnnnnnnnnnnnnnnnnnnnnnnnnnnnnnnnnnnnnnnnnnnnnnnnnnnnnnnnnnnnnnnnncacagatcagtttcttacatacaaatctcttccataacacattattgttttttaattaatattatatttacgaactcagatttttgtacttgctttaagtaaaaattgatcccagaagatcaagacatggctaacaatatgtatcttcaaaatgttttycatacacattcctactatttctgaagtattcacattctaatgtcagcactccacctcaatatttaagcattattattttcagtacagccagaaaatacaatgaggttgtatctcaagggtctgcctacatataatacacacaataaaaaatggaaccattccttttttcatactcaaaattcagatgtttcatagctggaaaggagagaagaatatgcaatgatgggcaatacaattagcagtcaccccatcaagtctaatcagtgtaaagttagagtataaaaaggttaacatgagta

SEQ ID NO: 90967 - DNA, 600 bp, Chicken  19866894399569_2
tttctgaagtattcacattctaatgtcagcactccacctcaatatttaagcattattattttcagtacagccagaaaatacaatgaggttgtatctcaagggtctgcctacatataatacacacaataaaaaatggaaccattccttttttcatactcaaaattcagatgtttcatagctggaaaggagagaagaatatgcaatgatgggcaatacaattagcagtcaccccatcaagtctaatcagtgtaaagttagagtataaaaaggttaacatgagtatctaagtagtgaagaaaratattttcaaagcaggtacctgtcctaatscataatattaaggcaagtcatcttttggatatgggtaacagtttatttctcaagtctaaagttgaatttaaacagacatttcaggttagatagttggttttcagatggaataaactgggttatatgtaatttcatctgaataggattcagttagtataaggtaagtttctcactttgttctatcagattactggcatcggctacacacagtaattggatatttgcctatatcaatttcagacttaatggctcagaagcagtggaatggat

SEQ ID NO: 90968 - DNA, 600 bp, Chicken  19866894399569_3
actccacctcaatatttaagcattattattttcagtacagccagaaaatacaatgaggttgtatctcaagggtctgcctacatataatacacacaataaaaaatggaaccattccttttttcatactcaaaattcagatgtttcatagctggaaaggagagaagaatatgcaatgatgggcaatacaattagcagtcaccccatcaagtctaatcagtgtaaagttagagtataaaaaggttaacatgagtatctaagtagtgaagaaaratattttcaaagcaggtacctgtcctaatscataatattaaggcaagtcatcttttggatatgggtaacagtttatttctcaagtctaaagttgaatttaaacagacatttcaggttagatagttggttttcagatggaataaactgggttatatgtaatttcatctgaataggattcagttagtataaggtaagtttctcactttgttctatcagattactggcatcggctacacacagtaattggatatttgcctatatcaatttcagacttaatggctcagaagcagtggaatggatgacggtgatgaagtgctaagcacctatccc

SEQ ID NO: 90969 - DNA, 600 bp, Chicken  19866894399571_1
aggataataggacctgtctggtttgggattcaatcaaagcctgggaccctccctctgagtgggatgcaattcactgctctgcatcagacaaacagcagccactttctgtgacaatgagtgtgtttcagcagtctctctcatgggagagaagagcttttcccttcccctctctcactcccagtactaattctttgtgcacgaccacagaagtcccttttcagctgctacaggtgacctgtggtgatactctaacctgcttggttctgtcccccataacagctttcctggtggtagcaccasaggattccagctccatattgtcacacgtgagtttgttccaaagtcgtatgaccctctaacaacaaacagcacttggggatggaggaggttggcgtggaggatgaagcagacacaccgcagttctctgtttgcagtggttccagccacatggtggcagttccccataagcctcactgctgctcccttgtcccagaggacctaggatttagttctgctaatctccagatctcatagaatgttatacatttaggcaagggtttatccctggagtcatattagattactaagacactgggaaac

SEQ ID NO: 90970 - DNA, 600 bp, Chicken  19866894399574_1
ttccagacagtttccctgtggacatgtttcctctccacttaaacgtgagacattcaggggagcatattaacaggaaggggaacggctgttcatgagggtggataatgacaagggggaatggtcttaaactgagacaggagaggtttaggttagatattaggataaagtttttcacacagagggtggcgacacactggaacaccagttgcccaaggaggttgtggatgtcccatcgctggagccattcaaggccaggctggatgtggctctgggcagcctggtcttggtggttggcgaccstgcrcacagcagttggggttgaaatgcaatgatcattgtggtccttttcaacccaggccattctgtgattttatttccagaccatttatgtatactcataaacaaaaccaactggttacatacctcagagaaagttgcacaaactattgattaacattacacttaactctcttctgttacaacttaccttgtgttatgacctgatctgattgtgttttcaaagattaagttttcaattaaatgcagcttgagttcctcaccctccaagagacttaccgctaaacatccttattacccagc

SEQ ID NO: 90971 - DNA, 600 bp, Chicken  19866894399574_2
agacagtttccctgtggacatgtttcctctccacttaaacgtgagacattcaggggagcatattaacaggaaggggaacggctgttcatgagggtggataatgacaagggggaatggtcttaaactgagacaggagaggtttaggttagatattaggataaagtttttcacacagagggtggcgacacactggaacaccagttgcccaaggaggttgtggatgtcccatcgctggagccattcaaggccaggctggatgtggctctgggcagcctggtcttggtggttggcgaccstgcrcacagcagttggggttgaaatgcaatgatcattgtggtccttttcaacccaggccattctgtgattttatttccagaccatttatgtatactcataaacaaaaccaactggttacatacctcagagaaagttgcacaaactattgattaacattacacttaactctcttctgttacaacttaccttgtgttatgacctgatctgattgtgttttcaaagattaagttttcaattaaatgcagcttgagttcctcaccctccaagagacttaccgctaaacatccttattacccagcttac

SEQ ID NO: 90972 - DNA, 600 bp, Chicken  19866894399575_1
taaattttgatggataatcagttttgaataagaactgtgtcggacaaaagctcagatacagcagatgtgtacaagctacatgatgttcagtttgtaactctacaaatcaagactctaaagaaactgctaacagctgaccagattttattcggcagcaaaattggaagagggggaagaaatttaatggcaaacccctttcctagcaacttcagggctcccctttgaattttatcctggaaacagttattctgactgtggtaatgcttcaagatagaccaaaatataggattaaattggatrcaaatcttagagccaagctccctgaatttggagattatttggctctggatctaaactgtgtcttgaatccatttctgatgtagaagaaaaataaatggttttaacaaccaagaggttacttaaaacagagaacaacccctttttgttaaatgtctgaattcccagaacactgagaaacaattgttattttacctgaatggatccaagttattcaaatgtacttatagtgcatttctctattactatgatgattcyctatgtaccattatatatatatatatattaatatttaattttcat

SEQ ID NO: 90973 - DNA, 350 bp, Chicken  19866894399575_2
tggtaatgcttcaagatagaccaaaatataggattaaattggatrcaaatcttagagccaagctccctgaatttggagattatttggctctggatctaaactgtgtcttgaatccatttctgatgtagaagaaaaataaatggttttaacaaccaagaggttacttaaaacagagaacaacccctttttgttaaatgtctgaattcccagaacactgagaaacaattgttattttacctgaatggatccaagttattcaaatgtacttatagtgcatttctctattactatgatgattcyctatgtaccattatatatatatatatattaatatttaattttcattattg

SEQ ID NO: 90974 - DNA, 600 bp, Chicken  19866894399576_1
agtatctgtgtttgaacgtaaggtcatcatttgcaggtcaacttgagcttgctatttgttagttcccttatttaatattgttagatgtactgtcataatgtccacagagaggacggttgcgaaaccgtcaatctgtctcatgcaaatgagaaatggaaaagtgatcttaggtaaaaggaatatcataaaaatctctgccttctgaagtgacacattatcaaaaaggttgggagcaaggtgcaaggattgctcttaaccccatgttcatcgtgaatctctttcctaatccctttgcattcrtcctgctgtacctttattaaagaaaaaaaacatggaaaagcaaagagctggaaatagattggaaaggaacaaaccatgagttaaattaatgctaccacaggtatgtagcaccaatgataattcctccctgtgcaatggtgctacggtttcggatgtgatgtatattctgatgtacttctcagaggagaaatgaggccagtgagtaattgtcatgtcaaataatcaaataattgtttttcagcctgctgtagattactattgatggcaagaactgccaggaggcattcgtactttgaaagg

SEQ ID NO: 90975 - DNA, 600 bp, Chicken  19866894399594_1
atgttcaacccatatcattgccatggagaaactgaattcctgaataccctgtcattgaacctttagagatgtaaacaggacatgcagagcacacagctcttattaagtttggaatatgcataaatataaaaatgaggtatcatctacctacatacagcctgtaattttcttcagataaattttgtagtattacttataattttagtctttttgttagtgtatgttaatttgctgtgaactaaaaggcatggattgcccatttaaagcaccttgaatttaacagcaggacaagggggaacrcttttaagttgaaagagggaagatttaggttggatgttagggggaagttctttacaaggagagtggtgaggtgytggaacaggctgcccctagaggttgtggatgccctgtccctggaggtgttcaaggcgaggttggatggggctctgggcaacctggtcgagtaaatgggaaggctggtggccctkcctggtaggggggttggagattcatgatccttgaggtcccttccaacccaggccattccgtgattctgtgaattttcaaatgtgtacccaaaagatggaataatgaacaaag

SEQ ID NO: 90976 - DNA, 600 bp, Chicken  19866894399594_2
acaggacatgcagagcacacagctcttattaagtttggaatatgcataaatataaaaatgaggtatcatctacctacatacagcctgtaattttcttcagataaattttgtagtattacttataattttagtctttttgttagtgtatgttaatttgctgtgaactaaaaggcatggattgcccatttaaagcaccttgaatttaacagcaggacaagggggaacrcttttaagttgaaagagggaagatttaggttggatgttagggggaagttctttacaaggagagtggtgaggtgytggaacaggctgcccctagaggttgtggatgccctgtccctggaggtgttcaaggcgaggttggatggggctctgggcaacctggtcgagtaaatgggaaggctggtggccctkcctggtaggggggttggagattcatgatccttgaggtcccttccaacccaggccattccgtgattctgtgaattttcaaatgtgtacccaaaagatggaataatgaacaaagttatcttgtttaaaaacagcatactttttccatgtgttcctttgtttggttttgtttgtttgtttattttaata

SEQ ID NO: 90977 - DNA, 600 bp, Chicken  19866894399594_3
attacttataattttagtctttttgttagtgtatgttaatttgctgtgaactaaaaggcatggattgcccatttaaagcaccttgaatttaacagcaggacaagggggaacrcttttaagttgaaagagggaagatttaggttggatgttagggggaagttctttacaaggagagtggtgaggtgytggaacaggctgcccctagaggttgtggatgccctgtccctggaggtgttcaaggcgaggttggatggggctctgggcaacctggtcgagtaaatgggaaggctggtggccctkcctggtaggggggttggagattcatgatccttgaggtcccttccaacccaggccattccgtgattctgtgaattttcaaatgtgtacccaaaagatggaataatgaacaaagttatcttgtttaaaaacagcatactttttccatgtgttcctttgtttggttttgtttgtttgtttattttaatatatcattctatgtggttatttcttcctacattccatttgagagccacgtgttcatcagctcattgccttagtagcatttcaatccaagctaagagatttttctcaaagaaaaac

SEQ ID NO: 90978 - DNA, 600 bp, Chicken  19866894399598_1
tgtgagctcagggctttgcagacttcgaagttatggacagaaaattttaaattacttaggaattctaatgagcagatggacaagttatgcgatggccttcccagcctctggggctgagatgcactgcagtgctgcaatgcctgaaggtcataagtggtgataaacgtgaggacaactaatgtcattcagctctcttaggacaaaataaaggagaaaaaaaaagagaagtaaacaggccaaaacaactgatacacaataataggaaaacacccatgtgctaccataaaagtagaccatttwaaaargattaatagctgtgcccccaggtactagctaaatgtttaaaaaaaaaccacatggaagttagattctttgtatgaaaatgcgttcattatggaattcaggagcatatgtttaaccatttggaacttaacaatgcaggcaatatttccccacattaattcaattttaagaagaattacagaagattctgcattgtcattccttcccaacaacagctaaagttattttctaaatttgtccattacacaaagcatattaaatcagaggtattgaaactgcttgataactcattaatct

SEQ ID NO: 90979 - DNA, 600 bp, Chicken  19866894399598_2
gctcagggctttgcagacttcgaagttatggacagaaaattttaaattacttaggaattctaatgagcagatggacaagttatgcgatggccttcccagcctctggggctgagatgcactgcagtgctgcaatgcctgaaggtcataagtggtgataaacgtgaggacaactaatgtcattcagctctcttaggacaaaataaaggagaaaaaaaaagagaagtaaacaggccaaaacaactgatacacaataataggaaaacacccatgtgctaccataaaagtagaccatttwaaaargattaatagctgtgcccccaggtactagctaaatgtttaaaaaaaaaccacatggaagttagattctttgtatgaaaatgcgttcattatggaattcaggagcatatgtttaaccatttggaacttaacaatgcaggcaatatttccccacattaattcaattttaagaagaattacagaagattctgcattgtcattccttcccaacaacagctaaagttattttctaaatttgtccattacacaaagcatattaaatcagaggtattgaaactgcttgataactcattaatctaaaca

SEQ ID NO: 90980 - DNA, 600 bp, Chicken  19866894399605_1
aataaagtttttcactattcaagagtgccaattataaatacagaatctgcctgttacttttttagttatttggctttaactgttccaaattgtcacaaatggaaagatcagacaatgtaaaaattctacatcataaccaggaaagacaaataaactattattaaatgctttaaatacctcaaagtttaaacaacacagagagaacagcaattgaactagcaaaaacataccagaattgaaattagagtgaataaatatagattgtcccaactaaattaaagctgtaaattagaggaaaaygtgaaatgctaatttcattaagtacaggaaatgtgagaaaacctrctcttctcaagatggagtaatatacacatatatgagcgaagttagttgtctgtggcatcaaggaacttcacaaatcaagatcccagtgtatcgaccgccaaagctcccggctctcttctataatgggtaaaaaaaaaaaagaaaaaagaaaaaaaggagggtgggggggctttgctgctgggaaagtcattcagacatgcaatcacccatccactacacatctaagtctttgcaatatcttcaaaatatgccaca

SEQ ID NO: 90981 - DNA, 600 bp, Chicken  19866894399605_2
tctgcctgttacttttttagttatttggctttaactgttccaaattgtcacaaatggaaagatcagacaatgtaaaaattctacatcataaccaggaaagacaaataaactattattaaatgctttaaatacctcaaagtttaaacaacacagagagaacagcaattgaactagcaaaaacataccagaattgaaattagagtgaataaatatagattgtcccaactaaattaaagctgtaaattagaggaaaaygtgaaatgctaatttcattaagtacaggaaatgtgagaaaacctrctcttctcaagatggagtaatatacacatatatgagcgaagttagttgtctgtggcatcaaggaacttcacaaatcaagatcccagtgtatcgaccgccaaagctcccggctctcttctataatgggtaaaaaaaaaaaagaaaaaagaaaaaaaggagggtgggggggctttgctgctgggaaagtcattcagacatgcaatcacccatccactacacatctaagtctttgcaatatcttcaaaatatgccacacaacctggagctccgtgtctctaatccttatcagtgaaatatagt

SEQ ID NO: 90982 - DNA, 600 bp, Chicken  19866894399617_1
aaaatatatgatctttgttccaaatcacaactcccctggcatcaatttaggtcttaatatcagactgaactcctacatgattttagagaaacaccattcaggtgaaaaatcattttaaaaattgctatcattatttgagtatagcaataaacatcactcatgctgtttactttatcactcaattctcagtgcagctggccaagacatggaaaacgtttagttaaagaaagaggaaaatttgaagatttgaagatttgaagctttgttaagtcacataaatggcacagatgcctgtagagyttttgattagagctagccaaactgtggctctcaggttacacccattatgacagtttgcggtgcacatcctgtgccttgatggaataccagtcagggactaggacaaatcaacatgcgtaccctgccctgccccaccctaaagtacctccccacaggtaagagttggatcttggggatgttggtcaatgcttggataaaaatgagccacttgtgtgcccaggtggccaagaaggccaatggcatcctggcttgtatcagaaatagtgttgccagcaagggaggtgattgtcattctgtact

SEQ ID NO: 90983 - DNA, 577 bp, Chicken  19866894399630_1
aattatggaatcatggggtttaagaaggtagtagaaattagtaaagaaattttactcttacagaaaaagagaatgtctggagttctaactgctgacactaaacgttctcatagagaaattcaatctcgtgcttctggttcaaagctgatctgtagttagcaatgattctgtgccatctgagcgggggaaagatttttcagtacttgatcctctgttttactgcttctagtgaggcatctgctcctggcttactgcaagtgcttcgtggacttaaatacaagtaattccagccaaattcayttattactatgttttgtgacatttctacggggtacataggaggtttctattaaagtgtgtgtattagctgatagacagagtcaaggtagatggtgtgatgagcattgaggtataatttgtgagatacattccagaaatatggggaaatggggcaaataaaaatactaaatgtagagtgttctgcacagcacttccaaaaagtgccatatatattctgttcccatccctaaatctaaatcaggggaaatttaagtgtgtgcagtgacaaatcttagtg

SEQ ID NO: 90984 - DNA, 600 bp, Chicken  19866894399638_1
agaagaggtaggctttgctgccacaaacagtgaaataaataaccagcaagatctgtctacttgtctttttttctgctaattgcataataagattctgttttgcctctattgttgaatattgaatagtcaagaatttaggctatcacagaccagaaatctgcattaattagaatggagaatgtctcactctaacagcagtatgagtatcaataagtctttggatcaagcaatttcagactgaggttgtgttgcaagaaatgttaagggattgtcctacattgtaataccttggcattaagwttttaactatgcttgttatttgtaaatatgctgagaagatgattaactgcaagattaaaaagaagtctttgatcttggagtatctaatacccgatgtccatggagactgctattaaaacaactaacttctgtaaaagttcacttaacaccaggctcatgttatctttacataggccctttcgttagttggagcagagaatataatattgtatatctttaaatattctatataatattctatattaattacatagagaatataatgttctgtattaattcagaacccccagaccctcagag

SEQ ID NO: 90985 - DNA, 599 bp, Chicken  19866894399653_1
  misc_feature (1)..(227): n is any nucleotide
nnnnnnnnnnnnnnnnnnnnnnnnnnnnnnnnnnnnnnnnnnnnnnnnnnnnnnnnnnnnnnnnnnnnnnnnnnnnnnnnnnnnnnnnnnnnnnnnnnnnnnnnnnnnnnnnnnnnnnnnnnnnnnnnnnnnnnnnnnnnnnnnnnnnnnnnnnnnnnnnnnnnnnnnnnnnnnnnnnnnnnnnnnnnnnnnnnnnnnnnnnnnnnnnnnnnnnnnnnnnnnnnnnnaaatatggccatgtgtgagtgcattctgttggcaaagtctatacctgaactcctcccttgtcttggtgtatgrctgtccctcatcccaagcagatcacactgggcttgcctacctccctgtcctctgcaggactaagcaatgagactgcaccaatttgctcacatcacttttttctctaccttcactgattctgttattgaacttcactgaccaggcactgagcaaacactgagtattcaacaccagcctctggcttctgcacttacagcacagaactgcctttgggaccaagtcctagttgaaagagtaatcagccatgacttcttggtgattgcttttaatgacctcatcctaagcccctccagaaggca

SEQ ID NO: 90986 - DNA, 600 bp, Chicken  19866894399653_2
attgaacttcactgaccaggcactgagcaaacactgagtattcaacaccagcctctggcttctgcacttacagcacagaactgcctttgggaccaagtcctagttgaaagagtaatcagccatgacttcttggtgattgcttttaatgacctcatcctaagcccctccagaaggcaatggcagctgagggcattaagcatcagagctggtgctcagtgtctcacaaattgggattttacctgggcaggttttctgagagttgatatttaaaccaaaggacgtcactacctctgaagttargcaatgattaactccttgctcctatatctgaggaagttaaagaactcattcaagaagcatttttaaataartgaacgtatgtttagtttctgcacacagtgggagatgagaagcaaggaatgcattttggagaggatgttttctgtattttttgtgcttctggctactaggttagctgggagaaaaatacccacaaacaaaattcagccattcaagttctaaatgagtgcagatattgtgatgggaatttattgaagtattccctcctctccttcagccccgtggggctgcctccactgc

SEQ ID NO: 90987 - DNA, 595 bp, Chicken  19866894399653_3
agcacagaactgcctttgggaccaagtcctagttgaaagagtaatcagccatgacttcttggtgattgcttttaatgacctcatcctaagcccctccagaaggcaatggcagctgagggcattaagcatcagagctggtgctcagtgtctcacaaattgggattttacctgggcaggttttctgagagttgatatttaaaccaaaggacgtcactacctctgaagttargcaatgattaactccttgctcctatatctgaggaagttaaagaactcattcaagaagcatttttaaataartgaacgtatgtttagtttctgcacacagtgggagatgagaagcaaggaatgcattttggagaggatgttttctgtattttttgtgcttctggctactaggttagctgggagaaaaatacccacaaacaaaattcagccattcaagttctaaatgagtgcagatattgtgatgggaatttattgaagtattccctcctctccttcagccccgtggggctgcctccactgcaaggtccttcttccctcacttttgacactgtctcttgttcccatctttatattcccctaccttatt

SEQ ID NO: 90988 - DNA, 600 bp, Chicken  19866894399654_1
cattttaaagtaaggttgcacgtgtgcttgagaacattaccaaaataacattgaatatcatcagtggctattaggccttatgtattaaccacctgtctgttactacctcgttgtattctcctgatgtagtgaagtatttaaatttctttttttttcctttgggatctatgctttcttaaattgttccttataattagcaaaattcttttcatattattcatacaaaacttctattgcttatattatctatgcagcagccaaaagtgagcagaatgtaatggcagaatgaataaagaagtrtacaaagacttgctgcataattttgacatccgaaaagacttgagaataacaaataatgcgatacacaagggaaaaggaaaagaaattcaggggaacaatatcttattatttacatgtgatacattccttgacgttctcagaaacatcaatgagcttagatagacttacaggtggaaaaaatgggtacacgaggtcttcttgagatatggaccatgaatcagagaaaaacaaggcagcactctttatttataggaattttttgagaggactgtaggaaaaatgccaggtaatgaagagaga

SEQ ID NO: 90989 - DNA, 600 bp, Chicken  19866894399657_1
aggtgtcagagaaaccctgaggtccaagaagaccccacagccccttctggtccttcagtccatccctggaggcattaaagaccaggctggatgggaccctgggcagcccactctagtaccagatctggaggttggtggccctgtctgtgccagggcggttggaacctgattatcccttccaacccaagccatgctatgactctgtgacctcctcattttgtcctccttatgttttgtcatgagttatgcagccctccagcacctcatctctgttccagacatttcaccccattccagctyartgcagatgcaccaaagcggggaggatgctgcagcacggaccaacctcacacctggatgcccaaacctctcctggcccaaggctgtaataaagcagctttcaaggagcaggtgcagcaaacatttgcatcaggtctttgccgagctgtaatttgaactaacagaattctaattaatttaactcaaagtgatggtaaactgtgggatggaaaccctgtgaacatcattccatcaggcagcagctcacggtcccacagagcccccagtccccccacactcacttgcatggagcacagcctg

SEQ ID NO: 90990 - DNA, 600 bp, Chicken  19866894399657_2
gtgtcagagaaaccctgaggtccaagaagaccccacagccccttctggtccttcagtccatccctggaggcattaaagaccaggctggatgggaccctgggcagcccactctagtaccagatctggaggttggtggccctgtctgtgccagggcggttggaacctgattatcccttccaacccaagccatgctatgactctgtgacctcctcattttgtcctccttatgttttgtcatgagttatgcagccctccagcacctcatctctgttccagacatttcaccccattccagctyartgcagatgcaccaaagcggggaggatgctgcagcacggaccaacctcacacctggatgcccaaacctctcctggcccaaggctgtaataaagcagctttcaaggagcaggtgcagcaaacatttgcatcaggtctttgccgagctgtaatttgaactaacagaattctaattaatttaactcaaagtgatggtaaactgtgggatggaaaccctgtgaacatcattccatcaggcagcagctcacggtcccacagagcccccagtccccccacactcacttgcatggagcacagcctggg

SEQ ID NO: 90991 - DNA, 599 bp, Chicken  19866894399662_1
  misc_feature (1)..(161): n is any nucleotide
nnnnnnnnnnnnnnnnnnnnnnnnnnnnnnnnnnnnnnnnnnnnnnnnnnnnnnnnnnnnnnnnnnnnnnnnnnnnnnnnnnnnnnnnnnnnnnnnnnnnnnnnnnnnnnnnnnnnnnnnnnnnnnnnnnnnnnnnnnnnnnnnnnnnnnnnnnnnnnnnntatttctttcctgtaagaatacagagttatgtgcatttttaagacaaagaaaatctaacagaagtatgatatttttagacagctaagagagcatattgcacaatatattttgccagtcaatatggcctaaggggctacrgagtgtacaataatcaagcctatctgtgtaatatcccagcagaatttggaatccaaagatttccttttacctgtaataaactattgttcagttcattcaatrttggaatattccgcctgggtcaatgatggcagctcaggcaaacaaaagaagtctttatgctccatctagatgttgcaaggtacttattcaatttcttctgcatcaggggcactgttccttacctaatatgtatacatttgctgagtgttattcagcctttgttgcatctgaccctcacttggcatttaattcccagt

SEQ ID NO: 90992 - DNA, 599 bp, Chicken  19866894399662_2
  misc_feature (1)..(59): n is any nucleotide
nnnnnnnnnnnnnnnnnnnnnnnnnnnnnnnnnnnnnnnnnnnnnnnnnnnnnnnnnnntatttctttcctgtaagaatacagagttatgtgcatttttaagacaaagaaaatctaacagaagtatgatatttttagacagctaagagagcatattgcacaatatattttgccagtcaatatggcctaaggggctacrgagtgtacaataatcaagcctatctgtgtaatatcccagcagaatttggaatccaaagatttccttttacctgtaataaactattgttcagttcattcaatrttggaatattccgcctgggtcaatgatggcagctcaggcaaacaaaagaagtctttatgctccatctagatgttgcaaggtacttattcaatttcttctgcatcaggggcactgttccttacctaatatgtatacatttgctgagtgttattcagcctttgttgcatctgaccctcacttggcatttaattcccagtccaccagggtattcatgcttgatggcactgatgcacacactgaatgctttatttatttaatggtaaagggaatgaagctataaactgtattagacaatatcc

SEQ ID NO: 90993 - DNA, 600 bp, Chicken  19866894399662_3
ccttacctaatatgtatacatttgctgagtgttattcagcctttgttgcatctgaccctcacttggcatttaattcccagtccaccagggtattcatgcttgatggcactgatgcacacactgaatgctttatttatttaatggtaaagggaatgaagctataaactgtattagacaatatcctgtttaaagatgccaatggtcggtgtcacagcattactgacccacatctacagcagtgaatatgtcactggaatttagagggttgtgtatataatgattacagatcaacactgcaayagggaaagaataaggtttcaattcaaaacccattaaacattcgttaggaatattgttacggtattgaagatgttatgtgcctttttacattctctctttttgaaaaatgtacatgaatcttcacttctagtggcaagaaatttcctttcagatagcacagtctctagcacaaactgctgatattacagtgaaatttaagatatatccctgtgtagctctgcagaattattttaaagcacggtgctctgcaactaaacagctgagggctggctgtgcacagttcttgtaaaaatcagtagc

SEQ ID NO: 90994 - DNA, 600 bp, Chicken  19866894399665_1
gttatgatcctcacagaatataatatttcttatgaaacttaattaggtgttgatggtaattcttcaaatctctcaatatgtaaatattctttatgatcttttcctactaaaataccacaagccatagttcactcaataatgtaaatgaagaatacaccaatctctaaaaaaagggatagctcactgacttccactctgtgattctgtgaaaaaacacaaaaccactggatcttgttgcatatttggaaaaagaaggtaagcaaggaaaacaaattatctctggatagtaaataaatcctmttaacatakgatcacttgttatatttatcaaaattttcacttgttcaaaacattaacagtcttaaacattctcccaaatgcagtgtacacctaattattgcaaacagctcatgttaaaatcatactatcaatgaacatataaaacaaacaaaattctcatctatattcacaaatgacttctaatttacaacagctatttgactactgatttcactgaggtctttgaagtactgctcacacacaagcaagaactggattactgtcatataaatgactgtgtgtgattatacttgtttcatt

SEQ ID NO: 90995 - DNA, 600 bp, Chicken  19866894399665_2
ctcacagaatataatatttcttatgaaacttaattaggtgttgatggtaattcttcaaatctctcaatatgtaaatattctttatgatcttttcctactaaaataccacaagccatagttcactcaataatgtaaatgaagaatacaccaatctctaaaaaaagggatagctcactgacttccactctgtgattctgtgaaaaaacacaaaaccactggatcttgttgcatatttggaaaaagaaggtaagcaaggaaaacaaattatctctggatagtaaataaatcctmttaacatakgatcacttgttatatttatcaaaattttcacttgttcaaaacattaacagtcttaaacattctcccaaatgcagtgtacacctaattattgcaaacagctcatgttaaaatcatactatcaatgaacatataaaacaaacaaaattctcatctatattcacaaatgacttctaatttacaacagctatttgactactgatttcactgaggtctttgaagtactgctcacacacaagcaagaactggattactgtcatataaatgactgtgtgtgattatacttgtttcattcttgtcatc

SEQ ID NO: 90996 - DNA, 600 bp, Chicken  19866894399665_3
aactggattactgtcatataaatgactgtgtgtgattatacttgtttcattcttgtcatcccaaaacacataagcctgtgtcctctcagggagcagcatgctaggactgaacagcaaaattttagctttcctgcagcacgcaagacctgctttcagtcagccttcattctgctctccaaaaaaccatgcggtatacgtcagaaggatatagcaaggacaaccttatatataaggtcctttctgtagagaaaagatcagttttccctttcactgaggccttatgataccgctgcttagcayacatctgtgcaaaataaaggacctcaaaactacagaattactcatctgtatgcacagatgatattttagtctgtgtcttttactaataagatacttcagaaaagtaaatgtatctgcttgatgagtcattccgctgcttatttcactggtatggaaaatgacaacctctgtgttaacaagaaaacacaaacgtttgctcccttgtcctggttgtatttatcttctgcttgtctggacttcagggaaagttaagcataatcatcagaatacaatgtgttctacatcaaggaagacaaaata

SEQ ID NO: 90997 - DNA, 599 bp, Chicken  19866894399670_1
  misc_feature (1)..(180): n is any nucleotide
nnnnnnnnnnnnnnnnnnnnnnnnnnnnnnnnnnnnnnnnnnnnnnnnnnnnnnnnnnnnnnnnnnnnnnnnnnnnnnnnnnnnnnnnnnnnnnnnnnnnnnnnnnnnnnnnnnnnnnnnnnnnnnnnnnnnnnnnnnnnnnnnnnnnnnnnnnnnnnnnnnnnnnnnnnnnnnnnnnnnaggaaaatggtatttttatttatccctctatgcgtttttgactgtatgctctgggtcctccagaagtatttctgtttgcctttggctgccattgatatttaagctcaataacattgcctygcacaatgtgagcttgactgtagtcaaaagttacagtaagatccttatctgtggcgttattttagatccctgtgcaactcccactggagttagtggaaagaattcrgttcacttgaacaagaggtggatttgggaggggatctcatagctttgcacagttttcttatcaaataccttaggttcatagcagtatgggtccctgattgtttctcagattggctcaagctcaagaaaaagatatcgtggtctctgtaagtaatcagctacaggaaasgggagggaagaaaaagcaactgctt

SEQ ID NO: 90998 - DNA, 599 bp, Chicken  19866894399670_2
  misc_feature (1)..(74): n is any nucleotide
nnnnnnnnnnnnnnnnnnnnnnnnnnnnnnnnnnnnnnnnnnnnnnnnnnnnnnnnnnnnnnnnnnnnnnnnnnaggaaaatggtatttttatttatccctctatgcgtttttgactgtatgctctgggtcctccagaagtatttctgtttgcctttggctgccattgatatttaagctcaataacattgcctygcacaatgtgagcttgactgtagtcaaaagttacagtaagatccttatctgtggcgttattttagatccctgtgcaactcccactggagttagtggaaagaattcrgttcacttgaacaagaggtggatttgggaggggatctcatagctttgcacagttttcttatcaaataccttaggttcatagcagtatgggtccctgattgtttctcagattggctcaagctcaagaaaaagatatcgtggtctctgtaagtaatcagctacaggaaasgggagggaagaaaaagcaactgcttgggaattttgaggtaactctcaatgtagggagcgtggagattttaacatygcatctcagtacggactggagacacaatagttctgcagccaagtgaaagctgctct

SEQ ID NO: 90999 - DNA, 600 bp, Chicken  19866894399670_3
atatttaagctcaataacattgcctygcacaatgtgagcttgactgtagtcaaaagttacagtaagatccttatctgtggcgttattttagatccctgtgcaactcccactggagttagtggaaagaattcrgttcacttgaacaagaggtggatttgggaggggatctcatagctttgcacagttttcttatcaaataccttaggttcatagcagtatgggtccctgattgtttctcagattggctcaagctcaagaaaaagatatcgtggtctctgtaagtaatcagctacaggaaasgggagggaagaaaaagcaactgcttgggaattttgaggtaactctcaatgtagggagcgtggagattttaacatygcatctcagtacggactggagacacaatagttctgcagccaagtgaaagctgctcttctgaatgtgaataacagctgtgatttggcctcagtggcattggatttaatgtgatgctaactgggaagcctttgaaaatcaccaccgaagaaagctgaaatcccagcagctgggaactggaggtgctcactcttgcagaggactggaactttcactacgtgtagggat

SEQ ID NO: 91000 - DNA, 525 bp, Chicken  19866894399670_4
tgtggcgttattttagatccctgtgcaactcccactggagttagtggaaagaattcrgttcacttgaacaagaggtggatttgggaggggatctcatagctttgcacagttttcttatcaaataccttaggttcatagcagtatgggtccctgattgtttctcagattggctcaagctcaagaaaaagatatcgtggtctctgtaagtaatcagctacaggaaasgggagggaagaaaaagcaactgcttgggaattttgaggtaactctcaatgtagggagcgtggagattttaacatygcatctcagtacggactggagacacaatagttctgcagccaagtgaaagctgctcttctgaatgtgaataacagctgtgatttggcctcagtggcattggatttaatgtgatgctaactgggaagcctttgaaaatcaccaccgaagaaagctgaaatcccagcagctgggaactggaggtgctcactcttgcagaggactggaactttcactacgtgtagggat

SEQ ID NO: 91001 - DNA, 600 bp, Chicken  19866894399679_1
tgtactcagcactggtgagaccacactttgagtatagtgttcagttttgggcccctcactacatgaaagacattgaggccctggagcgtgtccagagaagggcaacaaaactggtgaggggtctggagcacaagtcttatgaggagccactgaggaagctggggttgtttagtctggagaagaggaggctcaggggagacctcattgcactctacaacttcctgaagggaggttgtgatgaggaggggtttggcctcttctcccaggcaacaaacaggacctgaggaaatggccacaagytgtgccagaggaggtttagatcatacataaggaaaaactttttcctctcagagagtggtcaggcactggaatggcctgtccagggaggtggtggagctgccatccctggcagtgttcaagaggcatttggatgaggagctacaagatatggtttagtggcttgtagtagcaagggtaattgggaggacagctggagtagatgatcttgtaggtcctttccaaccttgtgattctatgactctcattatatgcttgtgctgtaccatcttaacatctttctgtgtccaattagttctttaa

SEQ ID NO: 91002 - DNA, 599 bp, Chicken  19866894399686_1
  misc_feature (1)..(46): n is any nucleotide
nnnnnnnnnnnnnnnnnnnnnnnnnnnnnnnnnnnnnnnnnnnnnnagagtatttgggaagatgagaaagtgacattttttgttacaagagctagcatatttcaagtcgtcatggcggagtagcacaattagcaataattgtgccttggattaacctcattggccacaatactgccactgcacaaagccttgcacatatcgcattacgtattaatttttgaaaccttaaagagacatgagaagaacaataagacaaatcttcacattaacggcagtgtgttctctcaattatagacgacrgggagacagtacagtttgaacaaccagtgatgtgaagcactgaaaagagcataggcaaagggcagggaggagtagctgagatggaggcccaccaagaggtaacagttatttgtcctttaccagagttccattgttaatgttgatgtaaatatgtgtcaccaaaatgggacaagcaagtatatttgaattatatgaagatcatatttactggaaaagccactgattagaagttaatttgttaatgcagcaaaacactctgtttctgaaaggtcagtaggggaagctgtgttggattatca

SEQ ID NO: 91003 - DNA, 580 bp, Chicken  19866894399686_2
aagtagctattatatatccaagaaactttcacaatacagcaatttagttttttatactagagaaaacattacaaaaggatcatttttgtactgtgaagtaagagttcgtgagcagaatattatctcaaactaactggatgtctgttgagatttttgtaaggtggtattcaaaacagagtctttatcagtaaattagaggtgctatttcacatgcagcaacaagtgcaactagaaataaatgcataaaggaaacccaactagatgaaaactggtttggtcagttcatacagaaagaagtgyttctcattctcaagttagtagtgagggtgtgtttccaatgatttccaaagcaaagcttttctatacagacatcttaatttcttcagaaattcagggctgatttataaactgtatgttttaaagacaatgagacatgggataaagatgcactgtcctgaatgtacccaagctcacatacatccatgctgcaaaggatttggatcactgactttggaaaaatatgcttgaacctcaactcaacattcaatgaagaaaaaaaaaggggggtgggggtgggggg

SEQ ID NO: 91004 - DNA, 599 bp, Chicken  19866894399688_1
  misc_feature (1)..(146): n is any nucleotide
nnnnnnnnnnnnnnnnnnnnnnnnnnnnnnnnnnnnnnnnnnnnnnnnnnnnnnnnnnnnnnnnnnnnnnnnnnnnnnnnnnnnnnnnnnnnnnnnnnnnnnnnnnnnnnnnnnnnnnnnnnnnnnnnnnnnnnnnnnnnnnnnnnctgctgcttcttggggagctcttgcccttagaaaagtccttctctaccactggaatggccccaaaagccaacatcagagagccaaggaggaaaaccccacgtgtctgtgcagggaaacagtgccccctccaacacgcagcacggagaagcagcrcccaaaccccaggtgggggcaatcccagaacgcccccagactcacattagggccgggcggtcccacacggccggcagctccggggaatcccgtggctccctggggagggaatcacagagtcagaggagagagggagaggagaaacggctcagacacagctcagccccacggccgttccttccccaccctgcagcccaccccccggtactcacagggggaccctgagccccacgagctcctttgggaccagtgacaccggttggaccctaggaaggagagaaaaacaggttacaaatccg

SEQ ID NO: 91005 - DNA, 479 bp, Chicken  19866894399688_2
cacattagggccgggcggtcccacacggccggcagctccggggaatcccgtggctccctggggagggaatcacagagtcagaggagagagggagaggagaaacggctcagacacagctcagccccacggccgttccttccccaccctgcagcccaccccccggtactcacagggggaccctgagccccacgagctcctttgggaccagtgacaccggttggaccctaggaaggagagaaaaacaggttacaaatccgaacgggagctgcagtgtgcctgcattggggccgtgacgtcccraatttgggggtttgccccatttggggttgtacctgggggccaggagcrccggagggaccttggggaccaggagcgcccgcgtcacccttctgcccgggctctccctgctcgcctttggcaccgggttgtccatcggcgccctgatgggaacagcagccaccatgagtggggtgaaggat

SEQ ID NO: 91006 - DNA, 431 bp, Chicken  19866894399688_3
cgtggctccctggggagggaatcacagagtcagaggagagagggagaggagaaacggctcagacacagctcagccccacggccgttccttccccaccctgcagcccaccccccggtactcacagggggaccctgagccccacgagctcctttgggaccagtgacaccggttggaccctaggaaggagagaaaaacaggttacaaatccgaacgggagctgcagtgtgcctgcattggggccgtgacgtcccraatttgggggtttgccccatttggggttgtacctgggggccaggagcrccggagggaccttggggaccaggagcgcccgcgtcacccttctgcccgggctctccctgctcgcctttggcaccgggttgtccatcggcgccctgatgggaacagcagccaccatgagtggggtgaaggat

SEQ ID NO: 91007 - DNA, 600 bp, Chicken  19866894399691_1
cagctctccagcctgttcaggtctcactgaatggcagcacggccttctggcatgtcagccactcctcccagcttcctatcatcagcaaacttgctgagggtgcactgtcccttcatccaggccactaatgaaaattttgagcaaggtcattaaactcctgtcaaacgacatcattaaataataggatttgaagagatctgtttacaaagtaataatgtcccagcaaaatgagaactgttaaatgcaaattacatttcagtcctcttcatgaacaagtaatattactggagatgtaaagargactccaaaggtatatggacagagtcaaagaattattgattatccaatgtgaaaaggataatcccattatgaaagaggaaaatatatttctatacttgttatttattggctaggaacaatctgtatcacttttgtataaagcaagattacagtgttcccatgagataagcttaagtttgcactgttaaaatgaataaattaatttatttatttagaaaaatgtatatttgtgtatgaatacactgtcattggttcacatggaagctctataaaagattttttcatattgttatgcataga

SEQ ID NO: 91008 - DNA, 599 bp, Chicken  19866894399692_1
  misc_feature (1)..(124): n is any nucleotide
nnnnnnnnnnnnnnnnnnnnnnnnnnnnnnnnnnnnnnnnnnnnnnnnnnnnnnnnnnnnnnnnnnnnnnnnnnnnnnnnnnnnnnnnnnnnnnnnnnnnnnnnnnnnnnnnnnnnnnnnnnnnttggtagagttgttgcatttaatgccaacacaagtttgttttttttttttcctctcctaacggtgagataggaggaggatataacccacccacgtagtgggttaatggcaaacagaaaccattagggttgggccagctgttcatgcagaatgtgtgtgccaggagtcagacaagcygctgggagctccccatcctgtgcattcaggccccagttttcaagtctttaatctctatgagttgttgcttttggtatttaatcttattttctactagtttgcgtagttggtataagaaaggcatgaagtttgctgtggattactgccaactgggctacaatgtctatttagtaattggcatctcatttatttattttaatctttggtagaaagttgaaaactttcccttgtttagtttcatgtttcattctgctgtgtcaaccttcataggagtttccyaggccacctgattactactg

SEQ ID NO: 91009 - DNA, 471 bp, Chicken  19866894399692_2
gtgccaggagtcagacaagcygctgggagctccccatcctgtgcattcaggccccagttttcaagtctttaatctctatgagttgttgcttttggtatttaatcttattttctactagtttgcgtagttggtataagaaaggcatgaagtttgctgtggattactgccaactgggctacaatgtctatttagtaattggcatctcatttatttattttaatctttggtagaaagttgaaaactttcccttgtttagtttcatgtttcattctgctgtgtcaaccttcataggagtttccyaggccacctgattactactgaaaatcatgccatttttctgcagcaattaaagcagttaatctcatggaagaggatttaggaatctggttaacgtattcctggtgcttttttttagttctttgttgtttgggaaaagaaagctcaagctgacttattgccagcaggcacttc

SEQ ID NO: 91010 - DNA, 599 bp, Chicken  19866894399695_1
  misc_feature (1)..(99): n is any nucleotide
nnnnnnnnnnnnnnnnnnnnnnnnnnnnnnnnnnnnnnnnnnnnnnnnnnnnnnnnnnnnnnnnnnnnnnnnnnnnnnnnnnnnnnnnnnnnnnnnnnncaaatttaaaataatacatcatgccaagacccttatttcaccatttccctttagtccaagaaatggcacttaccataacaacaaacatttgtaactccaaatgtcaattttctctctccttttgcccaacaattgcttttatttgggaaataaatttaaaaaatcatttatcaaagagtcatgatactaaactttgcttaraaattttagtaattgtraagactaatttaaataacataccatattataatgcttgaaatgtgtataaatgtatgcattttattttaaaatggatttttaaacataactcgtgattagagatgaaaagaagaaygtaagaagtaaatcataattttgaaaactttcaaagtataactaaagataaacttggtcaatgaaaatagagataatatttcaccactggtgccagcctttatgaytgaaatgaaagttccagttctctgagttttgtaatacaggattacacaacagagaaaata

SEQ ID NO: 91011 - DNA, 599 bp, Chicken  19866894399695_2
  misc_feature (1)..(82): n is any nucleotide
nnnnnnnnnnnnnnnnnnnnnnnnnnnnnnnnnnnnnnnnnnnnnnnnnnnnnnnnnnnnnnnnnnnnnnnnnnnnnnnnnncaaatttaaaataatacatcatgccaagacccttatttcaccatttccctttagtccaagaaatggcacttaccataacaacaaacatttgtaactccaaatgtcaattttctctctccttttgcccaacaattgcttttatttgggaaataaatttaaaaaatcatttatcaaagagtcatgatactaaactttgcttaraaattttagtaattgtraagactaatttaaataacataccatattataatgcttgaaatgtgtataaatgtatgcattttattttaaaatggatttttaaacataactcgtgattagagatgaaaagaagaaygtaagaagtaaatcataattttgaaaactttcaaagtataactaaagataaacttggtcaatgaaaatagagataatatttcaccactggtgccagcctttatgaytgaaatgaaagttccagttctctgagttttgtaatacaggattacacaacagagaaaataaatatgaattgtaaaag

SEQ ID NO: 91012 - DNA, 600 bp, Chicken  19866894399695_3
atttcaccatttccctttagtccaagaaatggcacttaccataacaacaaacatttgtaactccaaatgtcaattttctctctccttttgcccaacaattgcttttatttgggaaataaatttaaaaaatcatttatcaaagagtcatgatactaaactttgcttaraaattttagtaattgtraagactaatttaaataacataccatattataatgcttgaaatgtgtataaatgtatgcattttattttaaaatggatttttaaacataactcgtgattagagatgaaaagaagaaygtaagaagtaaatcataattttgaaaactttcaaagtataactaaagataaacttggtcaatgaaaatagagataatatttcaccactggtgccagcctttatgaytgaaatgaaagttccagttctctgagttttgtaatacaggattacacaacagagaaaataaatatgaattgtaaaagtacagaagtttctgaaatactttgtcctgtattttgaaatcttttttggttttcagtattctttttcatttttttttttcctaaaacgcygtcaagacatccttttggtactcttat

SEQ ID NO: 91013 - DNA, 600 bp, Chicken  19866894399695_4
atttgggaaataaatttaaaaaatcatttatcaaagagtcatgatactaaactttgcttaraaattttagtaattgtraagactaatttaaataacataccatattataatgcttgaaatgtgtataaatgtatgcattttattttaaaatggatttttaaacataactcgtgattagagatgaaaagaagaaygtaagaagtaaatcataattttgaaaactttcaaagtataactaaagataaacttggtcaatgaaaatagagataatatttcaccactggtgccagcctttatgaytgaaatgaaagttccagttctctgagttttgtaatacaggattacacaacagagaaaataaatatgaattgtaaaagtacagaagtttctgaaatactttgtcctgtattttgaaatcttttttggttttcagtattctttttcatttttttttttcctaaaacgcygtcaagacatccttttggtactcttataatatgtagtttcttccttctttattctaccttgatatcaattcattatgtaaaaaaatatgatttataatgaatactcattttttttctacattcttagaaattc

SEQ ID NO: 91014 - DNA, 600 bp, Chicken  19866894399695_5
aaaatggatttttaaacataactcgtgattagagatgaaaagaagaaygtaagaagtaaatcataattttgaaaactttcaaagtataactaaagataaacttggtcaatgaaaatagagataatatttcaccactggtgccagcctttatgaytgaaatgaaagttccagttctctgagttttgtaatacaggattacacaacagagaaaataaatatgaattgtaaaagtacagaagtttctgaaatactttgtcctgtattttgaaatcttttttggttttcagtattctttttcayttttttttttcctaaaacgcygtcaagacatccttttggtactcttataatatgtagtttcttccttctttattctaccttgatatcaattcattatgtaaaaaaatatgatttataatgaatactcattttttttctacattcttagaaattctaaatgaacaaatagtaagtccccycccagccacacatgcacaagctgttcttgttgtatgaaaaactggaagtgacttttacttgctgcatttattctagacttaagaatatatacacagcattaaaatatcatttgaaaaacat

SEQ ID NO: 91015 - DNA, 600 bp, Chicken  19866894399695_6
ctcgtgattagagatgaaaagaagaaygtaagaagtaaatcataattttgaaaactttcaaagtataactaaagataaacttggtcaatgaaaatagagataatatttcaccactggtgccagcctttatgaytgaaatgaaagttccagttctctgagttttgtaatacaggattacacaacagagaaaataaatatgaattgtaaaagtacagaagtttctgaaatactttgtcctgtattttgaaatcttttttggttttcagtattctttttcatttttttttttcctaaaacgcygtcaagacatccttttggtactcttataatatgtagtttcttccttctttattctaccttgatatcaattcattatgtaaaaaaatatgatttataatgaatactcattttttttctacattcttagaaattctaaatgaacaaatagtaagtccccycccagccacacatgcacaagctgttcttgttgtatgaaaaactggaagtgacttttacttgctgcatttattctagacttaagaatatatacacagcattaaaatatcatttgaaaaacatagataaacgctgctctatctt

SEQ ID NO: 91016 - DNA, 600 bp, Chicken  19866894399695_7
caccactggtgccagcctttatgaytgaaatgaaagttccagttctctgagttttgtaatacaggattacacaacagagaaaataaatatgaattgtaaaagtacagaagtttctgaaatactttgtcctgtattttgaaatcttttttggttttcagtattctttttcatttttttttttcctaaaacgcygtcaagacatccttttggtactcttataatatgtagtttcttccttctttattctaccttgatatcaattcattatgtaaaaaaatatgatttataatgaatactcaytttttttctacattcttagaaattctaaatgaacaaatagtaagtccccycccagccacacatgcacaagctgttcttgttgtatgaaaaactggaagtgacttttacttgctgcatttattctagacttaagaatatatacacagcattaaaatatcatttgaaaaacatagataaacgctgctctatcttaagtgccagtttctttaacaggtgaaaaggatgacagcaaattatgtgggataattctattccaaagacgaagaattgtttcatttaatgctgttgaataactggaga

SEQ ID NO: 91017 - DNA, 569 bp, Chicken  19866894399695_8
gttttgtaatacaggattacacaacagagaaaataaatatgaattgtaaaagtacagaagtttctgaaatactttgtcctgtattttgaaatcttttttggttttcagtattctttttcatttttttttttcctaaaacgcygtcaagacatccttttggtactcttataatatgtagtttcttccttctttattctaccttgatatcaattcattatgtaaaaaaatatgatttataatgaatactcattttttttctacattcttagaaattctaaatgaacaaatagtaagtccccycccagccacacatgcacaagctgttcttgttgtatgaaaaactggaagtgacttttacttgctgcatttattctagacttaagaatatatacacagcattaaaatatcatttgaaaaacatagataaacgctgctctatcttaagtgccagtttctttaacaggtgaaaaggatgacagcaaattatgtgggataattctattccaaagacgaagaattgtttcatttaatgctgttgaataactggagagaagttagaggatttttaa

SEQ ID NO: 91018 - DNA, 599 bp, Chicken  19866894399704_1
  misc_feature (1)..(16): n is any nucleotide
nnnnnnnnnnnnnnnnaccattaatcatgtgtcaagaacagaaaaaaaatgcaatccaaaacccagaaccgaattttcactcttctagcgtgcttaatctgctgttagtagcctgaaaaaagaaatgattcacaaacacaatttgcaggctgaaaattaatagcttaagtagaggtttcacggcaaatggacatctctttcctccctgtaaaaatcacacaaactcaaatcaaacagctcaccacaacataaaacagtttacagttacaatttacagttgtttgcctgccacagactatrgtttccctattaagcagacagaatcaaaggtacactgtggcattattcataacatctcataaatctcacctctccctaacgcatgctactgtactgaggttactcaatggataggaagtttaaggggaatctcaacccagtctttactccctctcatctgtgaattccaaaggcatgtgtttcctttgcagattatttcaaacaaaaacagtggcttattggcaagcacataaaaaacagaagacaggatgcagcagtgacagggacttacagccaagtaacatctgccctgggctaac

SEQ ID NO: 91019 - DNA, 600 bp, Chicken  19866894399705_1
cacatccacccactacccagcagtgtaatggcatcagctaatccccagcgtcgagtaatctgctgccactgggacgacacgaaggaaagcagagccggacccatccctgctcatttgcccagccctaatcccagagaagcaagctaataaggcatggagctcagtacctgcttgcctttattaaattccccgcatcactcctacattatatccatccttgccaactggatctgccccgcttcagagccagcaagagaggacacatttccaaccaaccccgggctaaaacctatttatttkctcgcactatctgatgaatcgtgaaagcgtttaaagcaaaaggagaacccagggctgatgcagyatcrctcgcaccggccatgctgggaccagctggcccccagccctcaccctgcctgcaccatcccgctccgtctccctcacccacrgctsctccaggagcgggagccctgcaggactgtgctgtgctgttcacagcagcattcctccttgctgagctggggatccaccggcacaggagcacagccccacrcagaccataaataaacagcgacaagtgcacgcactcctttcttttgc

SEQ ID NO: 91020 - DNA, 600 bp, Chicken  19866894399705_2
gccactgggacgacacgaaggaaagcagagccggacccatccctgctcatttgcccagccctaatcccagagaagcaagctaataaggcatggagctcagtacctgcttgcctttattaaattccccgcatcactcctacattatatccatccttgccaactggatctgccccgcttcagagccagcaagagaggacacatttccaaccaaccccgggctaaaacctatttatttkctcgcactatctgatgaatcgtgaaagcgtttaaagcaaaaggagaacccagggctgatgcagyatcrctcgcaccggccatgctgggaccagctggcccccagccctcaccctgcctgcaccatcccgctccgtctccctcacccacrgctsctccaggagcgggagccctgcaggactgtgctgtgctgttcacagcagcattcctccttgctgagctggggatccaccggcacaggagcacagccccacrcagaccataaataaacagcgacaagtgcacgcactcctttcttttgcatgcccgaaagctagaaataacgtctgacgctcagaagaaaggaaatatttagttaagagaagg

SEQ ID NO: 91021 - DNA, 600 bp, Chicken  19866894399705_3
ctgggacgacacgaaggaaagcagagccggacccatccctgctcatttgcccagccctaatcccagagaagcaagctaataaggcatggagctcagtacctgcttgcctttattaaattccccgcatcactcctacattatatccatccttgccaactggatctgccccgcttcagagccagcaagagaggacacatttccaaccaaccccgggctaaaacctatttatttkctcgcactatctgatgaatcgtgaaagcgtttaaagcaaaaggagaacccagggctgatgcagyatcrctcgcaccggccatgctgggaccagctggcccccagccctcaccctgcctgcaccatcccgctccgtctccctcacccacrgctsctccaggagcgggagccctgcaggactgtgctgtgctgttcacagcagcattcctccttgctgagctggggatccaccggcacaggagcacagccccacrcagaccataaataaacagcgacaagtgcacgcactcctttcttttgcatgcccgaaagctagaaataacgtctgacgctcagaagaaaggaaatatttagttaagagaaggggag

SEQ ID NO: 91022 - DNA, 600 bp, Chicken  19866894399705_4
aggcatggagctcagtacctgcttgcctttattaaattccccgcatcactcctacattatatccatccttgccaactggatctgccccgcttcagagccagcaagagaggacacatttccaaccaaccccgggctaaaacctatttatttkctcgcactatctgatgaatcgtgaaagcgtttaaagcaaaaggagaacccagggctgatgcagyatcrctcgcaccggccatgctgggaccagctggcccccagccctcaccctgcctgcaccatcccgctccgtctccctcacccacrgctsctccaggagcgggagccctgcaggactgtgctgtgctgttcacagcagcattcctccttgctgagctggggatccaccggcacaggagcacagccccacrcagaccataaataaacagcgacaagtgcacgcactcctttcttttgcatgcccgaaagctagaaataacgtctgacgctcagaagaaaggaaatatttagttaagagaaggggagtgctgtaagaaggcaaggcaaacgctatatatttattttttatggtgcaaatggaaagccccaagcgtttggcttcgctgc

SEQ ID NO: 91023 - DNA, 600 bp, Chicken  19866894399705_5
atggagctcagtacctgcttgcctttattaaattccccgcatcactcctacattatatccatccttgccaactggatctgccccgcttcagagccagcaagagaggacacatttccaaccaaccccgggctaaaacctatttatttkctcgcactatctgatgaatcgtgaaagcgtttaaagcaaaaggagaacccagggctgatgcagyatcrctcgcaccggccatgctgggaccagctggcccccagccctcaccctgcctgcaccatcccgctccgtctccctcacccacrgctsctccaggagcgggagccctgcaggactgtgctgtgctgttcacagcagcattcctccttgctgagctggggatccaccggcacaggagcacagccccacrcagaccataaataaacagcgacaagtgcacgcactcctttcttttgcatgcccgaaagctagaaataacgtctgacgctcagaagaaaggaaatatttagttaagagaaggggagtgctgtaagaaggcaaggcaaacgctatatatttattttttatggtgcaaatggaaagccccaagcgtttggcttcgctgcatca

SEQ ID NO: 91024 - DNA, 559 bp, Chicken  19866894399705_6
gagaggacacatttccaaccaaccccgggctaaaacctatttatttkctcgcactatctgatgaatcgtgaaagcgtttaaagcaaaaggagaacccagggctgatgcagyatcrctcgcaccggccatgctgggaccagctggcccccagccctcaccctgcctgcaccatcccgctccgtctccctcacccacrgctsctccaggagcgggagccctgcaggactgtgctgtgctgttcacagcagcattcctccttgctgagctggggatccaccggcacaggagcacagccccacrcagaccataaataaacagcgacaagtgcacgcactcctttcttttgcatgcccgaaagctagaaataacgtctgacgctcagaagaaaggaaatatttagttaagagaaggggagtgctgtaagaaggcaaggcaaacgctatatatttattttttatggtgcaaatggaaagccccaagcgtttggcttcgctgcatcatttcacagcgtatctctggcagaactcgagagctccgctcgcatccagccctgcaatta

SEQ ID NO: 91025 - DNA, 600 bp, Chicken  19866894399706_1
caggaaaacaccttttacaatgggcatagcatacaaagtaaaaattcatttgatacctgggccagatgaaagccttgctgagtggcagtgtttactcaatatctgaaaaatagtctttccagaggaatacactcagagaggaaacaaactcataaattacccagctaaggcacggcagattaactttactttcatgctatcgatccaaatcccctccaatcaaactgccctgagaaaggcaccactgcttgctggcagcactgcctgaatccaaggagaaattaagggcccatcactgcmgtgcaaggtcccaagcagcacacaaagccatgcacacagtctgcacattcccaggttctgcagggccattctttccctaccctcacaattcaagggcagcacacaacccctgcctggtagatctcaccaccacagctgtgccaattgagaagcagtgggaggccacagcagctcctcctcttgcagaggtagggatttcagctttagcacatgcagccactacaaaacacctgtggtggcagtcctgcaggtaaaactgtatccaaacaagaccttcagaaatcaattgcctccagcact

SEQ ID NO: 91026 - DNA, 600 bp, Chicken  19866894399714_1
tgtctgagctctgttaaatgaatgcgtcattgcctcagtaactcttctgtctgaacagggaagaattttgccagagagatacagaaaacaatggtttttccaaagcaaagtgtttgcttcctggggaagggcagtgtgctttccactcccagcttcagcagccatttgaaactctttctgcagattaccacattctacatatcgtgtccatgaggaaggtttaattaactgaagtgcataaagcacaaggagctcgtcagataaaggatactatttaattgcaaaaccagaatatacgaygacttcttgttgttattgtttttaatagcgtcattattcagacaatcctctgtggttcactatccctcttctggctgttgatgagttaaagagagttccattcactgtccgctcacagttctgccttgatttcttcccactgcttattttctccttgagcagtaactgcactttagaagtgcaaacagatttagaaaggggaaattggcctaaatatttcaaacaccaaaaaagacaaaagaagaaagagacgtaaagcaaagaaattaaatgtcctgatgtgttgaaagcagaaagttt

SEQ ID NO: 91027 - DNA, 600 bp, Chicken  19866894399726_1
agaattcataaacattagaaatcagagtatcaacacgagtagctttctaaaggtgcagtttagcatactgtacgcaactcagtgagagcagggactctagtgactaagaaattcacgagtagtaatagctagattaggtctttcagagtgttcttctggcaagaacaacaacaactgcttgaggctgaataaatggaaataatcagcttttagctttgttagaagtttgaatatcctatttttaaacagtttttaggactttcttgtgttgtttttttttttttccctcattgaatagaragtatgactgtacatcttcctgagggaatttatactatrccttatctatcgaggcataattctgtggataacaggtgaaatatcctcagtaattatgtgaaggtaaccacttcagaattaggtacctgccttcttcattgatatacttgctgagatctcctgaaactcactgattttaagaggaagactgaatggtaggaatacagtggctttgtatgccagtgttagaaaggtggttgcactgaagctatgagaaaccaaacatggaggttctttttgctgttaggcgagcagctacaa

SEQ ID NO: 91028 - DNA, 600 bp, Chicken  19866894399726_2
tagctttctaaaggtgcagtttagcatactgtacgcaactcagtgagagcagggactctagtgactaagaaattcacgagtagtaatagctagattaggtctttcagagtgttcttctggcaagaacaacaacaactgcttgaggctgaataaatggaaataatcagcttttagctttgttagaagtttgaatatcctatttttaaacagtttttaggactttcttgtgttgtttttttttttttccctcattgaatagaragtatgactgtacatcttcctgagggaatttatactatrccttatctatcgaggcataattctgtggataacaggtgaaatatcctcagtaattatgtgaaggtaaccacttcagaattaggtacctgccttcttcattgatatacttgctgagatctcctgaaactcactgattttaagaggaagactgaatggtaggaatacagtggctttgtatgccagtgttagaaaggtggttgcactgaagctatgagaaaccaaacatggaggttctttttgctgttaggcgagcagctacaatgtggggaaacgagatcagtcagtaatgggaaatgggaa

SEQ ID NO: 91029 - DNA, 599 bp, Chicken  19866894399727_1
  misc_feature (1)..(2): n is any nucleotide
nnctttttggcttttttgtcatctagaactggaccaatctggatgctgcaaaccttatattgcaaagaactaaggatgcagtgaagaaggaaaactcactattattctcttatgcatgctataatttttgaaagcacttggacagtctgatgtgagctgagtttcaggctgtgtagtcctagctgtctctgctgtagggctcccattacaattttgagcatgtctcttgaatttaggaaggaaaagtattcttcatgagagcaaaaattgcttgactgttttgtaatgagaaggaaggtrcaaaaaatggctgtaccaccttatctcacccagaccccaggctactgttttcttttgcctttttttaactttcaattcttacttacaatgccttgtaggcattattgtctcaagccattacttcaattaaaatattttaacttagttatgatmgtgagtgacagaggtaaaggtgaccaacgccaggttcaatctctcagcagcagagcagtaatcagattttgttcattagagaggtcaacacaaacaaaaacagtgctattaaattgctgtttctaatacaataacgcagtgaagaa

SEQ ID NO: 91030 - DNA, 600 bp, Chicken  19866894399727_2
gagctgagtttcaggctgtgtagtcctagctgtctctgctgtagggctcccattacaattttgagcatgtctcttgaatttaggaaggaaaagtattcttcatgagagcaaaaattgcttgactgttttgtaatgagaaggaaggtrcaaaaaatggctgtaccaccttatctcacccagaccccaggctactgttttcttttgcctttttttaactttcaattcttacttacaatgccttgtaggcattattgtctcaagccattacttcaattaaaatattttaacttagttatgatmgtgagtgacagaggtaaaggtgaccaacgccaggttcaatctctcagcagcagagcagtaatcagattttgttcattagagaggtcaacacaaacaaaaacagtgctattaaattgctgtttctaatacaataacgcagtgaagaaaccatggaagatttcaaggagaaaactaacaggtgccaaatggctgctcagctacaggtaggaaaatgtctttcctctggttccactcctcatcccttcttgtacttcagcattgcattgatatgctgtgttgttctcccagcactgcacttac

SEQ ID NO: 91031 - DNA, 600 bp, Chicken  19866894399732_1
gatctatctgtggatatttgactaggaagtatattaaaatcttaaaatactactgaagttgtcagggcaaaaaaagagtcaaacgtgaggtctgaaaccaatcaaagctttcagtgctaagcagcagtattttcttgagagcttatctatgcatgttgcatttatcatcacaacagctctagtgttacaactgatgatgatataatattaccacaagggggaaaaatcttagagatgatcatttatctgccttctcccttcttttcttcttggaaagccatttacatttaactcacctcytaagagaaagggaaagcagaaaggggacaaggttccaaatctgacatcagtctttctatactctctttttgttttctgcgatgctcctttaattttagtaagaaattctaaattgacatttaaatggtggcagggcaattctcattctctgccttgtgaaatggtctctgaaatgtacaattatgctgtcatctttagtactccacattggacagagtttaattattaatgtgtttccctcagagaatgactcgatcatgtcacaactctagacaaatacagctaatgcaaaatcataaa

SEQ ID NO: 91032 - DNA, 600 bp, Chicken  19866894399734_1
cagtttgtgcttcgaggctcactggaatagctccaatcaaaaatatcctctcaggtctccatattcaggagaatgtgtcaatgttcatacagcaatggtgtcagtgatttcaacaagtcagggagcaaggccatgcacgagctttcagagaacaaagtagctgagttcatccacaaagagcactttatcttagagcagcatagaacgcacaacgctgcacagacctacattatttgataatttcatagcataactacttctggagaataaatgtttcaaatcattgctcaagagccataygtcctcctcccatgaaatctgctatgtaactgccccgaaagtccaaattctcaccttatagttaaagacagtgctccatcagcgtaagatcctgaaactgctaaagcatacaacctgtatcattagcacagctggaactttgggcttcagtttaatagctgcatgtttttgcagtttctcaaagataccaacaaaactcaccattttgaaagagcaacaacacattttctgggctctatgctgccaagacatttctacayatcaatctgcagatggagagttgactgcgtatttccttgt

SEQ ID NO: 91033 - DNA, 551 bp, Chicken  19866894399734_2
tggagaataaatgtttcaaatcattgctcaagagccataygtcctcctcccatgaaatctgctatgtaactgccccgaaagtccaaattctcaccttatagttaaagacagtgctccatcagcgtaagatcctgaaactgctaaagcatacaacctgtatcattagcacagctggaactttgggcttcagtttaatagctgcatgtttttgcagtttctcaaagataccaacaaaactcaccattttgaaagagcaacaacacattttctgggctctatgctgccaagacatttctacayatcaatctgcagatggagagttgactgcgtatttccttgtstcccagctgccttgagaaataacacacagcaaagccacctggatttaaagaaaatcctgaaaaagtaacaattctgcaaatccacacacacaaggaatagagaaaaaaacattccagaagaaaattctattgcaacagcattcacaggttgctactgcttaaaataagtcccaacatacatacagccctgcatttctagtaatttaatat

SEQ ID NO: 91034 - DNA, 510 bp, Chicken  19866894399734_3
tcctcctcccatgaaatctgctatgtaactgccccgaaagtccaaattctcaccttatagttaaagacagtgctccatcagcgtaagatcctgaaactgctaaagcatacaacctgtatcattagcacagctggaactttgggcttcagtttaatagctgcatgtttttgcagtttctcaaagataccaacaaaactcaccattttgaaagagcaacaacacattttctgggctctatgctgccaagacatttctacayatcaatctgcagatggagagttgactgcgtatttccttgtstcccagctgccttgagaaataacacacagcaaagccacctggatttaaagaaaatcctgaaaaagtaacaattctgcaaatccacacacacaaggaatagagaaaaaaacattccagaagaaaattctattgcaacagcattcacaggttgctactgcttaaaataagtcccaacatacatacagccctgcatttctagtaatttaatat

SEQ ID NO: 91035 - DNA, 600 bp, Chicken  19866894399735_1
ctgtcctggcttgactcttcctccaccccccagccacacgctggctgagtttcctctgtatcttgtcttgttgttttctttttggagttctgtaaagtaatttaatgggtaggaatgatattcttagcataactctacaacagcgttttagaataactgatgaaacggaggttgaacagagagaaatgtgaacaagtgggttattcgtgcagtactctttcaggcctggaggtagagtgacttctaacttttttcttgcaaattctcttagttatggttatcgtgtgccaaagcagtgcrttttggacttccacagcgacatgttttcccaactyatccagctgcgtgactaattccttgttaacccagaggagtctgagggatctaaccgatctgatctttatttctggatgttttccagttgaactaatacatctttattggtgtaacgaagtttagaaggaacatccattggcgttggtggcagtgatcagccatgggtgatttctgctggaaatcactggcactgttaaaatagcagatgcagaactaatgtatctatggccctttgttttaagctttcgtgtttcttactctagt

SEQ ID NO: 91036 - DNA, 600 bp, Chicken  19866894399735_2
acacgctggctgagtttcctctgtatcttgtcttgttgttttctttttggagttctgtaaagtaatttaatgggtaggaatgatattcttagcataactctacaacagcgttttagaataactgatgaaacggaggttgaacagagagaaatgtgaacaagtgggttattcgtgcagtactctttcaggcctggaggtagagtgacttctaacttttttcttgcaaattctcttagttatggttatcgtgtgccaaagcagtgcrttttggacttccacagcgacatgttttcccaactyatccagctgcgtgactaattccttgttaacccagaggagtctgagggatctaaccgatctgatctttatttctggatgttttccagttgaactaatacatctttattggtgtaacgaagtttagaaggaacatccattggcgttggtggcagtgatcagccatgggtgatttctgctggaaatcactggcactgttaaaatagcagatgcagaactaatgtatctatggccctttgttttaagctttcgtgtttcttactctagtatccaacactgtagctcataagatactgtatttgg

SEQ ID NO: 91037 - DNA, 599 bp, Chicken  19866894399755_1
  misc_feature (1)..(51): n is any nucleotide
nnnnnnnnnnnnnnnnnnnnnnnnnnnnnnnnnnnnnnnnnnnnnnnnnnnctattactactagatgctgccacagcagacttagaggcactgttcccctagcaggccttgtctccctttatgaacgcacatcacccccacatcaatcgtggatgcacaaaggtccgtcagttttgctttccaaaatgaatcaactatacacaagagtctcccacgatcccactatgaagtattccgcgtattctccacttcaccttctccgctgatgagagtgcatcggctcaaaaggcagcagccccraagtcttttgctatgacacctttctcctagcatttcaagggctgaggacctcagtgccagttctgcaggctgagcccctcctcgaaccacagcccggctgggtgatgaaacagctgcacrtgaagctgaaagcactgttgacatgcaccattgccggtgctcatcacatccaggaaatagcaaaacgctcagctcaactcagactcgtgctggtaatgcaaccactgcaattagagattacagagaaaaagacggaaggagggcttctacggctggaaaacttcatgcactttcaacag

SEQ ID NO: 91038 - DNA, 600 bp, Chicken  19866894399755_2
atgaacgcacatcacccccacatcaatcgtggatgcacaaaggtccgtcagttttgctttccaaaatgaatcaactatacacaagagtctcccacgatcccactatgaagtattccgcgtattctccacttcaccttctccgctgatgagagtgcatcggctcaaaaggcagcagccccraagtcttttgctatgacacctttctcctagcatttcaagggctgaggacctcagtgccagttctgcaggctgagcccctcctcgaaccacagcccggctgggtgatgaaacagctgcacrtgaagctgaaagcactgttgacatgcaccattgccggtgctcatcacatccaggaaatagcaaaacgctcagctcaactcagactcgtgctggtaatgcaaccactgcaattagagattacagagaaaaagacggaaggagggcttctacggctggaaaacttcatgcactttcaacagatgtggagacgtggaactgagggccatggttagtggtggtgatgggctgacaattggacatgatgatcttagtgatctcttctgaccacgacgactctgtgattctatgacagcaccatgt

SEQ ID NO: 91039 - DNA, 599 bp, Chicken  19866894399765_1
  misc_feature (1)..(114): n is any nucleotide
nnnnnnnnnnnnnnnnnnnnnnnnnnnnnnnnnnnnnnnnnnnnnnnnnnnnnnnnnnnnnnnnnnnnnnnnnnnnnnnnnnnnnnnnnnnnnnnnnnnnnnnnnnnnnnnnnncttctctggaggttgtatttcaacgaagggcaaaatatcaaactctgtgagagagtgcctcaggtaaacttagtggattggacatgttggagggtcagactgggaaggtttcatagtcctttctggcttcaaatgctataaaactttattgctctacccgttgactctgagtgctgtgaggcagaycatacagcagcacacgtagtgactccttgtatctgtccaaatgcatctcagcgtttggctgttctcctaaactgagctgatttcagcaaagttcaaataaatgctttgatcgctttgagctattttgaagcgcttctgtttatcgtgacatctcttggcacataaagaaagggaacagcacacgaaacatgtgggaaagggcaaaactttctggtagaggaaggcatttgtcttcgaatacaaggtcacctttcacatatgcttccttgttgaggtcaagtaccaaagactgcctggca

SEQ ID NO: 91040 - DNA, 490 bp, Chicken  19866894399765_2
cagcacacgtagtgactccttgtatctgtccaaatgcatctcagcgtttggctgttctcctaaactgagctgatttcagcaaagttcaaataaatgctttgatcgctttgagctattttgaagcgcttctgtttatcgtgacatctcttggcacataaagaaagggaacagcacacgaaacatgtgggaaagggcaaaactttctggtagaggaaggcatttgtcttcgaatacaaggtcacctttcacatatgcttccttgttgaggtcaagtaccaaagactgcctggcatttcctcwacctgtctcagagactttctaaaaatgcacctgatctctaaaatgccactttgtctggaatctttagccctgacaagtaaaaaggagcctgttctgaaggcagagaaaaggaagaaagcaacgcacatgagacaaggaaggaaaagccagcatatgaggaggtgcaggtaaatacccagacaaaaaagaa

SEQ ID NO: 91041 - DNA, 600 bp, Chicken  19866894399783_1
gcaagtttcaagtttcttgcaaaggttgataccgtatgtttagattttaataataataaaatgaataataattttaaatttcctaccaatgttggagcaataacatggaattgaaatgtaatccattaaaaatagatttgaaagtagttcttaaaactgccatttcatctagatgtatctactcatttttccaactttagtcccattttcttatgaagctgtcttccatgtggccttccaaaggaaaatttaattgtatgtataataaactgaaaaaaggaaatgtttttccccttgaamtgtcttcaaaagaatattttgtggggtttttgtaattaagtaaattaaatatttaagacgttactttttttttttttaagttaatgtcactttattccatctgaagacttgttctcataccttgcaaaacaaatgaataaaaaaagccttgccttcacatttctgatgaaattgtttttcaacttggtgcattttgtttttcagtaattttctaaggtagtgtagttcacttcctgaagcacagatggtattttcttctgtgtcttttacagcaccaaaagcaaagtgaatatgacttat

SEQ ID NO: 91042 - DNA, 599 bp, Chicken  19866894399787_1
  misc_feature (1)..(68): n is any nucleotide
nnnnnnnnnnnnnnnnnnnnnnnnnnnnnnnnnnnnnnnnnnnnnnnnnnnnnnnnnnnnnnnnnnnnaaataacggaaataaaggaaataacataattaacggaaataacagaaataacccacacagagactgaaacttacggcagaaaattaggtaacaggtcaagaacaacatcggaaataacggaaataataagggaaagaacggaaataacctccacagagacagaaacatagagcagaaaatgacatgacaggtcaaaaataacaacggaaagaaaggaaagaacggaaaaaawcggaaaaaacggaaaaaactaaaagaacggaaataacctccagagagacagaaacatacggcagaaaattaggtgacagggcaagaagaacaacggaaataacggaaataaccgcaataaccgaaataacaaaaataacggaaataataaaggaaataacggaaataacctccacacaaacagaaaaagacggcagaaaattaaatgacaggtctagaacaacaacggaaataattgaaataatggaaaaaamcgaaataaagsaaataacggaaataacctccacagagccagaaacg

SEQ ID NO: 91043 - DNA, 600 bp, Chicken  19866894399787_2
gacaggtcaaaaataacaacggaaagaaaggaaagaacggaaaaaawcggaaaaaacggaaaaaactaaaagaacggaaataacctccagagagacagaaacatacggcagaaaattaggtgacagggcaagaagaacaacggaaataacggaaataaccgcaataaccgaaataacaaaaataacggaaataataaaggaaataacggaaataacctccacacaaacagaaaaagacggcagaaaattaaatgacaggtctagaacaacaacggaaataattgaaataatggaaaaaamcgaaataaagsaaataacggaaataacctccacagagccagaaacgtacggcagaaaattaagtgacaggtctagaacaacaacacaaataacagaaataaccgagagaacctccaaggagacagaaacatacagcagaaaattaggtgacaggtcatgaacaactacagaaataatagaaaaaaactaaataaagaaataataacggaaataaccgaaataataacggaaataatggaaataacctacacagagaaagacacatacggcagaaaattagctgacaggtcaagaacacaa

SEQ ID NO: 91044 - DNA, 600 bp, Chicken  19866894399787_3
aataacaacggaaagaaaggaaagaacggaaaaaawcggaaaaaacggaaaaaactaaaagaacggaaataacctccagagagacagaaacatacggcagaaaattaggtgacagggcaagaagaacaacggaaataacggaaataaccgcaataaccgaaataacaaaaataacggaaataataaaggaaataacggaaataacctccacacaaacagaaaaagacggcagaaaattaaatgacaggtctagaacaacaacggaaataattgaaataatggaaaaaamcgaaataaagsaaataacggaaataacctccacagagccagaaacgtacggcagaaaattaagtgacaggtctagaacaacaacacaaataacagaaataaccgagagaacctccaaggagacagaaacatacagcagaaaattaggtgacaggtcatgaacaactacagaaataatagaaaaaaactaaataaagaaataataacggaaataaccgaaataataacggaaataatggaaataacctacacagagaaagacacatacggcagaaaattagctgacaggtcaagaacacaacgcaaagaacg

SEQ ID NO: 91045 - DNA, 599 bp, Chicken  19866894399788_1
  misc_feature (1)..(86): n is any nucleotide
nnnnnnnnnnnnnnnnnnnnnnnnnnnnnnnnnnnnnnnnnnnnnnnnnnnnnnnnnnnnnnnnnnnnnnnnnnnnnnnnnnnnnntttctgagaaagaatttgactgttcacacgggcaattacaccaatattagaaggtaatagcatattatagctaattattttttgatgatacaaagcacagttagtctgctctgaaccacaacagaacagctgaaatcaccgtctcctacacctctgacttctttgtgataatctggagcaaaaatgtgaaaaatacttagacatatattttccsagatctgcaagccaatagacttttttaccagacagtggtttttgaaagtagggaggacagatgggaacagaaaataactttgaactgattaatctgaatttcgggggattaatgaacatgaggaattttatgagtaacagttacactaattccaaaagggcaagtttggacaaagcaaggaatgtgacttaacaatttaaagaattaaaatgtttgtctgtgaaaagtgctaagaatatccataccataaagatacagaaactatatacattaactatgctaagtttgtgcactaagca

SEQ ID NO: 91046 - DNA, 600 bp, Chicken  19866894399790_1
gttggagttgctagatgagaatgtgagtgggggaaggctaggtgtcttggcaaggtctccaatctgtgcctgaaactagttttacttcagaaaataggcgtaaccttcctatacgttttgcaccatttctccctagtcagcttttaaatggtatttagtatgaaaatgttataagtttgtttattgtagcatgacagcagtgtgaagaatgcttctgtagctaattctgaggcttttttctcaagttctcttgaattcttaatggaaatctgtttgggaaagtagaactagtaccatggrcttacrtcttgcaagaattgttaatcacagcaggttgtcaaagtactgagatagatagccaccaagcatttctcaggcttatgaagaacaccattgtcctctgcatgttgagaattgcacayrtggtrcctggtggaaataaggatgtttgttcccatctcctggacagaccatcacagaactgygtaaaggctgatgataggatggccagatctgtaattgttagggtacattcagcaaacatatattttgtattgctaccacaatgagagatgagaggaaaaatatttttaagcccct

SEQ ID NO: 91047 - DNA, 600 bp, Chicken  19866894399790_2
gttgctagatgagaatgtgagtgggggaaggctaggtgtcttggcaaggtctccaatctgtgcctgaaactagttttacttcagaaaataggcgtaaccttcctatacgttttgcaccatttctccctagtcagcttttaaatggtatttagtatgaaaatgttataagtttgtttattgtagcatgacagcagtgtgaagaatgcttctgtagctaattctgaggcttttttctcaagttctcttgaattcttaatggaaatctgtttgggaaagtagaactagtaccatggrcttacrtcttgcaagaattgttaatcacagcaggttgtcaaagtactgagatagatagccaccaagcatttctcaggcttatgaagaacaccattgtcctctgcatgttgagaattgcacayrtggtrcctggtggaaataaggatgtttgttcccatctcctggacagaccatcacagaactgygtaaaggctgatgataggatggccagatctgtaattgttagggtacattcagcaaacatatattttgtattgctaccacaatgagagatgagaggaaaaatatttttaagcccctcttctc

SEQ ID NO: 91048 - DNA, 600 bp, Chicken  19866894399790_3
ccatttctccctagtcagcttttaaatggtatttagtatgaaaatgttataagtttgtttattgtagcatgacagcagtgtgaagaatgcttctgtagctaattctgaggcttttttctcaagttctcttgaattcttaatggaaatctgtttgggaaagtagaactagtaccatggrcttacrtcttgcaagaattgttaatcacagcaggttgtcaaagtactgagatagatagccaccaagcatttctcaggcttatgaagaacaccattgtcctctgcatgttgagaattgcacayrtggtrcctggtggaaataaggatgtttgttcccatctcctggacagaccatcacagaactgygtaaaggctgatgataggatggccagatctgtaattgttagggtacattcagcaaacatatattttgtattgctaccacaatgagagatgagaggaaaaatatttttaagcccctcttctctatgcagtattgctgtgcaggggagagatagatttagcagtaaatcctgctgtttatattttatggatccagaacacatctttgtaggaaaaaacccaaacgacatgctatagtta

SEQ ID NO: 91049 - DNA, 600 bp, Chicken  19866894399790_4
catttctccctagtcagcttttaaatggtatttagtatgaaaatgttataagtttgtttattgtagcatgacagcagtgtgaagaatgcttctgtagctaattctgaggcttttttctcaagttctcttgaattcttaatggaaatctgtttgggaaagtagaactagtaccatggrcttacrtcttgcaagaattgttaatcacagcaggttgtcaaagtactgagatagatagccaccaagcatttctcaggcttatgaagaacaccattgtcctctgcatgttgagaattgcacayrtggtrcctggtggaaataaggatgtttgttcccatctcctggacagaccatcacagaactgygtaaaggctgatgataggatggccagatctgtaattgttagggtacattcagcaaacatatattttgtattgctaccacaatgagagatgagaggaaaaatatttttaagcccctcttctctatgcagtattgctgtgcaggggagagatagatttagcagtaaatcctgctgtttatattttatggatccagaacacatctttgtaggaaaaaacccaaacgacatgctatagttag

SEQ ID NO: 91050 - DNA, 600 bp, Chicken  19866894399790_5
ctccctagtcagcttttaaatggtatttagtatgaaaatgttataagtttgtttattgtagcatgacagcagtgtgaagaatgcttctgtagctaattctgaggcttttttctcaagttctcttgaattcttaatggaaatctgtttgggaaagtagaactagtaccatggrcttacrtcttgcaagaattgttaatcacagcaggttgtcaaagtactgagatagatagccaccaagcatttctcaggcttatgaagaacaccattgtcctctgcatgttgagaattgcacayrtggtrcctggtggaaataaggatgtttgttcccatctcctggacagaccatcacagaactgygtaaaggctgatgataggatggccagatctgtaattgttagggtacattcagcaaacatatattttgtattgctaccacaatgagagatgagaggaaaaatatttttaagcccctcttctctatgcagtattgctgtgcaggggagagatagatttagcagtaaatcctgctgtttatattttatggatccagaacacatctttgtaggaaaaaacccaaacgacatgctatagttagaaagg

SEQ ID NO: 91051 - DNA, 600 bp, Chicken  19866894399790_6
gtagcatgacagcagtgtgaagaatgcttctgtagctaattctgaggcttttttctcaagttctcttgaattcttaatggaaatctgtttgggaaagtagaactagtaccatggrcttacrtcttgcaagaattgttaatcacagcaggttgtcaaagtactgagatagatagccaccaagcatttctcaggcttatgaagaacaccattgtcctctgcatgttgagaattgcacayrtggtrcctggtggaaataaggatgtttgttcccatctcctggacagaccatcacagaactgygtaaaggctgatgataggatggccagatctgtaattgttagggtacattcagcaaacatatattttgtattgctaccacaatgagagatgagaggaaaaatatttttaagcccctcttctctatgcagtattgctgtgcaggggagagatagatttagcagtaaatcctgctgtttatattttatggatccagaacacatctttgtaggaaaaaacccaaacgacatgctatagttagaaaggatttcttaaagctgagtcaaagtattaagcagttcacaggttagttgtcttcttgct

SEQ ID NO: 91052 - DNA, 600 bp, Chicken  19866894399805_1
cgaaaagctgacctggaggtactaatgcactgactttttcagccttgttggtattttattttcagtagagctgtgcaaatatctgaagttttttattgttgttttattgttttgttttttttttttccctctataaagagccaaagcaactaaaatacatcagtcatgagataaacaaaatagtttatttgaactctgccctataagcttttcatttcaactgagaattaaaagggttttagtataatggatttttgaaattacaggctctttggtattaaaatataaagagctgtattygtagaaatatgaacacgtaaacctttctgctatcatcctttctggtctccatttttcaacatgaatcatttcaattaaaacaaaacaaaccatgaaatgttttgcaaataaaaagttgggtcagaaatgtctcctggatgtagccatacttgtgtactgagcccaaacacttttgcactccctcctcgctcagcacactgacagaacgcatcctgytgtcatggacagattaggtagtattccaaactgyacttcaattaaaagtttggtttgaatacaacaggccagctgaaagagaga

SEQ ID NO: 91053 - DNA, 600 bp, Chicken  19866894399805_10
tctttaccaggctgcaaacgaaagtgctccttctctttgcactatgatggttgtgcatcctttctttcaaagtaatctatctctttgtggtctggtgtggtggccaaaatagcccaaacaacaaagagggattagagggcagccactgtgcctgttacaacaccaccacatgctggaggtggtactgagccctacagtggacacatcttcaggcttcagcactgtgaggctgccagcaaatcctcacgagcaaatgaggtgctgcamgtccaagcacaatgctatgcagcattcacacaratgcgttgatagagcacatgctgaaaagaaagcagatgggcacaaggtgggtgacaacgaagaataccatacttggcatttctccagagagtcttttctcagagccgtgtctttcccccaggctaagaatattttgactgaactgaaggaattcttttcctgtctgcacaccctcttcaaaggagagtcagatcctacagatcctgtcccacagtcaggttaaacagatgtgtttctctttgctaccccaagagactgctttcccccaatctgactgcacattcatatctcttctctctt

SEQ ID NO: 91054 - DNA, 600 bp, Chicken  19866894399805_2
tcaactgagaattaaaagggttttagtataatggatttttgaaattacaggctctttggtattaaaatataaagagctgtattygtagaaatatgaacacgtaaacctttctgctatcatcctttctggtctccatttttcaacatgaatcatttcaattaaaacaaaacaaaccatgaaatgttttgcaaataaaaagttgggtcagaaatgtctcctggatgtagccatacttgtgtactgagcccaaacacttttgcactccctcctcgctcagcacactgacagaacgcatcctgytgtcatggacagattaggtagtattccaaactgyacttcaattaaaagtttggtttgaatacaacaggccagctgaaagagagacagtgtccaaagaaaactgttggcagaaaagggcatgaaaagggtaagtggtccctagctacgtgatcgatttactggaggaagaccaaaacccagattatgctggctttgtctgaaaccacaacagtttgccacctggcttcagtacttcaagggcacccttgaagaacacattcttctgctgtscttctgaggtgaggcacagtaaattattgc

SEQ ID NO: 91055 - DNA, 600 bp, Chicken  19866894399805_3
atttttgaaattacaggctctttggtattaaaatataaagagctgtattygtagaaatatgaacacgtaaacctttctgctatcatcctttctggtctccatttttcaacatgaatcatttcaattaaaacaaaacaaaccatgaaatgttttgcaaataaaaagttgggtcagaaatgtctcctggatgtagccatacttgtgtactgagcccaaacacttttgcactccctcctcgctcagcacactgacagaacgcatcctgytgtcatggacagattaggtagtattccaaactgyacttcaattaaaagtttggtttgaatacaacaggccagctgaaagagagacagtgtccaaagaaaactgttggcagaaaagggcatgaaaagggtaagtggtccctagctacgtgatcgatttactggaggaagaccaaaacccagattatgctggctttgtctgaaaccacaacagtttgccacctggcttcagtacttcaagggcacccttgaagaacacattcttctgctgtscttctgaggtgaggcacagtaaattattgcttgcattttccagacagaattggacttacacatg

SEQ ID NO: 91056 - DNA, 600 bp, Chicken  19866894399805_4
cgctcagcacactgacagaacgcatcctgytgtcatggacagattaggtagtattccaaactgyacttcaattaaaagtttggtttgaatacaacaggccagctgaaagagagacagtgtccaaagaaaactgttggcagaaaagggcatgaaaagggtaagtggtccctagctacgtgatcgatttactggaggaagaccaaaacccagattatgctggctttgtctgaaaccacaacagtttgccacctggcttcagtacttcaagggcacccttgaagaacacattcttctgctgtscttctgaggtgaggcacagtaaattattgcttgcattttccagacagaattggacttacacatgcaaagaaagccccatttagccagtggacttgtgtgtagaattgttctctgtacagrgttgccacagatttgtgaatttgaaagaaattttwtatacatgcaaagaactttttttcttacattaygatgttgttaatatgatgttaatgtgagtttttggccagtataytttgctgatttagctcctgatctttaccaggctgcaaacgaaagtgctccttctctttgcactatgat

SEQ ID NO: 91057 - DNA, 600 bp, Chicken  19866894399805_5
ccaaagaaaactgttggcagaaaagggcatgaaaagggtaagtggtccctagctacgtgatcgatttactggaggaagaccaaaacccagattatgctggctttgtctgaaaccacaacagtttgccacctggcttcagtacttcaagggcacccttgaagaacacattcttctgctgtscttctgaggtgaggcacagtaaattattgcttgcattttccagacagaattggacttacacatgcaaagaaagccccatttagccagtggacttgtgtgtagaattgttctctgtacagrgttgccacagatttgtgaatttgaaagaaattttwtatacatgcaaagaactttttttcttacattaygatgttgttaatatgatgttaatgtgagtttttggccagtataytttgctgatttagctcctgatctttaccaggctgcaaacgaaagtgctccttctctttgcactatgatggttgtgcatcctttctttcaaagtaatctatctctttgtggtctggtgtggtggccaaaatagcccaaacaacaaagagggattagagggcagccactgtgcctgttacaacaccacca

SEQ ID NO: 91058 - DNA, 600 bp, Chicken  19866894399805_6
gggtaagtggtccctagctacgtgatcgatttactggaggaagaccaaaacccagattatgctggctttgtctgaaaccacaacagtttgccacctggcttcagtacttcaagggcacccttgaagaacacattcttctgctgtscttctgaggtgaggcacagtaaattattgcttgcattttccagacagaattggacttacacatgcaaagaaagccccatttagccagtggacttgtgtgtagaattgttctctgtacagrgttgccacagatttgtgaatttgaaagaaattttwtatacatgcaaagaactttttttcttacattaygatgttgttaatatgatgttaatgtgagtttttggccagtataytttgctgatttagctcctgatctttaccaggctgcaaacgaaagtgctccttctctttgcactatgatggttgtgcatcctttctttcaaagtaatctatctctttgtggtctggtgtggtggccaaaatagcccaaacaacaaagagggattagagggcagccactgtgcctgttacaacaccaccacatgctggaggtggtactgagccctacagtggaca

SEQ ID NO: 91059 - DNA, 600 bp, Chicken  19866894399805_7
ctggaggaagaccaaaacccagattatgctggctttgtctgaaaccacaacagtttgccacctggcttcagtacttcaagggcacccttgaagaacacattcttctgctgtscttctgaggtgaggcacagtaaattattgcttgcattttccagacagaattggacttacacatgcaaagaaagccccatttagccagtggacttgtgtgtagaattgttctctgtacagrgttgccacagatttgtgaatttgaaagaaattttwtatacatgcaaagaactttttttcttacattaygatgttgttaatatgatgttaatgtgagtttttggccagtataytttgctgatttagctcctgatctttaccaggctgcaaacgaaagtgctccttctctttgcactatgatggttgtgcatcctttctttcaaagtaatctatctctttgtggtctggtgtggtggccaaaatagcccaaacaacaaagagggattagagggcagccactgtgcctgttacaacaccaccacatgctggaggtggtactgagccctacagtggacacatcttcaggcttcagcactgtgaggctgccag

SEQ ID NO: 91060 - DNA, 600 bp, Chicken  19866894399805_8
ccacaacagtttgccacctggcttcagtacttcaagggcacccttgaagaacacattcttctgctgtscttctgaggtgaggcacagtaaattattgcttgcattttccagacagaattggacttacacatgcaaagaaagccccatttagccagtggacttgtgtgtagaattgttctctgtacagrgttgccacagatttgtgaatttgaaagaaattttwtatacatgcaaagaactttttttcttacattaygatgttgttaatatgatgttaatgtgagtttttggccagtataytttgctgatttagctcctgatctttaccaggctgcaaacgaaagtgctccttctctttgcactatgatggttgtgcatcctttctttcaaagtaatctatctctttgtggtctggtgtggtggccaaaatagcccaaacaacaaagagggattagagggcagccactgtgcctgttacaacaccaccacatgctggaggtggtactgagccctacagtggacacatcttcaggcttcagcactgtgaggctgccagcaaatcctcacgagcaaatgaggtgctgcamgtccaagcacaat

SEQ ID NO: 91061 - DNA, 600 bp, Chicken  19866894399805_9
ttggccagtataytttgctgatttagctcctgatctttaccaggctgcaaacgaaagtgctccttctctttgcactatgatggttgtgcatcctttctttcaaagtaatctatctctttgtggtctggtgtggtggccaaaatagcccaaacaacaaagagggattagagggcagccactgtgcctgttacaacaccaccacatgctggaggtggtactgagccctacagtggacacatcttcaggcttcagcactgtgaggctgccagcaaatcctcacgagcaaatgaggtgctgcamgtccaagcacaatgctatgcagcattcacacaratgcgttgatagagcacatgctgaaaagaaagcagatgggcacaaggtgggtgacaacgaagaataccatacttggcatttctccagagagtcttttctcagagccgtgtctttcccccaggctaagaatattttgactgaactgaaggaattcttttcctgtctgcacaccctcttcaaaggagagtcagatcctacagatcctgtcccacagtcaggttaaacagatgtgtttctctttgctaccccaagagactgctttccccc

SEQ ID NO: 91062 - DNA, 599 bp, Chicken  19866894399806_1
  misc_feature (1)..(108): n is any nucleotide
nnnnnnnnnnnnnnnnnnnnnnnnnnnnnnnnnnnnnnnnnnnnnnnnnnnnnnnnnnnnnnnnnnnnnnnnnnnnnnnnnnnnnnnnnnnnnnnnnnnnnnnnnnnnactggaatatgtttcccagtaacactgtagattatacatcattgggaacatttgaaacccaaaaggaaacagccctcagccaccagctctggttgatcttgctttaattggtgacactgactagaaaatctatagcgcttccttcgaatctcctattctgtgactccatcagtataatccattggattttaygctactttgagaaatcatgattttccattctgtttgatttacaaattaacatataaaacttaaattacaattaagtgatgcagagaactctaagggagagtaagaataagggcatcagtcaaagacctctaccatgcttaagactggttcactctttttgacagaacaagcaatttcctattacagccaactgccaggaggtcacaagagagtcccagtctgagaaagaacttggcaatgcctgcagccttyctgttctgcacccagacctgtcctcattattatcaccctgactgatg

SEQ ID NO: 91063 - DNA, 600 bp, Chicken  19866894399806_2
cgaatctcctattctgtgactccatcagtataatccattggattttaygctactttgagaaatcatgattttccattctgtttgatttacaaattaacatataaaacttaaattacaattaagtgatgcagagaactctaagggagagtaagaataagggcatcagtcaaagacctctaccatgcttaagactggttcactctttttgacagaacaagcaatttcctattacagccaactgccaggaggtcacaagagagtcccagtctgagaaagaacttggcaatgcctgcagccttyctgttctgcacccagacctgtcctcattattatcaccctgactgatgaagtagaaatgggaatgcagcaagaatatcaacacagagctccctggctgtaaaaccagagaggattcaaggtaagaaacctttaaatcttccaattctgacaactttcacttgccagtgcattgaagactcatcrtttagacaaaaatggcttgttgctccagaagttttattttagtcatgatgtaggaaaaaaatatatccttgataacaactagggcacaaatcttgtctgcaacacaattgtcctcat

SEQ ID NO: 91064 - DNA, 600 bp, Chicken  19866894399806_3
gcttaagactggttcactctttttgacagaacaagcaatttcctattacagccaactgccaggaggtcacaagagagtcccagtctgagaaagaacttggcaatgcctgcagccttyctgttctgcacccagacctgtcctcattattatcaccctgactgatgaagtagaaatgggaatgcagcaagaatatcaacacagagctccctggctgtaaaaccagagaggattcaaggtaagaaacctttaaatcttccaattctgacaactttcacttgccagtgcattgaagactcatcrtttagacaaaaatggcttgttgctccagaagttttattttagtcatgatgtaggaaaaaaatatatccttgataacaactagggcacaaatcttgtctgcaacacaattgtcctcatctagaaaatggaaaggaaaaaaaatcaagtaccaacacttcactgtagtgcatggaagaatgcaaaacaacctcagtactcaccagaccacaccaattaaatgaactacttattttaaagtttgtacagcatacagccacatctcactactcctttaagaccactcaaaaacaatagataact

SEQ ID NO: 91065 - DNA, 597 bp, Chicken  19866894399806_4
aagcaatttcctattacagccaactgccaggaggtcacaagagagtcccagtctgagaaagaacttggcaatgcctgcagccttyctgttctgcacccagacctgtcctcattattatcaccctgactgatgaagtagaaatgggaatgcagcaagaatatcaacacagagctccctggctgtaaaaccagagaggattcaaggtaagaaacctttaaatcttccaattctgacaactttcacttgccagtgcattgaagactcatcrtttagacaaaaatggcttgttgctccagaagrtttattttagtcatgatgtaggaaaaaaatatatccttgataacaactagggcacaaatcttgtctgcaacacaattgtcctcatctagaaaatggaaaggaaaaaaaatcaagtaccaacacttcactgtagtgcatggaagaatgcaaaacaacctcagtactcaccagaccacaccaattaaatgaactacttattttaaagtttgtacagcatacagccacatctcactactcctttaagaccactcaaaaacaatagataacttaaaaaatatctatctctttaaaaattat

SEQ ID NO: 91066 - DNA, 600 bp, Chicken  19866894399816_1
ctctggagtcagagtgacctttccatagcatggagatcaatgcttgctattgaatagctcttccaccagcctgtcagcatgtagggcacggcagcagctgaatgaatgctgtatcgctgagagatatcggtgtaagcttttttcactccctgtccatagaggctgaagattgatttagtggttgtcagtgagctctcaagtggcttttaatgcttgctttaaacccaagagctctgctttcttctggggaggctgaggcactctgtggtcctggtgggaggcagcaggaatgagtaagaytgtgtggagaaggatgcgtatgarcatcacgagaaagcaaagttggctcagtgtttgcagagaagaagggagcggaatggatacagagagacaaactgctgarttttcccacgttctccatctgtcttgggcttccccacatcccacaagacccaggccagagcagaagctccctacatttgcagtgagaggttttccaagcttcggtgtctgtgtgcagtgtgctttgataaataggcagagtccacgttgcagctaggggatagtgagaaagcactctgcagatctgtcatctggcta

SEQ ID NO: 91067 - DNA, 600 bp, Chicken  19866894399816_2
atagcatggagatcaatgcttgctattgaatagctcttccaccagcctgtcagcatgtagggcacggcagcagctgaatgaatgctgtatcgctgagagatatcggtgtaagcttttttcactccctgtccatagaggctgaagattgatttagtggttgtcagtgagctctcaagtggcttttaatgcttgctttaaacccaagagctctgctttcttctggggaggctgaggcactctgtggtcctggtgggaggcagcaggaatgagtaagaytgtgtggagaaggatgcgtatgarcatcacgagaaagcaaagttggctcagtgtttgcagagaagaagggagcggaatggatacagagagacaaactgctgarttttcccacgttctccatctgtcttgggcttccccacatcccacaagacccaggccagagcagaagctccctacatttgcagtgagaggttttccaagcttcggtgtctgtgtgcagtgtgctttgataaataggcagagtccacgttgcagctaggggatagtgagaaagcactctgcagatctgtcatctggctaaacatcaaggcctgtgtattttcc

SEQ ID NO: 91068 - DNA, 600 bp, Chicken  19866894399816_3
gaatgctgtatcgctgagagatatcggtgtaagcttttttcactccctgtccatagaggctgaagattgatttagtggttgtcagtgagctctcaagtggcttttaatgcttgctttaaacccaagagctctgctttcttctggggaggctgaggcactctgtggtcctggtgggaggcagcaggaatgagtaagaytgtgtggagaaggatgcgtatgarcatcacgagaaagcaaagttggctcagtgtttgcagagaagaagggagcggaatggatacagagagacaaactgctgarttttcccacgttctccatctgtcttgggcttccccacatcccacaagacccaggccagagcagaagctccctacatttgcagtgagaggttttccaagcttcggtgtctgtgtgcagtgtgctttgataaataggcagagtccacgttgcagctaggggatagtgagaaagcactctgcagatctgtcatctggctaaacatcaaggcctgtgtattttccatctctgctacaagttcctgcattcttttgccaaatgttctggataggaatgctgatttctttctgtggaatatccctg

SEQ ID NO: 91069 - DNA, 600 bp, Chicken  19866894399823_1
gcagatgtggaaatgctgtatataccattgctaagggtactacaggaattgttttcagatacttagagggtacgtacacttgatcactttcctttgtgtttagacccaaccttgaattcaagtgttaagattgtctgcttgtgcagctcaagaacgtggaacttgaggtcctagatccagttgagtgttttacattttattatacacgatgaatcaaatgatgtgtatgtgcatttcaggctattggctgggcaagataatagggcatgctgctgattcatgctcaatcagaacctccayatccctttctgtaaggctgttcttcagcctctcatccctcagtctgtacagatatccagagttgctccatccaaggtgcagtctagcatttgctcttgttaaacttcatgcagttgacgagtgctcaggcctcctgcttgtcatggtctttctgcaaaacctctgcccctggagagggagccagcagctcctcytcattaatgtaatctgcaaacttatttagtatacattcaaagtcctgcattcaggtgatttatgaagatattgaagtgaactgcagagccccaccattgactgctt

SEQ ID NO: 91070 - DNA, 600 bp, Chicken  19866894399823_2
ttttattatacacgatgaatcaaatgatgtgtatgtgcatttcaggctattggctgggcaagataatagggcatgctgctgattcatgctcaatcagaacctccayatccctttctgtaaggctgttcttcagcctctcatccctcagtctgtacagatatccagagttgctccatccaaggtgcagtctagcatttgctcttgttaaacttcatgcagttgacgagtgctcaggcctcctgcttgtcatggtctttctgcaaaacctctgcccctggagagggagccagcagctcctcytcattaatgtaatctgcaaacttatttagtatacattcaaagtcctgcattcaggtgatttatgaagatattgaagtgaactgcagagccccaccattgactgcttgccagcctgatgtaaccttatttactacaaccctttgagaataacttatcagccaattgttcacccatcacccagctgcatgctggacattttgtccaaaagaatcttcacttttttaaagtctaattcaagagctttatgtggtaaaatgaaaaacatttctcctagaacagttgctgtatggacttcagctc

SEQ ID NO: 91071 - DNA, 599 bp, Chicken  19866894399827_1
  misc_feature (1)..(133): n is any nucleotide
nnnnnnnnnnnnnnnnnnnnnnnnnnnnnnnnnnnnnnnnnnnnnnnnnnnnnnnnnnnnnnnnnnnnnnnnnnnnnnnnnnnnnnnnnnnnnnnnnnnnnnnnnnnnnnnnnnnnnnnnnnnnnnnnnnnnnctggctgggcaacctggtgaggagagctttaaagtggaaatgacaagatgatgaaccacaatcgacaaaggaagtggtggaccacttttgacaagcaaattgcatgggatgatgtggacaagacaccttgtaatcaacagaacaaggtgaaagggccccagttaagmaagtgcacataaataagcaagtactaatatcacaacattgtggagaaagttctcatttcttttcaggagtatcagtgtgacttggtgcccatcagaaatacttgctcatccatgcatgcagcagggataaccaacagggggaattagagattgcaggaggaattagaaaagttgtgacaagcaataagaagttcagctggagatcagtatcccagacttactagtgtacatttgggactgatactgagtccagcactgttcaacttctttattagtgacccagatggtggtacacagtg

SEQ ID NO: 91072 - DNA, 600 bp, Chicken  19866894399827_2
catgcatgcagcagggataaccaacagggggaattagagattgcaggaggaattagaaaagttgtgacaagcaataagaagttcagctggagatcagtatcccagacttactagtgtacatttgggactgatactgagtccagcactgttcaacttctttattagtgacccagatggtggtacacagtgcaccttcagcaagtttgcagatgataccaaattgggaggagttgctgacacttcggatcgttgccattttgggggacttcagtaggctggagaaaatggcaaactgagatyccatgaacttaaaggatacacaaagccctgcacctgggagaactagctcaagcaccagagcaggctgaaaaacagctctatagagatggacctggggatmctggtgggcatgtttggatgtgagctagcaacaagacctcatggcaaggaaggacaggagtctcctgacttgcgttaggatgtgtcatttacaggttgaggatgtgatccttttattctgtccaacacagatgaggcctcacctatagtgtgggctccagctttgggctgctcaataacaagtaagacacagttgcactg

SEQ ID NO: 91073 - DNA, 514 bp, Chicken  19866894399827_3
cccagacttactagtgtacatttgggactgatactgagtccagcactgttcaacttctttattagtgacccagatggtggtacacagtgcaccttcagcaagtttgcagatgataccaaattgggaggagttgctgacacttcggatcgttgccattttgggggacttcagtaggctggagaaaatggcaaactgagatyccatgaacttaaaggatacacaaagccctgcacctgggagaactagctcaagcaccagagcaggctgaaaaacagctctatagagatggacctggggatmctggtgggcatgtttggatgtgagctagcaacaagacctcatggcaaggaaggacaggagtctcctgacttgcgttaggatgtgtcatttacaggttgaggatgtgatccttttattctgtccaacacagatgaggcctcacctatagtgtgggctccagctttgggctgctcaataacaagtaagacacagttgcactggagtgaatgctcca

SEQ ID NO: 91074 - DNA, 600 bp, Chicken  19866894399828_1
cctttcacaggttttctcttgtgtactttgtaagacaagctaggaagactgtccatgtaggccaaaagatctctgccttggccagaaggagatggctagggaagagaaaaatcaaagataccagcagaagtgttacttcctcctaacattctctgtaatacgatcaacttggggactttcagggctagatgggattttgcgtgtttgctgtccctcagtagatttcctttctgtgtacatgacctctcttccgtgtcctcatgtaatctttaagcatcttcagagccctcagacaagaarttgcagagatttcaccctcttcttgtttgcttttaaaactggctcatsctagcatcttctgatgtatttatttttttgctggaacagacagtgaacagttaatccaygtgccacttacattgtgctgtcccacgtcgcctccctgcaatttcctccatcactttctaggggggtctggctcagacaagcactgtgtggaagctgctgtttcttgtttggatgggaaagctagaagtgcatgcaggatttgacatatgactatattttatgcattgcgcatttattcaacaactattgagg

SEQ ID NO: 91075 - DNA, 600 bp, Chicken  19866894399828_2
ctgtccatgtaggccaaaagatctctgccttggccagaaggagatggctagggaagagaaaaatcaaagataccagcagaagtgttacttcctcctaacattctctgtaatacgatcaacttggggactttcagggctagatgggattttgcgtgtttgctgtccctcagtagatttcctttctgtgtacatgacctctcttccgtgtcctcatgtaatctttaagcatcttcagagccctcagacaagaarttgcagagatttcaccctcttcttgtttgcttttaaaactggctcatsctagcatcttctgatgtatttatttttttgctggaacagacagtgaacagttaatccaygtgccacttacattgtgctgtcccacgtcgcctccctgcaatttcctccatcactttctaggggggtctggctcagacaagcactgtgtggaagctgctgtttcttgtttggatgggaaagctagaagtgcatgcaggatttgacatatgactatattttatgcattgcgcatttattcaacaactattgaggggtctggagcacaagccctatgaggagctgctgagagaactgggattg

SEQ ID NO: 91076 - DNA, 600 bp, Chicken  19866894399828_3
aaaatcaaagataccagcagaagtgttacttcctcctaacattctctgtaatacgatcaacttggggactttcagggctagatgggattttgcgtgtttgctgtccctcagtagatttcctttctgtgtacatgacctctcttccgtgtcctcatgtaatctttaagcatcttcagagccctcagacaagaarttgcagagatttcaccctcttcttgtttgcttttaaaactggctcatsctagcatcttctgatgtatttatttttttgctggaacagacagtgaacagttaatccaygtgccacttacattgtgctgtcccacgtcgcctccctgcaatttcctccatcactttctaggggggtctggctcagacaagcactgtgtggaagctgctgtttcttgtttggatgggaaagctagaagtgcatgcaggatttgacatatgactatattttatgcattgcgcatttattcaacaactattgaggggtctggagcacaagccctatgaggagctgctgagagaactgggattgtttagtctggagaagaggaggctcaggggagactttactgctctctacaactacctgaa

SEQ ID NO: 91077 - DNA, 600 bp, Chicken  19866894399834_1
gtgccaggaacagaaactgggttcgcttctttgcctccaattcaaaacaaactcttatccagcccaaggaaagttgtatttccccctgatgaccaacctcctttggttggcacagcccatcagggaacagcacccactcccagtgctgctagagggaaggaaccgagcagccagttttcttgagatcattcatcatcacgcaagcttttttttccttcttacttcctatttctctagttttaatttacccttttctttcttgaacgttcacattagcagtaaacaggtccatctgccccyaaagagcaggaatgggaagagccttcgccttatcagtcactgtgaataacccagagctgcgtggtatctctgtgctgtaggctgatgttctggcacatcctcccagcactgctgggcccaggacccagcacagtccccagctggaagcgattccctggcagacatcagctgtgcatcccaatggcttcaggaaggcagatgggaatgacagctaaccggagttggcagtaacctggtatttttgctatgggaaaaacacagctttacaatcacctagttatgtttgcgaaacaacacatt

SEQ ID NO: 91078 - DNA, 600 bp, Chicken  19866894399834_2
ctggtatttttgctatgggaaaaacacagctttacaatcacctagttatgtttgcgaaacaacacattcaagattgatggcttacttctggaagctgctgcagctgaaagcatagctgttaaaggctcacaggtgcggcaagtcagggtcttccacatcaatccgtgcctgctgctgacaagaaatttaacaatttggatcagctgttaggagggcacacacaattgcatatgttgaaatcttaatggtgcttctccttactgttgggtacagccagtaaatcacacaaacaaaaacagsccttgctgtgagctttagttgtcttatggagtcggcagaaatgtctctagacaacgttctgagcagagccccagctgatcaaaaccagattcctcctcwgtgtgtgcacaagtgatgggcttgcattcctttaatattttcaactccatatctggaaaaatcattttcccaagcttccctgctggtaagggaggaggatggggagtaagagggatcactgcagggatatgaagtggaaacgttgatccagcaagttaaggaagatgccttcagtggaagaatggagggcaaagcccagtg

SEQ ID NO: 91079 - DNA, 513 bp, Chicken  19866894399834_3
gcagctgaaagcatagctgttaaaggctcacaggtgcggcaagtcagggtcttccacatcaatccgtgcctgctgctgacaagaaatttaacaatttggatcagctgttaggagggcacacacaattgcatatgttgaaatcttaatggtgcttctccttactgttgggtacagccagtaaatcacacaaacaaaaacagsccttgctgtgagctttagttgtcttatggagtcggcagaaatgtctctagacaacgttctgagcagagccccagctgatcaaaaccagattcctcctcwgtgtgtgcacaagtgatgggcttgcattcctttaatattttcaactccatatctggaaaaatcattttcccaagcttccctgctggtaagggaggaggatggggagtaagagggatcactgcagggatatgaagtggaaacgttgatccagcaagttaaggaagatgccttcagtggaagaatggagggcaaagcccagtgttcgtctccctg

SEQ ID NO: 91080 - DNA, 599 bp, Chicken  19866894399836_1
  misc_feature (1)..(104): n is any nucleotide
nnnnnnnnnnnnnnnnnnnnnnnnnnnnnnnnnnnnnnnnnnnnnnnnnnnnnnnnnnnnnnnnnnnnnnnnnnnnnnnnnnnnnnnnnnnnnnnnnnnnnnnntatgtgagcacccagcactcggacaaacaaactttgtcaaaattcaatgctcggattaatgctgtcactttctgtagttctgtgttcaaagcgttcctttggcacaagggattttccttcgcagattattgaggatgaaatcaagtattgaaccgtaaaggcatcttccattctgttttcttagccagtgccactyacagcccaggctttctctcggggttgtctatgatgcatcctgcccatatcctgcctggggtctgtgtttggcctaaggcccagaacaaagtccggacaacagagataacatctgggtccaaacagaattataactctgagtgcttgtggcacgggcttatgtctgtaccctccacttagagggtaactgaagcctttgacagagaggaaagagcagcagaagtgctgactcctggggcaccttgcaggaggagctctggttggagctgagctctgcccatgcagggctgggtgcagagg

SEQ ID NO: 91081 - DNA, 428 bp, Chicken  19866894399836_2
ttctctcggggttgtctatgatgcatcctgcccatatcctgcctggggtctgtgtttggcctaaggcccagaacaaagtccggacaacagagataacatctgggtccaaacagaattataactctgagtgcttgtggcacgggcttatgtctgtaccctccacttagagggtaactgaagcctttgacagagaggaaagagcagcagaagtgctgactcctggggcaccttgcaggaggagctctggttggagctgagctctgcccatgcagggctgggtgcagaggtgaggtgaggcasygctgctgctcagtgtaagcagctgctgcatgcccaaatcctgcatcagctctagggccttgtgtcagcatgcaaagcattcacctggacttcttgtcgggtttaaatgccacttttcttctgttaaa

SEQ ID NO: 91082 - DNA, 427 bp, Chicken  19866894399836_3
tctctcggggttgtctatgatgcatcctgcccatatcctgcctggggtctgtgtttggcctaaggcccagaacaaagtccggacaacagagataacatctgggtccaaacagaattataactctgagtgcttgtggcacgggcttatgtctgtaccctccacttagagggtaactgaagcctttgacagagaggaaagagcagcagaagtgctgactcctggggcaccttgcaggaggagctctggttggagctgagctctgcccatgcagggctgggtgcagaggtgaggtgaggcasygctgctgctcagtgtaagcagctgctgcatgcccaaatcctgcatcagctctagggccttgtgtcagcatgcaaagcattcacctggacttcttgtcgggtttaaatgccacttttcttctgttaaa

SEQ ID NO: 91083 - DNA, 600 bp, Chicken  19866894399851_1
gcatacatgactcatttccataggaaaccaggctttaaaatggaagatttacaaggaaaatgagctgcactttggctcaaagcaatacacttgctggaaacatcagagtttgctcaatgtaaaaaaattatctgtatatattcgtcctcaccttgggtgttgtaaatcctcagagatcctcagaagacattgggtttatattcattgttatctgtagcccactaatttcatttttatactccgtgtgtcagctaaggaggtacaggagcatcaccagacacacacatgtgagcccaggcrtrtgtatgcacaaggacatgtacgctcaggtaycacaaagagcattcacggggagacgtcacaacagctccagtcctacaggacacagatttgcacccatggcaagggcacagtcgcatcaaactggtagagatagagctgccctgggaaagatggggggtgtgaccattcacaatacacttttctacctctttttcacaagtgcataaaagcagctttctcacggagcacttcaaagtcacctccacacatccgaaacttggctgaggatctcagcctgcctttattactgcgcaactc

SEQ ID NO: 91084 - DNA, 600 bp, Chicken  19866894399851_2
atacatgactcatttccataggaaaccaggctttaaaatggaagatttacaaggaaaatgagctgcactttggctcaaagcaatacacttgctggaaacatcagagtttgctcaatgtaaaaaaattatctgtatatattcgtcctcaccttgggtgttgtaaatcctcagagatcctcagaagacattgggtttatattcattgttatctgtagcccactaatttcatttttatactccgtgtgtcagctaaggaggtacaggagcatcaccagacacacacatgtgagcccaggcrtrtgtatgcacaaggacatgtacgctcaggtaycacaaagagcattcacggggagacgtcacaacagctccagtcctacaggacacagatttgcacccatggcaagggcacagtcgcatcaaactggtagagatagagctgccctgggaaagatggggggtgtgaccattcacaatacacttttctacctctttttcacaagtgcataaaagcagctttctcacggagcacttcaaagtcacctccacacatccgaaacttggctgaggatctcagcctgcctttattactgcgcaactcta

SEQ ID NO: 91085 - DNA, 600 bp, Chicken  19866894399851_3
tttaaaatggaagatttacaaggaaaatgagctgcactttggctcaaagcaatacacttgctggaaacatcagagtttgctcaatgtaaaaaaattatctgtatatattcgtcctcaccttgggtgttgtaaatcctcagagatcctcagaagacattgggtttatattcattgttatctgtagcccactaatttcatttttatactccgtgtgtcagctaaggaggtacaggagcatcaccagacacacacatgtgagcccaggcrtrtgtatgcacaaggacatgtacgctcaggtaycacaaagagcattcacggggagacgtcacaacagctccagtcctacaggacacagatttgcacccatggcaagggcacagtcgcatcaaactggtagagatagagctgccctgggaaagatggggggtgtgaccattcacaatacacttttctacctctttttcacaagtgcataaaagcagctttctcacggagcacttcaaagtcacctccacacatccgaaacttggctgaggatctcagcctgcctttattactgcgcaactctattaaagctctcagtggaaccgatgagtgaat

SEQ ID NO: 91086 - DNA, 600 bp, Chicken  19866894399852_1
attttcatgggatcagtgaaggactacttttctgctgtattagtagtgtatgtccatcccacaggctgacatggcatttgcaggaatcagctgtgctgacttcatgcaagtagaaaatttctctccgctgagagtattctccacatgcagatgaaacacattcactgtatcgcagagcagtacaaactgattcaggctgaaccaagaccttaactgacactcattattatggcatgtcttcactgtaacaaaatgtgtgattgtatgttcacactacctttatttagaaagtgaagatayactgacatggaacatcaagattaattttatgaattggttgagttccttcattcttctgcagttattttactttatgatgatgtatgtgaaaatatatgtgcatgaatatgggtaacaaacaggaggaggtggaagccattgtgcagcaggcaaacttggacttagttgtcattacaaaaacatggtgggatcacttccatgaccggagtgctgcagtggatggctattagctcttcagaaaagatagtcaaggaaggaggggtgttggcatggctctatatgttagagagtgttttgatg

SEQ ID NO: 91087 - DNA, 599 bp, Chicken  19866894399855_1
  misc_feature (1)..(153): n is any nucleotide
nnnnnnnnnnnnnnnnnnnnnnnnnnnnnnnnnnnnnnnnnnnnnnnnnnnnnnnnnnnnnnnnnnnnnnnnnnnnnnnnnnnnnnnnnnnnnnnnnnnnnnnnnnnnnnnnnnnnnnnnnnnnnnnnnnnnnnnnnnnnnnnnnnnnnnnnnaaaaaaatatttcacatttgccatagattaagaactcacaggcagacaaacaccacagaaggactggcaagtaacgagttgcttcctcagcgtgtatcacagcctttaaaattcttcaacgtaacaggaaaatgtctaaagaattcyaaaaatatcacatatttagctttccaaagggcccttggcaagtttacacccaaaggactattagaaaagtcattattattacaaaagcaatcctgtccaactcctttgctcaaagcagggtcacatagagcagtttgcctaggaccatgcccagtcagactttaaagatctccaaggatgaagactcaacagcctctgcaattcatcactttgcagagtaggtacttatatttgtttagtgaacatggaataggattctgttgactagatcttcctgagatggagattactaatgacaa

SEQ ID NO: 91088 - DNA, 600 bp, Chicken  19866894399858_1
ctaactgaagtcccacattattataatttagacagattttacagactcttcggcactctttgttgtaaactcagtattgtctacattcaattatgcagcagttagcctcttgcagccaggggaagaaaacccaaaaactggctttaaatccactaactagcaatatcactgtaaagtagtcagtgaaacttaaaaataagctctgttagagctgtcctactgactgtcacacctcgcttttcacttctgcacataagaactttaaaaatcatagaatcctagaataatttgagttggaayggacccttaaaaaccatctagtccatctcccctcartgaacagagacacgtacagctccatcaggtgctcagagccacatccagcctggccttgaatgcctccagggatggggtatccatcacctctctagacaacctgtgccactgcctcaccatacttaacataaaaaaaaaaaagtttccttgtatccaatctaaatctccttccttaatttaaaaccatttcccttgtcctatcaccacctacactgtaaagagcctgtccstttctttygtgtagctccyctgtagatactgaaa

SEQ ID NO: 91089 - DNA, 600 bp, Chicken  19866894399858_2
ttttacagactcttcggcactctttgttgtaaactcagtattgtctacattcaattatgcagcagttagcctcttgcagccaggggaagaaaacccaaaaactggctttaaatccactaactagcaatatcactgtaaagtagtcagtgaaacttaaaaataagctctgttagagctgtcctactgactgtcacacctcgcttttcacttctgcacataagaactttaaaaatcatagaatcctagaataatttgagttggaayggacccttaaaaaccatctagtccatctcccctcartgaacagagacacgtacagctccatcaggtgctcagagccacatccagcctggccttgaatgcctccagggatggggtatccatcacctctctagacaacctgtgccactgcctcaccatacttaacataaaaaaaaaaaagtttccttgtatccaatctaaatctccttccttaatttaaaaccatttcccttgtcctatcaccacctacactgtaaagagcctgtccstttctttygtgtagctccyctgtagatactgaaaatggctaaaaccctgtatactctggcaatctttgcc

SEQ ID NO: 91090 - DNA, 600 bp, Chicken  19866894399858_3
aatcatagaatcctagaataatttgagttggaayggacccttaaaaaccatctagtccatctcccctcartgaacagagacacgtacagctccatcaggtgctcagagccacatccagcctggccttgaatgcctccagggatggggtatccatcacctctctagacaacctgtgccactgcctcaccatacttaacataaaaaaaaaaaagtttccttgtatccaatctaaatctccttccttaatttaaaaccatttcccttgtcctatcaccacctacactgtaaagagcctgtccstttctttygtgtagctccyctgtagatactgaaaatggctaaaaccctgtatactctggcaatctttgcctccagagaattctaagtagcagcttgtcttaaggctttttttaatttgcagtgagatcccatacctattactacttatcacttgtactttgataaaaaaaatattccgtaaagactcagaattagattatggtagacattatataaacagaaagcattcttaccataaataattcagagtttaaatagagttaagagatctaagaaaaggacaattatgaccagtttaca

SEQ ID NO: 91091 - DNA, 600 bp, Chicken  19866894399858_4
aatcctagaataatttgagttggaayggacccttaaaaaccatctagtccatctcccctcartgaacagagacacgtacagctccatcaggtgctcagagccacatccagcctggccttgaatgcctccagggatggggtatccatcacctctctagacaacctgtgccactgcctcaccatacttaacataaaaaaaaaaaagtttccttgtatccaatctaaatctccttccttaatttaaaaccatttcccttgtcctatcaccacctacactgtaaagagcctgtccstttctttygtgtagctccyctgtagatactgaaaatggctaaaaccctgtatactctggcaatctttgcctccagagaattctaagtagcagcttgtcttaaggctttttttaatttgcagtgagatcccatacctattactacttatcacttgtactttgataaaaaaaatattccgtaaagactcagaattagattatggtagacattatataaacagaaagcattcttaccataaataattcagagtttaaatagagttaagagatctaagaaaaggacaattatgaccagtttacagatgagga

SEQ ID NO: 91092 - DNA, 600 bp, Chicken  19866894399858_5
aatttgagttggaayggacccttaaaaaccatctagtccatctcccctcartgaacagagacacgtacagctccatcaggtgctcagagccacatccagcctggccttgaatgcctccagggatggggtatccatcacctctctagacaacctgtgccactgcctcaccatacttaacataaaaaaaaaaaagtttccttgtatccaatctaaatctccttccttaatttaaaaccatttcccttgtcctatcaccacctacactgtaaagagcctgtccstttctttygtgtagctccyctgtagatactgaaaatggctaaaaccctgtatactctggcaatctttgcctccagagaattctaagtagcagcttgtcttaaggctttttttaatttgcagtgagatcccatacctattactacttatcacttgtactttgataaaaaaaatattccgtaaagactcagaattagattatggtagacattatataaacagaaagcattcttaccataaataattcagagtttaaatagagttaagagatctaagaaaaggacaattatgaccagtttacagatgaggagctaaggtaga

SEQ ID NO: 91093 - DNA, 600 bp, Chicken  19866894399860_1
cagccagggcagtggttgtgcttcacagctgtgtctggccaggctggtagtgacgtgcagcactccttgcctcaggaaagtctcctcttggtcaatgctggtattcattgcatgcgctgaggaatcacccccaagcacgctgatgctatccggtacagagaggtgcaagtgtctgcctggagatctttccatctgagcagacggggtgggaaggataagcctggcagatgtgtggatatgcagatgcttatctcgggagctggcggctcggcaaatagtgtctccatgtgaccacggatrgggaaagggttttggcttgttttccttaggtttggccttgccaagtcaccatgtgggaatgtatcraggagtggatgcgtgctgtttgctcattctgtctctcacagtggttcttttcctcgttcttgaccattactttttcatcatttgtgctttaaggtgaaataaggagagagccctacaaaggagaatgtgattggtgctgctgggagaagtctttttgctcagggcagggtaaaattgctgttctgacagcaagmgatgcagacccaaggcaccagtggagcagggggtgctcat

SEQ ID NO: 91094 - DNA, 600 bp, Chicken  19866894399860_2
ttgcctcaggaaagtctcctcttggtcaatgctggtattcattgcatgcgctgaggaatcacccccaagcacgctgatgctatccggtacagagaggtgcaagtgtctgcctggagatctttccatctgagcagacggggtgggaaggataagcctggcagatgtgtggatatgcagatgcttatctcgggagctggcggctcggcaaatagtgtctccatgtgaccacggatrgggaaagggttttggcttgttttccttaggtttggccttgccaagtcaccatgtgggaatgtatcraggagtggatgcgtgctgtttgctcattctgtctctcacagtggttcttttcctcgttcttgaccattactttttcatcatttgtgctttaaggtgaaataaggagagagccctacaaaggagaatgtgattggtgctgctgggagaagtctttttgctcagggcagggtaaaattgctgttctgacagcaagmgatgcagacccaaggcaccagtggagcagggggtgctcatggggtgtcacccagaagggacgtctgttcaaaggcgaactcatctacagtgcagtcattagaacca

SEQ ID NO: 91095 - DNA, 600 bp, Chicken  19866894399860_3
tggcggctcggcaaatagtgtctccatgtgaccacggatrgggaaagggttttggcttgttttccttaggtttggccttgccaagtcaccatgtgggaatgtatcraggagtggatgcgtgctgtttgctcattctgtctctcacagtggttcttttcctcgttcttgaccattactttttcatcatttgtgctttaaggtgaaataaggagagagccctacaaaggagaatgtgattggtgctgctgggagaagtctttttgctcagggcagggtaaaattgctgttctgacagcaagmgatgcagacccaaggcaccagtggagcagggggtgctcatggggtgtcacccagaagggacgtctgttcaaaggcgaactcatctacagtgcagtcattagaaccatggaatggttgggttggaagggccatccagttccaactccctgccacggactgggttgccactcaccagagccccactcaaccctttaccttgggcacctccagggatggggcacccaaaacctctccgggcaggaggatggtttggaggatggagtgctccttttacaaaattagacagaatgttcttgctga

SEQ ID NO: 91096 - DNA, 600 bp, Chicken  19866894399862_1
gcctcatttcccaccgactagtccatacaagcccacagacaatagggccaagtgtgcactgccggcagcgttcccatagaggagagctgtctggcgctcgggttgctttgctgagagcctccgtatctgaaaaagccatcagcacgcctgttccttcacttagaataaaaggtcacttcagggctcttaggggtttttggttgtttttttttttgtattttgtattcccccccccccccttttttttttgtccaaacaaaagaattatcttgattttattttatttcttttttttaaatrctttgccctgagatcacaaaagccgttaaaagcgatgtawgatatcaccgtcagcaaagccagagctcatgggaagctggatctagattacttacttctgctaatttatttccggacaaggccaggctcatctctgctgcttttctgctcgcctttccaccagcacagatggaagcaccctgacctcccccaccaaagagtctctcctgcagcaccctgagcccctctccctttgttttctgcatacatttattcyactgatgttgtttccatgccagtcagttgccttcttattacttc

SEQ ID NO: 91097 - DNA, 600 bp, Chicken  19866894399862_2
aatagggccaagtgtgcactgccggcagcgttcccatagaggagagctgtctggcgctcgggttgctttgctgagagcctccgtatctgaaaaagccatcagcacgcctgttccttcacttagaataaaaggtcacttcagggctcttaggggtttttggttgtttttttttttgtattttgtattcccccccccccccttttttttttgtccaaacaaaagaattatcttgattttattttatttcttttttttaaatrctttgccctgagatcacaaaagccgttaaaagcgatgtawgatatcaccgtcagcaaagccagagctcatgggaagctggatctagattacttacttctgctaatttatttccggacaaggccaggctcatctctgctgcttttctgctcgcctttccaccagcacagatggaagcaccctgacctcccccaccaaagagtctctcctgcagcaccctgagcccctctccctttgttttctgcatacatttattcyactgatgttgtttccatgccagtcagttgccttcttattacttctctaactacagcttcctccaaagttgttgcattgctgaac

SEQ ID NO: 91098 - DNA, 480 bp, Chicken  19866894399862_3
caaaagaattatcttgattttattttatttcttttttttaaatrctttgccctgagatcacaaaagccgttaaaagcgatgtawgatatcaccgtcagcaaagccagagctcatgggaagctggatctagattacttacttctgctaatttatttccggacaaggccaggctcatctctgctgcttttctgctcgcctttccaccagcacagatggaagcaccctgacctcccccaccaaagagtctctcctgcagcaccctgagcccctctccctttgttttctgcatacatttattcyactgatgttgtttccatgccagtcagttgccttcttattacttctctaactacagcttcctccaaagttgttgcattgctgaacttggagcaatggcacaagaatacactgatcgccccacttccacactgctctgtctgctctcactggctgacatctccctgcagggatcatttcaga

SEQ ID NO: 91099 - DNA, 600 bp, Chicken  19866894399871_1
tttttgatctaaaatagactatgctaaaattgtgtactggctaatcaaaaaataaaacaaacaaataaacccaaccaaataaaggtattaattaaaaaaacaatagcccagaatgcatgagctaaaattagtctcactgacagtcatatggtaactaagtcatttgtttttcttatatcaaaggaactaccgaggagaacttggacaagctgatccagaatgtgcaaatagaaagtgatagtgatatgataagaaactgggaataccttcatgttcctattaccaattcagtaagatttwtcttttgtaatttcctactgtccaagctttcagcaactcttatatcagcagtattgattaggactctttttggaagcaagttattactcagtgctcttgttttcatgatgtgtttttgaacaatgtgcataaataactttcaaagagagatacctataatgcttccactaaaaccattagatggtgacttgagctatctggttttggaaagcgcttgcctgctcaaatacttgtctctgaaaggtgttattctagtggtgtgattacctgtagatagaatgattatcagttaaataatgg

SEQ ID NO: 91100 - DNA, 600 bp, Chicken  19866894399871_2
attgattaggactctttttggaagcaagttattactcagtgctcttgttttcatgatgtgtttttgaacaatgtgcataaataactttcaaagagagatacctataatgcttccactaaaaccattagatggtgacttgagctatctggttttggaaagcgcttgcctgctcaaatacttgtctctgaaaggtgttattctagtggtgtgattacctgtagatagaatgattatcagttaaataatggtacgattgtaatggatgatgatgtctttaagttcctactgaattttctccayctgctgcaaactgataaatttcagtaaaacctgaatgtcctgtatgatgaaaataaggttttgaaaatctcttcagtcagctgttcagcaacaaaaacaaccaaggagggaccgctcttcagaagaaacttttcaactctctaggtggacgcctcttataaaagatgttatggaggtaaatttgacctactaataatttcttgagtgcattgcagagagatgctaagtgtgcagttgtattcaatctttcaaaattcaattatactccatattctgttgaataaccacttcaaatgtctt

SEQ ID NO: 91101 - DNA, 600 bp, Chicken  19866894399872_1
cttaggagagaaacatacccagaatgagatgcccagagctgtgggtgccccatccccagaggtgtccaaggccatggatggggtcctgggcagcctgagctggtgggggcactcagaccatggcaggggttggaactgggtgggttttaaagtcccttccgacccaaccattctgtgattctatatgattgatatatcgacagacaaaatagctagcaatacaaaagagaactatggaggggagtaataactgcccaaatacaaaactggtcttacctgttcttctcccagactgcttasatgctgtcagagcaaaccactaacaagaaatctcagttggataggtctcgtgtataaacttgatctccctaggctgtacgcttttcctttcctgacccaagaagggaactcgccaggataaggctgtttctgccttctgtcatccattctccaagtaactggttgctatttgaaagccagctgctaagaaatgagcagtgaaacgcatagctcaggttcccctctcctttcaacaaacagcagcccaaaatctcccccaaagcttctctgctgcattccacagagactgagtggttcaga

SEQ ID NO: 91102 - DNA, 600 bp, Chicken  19866894399874_1
gtctgctcagaaggtgtctgcttaggtctgtgctgtgatttatctaatgttgtgtacttcatgtgatcattgaactagcatcactaaggacaaatagctttgcatcccagagaaattaacagtttttacctgagtccagccaagaaacaggaatcaagagaatgttgccagttttcagagaaactcagcttttgtcagagttcatgatgaaatcagtcacatgtagctgatgagcattgattccgtaatccaaagccacgtgtgtctttaaacgtgcagggatcatcaacacttcgcaartagtaaacagctttgtatgaaggattctgatgatttattttttatttttatttttgctatatgtagtttcagtttgcagccatgcttaggttcaatagattgtgaactttaaaaaaaaaagtctaagaaaactgtgcaagcctaatagttaaacttgtgtgcaatccgaatgtatacgcaatacgaatattaaaagagaaaaaagatttctgcctgcaagtggtcttgactgctgtgctgctgataaaacctcgcagcctgttgagtggacattagctatgtaaacagatgttcctgaag

SEQ ID NO: 91103 - DNA, 599 bp, Chicken  19866894399877_1
  misc_feature (1)..(113): n is any nucleotide
nnnnnnnnnnnnnnnnnnnnnnnnnnnnnnnnnnnnnnnnnnnnnnnnnnnnnnnnnnnnnnnnnnnnnnnnnnnnnnnnnnnnnnnnnnnnnnnnnnnnnnnnnnnnnnnnnccctgacgagctggtagcatttcagctgatggtattctgctacatgcagggctttgcaggcgcccactactcccataggtcccactcatggacatccctctccccccagcacccagggacagcctggggcccaccaggggacccattcaggttgcggccccagactgtgatgcagctgtcaggaagygttttgctgatgtttggcacgaactgcttgacagccaataccaccatcctctaataagacatgcttgtcgatgtgcactgtggtgttttgtagccctgtaatgcaggagcacactgttccatttggctgggtgcatcaccggtctgggtccaccaccagcactcagagctggggaaggctggatggaaggcgaaccactcggtgctgcagggagccatgccatagcagcctccaggtaacaaagcctgcccaaacaatgcccagggctgccttaatgcagttcccagagccagatctgc

SEQ ID NO: 91104 - DNA, 430 bp, Chicken  19866894399877_2
cagagctggggaaggctggatggaaggcgaaccactcggtgctgcagggagccatgccatagcagcctccaggtaacaaagcctgcccaaacaatgcccagggctgccttaatgcagttcccagagccagatctgctccccacccgctttgctgggggctgggtgtaatgttatccgcagtgacttctcagtggggtgatttgagcacgctcaagagtgtgattctcccactgctgactcccatacggggacacagagcgcccagtgcaggactgcaccaagagccagcactcaccaggmtgcccacaaaaggttaaacacagccactccccttccttttgttgttatacttctaataatggtatctccattgtgtcagggagggggaaattatgctgctcatcctgcctagggacaacggagatggagt

SEQ ID NO: 91105 - DNA, 599 bp, Chicken  19866894399887_1
  misc_feature (1)..(66): n is any nucleotide
nnnnnnnnnnnnnnnnnnnnnnnnnnnnnnnnnnnnnnnnnnnnnnnnnnnnnnnnnnnnnnnnnngggtgttgtgatgtgagcactaattagttcatgcctccatagcatattaaaatctttggataatggatggtgtgcaagtatcaataatattatttttaacaatatttgtttaagctatgctaaaagccttcaaaaaagttacctctgattttacattttccttcagatttctccaagtgacttatctaaacagtaaggaagaaaatacttaagcagaacagccaagaataaggrttgctactttttaaaagcagatgttttgaaagaaatgtgtaaaattcaggaaagctagggaatagataggggattctgtcaagttaggatgataaatgaaagggctctagtggcccctctgtttgtttagacctcttgttcctgctacagctccgcacaaaactagcattgaagtgtctaccattaaaacataacataacctgacaatgatcagcccacagggcttttccaagagaaggccatattgttctgtgtggggaagtgttctagcacgagatgtcccaagacatgaaggaaag

SEQ ID NO: 91106 - DNA, 600 bp, Chicken  19866894399889_1
ctgttgtctccactgaaacacagaaatgtagtaccattttctataacccttgtcagccagttgttcgcccatcgcattacgcttttgccaagatgtgctggacattttgtgcggaaggatactgtgagagctttgctgaaattgaaaaagattacatcaagtggcttccctttgggtaactttgtcataaaaggaaattatattcattaagctggacgttttgctcaagaaagtcccttctttatttcttgttccctgtgacagaatgaaagatgaatggctgccaacactggcttgcartttacacatctctgaaaaaccgggtgactcctttcaaatgtaaggaatccatgtaatcacttgcttataagattaccaatatctgattataaaggttgggatgatatcaggaagggacttcacatgaagctgtttgcaagatgcttttttttacttactcagaatgtattccatttccttagggaaaggtcaaagcactaagaattagggaataaatgggtattacgttaatgatctttctgggcctatcatttatatttattgtttgctctgcctcctttgggtatgctaacagaaata

SEQ ID NO: 91107 - DNA, 464 bp, Chicken  19866894399889_2
gggtgactcctttcaaatgtaaggaatccatgtaatcacttgcttataagattaccaatatctgattataaaggttgggatgatatcaggaagggacttcacatgaagctgtttgcaagatgcttttttttacttactcagaatgtattccatttccttagggaaaggtcaaagcactaagaattagggaataaatgggtattacgttaatgatctttctgggcctatcatttatatttattgtttgctctgcctcctttgggtatgctaacagaaatacatgaatttcacagagaattycacctgtacrggcaacaaaagagatgtcagatgagaggaagaagtggaaaaggaatgcggaataaagcaatcctcaagagcattccccggtacatcagcaactaactgggaaaggcttatgggtttttcctggaccttacatccacctcaggctgaaagttctc

SEQ ID NO: 91108 - DNA, 454 bp, Chicken  19866894399889_3
tttcaaatgtaaggaatccatgtaatcacttgcttataagattaccaatatctgattataaaggttgggatgatatcaggaagggacttcacatgaagctgtttgcaagatgcttttttttacttactcagaatgtattccatttccttagggaaaggtcaaagcactaagaattagggaataaatgggtattacgttaatgatctttctgggcctatcatttatatttattgtttgctctgcctcctttgggtatgctaacagaaatacatgaatttcacagagaattycacctgtacrggcaacaaaagagatgtcagatgagaggaagaagtggaaaaggaatgcggaataaagcaatcctcaagagcattccccggtacatcagcaactaactgggaaaggcttatgggtttttcctggaccttacatccacctcaggctgaaagttctc

SEQ ID NO: 91109 - DNA, 599 bp, Chicken  19866894399892_1
  misc_feature (1)..(43): n is any nucleotide
nnnnnnnnnnnnnnnnnnnnnnnnnnnnnnnnnnnnnnnnnnntcaccatctccgttcaaacaccagctcatgattaagaaaataaaaatagaccagacaggtgccaaagaactcaccaaacctgctcagcccacaggctctccagcattcacagcgacaagacatgtgtgaaccacccacaccaattatttttttttctcctaaaactgagaatgtgaaatacttagaggtttagaaagatgatctttagtaccagcttctacaccatgtaactcacaccacacttgattctgacccastgcagtgatcaagcagcactttgactattgtgaatcttgactaactggttcctgagcaaatacctgtaattggcttcctctctcctttctccagctttgcttgtggggactcagtgtagacactgtgctccatgggctgctccaccctcttcgtcgccrtgcctttgaaattcatctgaagctggctggtgtacttctcgtgctgcagagacataaggacagctgcagagtgcccatgcaatctgcatggcagcctgtggcaatgataacctcccttgcccaaacgtggcaatgcaaag

SEQ ID NO: 91110 - DNA, 600 bp, Chicken  19866894399892_2
aagacatgtgtgaaccacccacaccaattatttttttttctcctaaaactgagaatgtgaaatacttagaggtttagaaagatgatctttagtaccagcttctacaccatgtaactcacaccacacttgattctgacccastgcagtgatcaagcagcactttgactattgtgaatcttgactaactggttcctgagcaaatacctgtaattggcttcctctctcctttctccagctttgcttgtggggactcagtgtagacactgtgctccatgggctgctccaccctcttcgtcgccrtgcctttgaaattcatctgaagctggctggtgtacttctcgtgctgcagagacataaggacagctgcagagtgcccatgcaatctgcatggcagcctgtggcaatgataacctcccttgcccaaacgtggcaatgcaaaggcaaatgctgtggctaagctctgtgacaaatgggaaacacacctaagtagaggctagagaacacaagtgccatcagagaggctttcagatacctcatctggaagacaataaatgacagttacagtccatgagaaggtcactgtaacacagccctgcaaaa

SEQ ID NO: 91111 - DNA, 600 bp, Chicken  19866894399894_1
gtcctgtccaccacaatatattggcgcctgtgcccggtccaactccagcacaccaccggtcaattcaaacctggcatcaacaaaacctcatagaacagcttcgatcaaatgaagatattcccaaagaaaacacagaggaaaactgtgtcaaggaagattcaagtaaaaccccacaggagttgcagatgatcacagaggaaaattcagatgaatctgcagagaggtaggagttttaaagcctgcacttcaaaagcagtacttctatccaagttattccctaaaactgtctttgttcttaascagaattctttaccgcattaatctcactttatgtatgtgcacacccacactcatacgaatagaaatgcattcgcattaaaaaagtgaaagattgtgaaatgtaaaggtttgatatgtcatttcagagcttccagaaaataaaatccactagcttatcgaatttttcctattacagtttacgacatgctaattctttgtcttgacttaatatgtgtaaagacaatgawgaaatgagccttctgaaacactgtcctcattctgactttatcaatgggtgcaactttgacaaatgagaactgc

SEQ ID NO: 91112 - DNA, 600 bp, Chicken  19866894399894_2
gaggaaaactgtgtcaaggaagattcaagtaaaaccccacaggagttgcagatgatcacagaggaaaattcagatgaatctgcagagaggtaggagttttaaagcctgcacttcaaaagcagtacttctatccaagttattccctaaaactgtctttgttcttaascagaattctttaccgcattaatctcactttatgtatgtgcacacccacactcatacgaatagaaatgcattcgcattaaaaaagtgaaagattgtgaaatgtaaaggtttgatatgtcatttcagagcttccasaaaataaaatccactagcttatcgaatttttcctattacagtttacgacatgctaattctttgtcttgacttaatatgtgtaaagacaatgawgaaatgagccttctgaaacactgtcctcattctgactttatcaatgggtgcaactttgacaaatgagaactgctggggatgcacagtctgcgtggttgccatcggtttgtcaaattctgcactgcctattattagtgccttcttgacaagtataattaaccttgaactaagtggaagggaagcaacattatttgcttctttgaaggt

SEQ ID NO: 91113 - DNA, 600 bp, Chicken  19866894399894_3
gagttttaaagcctgcacttcaaaagcagtacttctatccaagttattccctaaaactgtctttgttcttaascagaattctttaccgcattaatctcactttatgtatgtgcacacccacactcatacgaatagaaatgcattcgcattaaaaaagtgaaagattgtgaaatgtaaaggtttgatatgtcatttcagagcttccagaaaataaaatccactagcttatcgaatttttcctattacagtttacgacatgctaattctttgtcttgacttaatatgtgtaaagacaatgawgaaatgagccttctgaaacactgtcctcattctgactttatcaatgggtgcaactttgacaaatgagaactgctggggatgcacagtctgcgtggttgccatcggtttgtcaaattctgcactgcctattattagtgccttcttgacaagtataattaaccttgaactaagtggaagggaagcaacattatttgcttctttgaaggtttctctgaaataacattactttcacagcttgtttagcacactaagggacaaatattttctgtaaggtcaggttaaaagatattacagctatgc

SEQ ID NO: 91114 - DNA, 600 bp, Chicken  19866894399895_1
aatggctaatttagaaatatagtgggatgtattttaagtgtccattcattcatatttttaaagtatattttattccattgtgtaatgatttctgttacaataaaaaactcaatagtaacctaagaaatctgttgtgaacaattccttcccaatgcaccaagactacttgaagcagaaaatataattcaaacgaacaaacaaacaaaaaaaagtctgtaggccaaaattaacaggacagtataccttgaagacactgatctgaattgcctggtgaatcctctggggcactcccaacagcaragtttttttagaatccatttagtccagggtctagaaatgttaaatatatgcaatgatagcacagtattcctgagacaggatgtttattgtctagattttatttctcaggagactttagaataaaatccagtgcttataaatgaatttttcaaacaccttttgcatacagagcccatagggaaaaacacaatgagtctgtaaaaaacttcataactcagaaggtgttggtcacacttttaagagtgaagctaacagactcacacaagtggtttaagatgcctactaacttcccacaggcta

SEQ ID NO: 91115 - DNA, 600 bp, Chicken  19866894399896_1
agagagggcttgcgctgaggaagaaagaaggagggggaatgtctacctgatgtttgagttgagaaactgctttttccatatgctggttaacttggctgagggactgcagtgtgctagtggttgctaaggtgtggccatccagtacttggagggtaattgatgtattttggagaaattttgagctcccatgggaaaaagaaacttggagctcggagctgtgatgtgttacctagactgctgcacctgtcttggaaaaaggcatacccctcttctgcctcggtttcgttccttctgctgtgrtataaagacacttggcagattaatgagcagagtgtcctatgcacacagctgcggtagcaacatcaaacctcgatggtgacatgagctttgtgctccgcttccaacagctattgccatgtcctgggcacctggctgaggctgcaggtgtcccagcacaggactgcctaggtgctttgtgttggcccgtgtagtctgcccttactgcgcgtatgtttgtcatgaggccactgaggcctacttactaatggtaggaattagtatgttgcttcaaactgtaatgataacagcactccttcttag

SEQ ID NO: 91116 - DNA, 599 bp, Chicken  19866894399902_1
  misc_feature (1)..(99): n is any nucleotide
nnnnnnnnnnnnnnnnnnnnnnnnnnnnnnnnnnnnnnnnnnnnnnnnnnnnnnnnnnnnnnnnnnnnnnnnnnnnnnnnnnnnnnnnnnnnnnnnnnntactgcagagtagagctggagaagtttgatgctccaagaaactatcttgataaaaatagcctaaacatctcttttagaaggaccctgtaaatgcacaagggagccaaggattaattgattatttgctttaattatgttagaatccccaagacaaaacttaaatataaaacagaaacgagaggtgcagaaggatctattgargtagaaaagcctgtcytaacttggcattttaggtgccagcacttctctgcatccagacagtgtgttcaagggttgtcatgtgttagtacaattcttgcaagttaaatatctcaagaaaagaatccaccttctttctgacttttctgtatcttatatttttcttgctcttttatgtgttttttcttgtaagaagactttttatccaagaaactgagcctgatgtcataacattattctcttttggatttttttttcatttctttgtcatctttgtatacacgaagatgcagtctggcttt

SEQ ID NO: 91117 - DNA, 599 bp, Chicken  19866894399902_2
  misc_feature (1)..(83): n is any nucleotide
nnnnnnnnnnnnnnnnnnnnnnnnnnnnnnnnnnnnnnnnnnnnnnnnnnnnnnnnnnnnnnnnnnnnnnnnnnnnnnnnnnntactgcagagtagagctggagaagtttgatgctccaagaaactatcttgataaaaatagcctaaacatctcttttagaaggaccctgtaaatgcacaagggagccaaggattaattgattatttgctttaattatgttagaatccccaagacaaaacttaaatataaaacagaaacgagaggtgcagaaggatctattgargtagaaaagcctgtcytaacttggcattttaggtgccagcacttctctgcatccagacagtgtgttcaagggttgtcatgtgttagtacaattcttgcaagttaaatatctcaagaaaagaatccaccttctttctgacttttctgtatcttatatttttcttgctcttttatgtgttttttcttgtaagaagactttttatccaagaaactgagcctgatgtcataacattattctcttttggatttttttttcatttctttgtcatctttgtatacacgaagatgcagtctggctttcagtcacatgggtaaa

SEQ ID NO: 91118 - DNA, 600 bp, Chicken  19866894399913_1
tacaattattatttatgtacttatatagcaccataggtgtgtatgccactttacagacttatagaccagtccctcattattacaagcagctaaaattggttataatactcaaggttcttaacatgcaagacttggaggaaatactttgcctgaaaaaaatttacaaccattaattgaattctgccatcagaattgtctataagaaaacgttttgaaaaatatatggacataaggaattatactgcaggattgctggattttttgtgttgtttttttgtttgtttgtttgttagttttttkgggggggtctgtttcttttttttttcttcttttttcaagaaaaaaatagtgtgtatggattgattttcaagaaggtttagaatgcgttcaagcctctggatgcatgagttatcaacaatactatctacaatagtaatagatttttatgttgtatatctaaacattatagagattgatgaagctcctgaaataatgaatgactcgattttgtaggcgaaagatctaaatatttatatttgcaagtattttctgaaagatagtccatttgtcacagattttgggtatttggactagagacct

SEQ ID NO: 91119 - DNA, 600 bp, Chicken  19866894399918_1
ctttgaagaaatgaaggtttgcatcaacttcatttttataaacttaattacaaaggtccgtttctcttcagcgccgtgcattgctctgcatgcagcagttggaggcggtggaagttatttacggacaacaataacatatacctttgggaagacgctttattcggtgtgttgagagctgaatgcagagccattactggagagattttgccttatttctctgcagcagttaaccgttattactgtgcatttctgttcttctctgaggatcacgcagccccaatgcgggtcacagaagttatraacagatttttgtctgaatggttccaatatgcacctaaacaactgtagtggagttatattgtttgctcagttatagtatttgtttcctgtgtgattctttttgttgctcaggtgcccccaatacgatttctttaaataaatagggatagttaaaatctatcaaagatttactgtaaaatgcagtatcaaatatgtaggtatactttcatatctgaggcaggagtaaatagaaacaaaagtctgattatatttttattcaccttttttaaaatcttggaaaagaaccaggtgtaaaatcca

SEQ ID NO: 91120 - DNA, 600 bp, Chicken  19866894399919_1
tgaacagcggagtacttacccaactataggagaataaagacaatacaaagactccagctctgtaagggattgaggtaacaaagaatagtttttggatctgagaggtctgtaaggagcaatcacataacccttcctacctctttttctgtgaacatgcatctttaaaacttctctgagcctgcagacacctatcagcacacagaatgctgcatgcagtgaatgacagcagagaccaacgatcagcagctcttgggaggccaagggaatgattttctctctgcacaacagaaaagtgtcaartgcctgctgtgcttaatgacattttccttggcaatggtctggagactaaacatgcagctcatcacaaaacaggactgtggctgtttgcacacactgctatgcaccagagaaataaatatgaattaggaaggagaggtgcaacataaaagcacagcatttctgctttgggggctcatggatgcaccttggaggttagcagctctgttcttttactccaggacagctggctgagtggaccgaaggcattctcaactacaggtgttatacctttaactccctcttaaatgtctccagcatctg

SEQ ID NO: 91121 - DNA, 600 bp, Chicken  19866894399929_1
aggagctctggcaaagtgctgccgtgtgccccgcagagaacagcaaagctgtcctgctcgttgctgccgcagaactgccctgccctttgggatctacacaggggtataaaaaagaaggggacagactcttcagctgggactgtggggataggacaaggggaagtggtttcagtgacaagaagagattgagattggatataaggaaatttgtttatgataagggtagtgaagcagtggaataggttgcccagagaggtggtggatgccccatccctgtagacactcaagatcaggctggayggggcttggagcaccagatcgagctctgggtgtccctgttcagtgcagrggagttggaccagatgacctttaaaagtcccttccaactcaaatractccgagattgtatggtcagcctccttgcagctccagcagcactgcacatacctgtgaaggggcttaatgcctttttaagcgcaggtcgcagtcccaccgatatcagcagggagcttttaaaaagtgtttttcccactgttctcctaaaatggaggctcagaacaacgcagtcctagaaacactgtcatcagaagaaccatgtca

SEQ ID NO: 91122 - DNA, 600 bp, Chicken  19866894399929_2
tgtcctgctcgttgctgccgcagaactgccctgccctttgggatctacacaggggtataaaaaagaaggggacagactcttcagctgggactgtggggataggacaaggggaagtggtttcagtgacaagaagagattgagattggatataaggaaatttgtttatgataagggtagtgaagcagtggaataggttgcccagagaggtggtggatgccccatccctgtagacactcaagatcaggctggayggggcttggagcaccagatcgagctctgggtgtccctgttcagtgcagrggagttggaccagatgacctttaaaagtcccttccaactcaaatractccgagattgtatggtcagcctccttgcagctccagcagcactgcacatacctgtgaaggggcttaatgcctttttaagcgcaggtcgcagtcccaccgatatcagcagggagcttttaaaaagtgtttttcccactgttctcctaaaatggaggctcagaacaacgcagtcctagaaacactgtcatcagaagaaccatgtcaattattttctctttatggctattactgactcattacaattttctagcgc

SEQ ID NO: 91123 - DNA, 600 bp, Chicken  19866894399929_3
tacacaggggtataaaaaagaaggggacagactcttcagctgggactgtggggataggacaaggggaagtggtttcagtgacaagaagagattgagattggatataaggaaatttgtttatgataagggtagtgaagcagtggaataggttgcccagagaggtggtggatgccccatccctgtagacactcaagatcaggctggayggggcttggagcaccagatcgagctctgggtgtccctgttcagtgcagrggagttggaccagatgacctttaaaagtcccttccaactcaaatractccgagattgtatggtcagcctccttgcagctccagcagcactgcacatacctgtgaaggggcttaatgcctttttaagcgcaggtcgcagtcccaccgatatcagcagggagcttttaaaaagtgtttttcccactgttctcctaaaatggaggctcagaacaacgcagtcctagaaacactgtcatcagaagaaccatgtcaattattttctctttatggctattactgactcattacaattttctagcgcactgagcttttgaaggcagctgtaagaggtgaggcacgttttatt

SEQ ID NO: 91124 - DNA, 600 bp, Chicken  19866894399932_1
ttaggctcccatatttggtcccgttgcttcccacaacacagtggcaaacaagttgctgttatctgtaaggcagtacactggctgtgtaatgtgacgctgacatgaaagtcacaaagcactgaaagagaactttttctctgggctgaactttttggctggttcagcatattgtgctaatgagaaggaaagctggtgctttgtgtttgaggagctgcttcatggtgacaggaggctctccagaaaaccctctgcctttaaagacttcacttctttcataaaacatacatttccttgcacaarcaaccatcaaaataaaaaagcacgctgttagcttccacactctgagggcttattgygcttctctgtcctgaagaaactaaagtgttgccttgtcatgacttatgtgggtcctgccagtgcttgaagagatctgcaggtaaatgtgcgtggacatgcccttgtagtgaagctgcgctggcatgagttctcatggattcatggcttatagcagctttctgaagaatgcaaaaagtgctgggaaagattggtgtgcatgcaaagctggaattctgccctagatgtcagttagggttatggcag

SEQ ID NO: 91125 - DNA, 600 bp, Chicken  19866894399932_2
tgttatctgtaaggcagtacactggctgtgtaatgtgacgctgacatgaaagtcacaaagcactgaaagagaactttttctctgggctgaactttttggctggttcagcatattgtgctaatgagaaggaaagctggtgctttgtgtttgaggagctgcttcatggtgacaggaggctctccagaaaaccctctgcctttaaagacttcacttctttcataaaacatacatttccttgcacaarcaaccatcaaaataaaaaagcacgctgttagcttccacactctgagggcttattgygcttctctgtcctgaagaaactaaagtgttgccttgtcatgacttatgtgggtcctgccagtgcttgaagagatctgcaggtaaatgtgcgtggacatgcccttgtagtgaagctgcgctggcatgagttctcatggattcatggcttatagcagctttctgaagaatgcaaaaagtgctgggaaagattggtgtgcatgcaaagctggaattctgccctagatgtcagttagggttatggcagcagtgtgtcttacagaggatacagttttcttagtgacttctgttttgctttcacag

SEQ ID NO: 91126 - DNA, 600 bp, Chicken  19866894399932_3
gctgtatttgccctttatgtgcaggtttataatattcaagttcagaaaccagtaacataacgcagtaatttgtgtgaaatttctaaataaaagtatatagaggaatagttgtgctttatgtatcagtgcagtgattgggagttcttgaatgcctgctcttgagttccctgaatcatgtaggcctcagaagagttctttgtcactgggtcaaacagaagggcctagattatacccagtaggccttgaccaactctaaaagatagtgttggggtttgacattgttttttgtttgttttagcytttttttttttaaagctcagaggcaccatttgcagtgagatgaatactttgtgcagtaatccacaataatagaaagcattctggaagttaccgagggaaacattaaaattgaagtaagctstgaatctgtgggctgaaatttacctactggtgtgtagtcttaacgtagctcctgaaaagcatgctggtatagtgctggagttcaaagagtttacaagaggggactgtatgtactattgcattaaagttggagggattcttattttaaaatgctgaggtttgtattagaaattcagaccc

SEQ ID NO: 91127 - DNA, 600 bp, Chicken  19866894399932_4
atcagtgcagtgattgggagttcttgaatgcctgctcttgagttccctgaatcatgtaggcctcagaagagttctttgtcactgggtcaaacagaagggcctagattatacccagtaggccttgaccaactctaaaagatagtgttggggtttgacattgttttttgtttgttttagcttttttttttttaaagctcagaggcaccatttgcagtgagatgaatactttgtgcagtaatccacaataatagaaagcattctggaagttaccgagggaaacattaaaattgaagtaagctstgaatctgtgggctgaaatttacctactggtgtgtagtcttaacgtagctcctgaaaagcatgctggtatagtgctggagttcaaagagtttacaagaggggactgtatgtactattgcattaaagttggagggattcttattttaaaatgctgaggtttgtattagaaattcagaccctgtcagttgcaggaatctctagtgactggaaaactactaaactcttgatgtttcaagatctgagagactgagaaatgaacaactgaaagaagggacttgagtgaaactgttcagaacttct

SEQ ID NO: 91128 - DNA, 600 bp, Chicken  19866894399933_1
cttagtgtagtttgcggcaacattttacaataaagagacaccacaaaacaaaaacagctaaatatgttgtgagttgcagtaaaactgattggcacttgtagaaattttataaatttaagagctctatgatacatatggttcactttattgaattgtgctttgagttgaatcactagtgtatatctaatcctgtgatttttacagggcaatgaagacaggaggatagacaataagctgtaaaatcaacttgtctcttaaagaccaccatctaaattctttaatagtttgatagatgcctamataaatgacagattcagtaaatcagactgttttccttgggttcttaactcactaaatgttttctacaaccaggacactaagtttctacaatccatggtgctgtaaatatacagattcctactgacatctgacatttttcatttgtgatggtgatttgacctacctgagtttaccacaatgtgattgaaatcttttggaaatgcagaaaggtctgtgttgaatgctgtttcacattcacatttcatatgaaacaaatttaatttatgaatcataaaaatatattaagtatattaattaaaa

SEQ ID NO: 91129 - DNA, 599 bp, Chicken  19866894399935_1
  misc_feature (1)..(74): n is any nucleotide
nnnnnnnnnnnnnnnnnnnnnnnnnnnnnnnnnnnnnnnnnnnnnnnnnnnnnnnnnnnnnnnnnnnnnnnnnntcactttttggcaattcccaagaagaaaatactccccattaagagctgtccattttttaaatgtaaaagaaatcccaaaagctcgatctgccagactgacaagtactaacagtttaaactgatttcaaacatagctacagatgttgaagactttgcaattcaggcccccagcttgtttggtttgctcctttctcttttgcagtcaaacacaccttccggcctctcrgttgcttggaatcatgaccaaccatttaggtttctttattcctccctcacttgctcataatccgtatctcatctcttcttacagacttgacactttatgttcaaagcaaagattttaatttatgtcttcattttattttgcctccattacagtatctccaagtcccttattattaaatgccagtgaatctacaaagaaaaattccttgtaattgccccaactatagaaagcttcawaaagaacagccaaagtcaatcatcagcaagataaatcccaaggaagcctaacttcatgaaatc

SEQ ID NO: 91130 - DNA, 600 bp, Chicken  19866894399935_2
ggcccccagcttgtttggtttgctcctttctcttttgcagtcaaacacaccttccggcctctcrgttgcttggaatcatgaccaaccatttaggtttctttattcctccctcacttgctcataatccgtatctcatctcttcttacagacttgacactttatgttcaaagcaaagattttaatttatgtcttcattttattttgcctccattacagtatctccaagtcccttattattaaatgccagtgaatctacaaagaaaaattccttgtaattgccccaactatagaaagcttcawaaagaacagccaaagtcaatcatcagcaagataaatcccaaggaagcctaacttcatgaaatccagagctcacggtagagatattagggatacatcagcaatgaaagcctaaattaaataacctaataaaataagcaatatctcttgatgaaagtccattaggatgatctcatgcaccacagcaatctcatttcatacacataaaagctctctttatgtaatttcaggatagatgttcttaaaaatcttcagacctttaaatctaagccaaaaagaatgccatgtaaaatgcttagtctt

SEQ ID NO: 91131 - DNA, 600 bp, Chicken  19866894399940_1
ttaaatttagctacgggacaggattccacctttctccaagcaggagattatgtttttgtgaggaacaaatgcatccataggttgttcgccatcacagacaaggctgaggtcttacctgtaagccatttgcccccaagtcaaggagcacaacgaggacttgtgctggagatgtgtcctgctgttaggaatgagggaagatccggagttctttctctgcttctccttcctgctccagtgcccccagcaggtgctgcccacaccatcgccttgtcctgaccacatctcctggaggtctgtccrgaagggaaggccccacatgcaagcatccaggagcttgttaatcacccagagctgtgaagttcctcaagtggaaccagcagctgggtaagaagcatctatttgttccctgtctctatcctcagagagccaaagcatcaccagaggaggtcagggtggattcccagaaatgtgacccatcttctcagcaatgcaagcataattctgagagggctgcaggcttgctggcacccccagagcttgctgtcgtgacttcatgaagcgcagcactcccccaggaagagcaatccaaagaggaggagc

SEQ ID NO: 91132 - DNA, 577 bp, Chicken  19866894399955_1
ttgaggtcactctagacagagcagaggctgctatgaggcagtgaggccactgcccgtggatggactggctccaccagcccagagaaaggggcagcccagggagcagggagccttgcaagatggccgggcacaattagacgcatgctttactactgctcagaatgttttcttgctgcgcttctcacctttacaatgaaggttttgtggggcccacttttagatgggttcctagaattaaaaacacaaatagaaaagaaaaaagttggagcctccggccatggagaaagtagatcaaaaatwgtatttttgtacatggaaaatccacacggaatttttctcatgtaattaattygtgaagcggtactggtaaatcagggaagatattagcaactaatagaggaaataatctgacacatctgggggaagtgagagattttcctctggagatttctatttttwaaagaaataggggatgtctgtcagctcagatgttttctatgtctctttcctacatcgttaagaaacgacccttttgtgatcagggaaaaaggtcacagtaatttaatttccaaatttg

SEQ ID NO: 91133 - DNA, 525 bp, Chicken  19866894399955_2
cccgtggatggactggctccaccagcccagagaaaggggcagcccagggagcagggagccttgcaagatggccgggcacaattagacgcatgctttactactgctcagaatgttttcttgctgcgcttctcacctttacaatgaaggttttgtggggcccacttttagatgggttcctagaattaaaaacacaaatagaaaagaaaaaagttggagcctccggccatggagaaagtagatcaaaaatwgtatttttgtacatggaaaatccacacggaatttttctcatgtaattaattygtgaagcggtactggtaaatcagggaagatattagcaactaatagaggaaataatctgacacatctgggggaagtgagagattttcctctggagatttctatttttwaaagaaataggggatgtctgtcagctcagatgttttctatgtctctttcctacatcgttaagaaacgacccttttgtgatcagggaaaaaggtcacagtaatttaatttccaaatttg

SEQ ID NO: 91134 - DNA, 418 bp, Chicken  19866894399955_3
gaatgttttcttgctgcgcttctcacctttacaatgaaggttttgtggggcccacttttagatgggttcctagaattaaaaacacaaatagaaaagaaaaaagttggagcctccggccatggagaaagtagatcaaaaatwgtatttttgtacatggaaaatccacacggaatttttctcatgtaattaattygtgaagcggtactggtaaatcagggaagatattagcaactaatagaggaaataatctgacacatctgggggaagtgagagattttcctctggagatttctatttttwaaagaaataggggatgtctgtcagctcagatgttttctatgtctctttcctacatcgttaagaaacgacccttttgtgatcagggaaaaaggtcacagtaatttaatttccaaatttg

SEQ ID NO: 91135 - DNA, 600 bp, Chicken  19866894399958_1
tgacaaacagaaatcatccatccgcatactgaaagtttcattcttcccactcattcccttgaagacagtatatttgctgtcctccacatttcttactcttttaactgtacttagactgaacaacactggtttatttttcagagtgtttggaggccctgccttccaacttcctccctgttgtttccattatctggcttaccgtggccttgttttctctactggattattgtcaaggataccagttggacttttgttgttgttgttttgtctcagttctatcttttccttctgtgtccccgragagcaggaaaatgagcaataaaagcaaatatttgttgttattaatactgacagtccaatttccacgtctgcatattctgcatagcctgtagaaataccaatcagctgcagtttaagatttttagtccagttctgtggactagggaaggatctgtactatccttaagccatttctatcatgcttccactcactcccactttactctttgttctggagtgaacagtgtaactattaatggagtcaccactgctaaagttgttgtaatacacaatttaccccagtgatggaactttttggta

SEQ ID NO: 91136 - DNA, 599 bp, Chicken  19866894399970_1
  misc_feature (1)..(16): n is any nucleotide
nnnnnnnnnnnnnnnncttggagagcggacgggaacttatggtgcgctgcgattggaagaaaaacgagtgctttcgccgcaagccccgccccgctcacccgcgcatgcgcactgtgccaccgctatagcaaccgctccatgcttggtcctcgggcccgatccgggtgtgagggctgccgggcagctcggctccatgatgcctaatgtggcggaaaaacaggaacagggcgaggtggcagtcggtgcaagccctgaccaaagcacctctttcccccccagccccactgcctgtccacagcycaggagtacccctgcactgccctctccccgccctcaggacaaggcccatagctccctgcaggcagcggggccacaggagcagggggagkcacagtcctgcagaggaggctacagccaaggatcactgcagagccaggcattgtggccaaaagggctttctttgagagctgagaaaccgtaagaagagaatagaggagtagctgccagttgcacagggatggagctgaagatcaccgaccctttgaagttgggttgttcattggagaaaaacacggtgtcccatggaggaggcagtgggg

SEQ ID NO: 91137 - DNA, 600 bp, Chicken  19866894399970_2
cccgctcacccgcgcatgcgcactgtgccaccgctatagcaaccgctccatgcttggtcctcgggcccgatccgggtgtgagggctgccgggcagctcggctccatgatgcctaatgtggcggaaaaacaggaacagggcgaggtggcagtcggtgcaagccctgaccaaagcacctctttcccccccagccccactgcctgtccacagcycaggagtacccctgcactgccctctccccgccctcaggacaaggcccatagctccctgcaggcagcggggccacaggagcagggggagkcacagtcctgcagaggaggctacagccaaggatcactgcagagccaggcattgtggccaaaagggctttctttgagagctgagaaaccgtaagaagagaatagaggagtagctgccagttgcacagggatggagctgaagatcaccgaccctttgaagttgggttgttcattggagaaaaacacggtgtcccatggaggaggcagtggggctcatttgtgcttggcacgagggaactccctcctgcccttgtcgcggcccccgaagtagcgcacgcggtggatggcctgcagctgccgct

SEQ ID NO: 91138 - DNA, 600 bp, Chicken  19866894399973_1
tgcgttggcaccgggaagctgtgtgtgtacctatgtacgtacatctgctttcttccagctttcaaaggtggcatccagtccccttggagcgtgagcagaatcccttctgagctggggaaaggtttgcttgaaaggtcttgtaataaggttaaggagaggccagcagccgctcgccctgctgctgagcacttcagtagctaaatttagtcccttgagtcattactgagtcagcaaattgggggcaggaaatcttgatttctcttctcttcctttttcatcagcgacggatccaagacgggmtccasactgctttctctctcaatccagcacgctgcctcccgcactgctttcccctggagcatccttgagcctggccagaagaagtcagagctcctttcctctctgctgcagccacctgccctgacaagtggcctgtcctcggggaagcggcatcgtttcctatcgttagtgatgcggggcacgggaagctgtgtccactcagctttgtctcttgctgggtgcacactggccgaggcacggtggcagctcatgcatcccctggagctgccttgaaacccagtgatgggtaaagaaacccca

SEQ ID NO: 91139 - DNA, 600 bp, Chicken  19866894399973_2
tggcaccgggaagctgtgtgtgtacctatgtacgtacatctgctttcttccagctttcaaaggtggcatccagtccccttggagcgtgagcagaatcccttctgagctggggaaaggtttgcttgaaaggtcttgtaataaggttaaggagaggccagcagccgctcgccctgctgctgagcacttcagtagctaaatttagtcccttgagtcattactgagtcagcaaattgggggcaggaaatcttgatttctcttctcttcctttttcatcagcgacggatccaagacgggmtccasactgctttctctctcaatccagcacgctgcctcccgcactgctttcccctggagcatccttgagcctggccagaagaagtcagagctcctttcctctctgctgcagccacctgccctgacaagtggcctgtcctcggggaagcggcatcgtttcctatcgttagtgatgcggggcacgggaagctgtgtccactcagctttgtctcttgctgggtgcacactggccgaggcacggtggcagctcatgcatcccctggagctgccttgaaacccagtgatgggtaaagaaaccccatccag

SEQ ID NO: 91140 - DNA, 599 bp, Chicken  19866894399985_1
  misc_feature (1)..(11): n is any nucleotide
nnnnnnnnnnntggaatcccttggtctttgtggttggagctgactggggattcacaagctacaggtgtgcttggtttgtgcctgcataaaccttctttctttaggaaatcagcctgaaaggagaacacactgtgattaaacctttcatggcttccaagtgaagaggggctatttacaacattactttaaacagagccaaaagccctcaaattgtaaaccctggaggggagagggctgctggctgttcagctgctagactctgcagctattctgttgggtcagtgagtgatttgatttcakctggactgtkaagccagatgcaacataatccgagcaacacttctgcacagcgctattagaccagagaaatatgaccacgtgctggttgtgctgagcccccagctgagagcagggctctgcctgaccctccctgaggagcccttcagtggttccaagaactgtgaaattttaggagcactgtctctggctgtgtatactacaagacagctactgtgcaaagcttgatttccttctccagaatgttcctttttacccaaggcagtaggtaccttggtcctgcacctcctcatgcaggagag

SEQ ID NO: 91141 - DNA, 599 bp, Chicken  19866894399985_2
  misc_feature (1)..(1): n is any nucleotide
ntggaatcccttggtctttgtggttggagctgactggggattcacaagctacaggtgtgcttggtttgtgcctgcataaaccttctttctttaggaaatcagcctgaaaggagaacacactgtgattaaacctttcatggcttccaagtgaagaggggctatttacaacattactttaaacagagccaaaagccctcaaattgtaaaccctggaggggagagggctgctggctgttcagctgctagactctgcagctattctgttgggtcagtgagtgatttgatttcakctggactgtkaagccagatgcaacataatccgagcaacacttctgcacagcgctattagaccagagaaatatgaccacgtgctggttgtgctgagcccccagctgagagcagggctctgcctgaccctccctgaggagcccttcagtggttccaagaactgtgaaattttaggagcactgtctctggctgtgtatactacaagacagctactgtgcaaagcttgatttccttctccagaatgttcctttttacccaaggcagtaggtaccttggtcctgcacctcctcatgcaggagagtcaaattgtg

SEQ ID NO: 91142 - DNA, 599 bp, Chicken  19866894399994_1
  misc_feature (1)..(109): n is any nucleotide
nnnnnnnnnnnnnnnnnnnnnnnnnnnnnnnnnnnnnnnnnnnnnnnnnnnnnnnnnnnnnnnnnnnnnnnnnnnnnnnnnnnnnnnnnnnnnnnnnnnnnnnnnnnnnagaggggaagagactgtttaaatgtgcctgtgaggtttgtcagaaagtgtcagagaattggcacaccacaaagccaacccacgcagccatcacgggcgcttctggaacgaccagcgcagcagcacctacacaccctacacacccagtcgcactctgcaaggcgtacgtgcttcccttctacctccagcacyaaaggatctcctctggaggtttgcccagcagcaggtggccatttccactacatgtgagaacctatacttcctttagaagcgcacacaggctttgaccagttatgttttaccgtgctcgagctcgagaaaaccactgtgtcttcaaagagctttcactaacacaggatgtaatatgtaggtggttctctctgctaccacagcatcacttacgaagcaacacaacatacacctacaattaacttctgcccaygactagttcaacttaatgggtcccgctaacaccctgtaccgttaccctc

SEQ ID NO: 91143 - DNA, 600 bp, Chicken  19866894399994_2
cccagtcgcactctgcaaggcgtacgtgcttcccttctacctccagcacyaaaggatctcctctggaggtttgcccagcagcaggtggccatttccactacatgtgagaacctatacttcctttagaagcgcacacaggctttgaccagttatgttttaccgtgctcgagctcgagaaaaccactgtgtcttcaaagagctttcactaacacaggatgtaatatgtaggtggttctctctgctaccacagcatcacttacgaagcaacacaacatacacctacaattaacttctgcccaygactagttcaacttaatgggtcccgctaacaccctgtaccgttaccctcttgctaatgctgttcagtaaaaacaaattcattttattggagctgctgctggctgttgttttccaattcccatttacacccattctagggtacaaatacataccctcagcttttaagtgatggcactgacactcggaggtcagcaggcacagccctgcagtgtaaaacaggaccgcagtgcgctctcagtctcactctccttattttaagtcattttctctaggactccttaccaccctgctgctgcagcc

SEQ ID NO: 91144 - DNA, 599 bp, Chicken  19866894400001_1
  misc_feature (1)..(37): n is any nucleotide
nnnnnnnnnnnnnnnnnnnnnnnnnnnnnnnnnnnnntaagaatatattacgttaaactgtacactagataaacagttcaatttctaagataaagatcatagagctctgaagtatttttcaaagttttccctgtggaaagttctttccatcctctctgtggtcacccccctcagaaagaccagataagacaccttttttcaagaagctcttttcattttctgtcttttgtgattcagttctattataattctgccccatcgcatatttttcctagtgtctttttttaaataaatcttttyaatttttccattatttgactgcatgatatccttccctctcctgtctttccccctctgattaaaatcgcacagcttgcttcagagactggatacctgtaattggctttctaatgtcatctgaatccttctctgctccaccatacmgtccaactctcctgcagaatggacatttttgtttcatcacttctctttcatggtctcttccctgtaatggtttgcactgacttttacctttgagcatgttctgaagctacaagatcactgttggcttaaatctcacttttttataagagtaactt

SEQ ID NO: 91145 - DNA, 562 bp, Chicken  19866894400001_2
ttccatcctctctgtggtcacccccctcagaaagaccagataagacaccttttttcaagaagctcttttcattttctgtcttttgtgattcagttctattataattctgccccatcgcatatttttcctagtgtctttttttaaataaatcttttyaatttttccattatttgactgcatgatatccttccctctcctgtctttccccctctgattaaaatcgcacagcttgcttcagagactggatacctgtaattggctttctaatgtcatctgaatccttctctgctccaccatacmgtccaactctcctgcagaatggacatttttgtttcatcacttctctttcatggtctcttccctgtaatggtttgcactgacttttacctttgagcatgttctgaagctacaagatcactgttggcttaaatctcacttttttataagagtaacttcataagctgagctttacagtaagaacagatgttgagctgttaacccacaggttttggtaaaggtgaataatggactaaacttgatgtccctcacccagatctaactg

SEQ ID NO: 91146 - DNA, 600 bp, Chicken  19866894400015_1
tttggagtaagatggcttctggagaagtacttttaatgaggggaaagattttttttttttctgaatcagagctctcctacctgttttgtggttttgtgtttctgtgatgtcatttctcacagaaaatgtgaattcgtatgcatttcagttacctcgaagagttctgtctactgtttcctgatgattgatttctattctttggttttcttgtattacacttgtaacacaggtgcaattgtcagtggtgcttcttgtgctgcagcctggtttagaagtcacagcaatgtttccaaagcttaractgctttctgtccttttttggttgtgattgtatagaaaattcaatctttttgttaatgaagcagcagtgttagaagtgtgacacactgcggttttaaaatgccatggaagtgccaccggggcagtccttgggtcatgctgggtttctttgtgggtttgtttctctttttctacgtttttttttcttctttcaaattcttttgagtatcctctgactttgacctgtcttgttttctttttttttttttcctcttttttttcaaacaagatcagggcattaggctctttcaagccaagctg

SEQ ID NO: 91147 - DNA, 600 bp, Chicken  19866894400024_1
acctgacccagcagttctcacgccgaggttcaaacgatgacagctcattgccaacagcagccggagctgcccaggaagccatcacagagaagtggatgttcctgtttttccaaaacaaccttttaattacgctccttactataatagcagcctttttccaacacgacagcagctggggctattaatttaggacccaaggtctaacgatggtaatatggaaacaccatacttcagcagacctcgtccttccatgcactgatacagaattttccaaggaaaaaacgcccgctcagtcagcamttcctgtttgtgacagcagattctcactcagctgggtttgaaccattttctgtctggccataaggtgcattttgtacaagcagagggagttcatgcgcagttactcattgaaaaagcccagctcaggagcacagcagtaaaacgcagctataaaacagccacacgtgaggctgtgagcgtggaaagacagctgtgctgcgttcctctcgtcttcttatcgcagaaaggctgctttccctcagctcacgcaaagtgaaacccctctgagtacatcacgcagtcacacagcggtttgggttg

SEQ ID NO: 91148 - DNA, 599 bp, Chicken  19866894400037_1
  misc_feature (1)..(152): n is any nucleotide
nnnnnnnnnnnnnnnnnnnnnnnnnnnnnnnnnnnnnnnnnnnnnnnnnnnnnnnnnnnnnnnnnnnnnnnnnnnnnnnnnnnnnnnnnnnnnnnnnnnnnnnnnnnnnnnnnnnnnnnnnnnnnnnnnnnnnnnnnnnnnnnnnnnnnnnnaatctgttccacttagcatcaacgtcacacccagcttcctggtaagacaatgccagaagtcatttggtttaacgttgcctcagctagtcaacacaaaacaataggaaccatcatgaagaaggtttaatcaagatcttagcattctgcytctggaaaatagacagtgatyagtatgttcaccaatcaggtaactagctcagattattgctgttaagtgaaatacatcctgaactagttgctkaaactcaagattttgagtaacagacatcaggtgttgataagcagtttaaagaaagacaaaagcaaatgtataagaatttatttcccctgagggaaattatccaattcaaaattgccttcagaagttagagttckactggttttagaaaatgaggattactagtaggttgtaaacttgctcaactttacctataccacttcagaatt

SEQ ID NO: 91149 - DNA, 599 bp, Chicken  19866894400037_2
  misc_feature (1)..(131): n is any nucleotide
nnnnnnnnnnnnnnnnnnnnnnnnnnnnnnnnnnnnnnnnnnnnnnnnnnnnnnnnnnnnnnnnnnnnnnnnnnnnnnnnnnnnnnnnnnnnnnnnnnnnnnnnnnnnnnnnnnnnnnnnnnnnnnnnnnnaatctgttccacttagcatcaacgtcacacccagcttcctggtaagacaatgccagaagtcatttggtttaacgttgcctcagctagtcaacacaaaacaataggaaccatcatgaagaaggtttaatcaagatcttagcattctgcytctggaaaatagacagtgatyagtatgttcaccaatcaggtaactagctcagattattgctgttaagtgaaatacatcctgaactagttgctkaaactcaagattttgagtaacagacatcaggtgttgataagcagtttaaagaaagacaaaagcaaatgtataagaatttatttcccctgagggaaattatccaattcaaaattgccttcagaagttagagttckactggttttagaaaatgaggattactagtaggttgtaaacttgctcaactttacctataccacttcagaattcatcaaaaaagctgtcaaagt

SEQ ID NO: 91150 - DNA, 599 bp, Chicken  19866894400037_3
  misc_feature (1)..(59): n is any nucleotide
nnnnnnnnnnnnnnnnnnnnnnnnnnnnnnnnnnnnnnnnnnnnnnnnnnnnnnnnnnnaatctgttccacttagcatcaacgtcacacccagcttcctggtaagacaatgccagaagtcatttggtttaacgttgcctcagctagtcaacacaaaacaataggaaccatcatgaagaaggtttaatcaagatcttagcattctgcytctggaaaatagacagtgatyagtatgttcaccaatcaggtaactagctcagattattgctgttaagtgaaatacatcctgaactagttgctkaaactcaagattttgagtaacagacatcaggtgttgataagcagtttaaagaaagacaaaagcaaatgtataagaatttatttcccctgagggaaattatccaattcaaaattgccttcagaagttagagttckactggttttagaaaatgaggattactagtaggttgtaaacttgctcaactttacctataccacttcagaattcatcaaaaaagctgtcaaagttttagcagcacacagccttcataaataatttctcatgtttaagcatgcttttgacttgagttctaaaatgca

SEQ ID NO: 91151 - DNA, 600 bp, Chicken  19866894400037_4
tgcctcagctagtcaacacaaaacaataggaaccatcatgaagaaggtttaatcaagatcttagcattctgcytctggaaaatagacagtgatyagtatgttcaccaatcaggtaactagctcagattattgctgttaagtgaaatacatcctgaactagttgctkaaactcaagattttgagtaacagacatcaggtgttgataagcagtttaaagaaagacaaaagcaaatgtataagaatttatttcccctgagggaaattatccaattcaaaattgccttcagaagttagagttckactggttttagaaaatgaggattactagtaggttgtaaacttgctcaactttacctataccacttcagaattcatcaaaaaagctgtcaaagttttagcagcacacagccttcataaataatttctcatgtttaagcatgcttttgacttgagttctaaaatgcagatcccttgctatgaagcacattagatctcccattagtctcaaacacttaagaagctcataccttaatctcccatcctgaaaagcaatagttccactttccatttcaacagaacttttaattmtagttactgatt

SEQ ID NO: 91152 - DNA, 600 bp, Chicken  19866894400037_5
agttagagttckactggttttagaaaatgaggattactagtaggttgtaaacttgctcaactttacctataccacttcagaattcatcaaaaaagctgtcaaagttttagcagcacacagccttcataaataatttctcatgtttaagcatgcttttgacttgagttctaaaatgcagatcccttgctatgaagcacattagatctcccattagtctcaaacacttaagaagctcataccttaatctcccatcctgaaaagcaatagttccactttccatttcaacagaacttttaattmtagttactgatttcactgagaaatcattaaaatacaggatgtttgcaaaatatccacattctcttactcratgttcaatgtgaggctgatgttaagactgtgctagctcaaatattgacataagaggtcatgtcagaattaactatagctataaaccagagatttgaattttattttccccaaactttacagatatgcctcaaattttgatgaagttaaggtgtagaagagctggaagtgaaaataaaaacactaagttagcatcctatttaatagcttataaagctgacagaatgataa

SEQ ID NO: 91153 - DNA, 600 bp, Chicken  19866894400037_6
accacttcagaattcatcaaaaaagctgtcaaagttttagcagcacacagccttcataaataatttctcatgtttaagcatgcttttgacttgagttctaaaatgcagatcccttgctatgaagcacattagatctcccattagtctcaaacacttaagaagctcataccttaatctcccatcctgaaaagcaatagttccactttccatttcaacagaacttttaattmtagttactgatttcactgagaaatcattaaaatacaggatgtttgcaaaatatccacattctcttactcratgttcaatgtgaggctgatgttaagactgtgctagctcaaatattgacataagaggtcatgtcagaattaactatagctataaaccagagatttgaattttattttccccaaactttacagatatgcctcaaattttgatgaagttaaggtgtagaagagctggaagtgaaaataaaaacactaagttagcatcctatttaatagcttataaagctgacagaatgataagcatgtaagactgcaaatgaaacgtgacttatcaagcatgtattcattccacatgtatttatatgttagt

SEQ ID NO: 91154 - DNA, 600 bp, Chicken  19866894400044_1
cagatgtggttgtggggtggcttgttgcttggatgtttcggtggggcttggctggcttggagcccggccttgagcaggaggtctgggctgctgtggtgggaacacgcctgccttggaagcctggactggagaggacccagttgctgatcggacttgttgtggagatccaggtgacctctgctgctgaggtgaggtggacaggggactctgaggctgctgtccttgaggagagagccgttgctgtggaggtgcatttgtccgtggaggctgagatgcctgaggctggcgtggtccacctgraagggtcatgtagataagaagcatgagggaggtcatgtggaaaatgagcaagtagcatctatakggagkgatgatatttgctaagaggagagactattcagagcagtttcatgcaaaagggtaaggaaaatcctcttttacaataaaaataaaaatctagcaccagtgtcatgcccatgtcttgttcttcaacacctgaggctaaatctggacagtaaaccaaatgtgttcttctggccaagccacaagtcaagtctgcttctgctgtcaagagaaactgagggtttgctctcccttggt

SEQ ID NO: 91155 - DNA, 600 bp, Chicken  19866894400044_2
cggccttgagcaggaggtctgggctgctgtggtgggaacacgcctgccttggaagcctggactggagaggacccagttgctgatcggacttgttgtggagatccaggtgacctctgctgctgaggtgaggtggacaggggactctgaggctgctgtccttgaggagagagccgttgctgtggaggtgcatttgtccgtggaggctgagatgcctgaggctggcgtggtccacctgraagggtcatgtagataagaagcatgagggaggtcatgtggaaaatgagcaagtagcatctatakggagkgatgatatttgctaagaggagagactattcagagcagtttcatgcaaaagggtaaggaaaatcctcttttacaataaaaataaaaatctagcaccagtgtcatgcccatgtcttgttcttcaacacctgaggctaaatctggacagtaaaccaaatgtgttcttctggccaagccacaagtcaagtctgcttctgctgtcaagagaaactgagggtttgctctcccttggtgacagggcagtgtgtgtgtgaatggatcaaggatcccggtgtcaccatcttggtatctattcca

SEQ ID NO: 91156 - DNA, 600 bp, Chicken  19866894400044_3
ttgagcaggaggtctgggctgctgtggtgggaacacgcctgccttggaagcctggactggagaggacccagttgctgatcggacttgttgtggagatccaggtgacctctgctgctgaggtgaggtggacaggggactctgaggctgctgtccttgaggagagagccgttgctgtggaggtgcatttgtccgtggaggctgagatgcctgaggctggcgtggtccacctgraagggtcatgtagataagaagcatgagggaggtcatgtggaaaatgagcaagtagcatctatakggagkgatgatatttgctaagaggagagactattcagagcagtttcatgcaaaagggtaaggaaaatcctcttttacaataaaaataaaaatctagcaccagtgtcatgcccatgtcttgttcttcaacacctgaggctaaatctggacagtaaaccaaatgtgttcttctggccaagccacaagtcaagtctgcttctgctgtcaagagaaactgagggtttgctctcccttggtgacagggcagtgtgtgtgtgaatggatcaaggatcccggtgtcaccatcttggtatctattccaggtgt

SEQ ID NO: 91157 - DNA, 599 bp, Chicken  19866894400045_1
  misc_feature (1)..(52): n is any nucleotide
nnnnnnnnnnnnnnnnnnnnnnnnnnnnnnnnnnnnnnnnnnnnnnnnnnnncccctggaacgatgcaatagggctgcagttaatcttctcttgttaaggttgtttggacaacatacaagcagccccagcaggagtgactgggacagaactggctggatgtaggactgcactgggagagcacagtattctaggtcagtctgttggcttccactgctcatgctcacgttaagtgcacaagcgtaggacatgaaagctgcagcaagcattatgcagctaataccatttaaaatttaatcatwtcctagtcttatctttaagataaagattgcataagcagcccaatcttctcgtcatactaaagcatgaatccactcaccgagaaaataactcatcatttgaggggtgtgatgaggtgtaggagcaatacgtagcagctcttctccacgaggaactgtggggtagttgattgcttggacatagatgctgtgctggctcatcagcttgtcacagatctctgtatttttagcagcatctgcaacctgaagttccaaactttgtttcagtatcagccagaaggtagcaaagttgtcagcccarc

SEQ ID NO: 91158 - DNA, 600 bp, Chicken  19866894400045_2
twtcctagtcttatctttaagataaagattgcataagcagcccaatcttctcgtcatactaaagcatgaatccactcaccgagaaaataactcatcatttgaggggtgtgatgaggtgtaggagcaatacgtagcagctcttctccacgaggaactgtggggtagttgattgcttggacatagatgctgtgctggctcatcagcttgtcacagatctctgtatttttagcagcatctgcaacctgaagttccaaactttgtttcagtatcagccagaaggtagcaaagttgtcagcccarcatcgtcagccacaggagtcaaacatgacaagcctcccttccacccactaaatagagtatccatcagacataggaacygaaagcttctactctagagccctccacagcctaaccaggtagttgtttgcacctgaattctttttactggctggttcttagcatctgtcttatttatacttgcagactgagagtttcatacactatcattttacattacaacatttatagggggctgaagtcaatttaatcacagcctttattcttcagacatgaagccagactcatggcatataagtaggt

SEQ ID NO: 91159 - DNA, 599 bp, Chicken  19866894400045_3
ccgagaaaataactcatcatttgaggggtgtgatgaggtgtaggagcaatacgtagcagctcttctccacgaggaactgtggggtagttgattgcttggacatagatgctgtgctggctcatcagcttgtcacagatctctgtatttttagcagcatctgcaacctgaagttccaaactttgtttcagtatcagccagaaggtagcaaagttgtcagcccarcatcgtcagccacaggagtcaaacatgacaagcctcccttccacccactaaatagagtatccatcagacataggaacygaaagcttctactctagagccctccacagcctaaccaggtagttgtttgcacctgaattctttttactggctggttcttagcatctgtcttatttatacttgcagactgagagtttcatacactatcattttacattacaacatttatagggggctgaagtcaatttaatcacagcctttattcttcagacatgaagccagactcatggcatataagtaggtcagagttggaacttaatgagtatttattaataccaggaaacaatctgatcataactacagacacaggcaccggggcc

SEQ ID NO: 91160 - DNA, 600 bp, Chicken  19866894400046_1
ccccagcaaactgtcactattactcaagtgtatttaaagctgtttaaaggctttagtgaaatgtgtatgttatgtactctggtaagggagacaataatgatctcaacctgtgacttcaagcagtatatcgccttaaggactcctttaaaatctatgtaatatcttctctctgctgtacaacactactactctgtagtagctttttatgtccctcttaatatgcattccttaatataaattaaatccttacttttgaggagcattatgtttggttttctattacattatattttttacctwtcctattatctgattttgaatgttgactgctttttttaggccacagctgtactgcatttattacgtttccatcttcagtttttggaatatgacattaataaaaytgaaaaaaactcatcccttttaaaggaaaaaaaatcaacaaaaacaaaacagtacattgtcctttcttgctacaggatttggatttgaacagatacaatgaagaaagctgtatatttgatttaagatttgcagaggcttttttttgtgtatttaggcagacagattggtaattcactaccatcaagtatgtatgtg

SEQ ID NO: 91161 - DNA, 600 bp, Chicken  19866894400046_2
aacctgtgacttcaagcagtatatcgccttaaggactcctttaaaatctatgtaatatcttctctctgctgtacaacactactactctgtagtagctttttatgtccctcttaatatgcattccttaatataaattaaatccttacttttgaggagcattatgtttggttttctattacattatattttttacctwtcctattatctgattttgaatgttgactgctttttttaggccacagctgtactgcatttattacgtttccatcttcagtttttggaatatgacattaataaaaytgaaaaaaactcatcccttttaaaggaaaaaaaatcaacaaaaacaaaacagtacattgtcctttcttgctacaggatttggatttgaacagatacaatgaagaaagctgtatatttgatttaagatttgcagaggcttttttttgtgtatttaggcagacagattggtaattcactaccatcaagtatgtatgtgtttgaatatatgtatgtctttatttaaataaatgtgaagataagcctaggacagaactagaaataaatttgctgaaataatgtattgaagtggtctgttttgga

SEQ ID NO: 91162 - DNA, 600 bp, Chicken  19866894400057_1
attaacacaggtttctcctcctcccatgtgaaattacagaatcacagaacagtttaggttggaagggacctctggatgtcagcttgtccaaccctcctcctcaagtgacagtatgttattttgactgtaaaaggtgaatcttgctgtaagcaatcattgcatgagaaagaaaactttgagtttggccctactagcttttgtaacttcatctaacacttttcataaggaaagagtgtgtcaaatctccaggtgttacaaatggcctttccccctgaatatcttcagtccttccagaggctrgaaagaaaagggctggatatgctgaggactgcagtgacccaaaaacacaacagctgagaagtttccgggagtactttgccacaaaggttctatgtgggtcaaagaggtgatcwgccttcctctgctcacccagtctgttcagaacccttttggttctaccttaaagctatggagcagragtgctccactgtgtcactttgtagtgccttagagctgtgatattttagttttcattgctctgactttcctcttactcttctccaaatctagcacaaaacaattctgactgtacctccactg

SEQ ID NO: 91163 - DNA, 600 bp, Chicken  19866894400057_2
tgttattttgactgtaaaaggtgaatcttgctgtaagcaatcattgcatgagaaagaaaactttgagtttggccctactagcttttgtaacttcatctaacacttttcataaggaaagagtgtgtcaaatctccaggtgttacaaatggcctttccccctgaatatcttcagtccttccagaggctrgaaagaaaagggctggatatgctgaggactgcagtgacccaaaaacacaacagctgagaagtttccgggagtactttgccacaaaggttctatgtgggtcaaagaggtgatcwgccttcctctgctcacccagtctgttcagaacccttttggttctaccttaaagctatggagcagragtgctccactgtgtcactttgtagtgccttagagctgtgatattttagttttcattgctctgactttcctcttactcttctccaaatctagcacaaaacaattctgactgtacctccactgctatctgctgtaataagaaatactgaaaaccacagtgctgcattgtttctccactaaagcaaccagaagttgagactattagtggtgtaatgcagttattacagatgtaatag

SEQ ID NO: 91164 - DNA, 600 bp, Chicken  19866894400057_3
agtttggccctactagcttttgtaacttcatctaacacttttcataaggaaagagtgtgtcaaatctccaggtgttacaaatggcctttccccctgaatatcttcagtccttccagaggctrgaaagaaaagggctggatatgctgaggactgcagtgacccaaaaacacaacagctgagaagtttccgggagtactttgccacaaaggttctatgtgggtcaaagaggtgatcwgccttcctctgctcacccagtctgttcagaacccttttggttctaccttaaagctatggagcagragtgctccactgtgtcactttgtagtgccttagagctgtgatattttagttttcattgctctgactttcctcttactcttctccaaatctagcacaaaacaattctgactgtacctccactgctatctgctgtaataagaaatactgaaaaccacagtgctgcattgtttctccactaaagcaaccagaagttgagactattagtggtgtaatgcagttattacagatgtaatagctacaggaaggactaggaaaatgggatatctaatcctagttcaattggattcataactcatagtc

SEQ ID NO: 91165 - DNA, 600 bp, Chicken  19866894400070_1
taacatattatctgaggatatggtagagaggtctttaaactagacatgaggggggaaggggataaaaccaggcctgctagagatgagcctgggggagcgataatgggattaggggtgagacgagaggcccagctcaggtatgtctataccagtgcacgcagcatggacaacaaacaagaagagttagaagccattgtacagcaggcaagctatgacctagttgccactccagaaacatggtgggaccactgccatgactggagtgctgcaatggatggctacaaactcttcaggaaggayaggcaaggaaggaggtgtggtggcgtggctctctatgttaaagagtgctttgagattactgaacttatgacwggggataataaggttgaatccttatgggttaagattaggggtagagctgacaaggcagacatcctgatgggcgtctgttatagaccgccaaaccaggttgaagagacagatgaattgttctatgagcagctggcggaagctgcacaattgctggcccttgtcctcatgggggacttcacgttccccgacatatgctgggaatacaatttaggacagaagaagcagtct

SEQ ID NO: 91166 - DNA, 600 bp, Chicken  19866894400070_2
cctgctagagatgagcctgggggagcgataatgggattaggggtgagacgagaggcccagctcaggtatgtctataccagtgcacgcagcatggacaacaaacaagaagagttagaagccattgtacagcaggcaagctatgacctagttgccactccagaaacatggtgggaccactgccatgactggagtgctgcaatggatggctacaaactcttcaggaaggayaggcaaggaaggaggtgtggtggcgtggctctctatgttaaagagtgctttgagattactgaacttatgacwggggataataaggttgaatccttatgggttaagattaggggtagagctgacaaggcagacatcctgatgggcgtctgttatagaccgccaaaccaggttgaagagacagatgaattgttctatgagcagctggcggaagctgcacaattgctggcccttgtcctcatgggggacttcacgttccccgacatatgctgggaatacaatttaggacagaagaagcagtctgggaagtttctggaatgtatggaggacaacttcttgatgcagatgataagagaacctacgagaggaactgcc

SEQ ID NO: 91167 - DNA, 600 bp, Chicken  19866894400073_1
aatttttccttcttcctgacactgaggagcacattctccattcacctatgaaaattcaacttttggaggtcattgtccttgcctgaagcttgtttaaataagtgttcttcttatgagatttgcttatcagcagtggaatacgtaactttgctctcttgcctgcaacttggcctctggaagcattgctcaagggactgaacagacttggagataaccagcttgttagcgcatggaatcaaacattatttacccatttagctcttactggagacagtatgagaatgcatgctgtcccaggtyataacaatattctttcaatctccagtgctggcagtggaagttaattaggaagagcacataagtatctgttgtccacttcccttgtagttgcccagcattctgaactgtactgtggatttgcttgtaaccttttgcttctgagtacaggcatgttttccaacaaattaaataataacagtattaaatgaaggatagaaacaaacattatctgctaaggcttcaaaatgcaggttctgaagtgctactaatgccgcactctrtacgagtcaggctactaagctgacaccactgtggtgttga

SEQ ID NO: 91168 - DNA, 600 bp, Chicken  19866894400073_2
cttactggagacagtatgagaatgcatgctgtcccaggtyataacaatattctttcaatctccagtgctggcagtggaagttaattaggaagagcacataagtatctgttgtccacttcccttgtagttgcccagcattctgaactgtactgtggatttgcttgtaaccttttgcttctgagtacaggcatgttttccaacaaattaaataataacagtattaaatgaaggatagaaacaaacattatctgctaaggcttcaaaatgcaggttctgaagtgctactaatgccgcactctrtacgagtcaggctactaagctgacaccactgtggtgttgaaaacttttatcttgaaaacattttaactctttaattcaaacaagtatcatttaagttcctcagagagggttaattcattctccacagtgaagtgcagaaatttcagaaataacatactctgttccactatcatacatataaaatattgtttacactccagggcaattgcttcaggaaattattgataggaactgctgctccttcacaagaagagtacaaaagtccttcttctctgaccaggggcacttctcagccacctt

SEQ ID NO: 91169 - DNA, 572 bp, Chicken  19866894400099_1
ctgacccccaccacttactttatgtgcatcaggaataggaagtgtgaaaatgcacacgattgagctcatactggggaaaggagtgggtgtccaaggccagcagataccttgctaagccatcttcctcataacagcaggagtggtgaatgtgtaactttcatagaaacatagaatcatttagtttggaaaagatctctgaggtcatccaagtccaaccatcaaaccatccccaccatgcccactaacaatgtccctcagtgcacatctacctttttcttgaacacatccagggcctttccmcgggcccctgcctctcctgagggcagaaaaattcagttatctgacttacattgctgaggagctttgaattggctctgtctttagccagcgtgactcaacataccacagattggtatagctgcatcagcatggtaatgtggataagcactaggaaaggatctggcccacggataacacagaagtagtacagaaagctggggataaataatttcagaatgcagagagtagtcatggtactagtactagtaataataataataataatgttttcc

SEQ ID NO: 91170 - DNA, 541 bp, Chicken  19866894400103_1
aagttctgtttctaagtctgctgctgagccttgaatttggggttaatgaataaatcatgataacaaaagaatttttaaccttccttatattcagggatattgatttgcattcagccattcctgatatctgcctttcagacatcatttacagttgtctgtttcttgaaaactcctgtggttgaccattgcacttgctgttttctttctagctgtcggagaatgctggtgcatggaattaactctccatatcacatgcaggaaaaaaataaaaaaaacattacctgcagaaatagaaaattmatagaaaatgcaaaactggttttcaagtgcagaatattcttaccttaatctacacagtttgctagggtttctaaaagtctcaaaggaggacatcctattttacagcgcttccttcaaccaagaaggatcttcactctgtagtcatagaaagactagcttgtttccaagctgggggacatacttgtctttaacttgccagcctttgttcatgaacatgcaaaagtccaaagatctatcaaag

SEQ ID NO: 91171 - DNA, 600 bp, Chicken  19866894400105_1
attacctggctgaaaggcgaccagcccctgattgtgacagaaaggcatcacttcacctctggcaaccagctcctcgtcgttaggaatgttgtcttggaagatgctgggaaatacacttgtgaaatgtccaacaccctggggacagagcgtgcgcacagccacgtgagcatcttacagtctcttgggtgtagaaaggaccgtaccaccgtggggatcatcaccattgctgtggtgtgtagcatcgtgctgacttcgctggtctgggtctgcatcatctaccaaaccagaaagaagagtgargaatacagtgtcaccaacacaggtacttctagaaccctgctgaggctttccctaacctgttgtgttgtcagacttcccactcgggccaagtcagcrtgtcaggtagccacaatcttactggaaaagcagttggcttttctcagcagttcatttggctgcaggagctggaaccaccctttgcctgcatgtttacagctgcatttctgtccttggctggctcttcagaaaggtcttttccaagtggaagtagtttcaactattgttttgcaactttaattttccatgactgtaaatgataac

SEQ ID NO: 91172 - DNA, 600 bp, Chicken  19866894400105_2
gaagatgctgggaaatacacttgtgaaatgtccaacaccctggggacagagcgtgcgcacagccacgtgagcatcttacagtctcttgggtgtagaaaggaccgtaccaccgtggggatcatcaccattgctgtggtgtgtagcatcgtgctgacttcgctggtctgggtctgcatcatctaccaaaccagaaagaagagtgargaatacagtgtcaccaacacaggtacttctagaaccctgctgaggctttccctaacctgttgtgttgtcagacttcccactcgggccaagtcagcrtgtcaggtagccacaatcttactggaaaagcagttggcttttctcagcagttcatttggctgcaggagctggaaccaccctttgcctgcatgtttacagctgcatttctgtccttggctggctcttcagaaaggtcttttccaagtggaagtagtttcaactattgttttgcaactttaattttccatgactgtaaatgataactatctyttgagacagtcagcatgatgcccatgatgcttagatcctgtcttaactttttgagaatctgtactttcaaagactgtgtgttttgaacat

SEQ ID NO: 91173 - DNA, 530 bp, Chicken  19866894400105_3
agtgtcaccaacacaggtacttctagaaccctgctgaggctttccctaacctgttgtgttgtcagacttcccactcgggccaagtcagcrtgtcaggtagccacaatcttactggaaaagcagttggcttttctcagcagttcatttggctgcaggagctggaaccaccctttgcctgcatgtttacagctgcatttctgtccttggctggctcttcagaaaggtcttttccaagtggaagtagtttcaactattgttttgcaactttaattttccatgactgtaaatgataactatctyttgagacagtcagcatgatgcccatgatgcttagatcctgtcttaactttttgagaatctgtactttcaaagactgtgtgttttgaacattgaaaaatgagcctttgaagctggaaacgcttttgtccaygttggctgtagagctgttgtaaccacactgatgaggggcatccctcttttcctgggggaagaagcagtgcttattgctctctgccactcttcaaagggga

SEQ ID NO: 91174 - DNA, 400 bp, Chicken  19866894400105_4
ttctcagcagttcatttggctgcaggagctggaaccaccctttgcctgcatgtttacagctgcatttctgtccttggctggctcttcagaaaggtcttttccaagtggaagtagtttcaactattgttttgcaactttaattttccatgactgtaaatgataactatctyttgagacagtcagcatgatgcccatgatgcttagatcctgtcttaactttttgagaatctgtactttcaaagactgtgtgttttgaacattgaaaaatgagcctttgaagctggaaacgcttttgtccaygttggctgtagagctgttgtaaccacactgatgaggggcatccctcttttcctgggggaagaagcagtgcttattgctctctgccactcttcaaagggga

SEQ ID NO: 91175 - DNA, 600 bp, Chicken  19866894400107_1
tatgttgtactaatcactcaacactttgtattaatatagtgtacgtgtgtattatttgtatgttcttcagttatcttaacacagatcagttcccaaaactggtaaactgtcagttttgttggactagcatggctaaagtcatcaagaaacatcgagatcattaggacctacaatcatattaatgccagtacaaaatgtaaaactcatctcttgaccatgtttaaaatgaagttacatattaattaacaagactggtgtaactgttaacaggctttgctaaaatacctaattctattagcyctcttaaatggagtttttccaacatctcttcagtgatatgaagtgcagggtccatttcactaattaagtaattagagcacagcagattaatggccagatgggtatactgatagcatctctaccttgggccataaaccctagcagcacttaaccatcttttactgaaaatactatgtaagaaatttatttttaaacatttgaagctatgcaattacttatgcaggagtgtgaaaaggaaaataacacaaatttattctgaattacaaagctcctaatctgaacatgtccatactaccaatt

SEQ ID NO: 91176 - DNA, 600 bp, Chicken  19866894400116_1
gaaaagggatgtgagcatgcggtaagtgcttttgaggttcaacagaagcaaatagaaaatgctgctagctaaattcatcaaggttttataatctcactttcacttacatctcatgaaagaaggaaaacatgaagttttctttccgaggtggatgcaaaaacagttgttattctctcactttttcagaacctcttctagtcatctttcaatgtagtttatgaatcttctagcacataccaatatatcaccatatatcactgtgctcatatccactgtttggtttccacagatgttcagcargtattgatgactgtcaatgggtgccattttctttgcatagaataattcagtgacacacctttgctttatacacatttccacgtcaaacaccattctgtcagactgcctttttgctgccatctctcacatggcaacaaaatgtgatgaaatactggtaggaaggttcaagctctactaccataccaccatcattcacctctgacctcatgggccaacagaatagaataggaggtgttacttttagagtagccctcatataatgctgtgttaatatcttagcaccttgtgaagttgttaatc

SEQ ID NO: 91177 - DNA, 600 bp, Chicken  19866894400120_1
gcttgggattaccctgacccagatgcaggaccttgcacttggccttgttgaacttcatgaagttgacatgggcccacctctcaagcctgtccaggtccccctggagagcatcttcaaactttttgagggtgcactgaatcccactgtccatgtcacctataaagatattaaataacaccagtcccaacaccaatccctgaggaatgccactcatcaccagtctccacttggacactgagctgttgaccacaactttctgagtgtgaccatccagtcaattccttatccagcaaatggtcyagctatcgaatccatttttctccaatttggtgaataggatgtcgtgtaggacagtgtcaaaagctttgcacgaattcaggtagattacatcagttgctcttccttttccactgatgctgtaactccatcatyagaggccatcaagtctgtcaagcacaatttgtccttggtgaaaccatgctgattaccaactgttgctcttcctaggctacaatgcacactgctggatcaygtctagcttttcattcaccgggaccctctaattctccaccgggcatgagttgaagatgatcctggcat

SEQ ID NO: 91178 - DNA, 491 bp, Chicken  19866894400120_2
actgaatcccactgtccatgtcacctataaagatattaaataacaccagtcccaacaccaatccctgaggaatgccactcatcaccagtctccacttggacactgagctgttgaccacaactttctgagtgtgaccatccagtcaattccttatccagcaaatggtcyagctatcgaatccatttttctccaatttggtgaataggatgtcgtgtaggacagtgtcaaaagctttgcacgaattcaggtagattacatcagttgctcttccttttccactgatgctgtaactccatcatyagaggccatcaagtctgtcaagcacaatttgtccttggtgaaaccatgctgattaccaactgttgctcttcctaggctacaatgcacactgctggatcaygtctagcttttcattcaccgggaccctctaattctccaccgggcatgagttgaagatgatcctggcatgatatcagcacagaaagcttttg

SEQ ID NO: 91179 - DNA, 391 bp, Chicken  19866894400120_3
cactgagctgttgaccacaactttctgagtgtgaccatccagtcaattccttatccagcaaatggtcyagctatcgaatccatttttctccaatttggtgaataggatgtcgtgtaggacagtgtcaaaagctttgcacgaattcaggtagattacatcagttgctcttccttttccactgatgctgtaactccatcatyagaggccatcaagtctgtcaagcacaatttgtccttggtgaaaccatgctgattaccaactgttgctcttcctaggctacaatgcacactgctggatcaygtctagcttttcattcaccgggaccctctaattctccaccgggcatgagttgaagatgatcctggcatgatatcagcacagaaagcttttg

SEQ ID NO: 91180 - DNA, 600 bp, Chicken  19866894400129_1
gttgttctgaactgttgtaatttattcacatcatctcagaataataatgaggtaaatggtacaatggaatgtaatggaaaagaaatcaagtactcaaggagattactttttataccttttcaatataagaggattctcaaattatcttaaccaaagcactgcatcagttatccaggtatacaggaaaacagagtttgaaaacactgtaggaaggaaaaagggagagttgtagtgatgcttctgaggggaagtgcaggtgcatgtctttgtgtctggtgcgtgttactccagagcgtttgyactcattgctcccttcaaggattttctgccagcagtgcagatgagcagctgggagcctacaggagccgtccacacgcagactcttgcagagctgtcacaccacctcctttctgccactgtttctctccccctttagccaggtcacattcagacctccacggccttctgcttttctcttggcaagaaggatagcctctctgctcctgaagcctctttccacactaggctttttagaaaggcgttttttattattgcccggggcagtgcttctcagctggatgtaaatttgcaagctatgtg

SEQ ID NO: 91181 - DNA, 600 bp, Chicken  19866894400132_1
ccgcggggatactccatcttgcacaaggaagggcaacgacagcggtgtccgggggacaaaaagaagagttagggaattctgtgccccggcaaccttctggagagatctggaaaggcagagataaccaaaatacgttttcctttgggttctaattcctgccagctccggagatcaatttagaaattgaaacagtaagcgggctgccaatggctctcaagtattgagctgctgctgctagccactattaatggatggatataattactatcaattatattgcctgcaggctcagccaacgasttggattccaaaactcacggggataagggatcggcttacactggtagaggaatgggagttgttagagaggtttcccrtttgtgatgcagacccgtcagtgaccgtgcgctacggtggataaggaaaaactaagtaaaaatggaccatcattaacaacgttaaagttgccatcctagcagccctttgtaagtggggaaaagaagtgcaacaattcacaaacatatcacaaatctaaacatgcagagcaaggccaaaagcgcatgcagcgcaggcaagggaaggaagctgccttgggacgat

SEQ ID NO: 91182 - DNA, 600 bp, Chicken  19866894400132_2
tctgtgccccggcaaccttctggagagatctggaaaggcagagataaccaaaatacgttttcctttgggttctaattcctgccagctccggagatcaatttagaaattgaaacagtaagcgggctgccaatggctctcaagtattgagctgctgctgctagccactattaatggatggatataattactatcaattatattgcctgcaggctcagccaacgasttggattccaaaactcacggggataagggatcggcttacactggtagaggaatgggagttgttagagaggtttcccrtttgtgatgcagacccgtcagtgaccgtgcgctacggtggataaggaaaaactaagtaaaaatggaccatcattaacaacgttaaagttgccatcctagcagccctttgtaagtggggaaaagaagtgcaacaattcacaaacatatcacaaatctaaacatgcagagcaaggccaaaagcgcatgcagcgcaggcaagggaaggaagctgccttgggacgatccagaaagtaacacgcagctttccaaaggacgcactcaactgcagattgcctttgcttggaggatctcaccctcagc

SEQ ID NO: 91183 - DNA, 600 bp, Chicken  19866894400133_1
accccttcatccgctccagctcccaccaatggcagagatttctggttatctattatcaaaattgttgggttcaatgagtccctccaacaatacgcttcacacatacactacaatccaacacaaactgatgtggccaattatacaaatacagagcacacagtaaaaagcttgtttgctccatcttgaagtatccagtgagcattgccagagaggaaattctgtatttctgagactactgcttctacacaggctgcattctgactttttttggggtgttcttgctcttgcttacatctccasaggaagaagaggaaagcaccattgaatgttgaccaagaagcggtcttcagctgatcatgaactctttagatgagaaacttaagtctatgtaatttgggctaaaagtgtgtctgcaaagcttttctgaatggcatatccagtagagatgaacaaaaaaccccattgtatgagcacgagcagcactgacctcatacagatttacttaggatagccctgctggcaagcagtgacatgatgaggcctcatgaaaccgatagcttgttcctgtgactgtgagtcattccccagggaaagaggcag

SEQ ID NO: 91184 - DNA, 600 bp, Chicken  19866894400133_2
ttaagtctatgtaatttgggctaaaagtgtgtctgcaaagcttttctgaatggcatatccagtagagatgaacaaaaaaccccattgtatgagcacgagcagcactgacctcatacagatttacttaggatagccctgctggcaagcagtgacatgatgaggcctcatgaaaccgatagcttgttcctgtgactgtgagtcattccccagggaaagaggcaggctcatgtactgggcagttccgcaggggaaaccagcatgctctcaaaatgtcaaggcatcagccctgcatggacctcygtccacgtgctcctcttcccaaggactaagcaagagttaacactgcctttcaccccaaccttttcctattacgggaatgacaactccaagtcttttgattgataaagtgatacttttccttgaaacagctttttttttttttttccacaactcatttttaaatgactgtagtaaggatttattccgtcttcttgcaacagttgagaatactgggtgcaacagaaggatccaggagttcctgagctgcaaccaagcttcaggtcatgtttcactgtgcctcaactcctgcaaaagagaagt

SEQ ID NO: 91185 - DNA, 600 bp, Chicken  19866894400134_1
gtatttccaggggctaccaagaagatgcagctgggctcttcacagtgggaggatgagaggcagtgggaataaggtgaaaaaaggaaggttcatactgaatagagggtaaaacattttcttgatgaagacaatcaatcagagcctagacagtggtatacacctagagagtttgtatgatttccacctttgagacgttcaggagcagacaggaagaagccctgaacaacctggtctgatctcatggttgaccttccttaagaaggaggttggactagagatgtcctgaggtctttgctaacyttaattatcctatgattccttatgtctgtgacrtcagccttcatgcacctgtgttagaaacgataacaaattcatcaaatataaaacttctaaattctcrtataaatatttggatcctacatatcatgtagaggcttgcttaacttccacttcagggcatcttagtatttgcttctttgcttaacacagctgtgacactgagcagatgtattatgttgacataattgttatctgagatttttacatattcactgaaacaatattctaaatacaaaagataattaaacttcaatgaaaatg

SEQ ID NO: 91186 - DNA, 600 bp, Chicken  19866894400134_2
ggctcttcacagtgggaggatgagaggcagtgggaataaggtgaaaaaaggaaggttcatactgaatagagggtaaaacattttcttgatgaagacaatcaatcagagcctagacagtggtatacacctagagagtttgtatgatttccacctttgagacgttcaggagcagacaggaagaagccctgaacaacctggtctgatctcatggttgaccttccttaagaaggaggttggactagagatgtcctgaggtctttgctaacyttaattatcctatgattccttatgtctgtgacrtcagccttcatgcacctgtgttagaaacgataacaaattcatcaaatataaaacttctaaattctcrtataaatatttggatcctacatatcatgtagaggcttgcttaacttccacttcagggcatcttagtatttgcttctttgcttaacacagctgtgacactgagcagatgtattatgttgacataattgttatctgagatttttacatattcactgaaacaatattctaaatacaaaagataattaaacttcaatgaaaatgacttacaagaaaggaacaaatgtggttagatag

SEQ ID NO: 91187 - DNA, 600 bp, Chicken  19866894400134_3
agagggtaaaacattttcttgatgaagacaatcaatcagagcctagacagtggtatacacctagagagtttgtatgatttccacctttgagacgttcaggagcagacaggaagaagccctgaacaacctggtctgatctcatggttgaccttccttaagaaggaggttggactagagatgtcctgaggtctttgctaacyttaattatcctatgattccttatgtctgtgacrtcagccttcatgcacctgtgttagaaacgataacaaattcatcaaatataaaacttctaaattctcrtataaatatttggatcctacatatcatgtagaggcttgcttaacttccacttcagggcatcttagtatttgcttctttgcttaacacagctgtgacactgagcagatgtattatgttgacataattgttatctgagatttttacatattcactgaaacaatattctaaatacaaaagataattaaacttcaatgaaaatgacttacaagaaaggaacaaatgtggttagatagacatgcataagcaaaagaaagtttacacaagcatgggctgcatataatataatgtcttcttaatgac

SEQ ID NO: 91188 - DNA, 600 bp, Chicken  19866894400142_1
agcaattcaggatatgttattggtatcctctgtgataccattgtatctttttggatctgtcagtcttcctcttttgttctctccattctccccataataatgcctacttgtgcttttgctaaagtggtgttactttgtaatttgtttcatataactaacacatttctacttacctgacttaacagctattaggatatgggggagcattttccagtcaagactgtgaatttcagatgtgaccctcaacagacgattatcaaaatctgaaattcacatctgaataaaaggaggttttttttwatgtgtgtgtagaagtgctttctttagcctgaggggtaactgtaaatacaggaagtgagatgaaaactgcatttttcagaatggatatttcattttaactaagtattttattctctttattcttctcctttctgctagaaaaaaaaaatgttaaacatgttgagtcagggagacattcctgtgctgcattagaatagccatcaacgtcagctgagaccatttggatcatgtcacttgtcctaaagtgtgtagctgtttttaaagaaagagcatgtcatgttctgtacagggatctttaat

SEQ ID NO: 91189 - DNA, 600 bp, Chicken  19866894400142_2
atttgtttcatataactaacacatttctacttacctgacttaacagctattaggatatgggggagcattttccagtcaagactgtgaatttcagatgtgaccctcaacagacgattatcaaaatctgaaattcacatctgaataaaaggaggttttttttwatgtgtgtgtagaagtgctttctttagcctgaggggtaactgtaaatacaggaagtgagatgaaaactgcatttttcagaatggatatttcattttaactaagtattttattctctttattcttctcctttctgctagwaaaaaaaaatgttaaacatgttgagtcagggagacattcctgtgctgcattagaatagccatcaacgtcagctgagaccatttggatcatgtcacttgtcctaaagtgtgtagctgtttttaaagaaagagcatgtcatgttctgtacagggatctttaatgcatgaaacttgtttgaagcaataataaatcaagtccttgctgctaaaaccagtgtctgattttccyatacgacaatctctatctttccatgtgtaaaaacttgagaygatagcaagaataattctgcatccktaagta

SEQ ID NO: 91190 - DNA, 600 bp, Chicken  19866894400142_3
tgcatttttcagaatggatatttcattttaactaagtattttattctctttattcttctcctttctgctagaaaaaaaaaatgttaaacatgttgagtcagggagacattcctgtgctgcattagaatagccatcaacgtcagctgagaccatttggatcatgtcacttgtcctaaagtgtgtagctgtttttaaagaaagagcatgtcatgttctgtacagggatctttaatgcatgaaacttgtttgaagcaataataaatcaagtccttgctgctaaaaccagtgtctgattttccyatacgacaatctctatctttccatgtgtaaaaacttgagaygatagcaagaataattctgcatccktaagtattgcaaatgattttgatcacaactaactaaatacataaatctagcaaaaaaaaragaaaaaaaaagaaaaaagaagcccaccctgaaatgtaaatggcctgtccgtttgtcacartgcttaataatgtactctttttctacaagcattgttataggagattgcaagatgtatagagatattttcattattcatgctctattcaggaggcagttctgcagacatttttc

SEQ ID NO: 91191 - DNA, 600 bp, Chicken  19866894400142_4
tattctctttattcttctcctttctgctagaaaaaaaaaatgttaaacatgttgagtcagggagacattcctgtgctgcattagaatagccatcaacgtcagctgagaccatttggatcatgtcacttgtcctaaagtgtgtagctgtttttaaagaaagagcatgtcatgttctgtacagggatctttaatgcatgaaacttgtttgaagcaataataaatcaagtccttgctgctaaaaccagtgtctgattttccyatacgacaatctctatctttccatgtgtaaaaacttgagaygatagcaagaataattctgcatccktaagtattgcaaatgattttgatcacaactaactaaatacataaatctagcaaaaaaaaragaaaaaaaaagaaaaaagaagcccaccctgaaatgtaaatggcctgtccgtttgtcacartgcttaataatgtactctttttctacaagcattgttataggagattgcaagatgtatagagatattttcattattcatgctctattcaggaggcagttctgcagacatttttctcacctctcccctaaaaagtggaataattaagagctagcag

SEQ ID NO: 91192 - DNA, 600 bp, Chicken  19866894400142_5
gctagaaaaaaaaaatgttaaacatgttgagtcagggagacattcctgtgctgcattagaatagccatcaacgtcagctgagaccatttggatcatgtcacttgtcctaaagtgtgtagctgtttttaaagaaagagcatgtcatgttctgtacagggatctttaatgcatgaaacttgtttgaagcaataataaatcaagtccttgctgctaaaaccagtgtctgattttccyatacgacaatctctatctttccatgtgtaaaaacttgagaygatagcaagaataattctgcatccktaagtattgcaaatgattttgatcacaactaactaaatacataaatctagcaaaaaaaaragaaaaaaaaagaaaaaagaagcccaccctgaaatgtaaatggcctgtccgtttgtcacartgcttaataatgtactctttttctacaagcattgttataggagattgcaagatgtatagagatattttcattattcatgctctattcaggaggcagttctgcagacatttttctcacctctcccctaaaaagtggaataattaagagctagcagagagtttgagccttatttgcctatc

SEQ ID NO: 91193 - DNA, 600 bp, Chicken  19866894400142_6
atagccatcaacgtcagctgagaccatttggatcatgtcacttgtcctaaagtgtgtagctgtttttaaagaaagagcatgtcatgttctgtacagggatctttaatgcatgaaacttgtttgaagcaataataaatcaagtccttgctgctaaaaccagtgtctgattttccyatacgacaatctctatctttccatgtgtaaaaacttgagaygatagcaagaataattctgcatccktaagtattgcaaatgattttgatcacaactaactaaatacataaatctagcaaaaaaaaragaaaaaaaaagaaaaaagaagcccaccctgaaatgtaaatggcctgtccgtttgtcacartgcttaataatgtactctttttctacaagcattgttataggagattgcaagatgtatagagatattttcattattcatgctctattcaggaggcagttctgcagacatttttctcacctctcccctaaaaagtggaataattaagagctagcagagagtttgagccttatttgcctatcatctttcacttttacatgcaggtattattttctggtagattcaaagcatttgccatttac

SEQ ID NO: 91194 - DNA, 544 bp, Chicken  19866894400142_7
gtttttaaagaaagagcatgtcatgttctgtacagggatctttaatgcatgaaacttgtttgaagcaataataaatcaagtccttgctgctaaaaccagtgtctgattttccyatacgacaatctctatctttccatgtgtaaaaacttgagaygatagcaagaataattctgcatccktaagtattgcaaatgattttgatcacaactaactaaatacataaatctagcaaaaaaaaragaaaaaaaaagaaaaaagaagcccaccctgaaatgtaaatggcctgtccgtttgtcacartgcttaataatgtactctttttctacaagcattgttataggagattgcaagatgtatagagatattttcattattcatgctctattcaggaggcagttctgcagacatttttctcacctctcccctaaaaagtggaataattaagagctagcagagagtttgagccttatttgcctatcatctttcacttttacatgcaggtattattttctggtagattcaaagcatttgccatttaccattt

SEQ ID NO: 91195 - DNA, 600 bp, Chicken  19866894400143_1
agacttttaacagctattagaaatccgaagcgcacagatttttagatctaccatgctttctgttgtggaaggaatgtgctgtggtgttcatctttttaatcctggaatacaaattgattttaaattgtgctgaatatttaaggatgacttcatgcaagttaataaaccatttgtaaaatgtttgtatacaaccctttgtatcatgttgttggtacaccttaccaaatttttttttgggcatgtattccattcttaacttctgtacaatttatattgttgctgtaaatattctaaaagagraaaaaaaaaatcctgtggtaaccttaattatcagcatggaaatggttaatttttactgagcacaatgtatttttgaatgggccttccaaaatatgtctttaataaaaatgcagattttgcactagaaaattggcactgctcgatggctgctcttatttgtgtcaygctgcttacagagccctcccggtgcccccggatggggcagagctgtaacgcagcttctctgcccaggccctgctgcgctccctgtctgagaagccagtgtgtgtctgtttgcaaggcagacatcttcacagcatc

SEQ ID NO: 91196 - DNA, 600 bp, Chicken  19866894400143_2
accatttgtaaaatgtttgtatacaaccctttgtatcatgttgttggtacaccttaccaaatttttttttgggcatgtattccattcttaacttctgtacaatttatattgttgctgtaaatattctaaaagagaaaaaaaaaaatcctgtggtaaccttaattatcagcatggaaatggttaatttttactgagcacaatgtatttttgaatgggccttccaaaatatgtctttaataaaaatgcagattttgcactagaaaattggcactgctcgatggctgctcttatttgtgtcaygctgcttacagagccctcccggtgcccccggatggggcagagctgtaacgcagcttctctgcccaggccctgctgcgctccctgtctgagaagccagtgtgtgtctgtttgcaaggcagacatcttcacagcatcacaaaatcacagaactgtagggcctggaagggacctttggagatcattgagaccaaccctctgctaaagcaggtaccctacagcaggttgcggatcacagacaagatagctctgaagcactccatttccaaccattccctctcattgcaaatactggaactctct

SEQ ID NO: 91197 - DNA, 600 bp, Chicken  19866894400144_1
ttttaattcaatcaattacagatatttgagcctcccagctggttcctttcagtgacttttctgagcactgttcccctgtggtgacattccgctcatggtggtcaagccaatagcaaagcaaatgcaactctaaaaaagagttactacaacgtgctgatggcatcagaacaaaacgtgcttgcctggctaccagatgtgcccatggcagtccctctcctagctgaagaggtgtttcaaggctttcgaaaggcttgtgctgtattatttaggtgggaacgtggcactgtggctaacctttaytaaagtggttttgtagccactttcaagatggactggcacagccagtgagactgatcctaattgtatgtatacactgtgctctgggtagagcctcctgccagtgcaatgtagcatttagcatccagctgctggccactgaggcgtggtagaagttgagttatagcagcaggactggagcatttaaaggcttgacttccttgtgttcggcctgcaattgcctgacaaagagctgtgctcactctgctgcacggtacagtgcctaatyacctgacagcaaggctgaaatgcagagaggtgcag

SEQ ID NO: 91198 - DNA, 600 bp, Chicken  19866894400144_2
ttaggtgggaacgtggcactgtggctaacctttaytaaagtggttttgtagccactttcaagatggactggcacagccagtgagactgatcctaattgtatgtatacactgtgctctgggtagagcctcctgccagtgcaatgtagcatttagcatccagctgctggccactgaggcgtggtagaagttgagttatagcagcaggactggagcatttaaaggcttgacttccttgtgttcggcctgcaattgcctgacaaagagctgtgctcactctgctgcacggtacagtgcctaatyacctgacagcaaggctgaaatgcagagaggtgcaggctgtgagcagtgcaaacaggaatgctaagaataccagcccagcagtggctgcaggaatttctcagtctgattttcagaggagcaggcagggagatagaacaacagaatcattaaggttggaaaaaacctctaagaacatctagtccaatcgtccacctaccaccaatattgccctcaaatgacacacatcaaaccatgcacgtggacagtttattgtcaaggacgctactcaccatcagcctgagtcccttccaactttcaccc

SEQ ID NO: 91199 - DNA, 600 bp, Chicken  19866894400150_1
acgggagatggtcgtttaggctcctccagctgaaatttaaacaggtgaaattctcatggggaagggagagttgatcacatttgttttttgttatatactgataagatgcatctgcagtctcttcagccatgttcctgtatcttgcaaaccagtatagaaatattctaggtactaaataattaagaaaaatataaccctatacataattataatataaaaagctttttttttttcctccccatgtctaaagaactggctacatgaaatctaattggaacgaagtcacacatccacctgtayrtgcacaaataacaacactgcatttggccttggctccttgctgaattttcacaaaggcatctccattttagggctcctgcaaagtttttagaatgagtcatcccataacaaaccaacaacaaccaacccaacaacacacacagcccttcatagcagcttttagaaatgactgacagcacaataattctgtactcaggtaactctttgtgatcaacagcttgcttggtttttttcccccactctacagtagaaataacaattttagaagtcctccatgaaaggttttgatattttcataga

SEQ ID NO: 91200 - DNA, 600 bp, Chicken  19866894400150_2
cgggagatggtcgtttaggctcctccagctgaaatttaaacaggtgaaattctcatggggaagggagagttgatcacatttgttttttgttatatactgataagatgcatctgcagtctcttcagccatgttcctgtatcttgcaaaccagtatagaaatattctaggtactaaataattaagaaaaatataaccctatacataattataatataaaaagctttttttttttcctccccatgtctaaagaactggctacatgaaatctaattggaacgaagtcacacatccacctgtayrtgcacaaataacaacactgcatttggccttggctccttgctgaattttcacaaaggcatctccattttagggctcctgcaaagtttttagaatgagtcatcccataacaaaccaacaacaaccaacccaacaacacacacagcccttcatagcagcttttagaaatgactgacagcacaataattctgtactcaggtaactctttgtgatcaacagcttgcttggtttttttcccccactctacagtagaaataacaattttagaagtcctccatgaaaggttttgatattttcatagaa

SEQ ID NO: 91201 - DNA, 600 bp, Chicken  19866894400155_1
taagtaatctttgaatatagagagggtccagaggagggacatgaagctaatcggagggctggagcacctcccttatgaagacagactgagggagccgggcttgttcagcctggagaagagaagacctgtgaggagacctcattacagcctttcagtatttaaaaggggattataaaaagaaggagaatcaactttttacaagggtagatagtgataggacaagggggaatggttttaaactcaaggaggacaggtttagattttacatcaggggaagttctttacagagtgagtggtgargtgctggaacaggctgcgcagggaagctatggatgctccatccctgcatgtgttcaagaccaggttggatggggccctgggcaatctggtctagtaccagatctggaggttggtggtcctgcctgtggcggggggggttggcacctgatgatcctttgaggtcccttccaacccaagccattctgtgattctatgtagaacactgctttatgttatatgatcacgtttctgtttgtgttatttcctgagactggcatgaccaattgcaaacaattatctgtatttcttcttaacgttttg

SEQ ID NO: 91202 - DNA, 600 bp, Chicken  19866894400156_1
gtcatttaaaacacttttgggattatattttcaacacagtcaaagaagcaaatatatctaaatgtcctaagaatgataaatattcataaattttatggcactttaccaagagacatagctgtaagaaagtgaacttggctcagcacatccgaggcattcatttagcgcattcccaccagctacatctgtgcagccctcctgaagatacgggtttgcaccaatgccatcaaagagaacaaaataagcgaccggggctcatgcaaatggaatggaagcactgactagtagcactcctagtastgctgagcagcagaggcacttaggctaagtgcgygtagaactcagaactaaacagaacacatttctacttaccggcttagcattttgcatgtgtttaaaaagaaactttatcatatttacataagctgttgtttcttaagaataaagagrcatttaccttgagtatccctataatctgcagactcttctaaaaggttttttaaataatctgtataaagaaaaaaataacagaggcattattgttaaagaaataaacagcatcagaaagcattaaagcccaacattttcctagcaatctgc

SEQ ID NO: 91203 - DNA, 600 bp, Chicken  19866894400156_2
cacagtcaaagaagcaaatatatctaaatgtcctaagaatgataaatattcataaattttatggcactttaccaagagacatagctgtaagaaagtgaacttggctcagcacatccgaggcattcatttagcgcattcccaccagctacatctgtgcagccctcctgaagatacgggtttgcaccaatgccatcaaagagaacaaaataagcgaccggggctcatgcaaatggaatggaagcactgactagtagcactcctagtastgctgagcagcagaggcacttaggctaagtgcgygtagaactcagaactaaacagaacacatttctacttaccggcttagcattttgcatgtgtttaaaaagaaactttatcatatttacataagctgttgtttcttaagaataaagagrcatttaccttgagtatccctataatctgcagactcttctaaaaggttttttaaataatctgtataaagaaaaaaataacagaggcattattgttaaagaaataaacagcatcagaaagcattaaagcccaacattttcctagcaatctgcttttcaggtacacctatgccacaaaggtctatta

SEQ ID NO: 91204 - DNA, 527 bp, Chicken  19866894400156_3
gaggcattcatttagcgcattcccaccagctacatctgtgcagccctcctgaagatacgggtttgcaccaatgccatcaaagagaacaaaataagcgaccggggctcatgcaaatggaatggaagcactgactagtagcactcctagtastgctgagcagcagaggcacttaggctaagtgcgygtagaactcagaactaaacagaacacatttctacttaccggcttagcattttgcatgtgtttaaaaagaaactttatcatatttacataagctgttgtttcttaagaataaagagrcatttaccttgagtatccctataatctgcagactcttctaaaaggttttttaaataatctgtataaagaaaaaaataacagaggcattattgttaaagaaataaacagcatcagaaagcattaaagcccaacattttcctagcaatctgcttttcaggtacacctatgccacaaaggtctattactacataaccttttaaattgtccaggtaacaacataaggaaaa

SEQ ID NO: 91205 - DNA, 458 bp, Chicken  19866894400156_4
aatgccatcaaagagaacaaaataagcgaccggggctcatgcaaatggaatggaagcactgactagtagcactcctagtastgctgagcagcagaggcacttaggctaagtgcgygtagaactcagaactaaacagaacacatttctacttaccggcttagcattttgcatgtgtttaaaaagaaactttatcatatttacataagctgttgtttcttaagaataaagagrcatttaccttgagtatccctataatctgcagactcttctaaaaggttttttaaataatctgtataaagraaaaaataacagaggcattattgttaaagaaataaacagcatcagaaagcattaaagcccaacattttcctagcaatctgcttttcaggtacacctatgccacaaaggtctattactacataaccttttaaattgtccaggtaacaacataaggaaaa

SEQ ID NO: 91206 - DNA, 599 bp, Chicken  19866894400163_1
  misc_feature (1)..(52): n is any nucleotide
nnnnnnnnnnnnnnnnnnnnnnnnnnnnnnnnnnnnnnnnnnnnnnnnnnnnttattgaagtccaagtcaacttccccctgcttctaaaagtgttcattttcctcttcagaatttctccttcaggaatttcttactaccatcttgtaaccccttgcagtctgaaggatgtttagtcctcctaaaaaacacttacagagctcctcccatggctgcagattagccttcaagctgagattcatcttttgcctttcaaagctcagaacaacttaatgctcagtccagccttgctgtcaagttgsagatggctgttaggttctgagrtsccattttattttatttttctggtcaagcactgcaatgagttgcccaaggaagtgctgaagtccccatgcctggaggtgttcaagggacgcgtgggtaaagcattaagggrcacggtttagcaatgggacttggcaggtcaggatgatggttggacctgtgccattctgtgattctatagagacaaacctcaagaaataycagaactgtcaactatcatttattgactcaaatcttatactcacatctgagggaaaatcctgcagctgagttgcac

SEQ ID NO: 91207 - DNA, 599 bp, Chicken  19866894400163_2
  misc_feature (1)..(30): n is any nucleotide
nnnnnnnnnnnnnnnnnnnnnnnnnnnnnnttattgaagtccaagtcaacttccccctgcttctaaaagtgttcattttcctcttcagaatttctccttcaggaatttcttactaccatcttgtaaccccttgcagtctgaaggatgtttagtcctcctaaaaaacacttacagagctcctcccatggctgcagattagccttcaagctgagattcatcttttgcctttcaaagctcagaacaacttaatgctcagtccagccttgctgtcaagttgsagatggctgttaggttctgagrtsccattttattttatttttctggtcaagcactgcaatgagttgcccaaggaagtgctgaagtccccatgcctggaggtgttcaagggacgcgtgggtaaagcattaagggrcacggtttagcaatgggacttggcaggtcaggatgatggttggacctgtgccattctgtgattctatagagacaaacctcaagaaataycagaactgtcaactatcatttattgactcaaatcttatactcacatctgagggaaaatcctgcagctgagttgcacagcaccactgctttctgcccag

SEQ ID NO: 91208 - DNA, 599 bp, Chicken  19866894400163_3
  misc_feature (1)..(28): n is any nucleotide
nnnnnnnnnnnnnnnnnnnnnnnnnnnnttattgaagtccaagtcaacttccccctgcttctaaaagtgttcattttcctcttcagaatttctccttcaggaatttcttactaccatcttgtaaccccttgcagtctgaaggatgtttagtcctcctaaaaaacacttacagagctcctcccatggctgcagattagccttcaagctgagattcatcttttgcctttcaaagctcagaacaacttaatgctcagtccagccttgctgtcaagttgsagatggctgttaggttctgagrtsccattttattttatttttctggtcaagcactgcaatgagttgcccaaggaagtgctgaagtccccatgcctggaggtgttcaagggacgcgtgggtaaagcattaagggrcacggtttagcaatgggacttggcaggtcaggatgatggttggacctgtgccattctgtgattctatagagacaaacctcaagaaataycagaactgtcaactatcatttattgactcaaatcttatactcacatctgagggaaaatcctgcagctgagttgcacagcaccactgctttctgcccagat

SEQ ID NO: 91209 - DNA, 600 bp, Chicken  19866894400163_4
ctaccatcttgtaaccccttgcagtctgaaggatgtttagtcctcctaaaaaacacttacagagctcctcccatggctgcagattagccttcaagctgagattcatcttttgcctttcaaagctcagaacaacttaatgctcagtccagccttgctgtcaagttgsagatggctgttaggttctgagrtsccattttattttatttttctggtcaagcactgcaatgagttgcccaaggaagtgctgaagtccccatgcctggaggtgttcaagggacgcgtgggtaaagcattaagggrcacggtttagcaatgggacttggcaggtcaggatgatggttggacctgtgccattctgtgattctatagagacaaacctcaagaaataycagaactgtcaactatcatttattgactcaaatcttatactcacatctgagggaaaatcctgcagctgagttgcacagcaccactgctttctgcccagattctccctcagccaatttttttggcgaataagcaagtaacagtgcacctagatgagtgttgaaatccattatagccttaaaagaaaagtatttatgcttccaaaaatcttct

SEQ ID NO: 91210 - DNA, 600 bp, Chicken  19866894400163_5
ttcaagctgagattcatcttttgcctttcaaagctcagaacaacttaatgctcagtccagccttgctgtcaagttgsagatggctgttaggttctgagrtsccattttattttatttttctggtcaagcactgcaatgagttgcccaaggaagtgctgaagtccccatgcctggaggtgttcaagggacgcgtgggtaaagcattaagggrcacggtttagcaatgggacttggcaggtcaggatgatggttggacctgtgccattctgtgattctatagagacaaacctcaagaaataycagaactgtcaactatcatttattgactcaaatcttatactcacatctgagggaaaatcctgcagctgagttgcacagcaccactgctttctgcccagattctccctcagccaatttttttggcgaataagcaagtaacagtgcacctagatgagtgttgaaatccattatagccttaaaagaaaagtatttatgcttccaaaaatcttctaaataatccctcagtagagtctattcagtaaagaaagccatgatgggttgcgtcaactaagaacagatggctcatctgctatcctgctc

SEQ ID NO: 91211 - DNA, 599 bp, Chicken  19866894400173_1
  misc_feature (1)..(14): n is any nucleotide
nnnnnnnnnnnnnnactgcactctgccttcctactgtgctcctctctgcatcccctgtccttgtcgtggagtgctcctatcttatcccatcccgcccaccccctcctcctgcacgctgcccttgttttgggggctggaggaatgcctttgccttctgtgcatgctctccgttgtcctttgcttcctacagggaggtgaggcacgtgggagggaagggttgatggttgggctctgcagccagcctggctggagatgcagggagaaatgaggtgggtttgaggggtgcagatggatttgggrcattttggtaaggggccacattgctgagcaaagcagcaatatcaggaggtcaaaactttgggagaygctaaaagggccttttaaggctatccagaggaggggaaggaaagagaaggggactgagatggggaaaaaaaaaaaaagaggagagtttgtgtgcgtggaagagactatagataagagggagcatatgtgcatgtgtgaaagaacaaggtgggagagtacgtgagagaaatgggaacacgtaaaggttcttgcgtctgaaagtcggggaatgagaggcagccaaggagggatgg

SEQ ID NO: 91212 - DNA, 600 bp, Chicken  19866894400173_2
tggagtgctcctatcttatcccatcccgcccaccccctcctcctgcacgctgcccttgttttgggggctggaggaatgcctttgccttctgtgcatgctctccgttgtcctttgcttcctacagggaggtgaggcacgtgggagggaagggttgatggttgggctctgcagccagcctggctggagatgcagggagaaatgaggtgggtttgaggggtgcagatggatttgggrcattttggtaaggggccacattgctgagcaaagcagcaatatcaggaggtcaaaactttgggagaygctaaaagggccttttaaggctatccagaggaggggaaggaaagagaaggggactgagatggggaaaaaaaaaaaaagaggagagtttgtgtgcgtggaagagactatagataagagggagcatatgtgcatgtgtgaaagaacaaggtgggagagtacgtgagagaaatgggaacacgtaaaggttcttgcgtctgaaagtcggggaatgagaggcagccaaggagggatggcgcatgcagaataaaagaggctgtgttgcacagggctgatgcagaaggcatgttttgatgtttgagg

SEQ ID NO: 91213 - DNA, 600 bp, Chicken  19866894400188_1
ccactgcacgggccaagtgagaggcaggtatgcattatttgggtgtagctatcctgtattcagcatgctggtcacttcaggtgcttccaaggaagaggggcagcaaaacacagtacgagtagcctcaattagtgatagcttactcacaggagactacaacagtagcattttacctagaatttgaaattcaatttcatgatctgggaaagaaagacttagcttcatagaatcatcacagaatgacagaatggcccaggttggaagggaccccaaggatcatgaagctccaacctccccacygcatgcagggccaccaacgtccacatttaatactagaccaggctgcccagggccccatccaacctggccttgaacacctccagagatggggcatccacagcctctctgggcagcctgtgccagcgcctcatcactgtcatagtaaagaacttaaagcttatctgatataaaccagtcattttcatgagcaccaatgcaagtgttttggttacacatcagtgatgaaaacacagggaaaaaaactcaataacttataaacaggacataccactgtttcctccagccccttgagatcttctc

SEQ ID NO: 91214 - DNA, 600 bp, Chicken  19866894400195_1
cagtctgtggatacctgggcctggtttctgcccaaggctgccatctccccttccagctcctatccctctgcatgaggagctcaatcacccctccaaggcacagtttccctattgcaaaaagcccttagaagtgtcatttctatgctatgtatcaggagcaaacttttttccatgtttttagacctaggaggtgtggtgtcaccctcgcagcctggagccacctttagctaacgccttgggacaaggttagggttaggcaaagcactggagaccaccagacaataatgcacgtccacagamcacctcatttcaataatagttttaatggaaatcaggctcccgctctagagtggtgtgtgttgctcctcttggtttaccgatcattgtttttccagtgtaatggcaagctggtggccctggagcatggagctattcctaggtcaaacattcacaaagcttgaggagcaggagcacctcctgccctgctaatgaccccacagagccagcaggcttccaccccaagccctggggctactgcaactccatcagcagtgctgccgagtaccaaagtgcagagtacagttggatgtgatgtgtgct

SEQ ID NO: 91215 - DNA, 600 bp, Chicken  19866894400200_1
gaggttcaagtcctggtactgactgtgggttcagtcaggatgtttggtagctggggatggcttggatataaagtggcaattaagatgtgaccttgcacactatcttgttcagcaagcaggaaataaaaaggaattggagtaggaagacatctgtgaggaaagaagcagatgagcatgatctgcaaggactacagaagagctcaggaatcatcaaagccatgagctttgcctgctaaggaaagcaaggaaggtagaaaatcacatcgcagactgatggaggagatgctacagatctaaggygaaactctgagagagggcagactgtaagtaagaatatgtacctttcccaaaattagccaccactttcaaacactgacataaatgcaatgaaacaggctgagccagttcttttgtgcactagccagccttagattagtacatgcaatgaacagtttcagctataatccagttttgggcaaattacaagatggctttatgtttaagagcactaaagatgtgcatggcaaagttcactgatccttctgaaagaggaaaaaagaaggaaaaaagggaagagatacacagagaaagacggcaaat

SEQ ID NO: 91216 - DNA, 600 bp, Chicken  19866894400202_1
tactatccaagtatgaaaaaagctgtactaaaatgctataaaaacaactagttaagatcatgaagtgctgtgtgccagttacatctgtatcaaattctgtcttctgtatgtataccctatgtgacttcaggaactattttgttccagaagcccttgcatctgggcttgttagcccttaaagattgtccttgttagtggtctgtcaggcatctggatggggcatagacctgtcagcagtggagctatgctgcagcttgcttgtaagcaggcgcctcaccatgtcacagtgaatccaggcaycgcacagaacccccctgcatagctcagggttccagcccacaacacattgctcttgacctcatccgatttcaatagagtaattgtatcttttttcttattccagaacttttgttcctggttttgggacacttgaaagagagcatctcccagtggcaaagataagagcccacgtccttcctgtatcctgtggctatgcattctcagccacaagagtcagcaagtccccttccagagggaagcgatttggacaataacatctcagactgatgctgctaatctgcccttacccaaggtaattac

SEQ ID NO: 91217 - DNA, 599 bp, Chicken  19866894400207_1
  misc_feature (1)..(144): n is any nucleotide
nnnnnnnnnnnnnnnnnnnnnnnnnnnnnnnnnnnnnnnnnnnnnnnnnnnnnnnnnnnnnnnnnnnnnnnnnnnnnnnnnnnnnnnnnnnnnnnnnnnnnnnnnnnnnnnnnnnnnnnnnnnnnnnnnnnnnnnnnnnnnnnnccctcctttggccccgcagctccagccccacgtcctgctcgtgcctcaaaacgctcctccagccccggggtgttgtggagagcaaagcgtgagggtagctattagacaggaaagcctccaccacccccctccctccccaagccctggccctctccytcgcacacactccctgcccgtgctgcaaggacagtccacgagggccgggtcactcgtcgccctcctcctcgtggtggtggtggctggaagcagggggctcttctacctcctgttggtggtgggcatagtggtgggggccggggccctctgcgggcatgttctcctctgcgttcaagtagacattgaacagggctccctcgtggcttggctccttgccacaagcctggcagctgcagtgaagtatcttctccaccagcttgtcaaccctggggatctcgtcgttgcctgggcagtccagt

SEQ ID NO: 91218 - DNA, 599 bp, Chicken  19866894400210_1
  misc_feature (1)..(20): n is any nucleotide
nnnnnnnnnnnnnnnnnnnntgaaaatgctttatacttttggaataatatcatttgttatggatattgtaaagaattttagaaatacaatatttatttaatccacccagcatcaccatgaaatagctaggtgctgttatgattattcaattacagttaattgctgccctctgggattaagctgtgtgacaccaggacatctcatgcttctgtgagtgtcttagagcaatttgggtcatacaggagtgcatgggtgctgagaaggggaagtgtgtttattgatttcttagctcataaatcrgagtttatttgtgccaaggttaggggtccaggtcctctagaaagttttgggaatgcaattgtgagagaacttccacaggttgaaataatccttatttctcaatttcakcatgtcacatttgcataactagtgcttcattaactagtcatagtcaattttccaaggcttacaagtagttcaacaatgtggcctgaataccactcaatggaacagttccattgttgcatacatgaccacgggcctagagactaatgatgtttcatgacattttatcattagagaagactggattctaaata

SEQ ID NO: 91219 - DNA, 600 bp, Chicken  19866894400210_2
gcatcaccatgaaatagctaggtgctgttatgattattcaattacagttaattgctgccctctgggattaagctgtgtgacaccaggacatctcatgcttctgtgagtgtcttagagcaatttgggtcatacaggagtgcatgggtgctgagaaggggaagtgtgtttattgatttcttagctcataaatcrgagtttatttgtgccaaggttaggggtccaggtcctctagaaagttttgggaatgcaattgtgagagaacttccacaggttgaaataatccttatttctcaatttcakcatgtcacatttgcataactagtgcttcattaactagtcatagtcaattttccaaggcttacaagtagttcaacaatgtggcctgaataccactcaatggaacagttccattgttgcatacatgaccacgggcctagagactaatgatgtttcatgacattttatcattagagaagactggattctaaataacatgatcaaatcttactacattcaagcaggattaaacaatcataatttctgttcaatagctaaaaaataaacctgctttataatatcttgcaggctttactgtgaaga

SEQ ID NO: 91220 - DNA, 600 bp, Chicken  19866894400211_1
gagaaacaaaatgtatacagcatattagagtggtataatatctgtactattcttatgtatgatttaggtcaacacagtaatttgccttagaaaacaaactacagctgccatccttgctctctccatcattcaagagctgtgaaccgggcacgctaactaaagtgcaggagttaccttcctttgagcgattcctattcctccgtttccttcctacctcctgttttgatcctctctcaggttgtgccatgatgcccatttcacagcagcttgcattaaccccggcaagaacaatcattttaygtggagacagcatttgactctgtaagtgggccaaaaaacttgttttaatttcagcaattgacttcagcagaatgaacttcagcatgcagatcaatcctgtggccacgacttgtgttttgatacaggaaagtgtatttttacagcctgactgtgatttacgctttctgcatagtggtgagaaaaaatttcacctatgcaaagcctggtctcgctggactttcagcattattagttaggagcacggggtgatacctaagttcttcactgctctcatttttacatttgacgtcttgaacattc

SEQ ID NO: 91221 - DNA, 524 bp, Chicken  19866894400214_1
acatggtggtggttgatgttcttctactcctgcccaaagatgaactagaagtagcacatgcacaaccattacacatttctacagccagatctgtgtggaagagagagctaaaactgggagaatagcagcatataatgatggcacggggggaagattttggctttgctgccttttgcccttgctttaagcagtctctgcttgtccgtttctgcctgcccatccatccaccatcctctctacgctatgtgctgctgtttccccagctggcaactgccccatcaggctgcaccagtgcctttygctgcggggacagggaaggggagaggtgaggayatgctgccaggggtgcgtttagcccaccaacgaggagcactgyaaaaagccatcagggcagcccaagccttgctgtgggtctgtgcaaggccgcttgggcctgtgcctgctcctttggcatcgggcggctgcggcgacccgcctccctgctgacacagaggttcctccggagtgcaaaaacaaatggctga

SEQ ID NO: 91222 - DNA, 491 bp, Chicken  19866894400214_2
ccaaagatgaactagaagtagcacatgcacaaccattacacatttctacagccagatctgtgtggaagagagagctaaaactgggagaatagcagcatataatgatggcacggggggaagattttggctttgctgccttttgcccttgctttaagcagtctctgcttgtccgtttctgcctgcccatccatccaccatcctctctacgctatgtgctgctgtttccccagctggcaactgccccatcaggctgcaccagtgcctttygctgcggggacagggaaggggagaggtgaggayatgctgccaggggtgcgtttagcccaccaacgaggagcactgyaaaaagccatcagggcagcccaagccttgctgtgggtctgtgcaaggccgcttgggcctgtgcctgctcctttggcatcgggcggctgcggcgacccgcctccctgctgacacagaggttcctccggagtgcaaaaacaaatggctga

SEQ ID NO: 91223 - DNA, 448 bp, Chicken  19866894400214_3
ttctacagccagatctgtgtggaagagagagctaaaactgggagaatagcagcatataatgatggcacggggggaagattttggctttgctgccttttgcccttgctttaagcagtctctgcttgtccgtttctgcctgcccatccatccaccatcctctctacgctatgtgctgctgtttccccagctggcaactgccccatcaggctgcaccagtgcctttygctgcggggacagggaaggggagaggtgaggayatgctgccaggggtgcgtttagcccaccaacgaggagcactgyaaaaagccatcagggcagcccaagccttgctgtgggtctgtgcaaggccgcttgggcctgtgcctgctcctttggcatcgggcggctgcggcgacccgcctccctgctgacacagaggttcctccggagtgcaaaaacaaatggctga

SEQ ID NO: 91224 - DNA, 600 bp, Chicken  19866894400223_1
tgactttccagtttcacatcctttgatgagctcaaaagatgtgagattctgctaaaacagaaacagctcagaaaaagaaactggaagttgataagaagaagagtttaactgaaataagtactaattaaatgtgcttttagttactggggtgtttcgtatgaaaatatgtattttgagttactgtccttatgtgctgttgtaatatatgtttatttaaatgtttaattatgtaacataaaatattttaaaagtacatttcttaatttgaagcgtagcgagaatactgacttttgatgtttyttaccagttctggctaatagtttaagctgaggattagtccacaggttagttactttttcagtatctattagaaactggacagcaaataaatgtgtagttccacctgagctctaatattctggacttcctagctattatacttagaaaaggcttttgctctgcttttaagaaatcttttaaaacatgcatatacctagcaaacaaagaacatcttcagctggaggtataattttaggaaattctggaggagtaactgacataggctttctgaatgccgttttatgtataatttagtcttca

SEQ ID NO: 91225 - DNA, 579 bp, Chicken  19866894400228_1
tacagcattgttggaagaactgctggacattcaagtgagggaaggaagggagagcactatttttcctcctttatctttcttttccttcctcacttggattataggtggtacgtatttgttagtcattttggttttactccagaccatttcctacagcatttctcttggattattattatttttttaagtccctgttatcttaaactgtgggacatctgacatagtgcttggcaaatgactccacaatttaatcagtgccagcttcaatccttttttttttaattttcacttatttaagaytcaaaatcagaaacaatccctcttcctacttttgttactagtagtttgtgaatatgttaatctttcaggcatctttttagtaagttctttcacaaatacacatcttatctgtttgacttcaccctggtaacaaaaccagagagtgaaccagagagtgttatgctttcagtatggcagtatttatagccatagttctgtcagtggagcaagctgctatccagactgttctgtgcaggaagtttcccatttcctcgttgtttaaatatacaaaattaagta

SEQ ID NO: 91226 - DNA, 600 bp, Chicken  19866894400229_1
ggtcagtgaaagggctcacctgcttgttgtcactttctttgcaaggtgacaggagcactggggagccagggaacagggtatacacagacaagcacagctgctgctgacggacttggtggttgtatgtgtatgtccattcctgcaaagagaaataaaggagagaaaggagatgagaaatcaaggttgactgttggtattcctcagcctggaaagcaaacacaatggcctggatcctgccccttctgaaaccaatcagaaaactcattgacttcaagaggcaccaggacgtgtcactagggmtgctccaagcctctctaaatctgcagctgtcactggcagattgctataccaaagcaaatgtccctgaaagtagctagaagaaaactgttcacaaggtaaaggtaggcagaactgggctgtggttagggagcgtggcaaaacagaaaaggaaaaagagaaatagtactaaccacacaagatgcaatcattttcaattccagggaagggcaacagaaatgctctgtggctggcacaaggagacaggaggtaacatacagcagacatctgcaattcctcaggattctgtycccaaaggtcaca

SEQ ID NO: 91227 - DNA, 600 bp, Chicken  19866894400229_2
gtattcctcagcctggaaagcaaacacaatggcctggatcctgccccttctgaaaccaatcagaaaactcattgacttcaagaggcaccaggacgtgtcactagggmtgctccaagcctctctaaatctgcagctgtcactggcagattgctataccaaagcaaatgtccctgaaagtagctagaagaaaactgttcacaaggtaaaggtaggcagaactgggctgtggttagggagcgtggcaaaacagaaaaggaaaaagagaaatagtactaaccacacaagatgcaatcattttcmattccagggaagggcaacagaaatgctctgtggctggcacaaggagacaggaggtaacatacagcagacatctgcaattcctcaggattctgtycccaaaggtcacaaatcttatgggtaaagttcccctttgtatcaaaagagtgggagctgcgagagtctgcttcaggcactgcttataggcacccctcattggagcccagtgggttacacagacattgtaaactgtattgtctaaggacgtgagttcctgtgcagagacactgctgataagagatggagagaaacacagtaccttac

SEQ ID NO: 91228 - DNA, 598 bp, Chicken  19866894400229_3
gtgtcactagggmtgctccaagcctctctaaatctgcagctgtcactggcagattgctataccaaagcaaatgtccctgaaagtagctagaagaaaactgttcacaaggtaaaggtaggcagaactgggctgtggttagggagcgtggcaaaacagaaaaggaaaaagagaaatagtactaaccacacaagatgcaatcattttcaattccagggaagggcaacagaaatgctctgtggctggcacaaggagacaggaggtaacatacagcagacatctgcaattcctcaggattctgtycccaaaggtcacaaatcttatgggtaaagttcccctttgtatcaaaagagtgggagctgcgagagtctgcttcaggcactgcttataggcacccctcattggagcccagtgggttacacagacattgtaaactgtattgtctaaggacgtgagttcctgtgcagagacactgctgataagagatggagagaaacacagtaccttactgtagaaaatttgactacaagtcagcagcttcatgctacaaatgcttactgctcccagagcccattgagcggtcctgtatggcactgggctg

SEQ ID NO: 91229 - DNA, 599 bp, Chicken  19866894400230_1
  misc_feature (1)..(105): n is any nucleotide
nnnnnnnnnnnnnnnnnnnnnnnnnnnnnnnnnnnnnnnnnnnnnnnnnnnnnnnnnnnnnnnnnnnnnnnnnnnnnnnnnnnnnnnnnnnnnnnnnnnnnnnnncctgctgtaggggtctggaagctcccggccgcagcccctcagtggggctcagcgtgacaagacggcggccgaaatagcggcacccaaaatagagccgcagggcggcagacgggcgggcgactcaccctggatagcggggctgtaggggtcccggatggggatggcggggtccagcacgcggtagatcacctgcargagggagaagggtggtgaggggacagcrgggtcccccacgcgcccctcggtgctgtcggagccttacctctccctcggtggagggctcgatgtcggagtagcgcgactcgcagatcacgtcgtcaatgcggcgcgggggcccacgggggacgtgggggaaggacgcagcacagtcgtaggcgaagtagcggtacaccttccagctgcggccraagtcggccgagcgctccaccagcatggctgcggggcggaaggtctgcggggcacacggagggatgggggcacacggtgggatgggg

SEQ ID NO: 91230 - DNA, 599 bp, Chicken  19866894400230_2
  misc_feature (1)..(77): n is any nucleotide
nnnnnnnnnnnnnnnnnnnnnnnnnnnnnnnnnnnnnnnnnnnnnnnnnnnnnnnnnnnnnnnnnnnnnnnnnnnnncctgctgtaggggtctggaagctcccggccgcagcccctcagtggggctcagcgtgacaagacggcggccgaaatagcggcacccaaaatagagccgcagggcggcagacgggcgggcgactcaccctggatagcggggctgtaggggtcccggatggggatggcggggtccagcacgcggtagatcacctgcargagggagaagggtggtgaggggacagcrgggtcccccacgcgcccctcggtgctgtcggagccttacctctccctcggtggagggctcgatgtcggagtagcgcgactcgcagatcacgtcgtcaatgcggcgcgggggcccacgggggacgtgggggaaggacgcagcacagtcgtaggcgaagtagcggtacaccttccagctgcggccraagtcggccgagcgctccaccagcatggctgcggggcggaaggtctgcggggcacacggagggatgggggcacacggtgggatgggggcgcgtggcggggtggggacatgcggca

SEQ ID NO: 91231 - DNA, 600 bp, Chicken  19866894400230_3
gacgggcgggcgactcaccctggatagcggggctgtaggggtcccggatggggatggcggggtccagcacgcggtagatcacctgcargagggagaagggtggtgaggggacagcrgggtcccccacgcgcccctcggtgctgtcggagccttacctctccctcggtggagggctcgatgtcggagtagcgcgactcgcagatcacgtcgtcaatgcggcgcgggggcccacgggggacgtgggggaaggacgcagcacagtcgtaggcgaagtagcggtacaccttccagctgcggccraagtcggccgagcgctccaccagcatggctgcggggcggaaggtctgcggggcacacggagggatgggggcacacggtgggatgggggcgcgtggcggggtggggacatgcggcacgatggcagtcggggctatggggtctgtgccatcccgctgcgcccaccttgaaggtcatgatgaggtgggtgaagtggaactcagcctcgaggtccagctggatgctgacgtgctccacgcctgggggggacaaccgtgtgactccagccttggccacggcagcacggggctgagtcacggcttc

SEQ ID NO: 91232 - DNA, 506 bp, Chicken  19866894400233_1
tttaactagattagctacaaagggattaaaaaagataacaacaactgaagtaataactttaaaaaaaggctcaaatccttactgctggctccgagtcacattctgaattttagcaataatttggacagtgcacactgggagagactgctagcattaaacagagggatacatatcttttttaaacctcagcaacaaatcttcaaaacattatagttagtaaccaagatcaaagcacttcctatgcagagaacgcactgggtgcagataggaacctcacacgcactggagctctgacatccyttgctcccttctyattacacagctccacattctttcatggctccctgccctaggaatgctctcgagtgacctgtgcccacactatctttcatctgtgcagtcattctaagatgagtgatttcatcccttgatgctgttaggtcagctttgttctgtctccagttaagctcatcacagttaaggtcctcatgtaatctaagcaatca

SEQ ID NO: 91233 - DNA, 493 bp, Chicken  19866894400233_2
gctacaaagggattaaaaaagataacaacaactgaagtaataactttaaaaaaaggctcaaatccttactgctggctccgagtcacattctgaattttagcaataatttggacagtgcacactgggagagactgctagcattaaacagagggatacatatcttttttaaacctcagcaacaaatcttcaaaacattatagttagtaaccaagatcaaagcacttcctatgcagagaacgcactgggtgcagataggaacctcacacgcactggagctctgacatccyttgctcccttctyattacacagctccacattctttcatggctccctgccctaggaatgctctcgagtgacctgtgcccacactatctttcatctgtgcagtcattctaagatgagtgatttcatcccttgatgctgttaggtcagctttgttctgtctccagttaagctcatcacagttaaggtcctcatgtaatctaagcaatca

SEQ ID NO: 91234 - DNA, 599 bp, Chicken  19866894400234_1
  misc_feature (1)..(119): n is any nucleotide
nnnnnnnnnnnnnnnnnnnnnnnnnnnnnnnnnnnnnnnnnnnnnnnnnnnnnnnnnnnnnnnnnnnnnnnnnnnnnnnnnnnnnnnnnnnnnnnnnnnnnnnnnnnnnnnnnnnnnnnaattattttatgagattctccccgcttattgcctcgccatttgagttgcccttcttgttttcgaatggtctcatcactaaatggcgttgtttctgcttcctgagtacaatcatccctctcggagagaacaaaacatgttcatataaagttttcttcctgcacaaacttgacgatgcgaatrtaaatctagcttttgccaagaactcccttgaatgaacattcatggaatgggaccatgagagaactccgagcacagccaaagcagatgtgtttttacagtttcaaacaaatctgtagatactgttttgcaatacgtctatcactgtctgtgaagaataaagcccctcaggccctcagatcccgggcttctctaagaacacagagctcttctccctgctgtcaagtagaaaagagagaacagagattccagtgcacgttgggctcctatttgtaacaaggatctscacgaacacattggct

SEQ ID NO: 91235 - DNA, 600 bp, Chicken  19866894400234_2
acttgacgatgcgaatrtaaatctagcttttgccaagaactcccttgaatgaacattcatggaatgggaccatgagagaactccgagcacagccaaagcagatgtgtttttacagtttcaaacaaatctgtagatactgttttgcaatacgtctatcactgtctgtgaagaataaagcccctcaggccctcagatcccgggcttctctaagaacacagagctcttctccctgctgtcaagtagaaaagagagaacagagattccagtgcacgttgggctcctatttgtaacaaggatctscacgaacacattggctgagggctgggaatggctgccttccccctggcatttcrctaaggctgaatgtggctgtctgcttygctacagctggaaacgtacaggggaaaaaaagcaccaagtcctcttacgtagtagaaatggaggatgttgagttaaaaccaaagcagggcaagtactttagaggtaactggaaggcacttttcctctggtaattgacatggtctaggaaaataaatgatcctgtgtattaaagtatgagtagcagagaagctgagtagaatactcctcacagcactaacc

SEQ ID NO: 91236 - DNA, 600 bp, Chicken  19866894400234_3
cattcatggaatgggaccatgagagaactccgagcacagccaaagcagatgtgtttttacagtttcaaacaaatctgtagatactgttttgcaatacgtctatcactgtctgtgaagaataaagcccctcaggccctcagatcccgggcttctctaagaacacagagctcttctccctgctgtcaagtagaaaagagagaacagagattccagtgcacgttgggctcctatttgtaacaaggatctscacgaacacattggctgagggctgggaatggctgccttccccctggcatttcrctaaggctgaatgtggctgtctgcttygctacagctggaaacgtacaggggaaaaaaagcaccaagtcctcttacgtagtagaaatggaggatgttgagttaaaaccaaagcagggcaagtactttagaggtaactggaaggcacttttcctctggtaattgacatggtctaggaaaataaatgatcctgtgtattaaagtatgagtagcagagaagctgagtagaatactcctcacagcactaacctgtttcagggtcttaaagcctctgttccaatacacaaaagctgtgacccagtc

SEQ ID NO: 91237 - DNA, 600 bp, Chicken  19866894400234_4
ctccgagcacagccaaagcagatgtgtttttacagtttcaaacaaatctgtagatactgttttgcaatacgtctatcactgtctgtgaagaataaagcccctcaggccctcagatcccgggcttctctaagaacacagagctcttctccctgctgtcaagtagaaaagagagaacagagattccagtgcacgttgggctcctatttgtaacaaggatctscacgaacacattggctgagggctgggaatggctgccttccccctggcatttcrctaaggctgaatgtggctgtctgcttygctacagctggaaacgtacaggggaaaaaaagcaccaagtcctcttacgtagtagaaatggaggatgttgagttaaaaccaaagcagggcaagtactttagaggtaactggaaggcacttttcctctggtaattgacatggtctaggaaaataaatgatcctgtgtattaaagtatgagtagcagagaagctgagtagaatactcctcacagcactaacctgtttcagggtcttaaagcctctgttccaatacacaaaagctgtgacccagtcaagcttgttagcagtggcaaatttatt

SEQ ID NO: 91238 - DNA, 600 bp, Chicken  19866894400244_1
tggtggttctctgaggtctcagagagctgctgaccatcatgggattgcttcaacaggcagtacaagagtataatatttaatccgactaaatactcttcacttctttctagactgagttctttccctgtcatcattcagcactatctgtggtaaccattttggcacaagggatctttttactgaaagctgaagtaaagcgggtaaatacttctactgtctttacatcattcgctaccacctctccttaccttctgggtagtccttcccacaaccttcatgtcattgctaatgtatttgaaktkttcttgatgtcccattgatccttctggttgattctctgtttctctcgtgacttttctgatgtggtccccacaccttcaggctgtgcatttacattcactggcatgtgaatctagtttctattctccgaagaccctatttcatgtgttagagatcggtgaagtggtgatgatttaagcacatcgtcttgtgacagttgctttccctcctctgctgggattgtttgaattgatgtccttaccaccattgtttctttaagctgctgccaactttcctgaattcccttttctctgagacttg

SEQ ID NO: 91239 - DNA, 600 bp, Chicken  19866894400244_2
gtggttctctgaggtctcagagagctgctgaccatcatgggattgcttcaacaggcagtacaagagtataatatttaatccgactaaatactcttcacttctttctagactgagttctttccctgtcatcattcagcactatctgtggtaaccattttggcacaagggatctttttactgaaagctgaagtaaagcgggtaaatacttctactgtctttacatcattcgctaccacctctccttaccttctgggtagtccttcccacaaccttcatgtcattgctaatgtatttgaaktkttcttgatgtcccattgatccttctggttgattctctgtttctctcgtgacttttctgatgtggtccccacaccttcaggctgtgcatttacattcactggcatgtgaatctagtttctattctccgaagaccctatttcatgtgttagagatcggtgaagtggtgatgatttaagcacatcgtcttgtgacagttgctttccctcctctgctgggattgtttgaattgatgtccttaccaccattgtttctttaagctgctgccaactttcctgaattcccttttctctgagacttgtt

SEQ ID NO: 91240 - DNA, 600 bp, Chicken  19866894400254_1
gcaggtctggcagtgtctgctattgcttgatagatgagtggtgcaacccagaagcatacagcattcattaacagaagactataaaaacctggccaaagacctagcccctgcaatttttaaagtctgatgatatggggtagcagcagaaatgagacagttttaataaggtttgtgaaaaaaagaaaaaaaaaaaaaggaagggtgtgaatggctagcacgaaaccaagacaagagacttgggttggaaaggactttaaagatgatctagttccagcccttctgccaaaatcgtaccacacraactcaggagtcaaagtgagcacagaaactagtcagtttatagctactacagctataaaatgttgggcatattcttgcacatctgttaatagcttggctactctggagctgctgtgcttatgccatgcagttaatccacatgtacgtaggttcaagtggtcyggatatcagctctcactttggccagactgtgwgaggtccagaaatgctgaatgtatggccacactcctatctcttggaaaaactctctaagtgaaagtaaaagataagtctaatagaagagatggttatcatatctct

SEQ ID NO: 91241 - DNA, 600 bp, Chicken  19866894400254_2
ataaggtttgtgaaaaaaagaaaaaaaaaaaaaggaagggtgtgaatggctagcacgaaaccaagacaagagacttgggttggaaaggactttaaagatgatctagttccagcccttctgccaaaatcgtaccacacraactcaggagtcaaagtgagcacagaaactagtcagtttatagctactacagctataaaatgttgggcatattcttgcacatctgttaatagcttggctactctggagctgctgtgcttatgccatgcagttaatccacatgtacgtaggttcaagtggtcyggatatcagctctcactttggccagactgtgwgaggtccagaaatgctgaatgtatggccacactcctatctcttggaaaaactctctaagtgaaagtaaaagataagtctaatagaagagatggttatcatatctctaaatcttgaagattgtgatccaattatggttgttygtaattcattttttcctaagtgttttctctatttctctagagtatttttctgcatgacttcattaactgttttactcaaggaggtccaagggaaaaatgtatgaacataatctttaccatctctgtg

SEQ ID NO: 91242 - DNA, 600 bp, Chicken  19866894400254_3
aggaagggtgtgaatggctagcacgaaaccaagacaagagacttgggttggaaaggactttaaagatgatctagttccagcccttctgccaaaatcgtaccacacraactcaggagtcaaagtgagcacagaaactagtcagtttatagctactacagctataaaatgttgggcatattcttgcacatctgttaatagcttggctactctggagctgctgtgcttatgccatgcagttaatccacatgtacgtaggttcaagtggtcyggatatcagctctcactttggccagactgtgwgaggtccagaaatgctgaatgtatggccacactcctatctcttggaaaaactctctaagtgaaagtaaaagataagtctaatagaagagatggttatcatatctctaaatcttgaagattgtgatccaattatggttgttygtaattcattttttcctaagtgttttctctatttctctagagtatttttctgcatgacttcattaactgttttactcaaggaggtccaagggaaaaatgtatgaacataatctttaccatctctgtgaagcagcaatcaaaaaggttaaaggaatggag

SEQ ID NO: 91243 - DNA, 600 bp, Chicken  19866894400254_4
gtttatagctactacagctataaaatgttgggcatattcttgcacatctgttaatagcttggctactctggagctgctgtgcttatgccatgcagttaatccacatgtacgtaggttcaagtggtcyggatatcagctctcactttggccagactgtgwgaggtccagaaatgctgaatgtatggccacactcctatctcttggaaaaactctctaagtgaaagtaaaagataagtctaatagaagagatggttatcatatctctaaatcttgaagattgtgatccaattatggttgttygtaattcattttttcctaagtgttttctctatttctctagagtatttttctgcatgacttcattaactgttttactcaaggaggtccaagggaaaaatgtatgaacataatctttaccatctctgtgaagcagcaatcaaaaaggttaaaggaatggagttggctataaacyatgacatttactgtctattgagagtattcatcatacggcacaagaagataatgcaatgtgagtcacagcaaaacaattcaatataaaatggatctcagggatacaagcctcaggttgacattagagta

SEQ ID NO: 91244 - DNA, 542 bp, Chicken  19866894400254_5
gctgaatgtatggccacactcctatctcttggaaaaactctctaagtgaaagtaaaagataagtctaatagaagagatggttatcatatctctaaatcttgaagattgtgatccaattatggttgttygtaattcattttttcctaagtgttttctctatttctctagagtatttttctgcatgacttcattaactgttttactcaaggaggtccaagggaaaaatgtatgaacataatctttaccatctctgtgaagcagcaatcaaaaaggttaaaggaatggagttggctataaacyatgacatttactgtctattgagagtattcatcatacggcacaagaagataatgcaatgtgagtcacagcaaaacaattcaatataaaatggatctcagggatacaagcctcaggttgacattagagtacttcgtagtgaaaaaactcttctttctccatagtgacaatcttcaaatgcaccgccagctacttttattctttacaaggatcaagaagattctggtctctgcttgcatcattag

SEQ ID NO: 91245 - DNA, 599 bp, Chicken  19866894400256_1
  misc_feature (1)..(115): n is any nucleotide
nnnnnnnnnnnnnnnnnnnnnnnnnnnnnnnnnnnnnnnnnnnnnnnnnnnnnnnnnnnnnnnnnnnnnnnnnnnnnnnnnnnnnnnnnnnnnnnnnnnnnnnnnnnnnnnnnnnttgggttggaagggaccttaaagatctctatgtccaaccccctgccgtgagcagggttgccaacccctagatcagaaagcaaacagcttttttcccttaaggactaccagacttcacactgttgttcagatagatagaatcaaggcaaaacattgcagaaatgtattttatcggtgcaactgatrcagctagaaaaagcaggtaacatgcatggttttgaacatgcaaatygttctttagatctagaacaggcatcacacttcacactgagtttaatttagttatttttgattaagcaactgtgctgaccagttatgagcaaaagatgcctggtacctgtggagaggtgaatggtgaaagagaagacacaaggaagtcctgcagcccagagtaacagcaatcacctgaggacatatattacatcactaaactgatgtcttttctttattggcagtgcctagtgctcagtggacctctgaatttc

SEQ ID NO: 91246 - DNA, 599 bp, Chicken  19866894400256_2
  misc_feature (1)..(69): n is any nucleotide
nnnnnnnnnnnnnnnnnnnnnnnnnnnnnnnnnnnnnnnnnnnnnnnnnnnnnnnnnnnnnnnnnnnnnttgggttggaagggaccttaaagatctctatgtccaaccccctgccgtgagcagggttgccaacccctagatcagaaagcaaacagcttttttcccttaaggactaccagacttcacactgttgttcagatagatagaatcaaggcaaaacattgcagaaatgtattttatcggtgcaactgatrcagctagaaaaagcaggtaacatgcatggttttgaacatgcaaatygttctttagatctagaacaggcatcacacttcacactgagtttaatttagttatttttgattaagcaactgtgctgaccagttatgagcaaaagatgcctggtacctgtggagaggtgaatggtgaaagagaagacacaaggaagtcctgcagcccagagtaacagcaatcacctgaggacatatattacatcactaaactgatgtcttttctttattggcagtgcctagtgctcagtggacctctgaatttctgaggcaggttatgtaacctgctgagtgcayatctgctggggatga

SEQ ID NO: 91247 - DNA, 600 bp, Chicken  19866894400256_3
tttgaacatgcaaatygttctttagatctagaacaggcatcacacttcacactgagtttaatttagttatttttgattaagcaactgtgctgaccagttatgagcaaaagatgcctggtacctgtggagaggtgaatggtgaaagagaagacacaaggaagtcctgcagcccagagtaacagcaatcacctgaggacatatattacatcactaaactgatgtcttttctttattggcagtgcctagtgctcagtggacctctgaatttctgaggcaggttatgtaacctgctgagtgcayatctgctggggatgaggaaaacagaatggatccttcacagtgctctatcaagaggattatattacgtgcagctggtcaatgaaatatatccatattgtctgacttgtctctcaaacgctgagatgtttattaaaaacaagattgtggggcagaatgacagaccatctggaatatatgcatctagtattgatttagccaagagctttctataaagctaaacacgacaagcatccagggagttcagctttctccacacgtcccagcccctccagcactgctttcctttagcaagtctctttt

SEQ ID NO: 91248 - DNA, 600 bp, Chicken  19866894400264_1
tcacaaggttcacctgggcccactgttcaagcctgtctaggttcatctgggtggcatcccatccctctggtgtgttgtctgcaccccacagcttggtgacatcagcagacttgctgaggatatgctcaaccccactgtcattgtcactgataaagatactaaggagtatcagccccagcactgacccctggggcataccacttgtcactggatctccatccagacaaggagccattgaccacccctctctgggtatgatgctgcagccctgcttcaggggcaaagggaagattccttccrctctgagcagaaacaaagatccagattcccttgtcttgcatgtgtctgtgatctgtctcctcaggtktggaatctagtgcctctgcctgcrgaaactagaatagattatggcctttcaggctacgtgtgtatctggagagttgtctgctttttctgtatgtgcattcagctaagacatgtgatctgtatatgtattatattaaatttataaagtgagatttaggcctgattaaaacaaacacaaaataattaaatttgtttttcagcattgaattcaatccataacagaacaaatcaaac

SEQ ID NO: 91249 - DNA, 600 bp, Chicken  19866894400264_2
tggtgtgttgtctgcaccccacagcttggtgacatcagcagacttgctgaggatatgctcaaccccactgtcattgtcactgataaagatactaaggagtatcagccccagcactgacccctggggcataccacttgtcactggatctccatccagacaaggagccattgaccacccctctctgggtatgatgctgcagccctgcttcaggggcaaagggaagattccttccrctctgagcagaaacaaagatccagattcccttgtcttgcatgtgtctgtgatctgtctcctcaggtktggaatctagtgcctctgcctgcrgaaactagaatagattatggcctttcaggctacgtgtgtatctggagagttgtctgctttttctgtatgtgcattcagctaagacatgtgatctgtatatgtattatattaaatttataaagtgagatttaggcctgattaaaacaaacacaaaataattaaatttgtttttcagcattgaattcaatccataacagaacaaatcaaacaaaaacaagggagaaaaattaataagaataaccttccaaggggaaaaaacaataaaagctttgaagt

SEQ ID NO: 91250 - DNA, 600 bp, Chicken  19866894400264_3
cttggtgacatcagcagacttgctgaggatatgctcaaccccactgtcattgtcactgataaagatactaaggagtatcagccccagcactgacccctggggcataccacttgtcactggatctccatccagacaaggagccattgaccacccctctctgggtatgatgctgcagccctgcttcaggggcaaagggaagattccttccrctctgagcagaaacaaagatccagattcccttgtcttgcatgtgtctgtgatctgtctcctcaggtktggaatctagtgcctctgcctgcrgaaactagaatagattatggcctttcaggctacgtgtgtatctggagagttgtctgctttttctgtatgtgcattcagctaagacatgtgatctgtatatgtattatattaaatttataaagtgagatttaggcctgattaaaacaaacacaaaataattaaatttgtttttcagcattgaattcaatccataacagaacaaatcaaacaaaaacaagggagaaaaattaataagaataaccttccaaggggaaaaaacaataaaagctttgaagtcaatctgaatcatgcccattataa

SEQ ID NO: 91251 - DNA, 600 bp, Chicken  19866894400265_1
ggaaagcaaagccagaggaaagaaaattactttaaaaacagcagatacattttgaacttctcacttctgtgaacatgaattactttttcttttttatgaattgtaaaaagctggtaaatttccaatggaacacacagaataaagtcttgttacaaactttgcactttaacacagataatagaagtcatatttcttaccttcattgctgcagccatatccatcttgttaattgctatgttaaaataatattaaaaaacacatcaatgttaaataagctttttaaaaataaaatttgaaaargccactaaacatcatataggatagtataatcctagcctgactagtctgaaagaaagatgagccactatccttgacaagatctatttctattgatcacaatatgtagtttcagaaaatcctaactgtgcttatgcagctttaaaatttaaacttgttatcagtgttcctcagtgcagttcaaactgctgctatgatatgaaattctgcttctataacattcagtacttttctctaaagaagtaaataatgagaactcaactgaagaaattactggatgaatttaaaaatacttttttataa

SEQ ID NO: 91252 - DNA, 600 bp, Chicken  19866894400269_1
ccagccggagatttacctgcctttaagggagatttattttggaagcaaacaggctcatgtgacaaaatgctttccatgagcacctcaggcgaggaggagcggttcccctgccggggggtccgtgctgtgccctgggctgggtgtggagctgggagctgccccagggctcggctgctccctcccaccccactgcgcagaccccattccctctgtgcccgcagggcttggggagaggctttggggaaaggtgggtccggcttctgtggctcttgcatttgcctgggaaatcagagagttttygctgtgaaggtattgctgccaacacctctctgcatccccaccccagcaccgcccgtttccatcaccaccacctkaagaacaagaacagaggggcattttctctctttcccatgcaacttagcctcggggactcagtgctgcagtcctaaaaatgcaccaccatctgcaggattggggtcctgcagaggctgcagaattgggtgactccatcccaaatgacacctcagccatgtggttctccaaggcagcaaaaatgctgatggcctggggtgggaagcacggcctggctgggtctgctga

SEQ ID NO: 91253 - DNA, 600 bp, Chicken  19866894400269_2
catgagcacctcaggcgaggaggagcggttcccctgccggggggtccgtgctgtgccctgggctgggtgtggagctgggagctgccccagggctcggctgctccctcccaccccactgcgcagaccccattccctctgtgcccgcagggcttggggagaggctttggggaaaggtgggtccggcttctgtggctcttgcatttgcctgggaaatcagagagttttygctgtgaaggtattgctgccaacacctctctgcatccccaccccagcaccgcccgtttccatcaccaccacctkaagaacaagaacagaggggcattttctctctttcccatgcaacttagcctcggggactcagtgctgcagtcctaaaaatgcaccaccatctgcaggattggggtcctgcagaggctgcagaattgggtgactccatcccaaatgacacctcagccatgtggttctccaaggcagcaaaaatgctgatggcctggggtgggaagcacggcctggctgggtctgctgagaggtattggccaaagcaccatagtggtgtctgtgcagaaagcgtgtttctgtacagagctagcctggaggtga

SEQ ID NO: 91254 - DNA, 599 bp, Chicken  19866894400277_1
  misc_feature (1)..(190): n is any nucleotide
nnnnnnnnnnnnnnnnnnnnnnnnnnnnnnnnnnnnnnnnnnnnnnnnnnnnnnnnnnnnnnnnnnnnnnnnnnnnnnnnnnnnnnnnnnnnnnnnnnnnnnnnnnnnnnnnnnnnnnnnnnnnnnnnnnnnnnnnnnnnnnnnnnnnnnnnnnnnnnnnnnnnnnnnnnnnnnnnnnnnnnnnnnnnnntgatggggttaactgagtaatgtaagagggtactaaataaggaatcctgggaggtcatttaaggtacccctacgccctcaagacagaattagatcttcaagggtggcaaygtcatgggaaaaaaaaaaattaaatgaaaaatcaggggccagtccaattcttgccataaatcttcatgctgccattaaaataagtgtgcatcagcaccaaggaatctgtaggagaaaaaagttctgctgtccccagcatgtggctcatcactgggaagaaatgacacacggtttgtgttagggcacaaacccaacattaagagatgccggaggactttccttccccggcgatgtcaacacgatgatctacrgagatctatagccccagccycggagtccgggccttcagggctaataaa

SEQ ID NO: 91255 - DNA, 600 bp, Chicken  19866894400277_2
aggtacccctacgccctcaagacagaattagatcttcaagggtggcaaygtcatgggaaaaaaaaaaattaaatgaaaaatcaggggccagtccaattcttgccataaatcttcatgctgccattaaaataagtgtgcatcagcaccaaggaatctgtaggagaaaaaagttctgctgtccccagcatgtggctcatcactgggaagaaatgacacacggtttgtgttagggcacaaacccaacattaagagatgccggaggactttccttccccggcgatgtcaacacgatgatctacrgagatctatagccccagccycggagtccgggccttcagggctaataaaagggcagctgtctgtgcgcagttcacatctccactgccagaggaatggcgagcatcacgagcaggctgctataaatagccgcgcacccgaggatatggctcatatctttatttcaatagaggctcrtttacgtaagcctctcccggcccgctccacgctctcccctctgaagttacggggtactgccagaaaagcaccgagacggggctgaatccgtgcttcctcccacccccactgctctgcctttccctg

SEQ ID NO: 91256 - DNA, 592 bp, Chicken  19866894400277_3
gacagaattagatcttcaagggtggcaaygtcatgggaaaaaaaaaaattaaatgaaaaatcaggggccagtccaattcttgccataaatcttcatgctgccattaaaataagtgtgcatcagcaccaaggaatctgtaggagaaaaaagttctgctgtccccagcatgtggctcatcactgggaagaaatgacacacggtttgtgttagggcacaaacccaacattaagagatgccggaggactttccttccccggcgatgtcaacacgatgatctacrgagatctatagccccagccycggagtccgggccttcagggctaataaaagggcagctgtctgtgcgcagttcacatctccactgccagaggaatggcgagcatcacgagcaggctgctataaatagccgcgcacccgaggatatggctcatatctttatttcaatagaggctcrtttacgtaagcctctcccggcccgctccacgctctcccctctgaagttacggggtactgccagaaaagcaccgagacggggctgaatccgtgcttcctcccacccccactgctctgcctttccctgcccgcttccctc

SEQ ID NO: 91257 - DNA, 438 bp, Chicken  19866894400277_4
gctgtccccagcatgtggctcatcactgggaagaaatgacacacggtttgtgttagggcacaaacccaacattaagagatgccggaggactttccttccccggcgatgtcaacacgatgatctacrgagatctatagccccagccycggagtccgggccttcagggctaataaaagggcagctgtctgtgcgcagttcacatctccactgccagaggaatggcgagcatcacgagcaggctgctataaatagccgcgcacccgaggatatggctcatatctttatttcaatagaggctcrtttacgtaagcctctcccggcccgctccacgctctcccctctgaagttacggggtactgccagaaaagcaccgagacggggctgaatccgtgcttcctcccacccccactgctctgcctttccctgcccgcttccctc

SEQ ID NO: 91258 - DNA, 600 bp, Chicken  19866894400279_1
caaactgaattttcacagttgattactcctgtctgctttcatcagcatttaataacgtcttacattctttagcgcattctttctgtttaagacaattttgaattctactcctgttcttcagcatatctgcagcctatcctacttatacatcatacttaaacttacagagtatattatccattctcccatccatgcttttgtcaatattttggaactacaccagaagcaagacagatatctgcagaattgcattcagcacattttttagttcagatatttgttcattaattgctgctctayggatgtagttttctggcctgaaagtatctgatgagcagaatttgctgakccacatttgctgattgatgtcagtaaatcctgatcccctcacactatatgatgaaatgggtaaagccaartcaccactgtaacagcaaaaaatcggactaggactacaatagtcacccacaaaataaaattacarggatttcttttattattcatctccacaaacaatgaaataatttataatcttaataattctttttctgttctctcaaacagctggtaaatgggtcaaacaaggctatgttacttcct

SEQ ID NO: 91259 - DNA, 600 bp, Chicken  19866894400279_2
taataacgtcttacattctttagcgcattctttctgtttaagacaattttgaattctactcctgttcttcagcatatctgcagcctatcctacttatacatcatacttaaacttacagagtatattatccattctcccatccatgcttttgtcaatattttggaactacaccagaagcaagacagatatctgcagaattgcattcagcacattttttagttcagatatttgttcattaattgctgctctayggatgtagttttctggcctgaaagtatctgatgagcagaatttgctgakccacatttgctgattgatgtcagtaaatcctgatcccctcacactatatgatgaaatgggtaaagccaartcaccactgtaacagcaaaaaatcggactaggactacaatagtcacccacaaaataaaattacarggatttcttttattattcatctccacaaacaatgaaataatttataatcttaataattctttttctgttctctcaaacagctggtaaatgggtcaaacaaggctatgttacttccttagttaaagtgtcaagcacgtgtgcgttcccaagttcactttttgctgt

SEQ ID NO: 91260 - DNA, 600 bp, Chicken  19866894400279_3
agcatatctgcagcctatcctacttatacatcatacttaaacttacagagtatattatccattctcccatccatgcttttgtcaatattttggaactacaccagaagcaagacagatatctgcagaattgcattcagcacattttttagttcagatatttgttcattaattgctgctctayggatgtagttttctggcctgaaagtatctgatgagcagaatttgctgakccacatttgctgattgatgtcagtaaatcctgatcccctcacactatatgatgaaatgggtaaagccaartcaccactgtaacagcaaaaaatcggactaggactacaatagtcacccacaaaataaaattacarggatttcttttattattcatctccacaaacaatgaaataatttataatcttaataattctttttctgttctctcaaacagctggtaaatgggtcaaacaaggctatgttacttccttagttaaagtgtcaagcacgtgtgcgttcccaagttcactttttgctgttttatatgacagaaaacacacaaaacctgcttccaaatagaaaggaaagtttcaaacgcatattactaat

SEQ ID NO: 91261 - DNA, 600 bp, Chicken  19866894400279_4
cccatccatgcttttgtcaatattttggaactacaccagaagcaagacagatatctgcagaattgcattcagcacattttttagttcagatatttgttcattaattgctgctctayggatgtagttttctggcctgaaagtatctgatgagcagaatttgctgakccacatttgctgattgatgtcagtaaatcctgatcccctcacactatatgatgaaatgggtaaagccaartcaccactgtaacagcaaaaaatcggactaggactacaatagtcacccacaaaataaaattacarggatttcttttattattcatctccacaaacaatgaaataatttataatcttaataattctttttctgttctctcaaacagctggtaaatgggtcaaacaaggctatgttacttccttagttaaagtgtcaagcacgtgtgcgttcccaagttcactttttgctgttttatatgacagaaaacacacaaaacctgcttccaaatagaaaggaaagtttcaaacgcatattactaatgtttcacatgagaccagagctacatttcactccagctggagtcgtgttgggcacatgggaaatga

SEQ ID NO: 91262 - DNA, 599 bp, Chicken  19866894400285_1
  misc_feature (1)..(71): n is any nucleotide
nnnnnnnnnnnnnnnnnnnnnnnnnnnnnnnnnnnnnnnnnnnnnnnnnnnnnnnnnnnnnnnnnnnnnnnagcttcttcaagttctgggtcagggagtacctacacctcctagcagggctccttccactgtgtttcagatgctcctcttggcctcgctagcctgcagaactggtaccaaagaggggagcaggctggaaactgacttgatcatgctccagtaaacacccatctgaccaggaaaaaacatgcaggaagacagaaagcaagctttctctatcctggtgacagatacctgtcyctcagctcaccctgtttttaaacagggaaatggagggaaggagcattataatattctggtagggctcagcaggcggctccttggcgaagcaaccctcgtagctccagtgtcacaagtgaaatagccactggacggaagaggtgtcgaaaccaaatcccctgccattttcattctgtggtcattagtggtgcccacagaggcccggcatgcccctggctgacagcagaaaaccaaagggactgctgcagcttcgaaagcccatcccgagccacattttccatacccgacacgcacgccct

SEQ ID NO: 91263 - DNA, 600 bp, Chicken  19866894400291_1
ctttacatatccaaaatataaaggcaaggacaattaacagttacatggtgctgtttcttaattctccagtatgtttgttcacagtatcaagtgggagatacctcaaataaaagttatgacaatgctgataaaatttaaaggaagacgcagtgtttttccccctttatttacagtgtggatagattacagtactgctgtctgttttcagaagaaaatgactcaaaatatgttaatgagatgaaatcaccctctaccaccagcttacatatctacatccctccaactaaggagcagctcagwagcagctcccttgtcagaaaccttacgagttaaattgaaagcaattttttttaagtctgggtaaaggtagaagaaagaggactgctattgatgagcatgctcttagaaaacgaaacagatcactattttccccttttctacttcttgcactgcatgtgttcatctgtccaaaatctgatcattaggyaaaatctatgttcagtccttgatcaaaccatgctgggaacagagccagaagcattacttatttaaaagagagtggggaattgcactgagctcatgagaaacctaatgttttct

SEQ ID NO: 91264 - DNA, 600 bp, Chicken  19866894400291_2
agtactgctgtctgttttcagaagaaaatgactcaaaatatgttaatgagatgaaatcaccctctaccaccagcttacatatctacatccctccaactaaggagcagctcagwagcagctcccttgtcagaaaccttacgagttaaattgaaagcaattttttttaagtctgggtaaaggtagaagaaagaggactgctattgatgagcatgctcttagaaaacgaaacagatcactattttccccttttctacttcttgcactgcatgtgttcatctgtccaaaatctgatcattaggyaaaatctatgttcagtccttgatcaaaccatgctgggaacagagccagaagcattacttatttaaaagagagtggggaattgcactgagctcatgagaaacctaatgttttctctatttcttgaaaacccacaggatctctcaatttctcaaacatctgttttttttataataaattgctatgacaattaaaaatctaacaactgaccaaagaaaataatagcctaaaayatttttaaacaaaacaaaacaaaaaaacagaaatacatgttttgctaaagtgttcactaaagatactcat

SEQ ID NO: 91265 - DNA, 408 bp, Chicken  19866894400291_3
gatcactattttccccttttctacttcttgcactgcatgtgttcatctgtccaaaatctgatcattaggyaaaatctatgttcagtccttgatcaaaccatgctgggaacagagccagaagcattacttatttaaaagagagtggggaattgcactgagctcatgagaaacctaatgttttctctatttcttgaaaacccacaggatctctcaatttctcaaacatctgttttttttataataaattgctatgacaattaaaaatctaacaactgaccaaagaaaataatagcctaaaayatttttaaacaaaacaaaacaaaaaaacagaaatacatgttttgctaaagtgttcactaaagatactcattgctttaaaacagcaaagagctctgggcctcccaaaaa

SEQ ID NO: 91266 - DNA, 548 bp, Chicken  19866894400302_1
ctacaagtaagggaagccatccagagagatctggacaggtgtgaaaagtggtctgaagaccaagtgtaaggtgtcgaactcaagtcttagcaatctcagatatgtgtatatacttatactgagataaaaggccattgagaacagccttgcagagaatgactgaaactgagcctgaaattcccctggtgcaacttgaggccattctctctagtcttatcactagttacacgacagaagaggctgaccccaacctctctacaacttcctttcgtgtagttatagtgatcaataaggtctccyctgagcctcctcttctccagactgaacagtcccagctccctcagccgctcctcgtaaaggcctgtgctccagacccctcaccagcttcgttgcccttctctggacgctctaccatgcctcaatgtctttcttgcagtgagaggcccgaaactgaacacagtactcaaggtacagcctcaccagtgctgagtacaggggggacaactacttccctgctcctgctggccacactctatttctaatgcagg

SEQ ID NO: 91267 - DNA, 600 bp, Chicken  19866894400321_1
cctgccagtaattttggtcactctatatgtacatttcctgtccttgcagattgctggagccagaattgtaaaagcaaatagttttggcattctctattaataacagttcgctacatgagttatctagcttgatgattacttgttcttcttttatcctggacagattttttttacaagttagacaaatgctactatgcaacatacaaacagtagcaaagacacacaacatgccaatacataaataatcaagcaaagtagcgtatttaaaatccatcacaaggcagttccaaatctgtcacygaaagcagcagattccagggctggtgaggccatgcagattttacccagtggctgactgccagctgcctgccgaatccatgagagacgcgcctttaagcactctcctctgctaattttatcttttccctgcctctagcaggcattacatgatatttaraggctactgagtttaaaggtgatcactgaacctacagtgaggaaagatcccttatttttataagagatgaaaatgatcagtaatcaagactagtaaacaactgatccaagtcagccatagcctgttcagcctgcctctgcaga

SEQ ID NO: 91268 - DNA, 549 bp, Chicken  19866894400321_2
ggacagattttttttacaagttagacaaatgctactatgcaacatacaaacagtagcaaagacacacaacatgccaatacataaataatcaagcaaagtagcgtatttaaaatccatcacaaggcagttccaaatctgtcacygaaagcagcagattccagggctggtgaggccatgcagattttacccagtggctgactgccagctgcctgccgaatccatgagagacgcgcctttaagcactctcctctgctaattttatcttttccctgcctctagcaggcattacatgatatttaraggctactgagtttaaaggtgatcactgaacctacagtgaggaaagatcccttatttttataagagatgaaaatgatcagtaatcaagactagtaaacaactgatccaagtcagccatagcctgttcagcctgcctctgcagaatcttgttcttataaaagataataccttcattgggaagaaactgctcttggatcttttctgtgagcaagaaaaacaaaacgcagtcatagtttcatagtaaaacat

SEQ ID NO: 91269 - DNA, 599 bp, Chicken  19866894400328_1
  misc_feature (1)..(224): n is any nucleotide
nnnnnnnnnnnnnnnnnnnnnnnnnnnnnnnnnnnnnnnnnnnnnnnnnnnnnnnnnnnnnnnnnnnnnnnnnnnnnnnnnnnnnnnnnnnnnnnnnnnnnnnnnnnnnnnnnnnnnnnnnnnnnnnnnnnnnnnnnnnnnnnnnnnnnnnnnnnnnnnnnnnnnnnnnnnnnnnnnnnnnnnnnnnnnnnnnnnnnnnnnnnnnnnnnnnnnnnnnnnnnnnntagcctctctaggtataggatcccattttacaatttcatatatgaaaagtaagaaatgcaaggtttccttcagttygtgcttgtttcaactggacttacctctcttttaagctcattcatacactggcatgtttttaaaatggcgacttccaagtcttccatgagatcctttgtcttctggttttgctagaagccaaagaaaacaaccagacaaaacattacacacacacacaaacccaacagcaaatcccagcatgacacattacttcattgctttagaagacagctttgtatttctaagtgtaatattttcatttgcataccctgtgtagattttatttgaagaattccttgatggaatctaaaactgatagc

SEQ ID NO: 91270 - DNA, 600 bp, Chicken  19866894400328_2
atttaatgtcaacaacaccctttttcaaataaagtggtacctaaagggttatattaaatgttttatattgaattacaaaaaggtattttccctgtaagacttcagatctttgtctaatttaaacaaatacattatcttcattttgttgaatcagctccaagatggagctccaaatttggcaaaaccaaccaaccaacccaacactatctatagtgttaacccacatgtcaaaaggcatacactgggaaaaagagttccatagcagtaggtctgcacccacctccaaaagctattgaaaakaattatcctaggtgggaccattaacaagtccacagctgcaaagatatgagcacctcaagtataaattatgtagtaacataaacacaaagtatctgcagataaagacaagcacactcatcattttttttataaaggaaaaacaacaccagaccaatgttatcatttcctcaggtattccttaagtatagactgtctaaaagtataataaaatctcatttaacgttttaacattcagtactcactgccctgtccttttttattcttttaccaatttatttaatagggacgctataactcctt

SEQ ID NO: 91271 - DNA, 600 bp, Chicken  19866894400330_1
cagtgattgctggatgccatttctgttttgctctgacctaattcattcagccaacagtattcaagggaaacataagaaacccttacaatacaaatgagagccagattcacaacctgcttctggtcacagaaaaaagcacagttaaacaacaaaaattgtgttttattcaaggtgaacattctggctggtgattagatggaacagctttggaaatacaatacaagacaatttcatacccccaagtgtcctgagcatatgaaccaacatttcagttctgacgcagccctaaattttttaatmatcttttctgttgaagttcagggagataacatttcacagttttggtttaataattagccagtcactgcagagcataatgccagaattctactagattaggataacaatctcatatgcatacatacttcacccatatcttcctcctcctcctcctccgatgtaacttcttccgttgttccattctgcaatgtaacagtgagataactgcattaaatgcacacgttcctttctttcaaaaatcaggaagccttctagcaaacagtaaatatgaacgttacacttatcaaggtctaccaaaga

SEQ ID NO: 91272 - DNA, 597 bp, Chicken  19866894400330_2
aaacttaagatccaggtaaagacatcctatttttgagacaacagttacaaacacaataaacaagtgggttataactcatgatatcttaaaccatgaaaatcagatcatggctctgactagaaagcatatacatgctagagctctataaattaatggttcttggtcacactacctggaactactgccacaaccactaacattatatagccactgttactacattatctgatgacatactaaagcagtacactgagttggtttttcagagctttccatttcaggataccacttcaagctcasgaagtttgagctgcagaaatagttggaagcattatatccttgtcctctgcttacccttttttttgacaagtaaggaatgcccctactgtacacaatgcaagataccggatggatcttctgtctgacttatcaaagcgtcttatttaacttgaaaattatccaaaatttccagctgtgaaactcttccatgagttaattttagagtttcagagcacaaacaagactcttcaatgaagctgcttcctaaccctacagaccttggagttgcactgctatgtgggggccaggggagaagag

SEQ ID NO: 91273 - DNA, 599 bp, Chicken  19866894400348_1
  misc_feature (1)..(62): n is any nucleotide
nnnnnnnnnnnnnnnnnnnnnnnnnnnnnnnnnnnnnnnnnnnnnnnnnnnnnnnnnnnnnnacagagaacaaagacaaggtatgagatgtagttacgtgatccatttaaatagctaaataataaatatttaattgtttgttagcaattaagatacagcttactacctgttagaagaatagcgtgctgtgtgcttaaaacaatagctagattgtgggtttaaaccagaggtctgaagacaacaccatctacaagcgatagacagcacggagaactttcctcctgggaaaaaaggattgcytttgggatagcagcctgagctaaaggtcaggtatccacaaaaacatgccagaagcacacactgagatatagctggaagagagagcaagtctggaagagagatttgaaaatcatccatacaaagttgacagctgacgttataaattatattagagaaatctggtgtagtaactgcaggcaaaaaccaaactggagagctcttacagacatctaaacaaatgaaccccaggaagaaaaatcttcaccaagctttaacttttgagaaaaaaagatggttgcgtcataaatgggcctctgttc

SEQ ID NO: 91274 - DNA, 600 bp, Chicken  19866894400354_1
tgctctgcagatagtatattgatcactggcaattcaaatctgttgctccaataaggagcgctattctacaaggtagttgtaggagttctcattgggcacacaccagctctttaaggatgggtacaccagtccatattgaacgtggctagatgaaggttctccacagtacaggtgaatctgtaataatagcagttctttgggcacagccaaattccctaaggctgatcatgcaagttcatttgaatgcaactcaacttgtagcaccaaagtaggtattaaccctttaacacaacacacagraagccttgataccaatctgtgagggcacatcagaggcatctttwattttaggacttaagctaggtaatgcaaaacctgaaaatgaagctgctgccttccataacgtttccagactgccccagttctctttggcttgaaactaagatgagagtgaggcctctccagaggcctctggggaaggcttaagccctcaattcgaaacctcgtaaaggatctggaggtgtagggcatgtcagtatgtcttcatactatgggccagctagaaacagctgattgaaaacccgagagatggagggaagt

SEQ ID NO: 91275 - DNA, 600 bp, Chicken  19866894400354_2
gctccaataaggagcgctattctacaaggtagttgtaggagttctcattgggcacacaccagctctttaaggatgggtacaccagtccatattgaacgtggctagatgaaggttctccacagtacaggtgaatctgtaataatagcagttctttgggcacagccaaattccctaaggctgatcatgcaagttcatttgaatgcaactcaacttgtagcaccaaagtaggtattaaccctttaacacaacacacagraagccttgataccaatctgtgagggcacatcagaggcatctttwattttaggacttaagctaggtaatgcaaaacctgaaaatgaagctgctgccttccataacgtttccagactgccccagttctctttggcttgaaactaagatgagagtgaggcctctccagaggcctctggggaaggcttaagccctcaattcgaaacctcgtaaaggatctggaggtgtagggcatgtcagtatgtcttcatactatgggccagctagaaacagctgattgaaaacccgagagatggagggaagtgctgcagcttaagctgtgagaaaatatctcctgtgaaaggtagt

SEQ ID NO: 91276 - DNA, 600 bp, Chicken  19866894400371_1
catctcaagagagaatattggcatttcaatcagggcagcttcgcacacacatacacagcccactcaactctgtgttgaaagctttatgaaagaaagcctgtaggatatccaagagattacttacaagattctaaggtatggagtcttacgaaatctttataacacagcctggtgcccttgttgaagtgaatttgaaatatgcccctgagcgcctcagagtctgcagacaatgctcacaggtatcagagtatacatgcatacctacatttattacaacacacagacatacgctcgtttcamatacaaagataaggtgtcaatctttgagactttaaaaaatcaatggtgtttgtaggggctactattaattttcattactccatcagtcactcagcaaacaaagtttttctgtgttgctagagcctctgaaaagagaaagcagccactgcgcaggaaagagtgtgacagacaaaataaggttttatgttttcatgtagtcaccagttgcatcatcttatgccctaatatattctgagatttttttttagaagctaatattgcacaaagataaaatgtacattagtacatttttttagcaca

SEQ ID NO: 91277 - DNA, 599 bp, Chicken  19866894400377_1
  misc_feature (1)..(11): n is any nucleotide
nnnnnnnnnnntctcattatgaggctgggaattcttccaccataaatcctttttactggggactagaggagttactttgcagttgtttgtcactaagcacttggaaacacacgaagaaagctcagtgtgtgcactgacaggaggccagtgggaaatctgtacgtcaaatatcagagacatcagcaccttcacagacgtacaatcctatacgaaacaaaaacctgccaagcatctccttataataagaagctttgttcagagagaagaatcctactttttgctaatcctctgctctccagygtgttctagacaaaacacgagatatctgattttgtacacaagcagtaatgtgatgctgttaaaatcccactctttgtgggcttataagcctgttgcaaataatttgttccaggatgcaatttggtaaagaagaacccagtccacagatgattttaatacaatgtttgtcaaagaaacaaacaaataaaaaatcatgttaaataatattacattgtggaagttttctcctgaggaaggccagaggaaatcaaccagggacaatatctttctcctcctctgttattttttctggctttaaa

SEQ ID NO: 91278 - DNA, 600 bp, Chicken  19866894400378_1
ggcagttaagacattaaacacagattagcaaactaggttttaacaaattattactgattggaccttttaaatactgtgtatttttgcatttgtctgtcatttctgtgttctactgatagaagtgctggttcaagtgttttgcattgatagctcttagctttgggccacagagaccaaatgttattgacatcactaattgtaaaaaaaatctgaggggtttccaaactgttcgataaattccatctaattgccagaaaatagtgataactttcatttttctttcaaagtgtatttcatcartttattaggaaaaagatatagtacactttaatacctttttgactccagaaagatgtcagttcaagtacttcactgttgttagcagttgtaaaaatgggtgaaaaatgatgtataaacttccacagatttgttttcctgtttattggcaaaatataacctaaaccagcttcataatctgtgagaaatatacttttctgccagtagattctaagtgacaaatgactttatctgaaaggccgatttgtttgttaataccacttactgctactatttctactctgaagttgtgctagtgctgcc

SEQ ID NO: 91279 - DNA, 514 bp, Chicken  19866894400378_2
ataatctgtgagaaatatacttttctgccagtagattctaagtgacaaatgactttatctgaaaggccgatttgtttgttaataccacttactgctactatttctactctgaagttgtgctagtgctgccccttgactcttttgcttataattgcaagtgaccatagtgacactatctgattaatttttttttccagtcaaggtagttgaaagaacagctggttctttgagttagtttgctcaggatcatatctagtggcatgatgtgcaggctaacttgtagacacctttacaaaaatrctgtgaaatgttgccagggcaggtaagtaatattccagaaatcatgtttgtgaattggagcttgtaaatacagcggatagtccttctgaatgtctcttgtaaataactttgcattctatatattaacgctgttctcacccacagaatggaattttctatacccagacaagaattcaagttcggggagagccttgtgcgccaggcctctgcccat

SEQ ID NO: 91280 - DNA, 600 bp, Chicken  19866894400379_1
catataggcattggaatctaaatcaaagcttcccataactcagaagtaacctgttcttctagtctgggtccttaagaaatcaaatggtttagttcctccaaaaacacacaagtgtggatgcctctctagatctccggagtctgcaaaggtaggacaaggaatcatgttaaaatgtgtgtgacctcaaaggaagttccacacatggtgtggctgttaaaacaggccttacaaagcgctcctttagctcacagttcattttccagaaacccttttgttggtctgatcctatgcacgtgatcwgggtacatatgtttgagctatatggtctctcaataccccaaagaggagtgcactacacttaatggaagatagaaaaaatacaaacataaatggtcttatttaagaagactatattagtgagcaaatccaagacacatccaaacaaaatttctggtaagtgtattttcaaatggaattatttgcttaaagaaagtgcatcatatctaaggcatcacttatctttagtaacagcctcctgatacttaaatgaaagaggtttcctggtgaatgcaaatcatcactgatttctatacagtcaga

SEQ ID NO: 91281 - DNA, 600 bp, Chicken  19866894400388_1
tttggtaagaagtaaggaagctgactttattttctggcccagggtcagttttagcctccaggactggtatttaaagtttacatttgcattttaagcctatgcactctaacattttgccactacagatgcatttgcagatgctcttaaggacagcatgtgataatgaaggtctggtcatcaagagagactatacatccacaaatgcaaaactgagagaaattgcagatttagtgctacaaaggaccagatgcggaaattattagtagcagtgttttctgatattgttgttatgcagtgttkgtctgtacttagcatttggtatttatgagaaaggaaatggctccagcaggtgtgctcacctgcaaggcagaggcgaagggccaggagactgcagggctgacacaggtgggacagggactgcaatgctgcccaatctgtgctcgctccctccctgtcctgctctgttgtctcccgggctgagaaatggagacttgacatgacatgcctcaaggagtatctttgggaaggcaaaagtgttgtaaaactggaaggtttcttgcaaagtgttttcctcctgaatgtgggaataagcagatgaac

SEQ ID NO: 91282 - DNA, 600 bp, Chicken  19866894400391_1
tatattggtcgccttaatgtaggccaagggctaaatcaatgtttacccaaggcagtgaaaagactcagaagcatgtttctacaaactttgctgtttccaagtttcagagctgctgaatgggttctggtaaaacataaaaaagagccttagtgaaactctaaaatgcagtagggctgaaaatagcatttctctgggcttgaggcaaaaagtgtcaccagctgaagctattctccagccacccctctcactgaagcaggagcacaagttatgcatttcatcaggtgattcattagtgctccracaattgatgcttaagcaattattaaattaggaagaagaaatgactcctactatgatataaagctcacaacagtgaagttactggtgtgaaattacagctttctctaagcacagccaactatatatttacgtttttgtatgcacattattccatttaaaaggtttaagtgctgaataacaagcaatgaggcaatgggctgtaagggggttggactaaatgaccttcaaggacccacttccaacccaaatcattctataattctgtgatgcaaaagtcccacaaatgtaacttgcatcaac

SEQ ID NO: 91283 - DNA, 600 bp, Chicken  19866894400398_1
gtgctaatttacatcctctggactttcctagagaattatccttccccactcacatttacaacattgtaattcttacagactgcgtatggtatctctccttaaatattgcttaaattgtataggtgtagtccagtcatttttctttggaagacactcctgtcagatctctaattcatttaaattctttacaagaagcatcctcttcacttttctactaccggagtgttttaatatgaaccctgagctgggtcaaacattggattcaaacccagtgaacaaagaaagaaagaagagaaacaygcagatcagagtgactggatctgttttcccaaggacaacaggtagttggacagaaatttcctcactaaaataaaatttattttcatatggctaaaatgcaagtttgcattttgatgaagagagagcctggccatgtttctagagtaggatcttgtttcctgaaaatcggtgcattgaaaagaaaggatttctcctatacttcccttttgtgactaaggtagtttttcagcacttgcacagcagcgtgctggatgatgccaaagagtttgggtttgctcacgatagacttgagtcctgtgt

SEQ ID NO: 91284 - DNA, 599 bp, Chicken  19866894400409_1
  misc_feature (1)..(76): n is any nucleotide
nnnnnnnnnnnnnnnnnnnnnnnnnnnnnnnnnnnnnnnnnnnnnnnnnnnnnnnnnnnnnnnnnnnnnnnnnnnncataacaaatgtaaaaagcatgcagctttttctgcagctctcctgagatgattctgtggtgttctaggatatgaaaatattccgccccattcttggacagcatggaatatatcatcaaatgtataaatgtgacatctttcagcagaattagtaattgatgacttgtagtatcatacaagaacagctgctatataacacagtcttgcagttagaaagcactctayaggagggaagccttcaaaatacaaacsttttacttgtcatcatctgcagaatactggacatccacaacwtgcaaatgtccaggttataaacttgcaggttgcattaacatggcagttaaatttactactatgaaagctgcacttgtaaaatatttatgaatacatgtggttgtcactgcaaagaaactgcactgtcagctcagcctctttccctgattgtttcctctccttgtcttctctctggattgtgttccatgaaattcaaaccatgagccttcagaaataccccactgagagga

SEQ ID NO: 91285 - DNA, 599 bp, Chicken  19866894400409_2
  misc_feature (1)..(49): n is any nucleotide
nnnnnnnnnnnnnnnnnnnnnnnnnnnnnnnnnnnnnnnnnnnnnnnnncataacaaatgtaaaaagcatgcagctttttctgcagctctcctgagatgattctgtggtgttctaggatatgaaaatattccgccccattcttggacagcatggaatatatcatcaaatgtataaatgtgacatctttcagcagaattagtaattgatgacttgtagtatcatacaagaacagctgctatataacacagtcttgcagttagaaagcactctayaggagggaagccttcaaaatacaaacsttttacttgtcatcatctgcagaatactggacatccacaacwtgcaaatgtccaggttataaacttgcaggttgcattaacatggcagttaaatttactactatgaaagctgcacttgtaaaatatttatgaatacatgtggttgtcactgcaaagaaactgcactgtcagctcagcctctttccctgattgtttcctctccttgtcttctctctggattgtgttccatgaaattcaaaccatgagccttcagaaataccccactgagaggagctacactggaaagaaataaagaactg

SEQ ID NO: 91286 - DNA, 599 bp, Chicken  19866894400409_3
  misc_feature (1)..(7): n is any nucleotide
nnnnnnncataacaaatgtaaaaagcatgcagctttttctgcagctctcctgagatgattctgtggtgttctaggatatgaaaatattccgccccattcttggacagcatggaatatatcatcaaatgtataaatgtgacatctttcagcagaattagtaattgatgacttgtagtatcatacaagaacagctgctatataacacagtcttgcagttagaaagcactctayaggagggaagccttcaaaatacaaacsttttacttgtcatcatctgcagaatactggacatccacaacwtgcaaatgtccaggttataaacttgcaggttgcattaacatggcagttaaatttactactatgaaagctgcacttgtaaaatatttatgaatacatgtggttgtcactgcaaagaaactgcactgtcagctcagcctctttccctgattgtttcctctccttgtcttctctctggattgtgttccatgaaattcaaaccatgagccttcagaaataccccactgagaggagctacactggaaagaaataaagaactgcctccatggtatttggtgcaatcattgcattcacattttaat

SEQ ID NO: 91287 - DNA, 600 bp, Chicken  19866894400412_1
gactgcttattggcaaagagatgtaaaagttgtgtggctgtttctgccctttgggctctcacatgctgtgggagccaagacaacagatatcagttagcttgtgctggcttacaaaaacccgcatggtggtttgactttttcaaatttaagatggaacagtttggctggtgtatcttagcatttatttgaattgcccctgaaagtgtttattgagcagcgcttggaaaaatataagtcaaaaactgtagaacagtagagttgagttctcccatgcttccttatttggactcttatccctayattttatagtacagtttgtaatcacagttcacgtattattttgcaagcagaaaatagtttcctctgttcatcagttacaaaggaataagacaaagctgttttctccttaggctaaggggtggatgaaacctaagaggggtggtaagttctcttctcttaccctgcctataggtttttcagttggtgtggggtagaattggtggaatacagaatgattaaatatccagatagctctgaatttacaggcttttttttcttctgaatcaacagcattgtagtcttaacagtctttttatattg

SEQ ID NO: 91288 - DNA, 600 bp, Chicken  19866894400413_1
ctgttaacctgtcaaggtgacacacggggacatctctgagcctggatgcccctgaggcttcctgttattccacaatgccctctggaagacaaacgctatgttttaattaatcgggctcaaaaccaaaggaccagcagcaagtgccaccactgtcccacagggtggcagagcaggtctgggacacggggatagcgaggtggggtgatgtgggggacagcaagcggtggccctgctgtgctcccaggagccacactgcaggtgtgagaagctgcctggaggctgggcagcacggccggccckaatgtcagcatgcggcagggatgtagtggctgtcagctctgctctgtgctcgtttgcttagtgacygtgaccggcagcggctggacgcaggctccgttccgccccgtttggaggaggttggttttgtttgcagtcatctggctcatgaaaaatgcagccacccgttgcctcgtacacggaattggttttagctcagaatttgtaggttgggtgccaggaggggccagatccatcctcaggcagctcagtgtgaaggagtgaatgggttcctctcattgctgacctcaggacccccacctc

SEQ ID NO: 91289 - DNA, 600 bp, Chicken  19866894400413_2
attccacaatgccctctggaagacaaacgctatgttttaattaatcgggctcaaaaccaaaggaccagcagcaagtgccaccactgtcccacagggtggcagagcaggtctgggacacggggatagcgaggtggggtgatgtgggggacagcaagcggtggccctgctgtgctcccaggagccacactgcaggtgtgagaagctgcctggaggctgggcagcacggccggccckaatgtcagcatgcggcagggatgtagtggctgtcagctctgctctgtgctcgtttgcttagtgacygtgaccggcagcggctggacgcaggctccgttccgccccgtttggaggaggttggttttgtttgcagtcatctggctcatgaaaaatgcagccacccgttgcctcgtacacggaattggttttagctcagaatttgtaggttgggtgccaggaggggccagatccatcctcaggcagctcagtgtgaaggagtgaatgggttcctctcattgctgacctcaggacccccacctcttgtccttccctctgcctctgccctgccagagccaccagaggggacatggggacaaatcttggagg

SEQ ID NO: 91290 - DNA, 510 bp, Chicken  19866894400413_3
acccccacctcttgtccttccctctgcctctgccctgccagagccaccagaggggacatggggacaaatcttggagggtatacagggacaaatctcatgccttgtcccatttccatccccttccagagcaaagatgtgtgaaagtgccctcataaatggtacaaaagggatgggaagcactgctcatagccatgccaaccttgtcatgcatgagcgtgcgcacacccaatgtcaccccatgctgccacccgtctatgcctcatacccatcaacttaggaaagggctggcagcatcccagrgatacaggatataggctgttgaatgcatgcagcaagatgtagaaacgtgggatataggatgcaggatgatggaggcaaggcacaggatgtgggatgtgcagtgcaggatatagtatgcaggatgctgcatccaggatgcaaggtgcagcatatgggttgcagaatgcaggatgtgggatgcagaatacaggaaggtggtgcaggatgtag

SEQ ID NO: 91291 - DNA, 600 bp, Chicken  19866894400415_1
tcacatatagttaagccattgaagaaaaggttctgacaaaacccttgatgaaaaccaagtggtctaaaagataactcatatttcagtggaaaaagcgaacaggttattttagggaattcccaattcagagattaccgaattctgacaaaataaacactgaaaaagaagtgctctaaaaggtagttcatatttcatgagaagaacaaatgaaggttatccaaggaaactatcgatttggaagaattccactgaatgctaagcaagtcagagctgagcagcattcaggcacaatacagcagrgctgccctgtgcctcaggcactacatgggctgcaccttgaaggggaagactgcaacactggagcttagctcagcatccctgcaattattctgcatccataccaaacacataagcagctaagtccttgctgcagaagggcagcgggtacagacccctgcaaagtgggtgtcaggcagctgggctgagcacccactgcgatggccctaacgcctggtgtgtcccaccacacaaagcatggccttaccatgcccatgaacctcttctagcagctgagagaaacccgattaagtcatgtccatg

SEQ ID NO: 91292 - DNA, 600 bp, Chicken  19866894400420_1
tccagtccctggttgaggagacggccgcagtgtctgcctcccctgcagcaaagtcatttattaactgattaattagccagataaaatgagagcgaagcaattattactctaagcaagtcacctcgcagggagattaaaaagtggaataatgagcaaaaatggctgtgttgttcatgggggagcaatcccttcctgcagccccgtcctgctggcaccgtgtcccacctggggaagggacatctgaggctgtgggacccaacctggggaccattcccagacactggggttgtcaccctgcakccaggcaggatgggtaaagacaccttggtgtcacatgcgcccatttgcccactgggaaaggcagtgcacatcaccaacacatcccaggattgctcccatgtgctgtaggatgctgcctgtctggtgtgatggggggttttggggatcctattgagagatataggggtctgtgaggtcctaagggggtcctggatgtggtatgggggttgtatggaggaattatgatggtctctggggattcttgggagggatatgagggtcctattgatgactatcgggctctgtgaggtcctagcatgg

SEQ ID NO: 91293 - DNA, 600 bp, Chicken  19866894400426_1
cctaatactctacctgttagatagcagtaacgacactttgagatggataaagtatttggtaggtgttattagcttttttttcttttttttaacatagcagtcataaaagctgccaggtctagagaagtgggtttattcctccaaaccttttgtaaacttgctaggtagttgtacggatccctgctgagtgtgtataacctaaaatacttatcttgatgctctccctgaatgtagagtccagtattatttttactcttgttcagaagagacagagtaagggacttgctcagtgttacttayggggatcgaagcagatttccctatgctaattgtaacagtgtgaggtggcaatcactttctcacacgttcttgcagagtgcatcatcatcatttatcaagatgaaagaatagtgcagcctctcaaatctattgtatgtcatctctgcagagcatagtgtcttctgtgctacattcacagatgttgtgactttcaaataccagccacagcgccttgtctttctatcatgttttgaataacttagaggttgtagaaacacattgaaaatcttgacttatktatcttacaaacactgaaagggt

SEQ ID NO: 91294 - DNA, 600 bp, Chicken  19866894400426_2
gggacttgctcagtgttacttayggggatcgaagcagatttccctatgctaattgtaacagtgtgaggtggcaatcactttctcacacgttcttgcagagtgcatcatcatcatttatcaagatgaaagaatagtgcagcctctcaaatctattgtatgtcatctctgcagagcatagtgtcttctgtgctacattcacagatgttgtgactttcaaataccagccacagcgccttgtctttctatcatgttttgaataacttagaggttgtagaaacacattgaaaatcttgacttatktatcttacaaacactgaaagggtcaccggtcattctcttttgcgcattcaggaaaattttaaggagtacctggtgatcagagggctaattctgtttaagtaaaactgattgtgaggtcatactatccataagaaatactgtgataatagaacatctctctggctgctgagaaaggaggaggtacttgatttaaccaggtaactgtggctgaatgcctcacctctgggtacatcagaaaccttaccatctttctgtagttagcaaaaataaaaataactttcttccttctgtatgttctgt

SEQ ID NO: 91295 - DNA, 600 bp, Chicken  19866894400426_3
cttacaaacactgaaagggtcaccggtcattctcttttgcgcattcaggaaaattttaaggagtacctggtgatcagagggctaattctgtttaagtaaaactgattgtgaggtcatactatccataagaaatactgtgataatagaacatctctctggctgctgagaaaggaggaggtacttgatttaaccaggtaactgtggctgaatgcctcacctctgggtacatcagaaaccttaccatctttctgtagttagcaaaaataaaaataactttcttccttctgtatgttctgttaycattcagtttcttcaaaagcaattgatcaggcaggcatttgtgcattagtcttctccgtcagctttcttcaactgctcagagagcactggaagacattcattaaaaccagaaggactagagatgtattttttagatttggcagaagctgatagcagttgcttgggaaaacatcttacttgcaacagatttttcaagccctctccatggctagataaacatctaagcatttggtgtcttacagatgtattctatagcaaaacaaaacaaaattaacttcaaatagttacggctaaggctaa

SEQ ID NO: 91296 - DNA, 600 bp, Chicken  19866894400435_1
agatgcactttgatttgtacagtctcatctctcttggttctattctcatcccccacttctccttcattccctttgcttcagcaaaccttcaattcccagccatcattatcttcttcccactctccttgcttttgcaattctttcatacctagaatatccccatatggatctgttctacaacacatccctttgagctgtttccttaagacctcagattagtttttgctgaagaactgcagtacagagctatcttcacctttcctcttgagaagaagtagacccaacaaattaccaaacaawaaattccgtagcaaatccaggactcatgaaatcyagcatacattggtctctgtgtcactgatttctttagaaagaaagatgtgctcacaaaatcctaaagctcctgtacatacctgtcaagtactaaagagacttggagctgatatgtcyaaaaataagtgaaaaaattatgttcattgcaaaatgacatcatcaaaagagaattcttccctatattgtgcggcatttggctgaaaatgaaatctgcagacttccagttggttcatgacaattaccaattccctttatttcataaaaacc

SEQ ID NO: 91297 - DNA, 600 bp, Chicken  19866894400435_2
tggttctattctcatcccccacttctccttcattccctttgcttcagcaaaccttcaattcccagccatcattatcttcttcccactctccttgcttttgcaattctttcatacctagaatatccccatatggatctgttctacaacacatccctttgagctgtttccttaagacctcagattagtttttgctgaagaactgcagtacagagctatcttcacctttcctcttgagaagaagtagacccaacaaattaccaaacaawaaattccgtagcaaatccaggactcatgaaatcyagcatacattggtctctgtgtcactgatttctttagaaagaaagatgtgctcacaaaatcctaaagctcctgtacatacctgtcaagtactaaagagacttggagctgatatgtcyaaaaataagtgaaaaaattatgttcattgcaaaatgacatcatcaaaagagaattcttccctatattgtgcggcatttggctgaaaatgaaatctgcagacttccagttggttcatgacaattaccaattccctttatttcataaaaacctattatgtgaaggaccttgatgttttcagtgtca

SEQ ID NO: 91298 - DNA, 600 bp, Chicken  19866894400435_3
agaatatccccatatggatctgttctacaacacatccctttgagctgtttccttaagacctcagattagtttttgctgaagaactgcagtacagagctatcttcacctttcctcttgagaagaagtagacccaacaaattaccaaacaawaaattccgtagcaaatccaggactcatgaaatcyagcatacattggtctctgtgtcactgatttctttagaaagaaagatgtgctcacaaaatcctaaagctcctgtacatacctgtcaagtactaaagagacttggagctgatatgtcyaaaaataagtgaaaaaattatgttcattgcaaaatgacatcatcaaaagagaattcttccctatattgtgcggcatttggctgaaaatgaaatctgcagacttccagttggttcatgacaattaccaattccctttatttcataaaaacctattatgtgaaggaccttgatgttttcagtgtcatttaaacaaaactggcctatgttataattaaactttgatcaaatttttaatgggatctcagaggaaaacagtatttgactaaaagaggcattcttctgcatgtattaatcaagtga

SEQ ID NO: 91299 - DNA, 537 bp, Chicken  19866894400446_1
gctgtgaataagccaaaccatcccatcctactgtgattaaaaactccttcttgggcaggggaacaggcagccaggcactgagcagctgaactctgcccctgcaaggaggagagcaaagcactaaccactgagccagccccgtttgccaggagttttatagggaaggaacttttacaattaaatacagcaaaaggtttcttccactgtgagcctctgaacacgggttgaaagaagcagagttgaacatggaagccaagtttaaaagaaaaatcttgatctgaaggttgtaggctcaaagtrgmtagaaaccccatcaagtgactgaatgggaacagcragaggcgggcaaagaccacagctcctccccgggtaaaggatgaagctgtaatgtggagcagactgacctagttacatatttcttctcctctcttcctccctctcgctgctgcagtttccaggctgatgttgcaaagcgaactgcaaataaagtttctgccttacragtgcagcaaagggaaatggggagctctgtggggt

SEQ ID NO: 91300 - DNA, 535 bp, Chicken  19866894400446_2
tgtgaataagccaaaccatcccatcctactgtgattaaaaactccttcttgggcaggggaacaggcagccaggcactgagcagctgaactctgcccctgcaaggaggagagcaaagcactaaccactgagccagccccgtttgccaggagttttatagggaaggaacttttacaattaaatacagcaaaaggtttcttccactgtgagcctctgaacacgggttgaaagaagcagagttgaacatggaagccaagtttaaaagaaaaatcttgatctgaaggttgtaggctcaaagtrgmtagaaaccccatcaagtgactgaatgggaacagcragaggcgggcaaagaccacagctcctccccgggtaaaggatgaagctgtaatgtggagcagactgacctagttacatatttcttctcctctcttcctccctctcgctgctgcagtttccaggctgatgttgcaaagcgaactgcaaataaagtttctgccttacragtgcagcaaagggaaatggggagctctgtggggt

SEQ ID NO: 91301 - DNA, 500 bp, Chicken  19866894400446_3
taaaaactccttcttgggcaggggaacaggcagccaggcactgagcagctgaactctgcccctgcaaggaggagagcaaagcactaaccactgagccagccccgtttgccaggagttttatagggaaggaacttttacaattaaatacagcaaaaggtttcttccactgtgagcctctgaacacgggttgaaagaagcagagttgaacatggaagccaagtttaaaagaaaaatcttgatctgaaggttgtaggctcaaagtrgmtagaaaccccatcaagtgactgaatgggaacagcragaggcgggcaaagaccacagctcctccccgggtaaaggatgaagctgtaatgtggagcagactgacctagttacatatttcttctcctctcttcctccctctcgctgctgcagtttccaggctgatgttgcaaagcgaactgcaaataaagtttctgccttacragtgcagcaaagggaaatggggagctctgtggggt

SEQ ID NO: 91302 - DNA, 335 bp, Chicken  19866894400446_4
actgtgagcctctgaacacgggttgaaagaagcagagttgaacatggaagccaagtttaaaagaaaaatcttgatctgaaggttgtaggctcaaagtrgmtagaaaccccatcaagtgactgaatgggaacagcragaggcgggcaaagaccacagctcctccccgggtaaaggatgaagctgtaatgtggagcagactgacctagttacatatttcttctcctctcttcctccctctcgctgctgcagtttccaggctgatgttgcaaagcgaactgcaaataaagtttctgccttacragtgcagcaaagggaaatggggagctctgtggggt

SEQ ID NO: 91303 - DNA, 599 bp, Chicken  19866894400447_1
  misc_feature (1)..(21): n is any nucleotide
nnnnnnnnnnnnnnnnnnnnnatgagtgtggggtttgggttttttttgttgttgttgttgggtttgttttcttttgttttccttggactgtgttgttgaaactgttttgctgaaatagatgccagtaccagattattgtatatgttatttatgctttggtgttggctagacagcttgacttggattaggctgtattgtacaaggcactatataaacatttgttaagtcagcctcagaagagtctgcaatcccataaattaaataagtttaccaacatacatatattgaatataacatacrtatatcgaaacaaagacatttagcaaagtatttgtgttagctttcatttattacactgttgttggctcttcagtgagtttaaacagtgcgtatcttaaagggggaaaaaatgcaatagtctgcttgctgcggtattatctttaatagtggtatttcatttagctgttttgacacatgacttttaaaatctgtctgagtgattcatgcaaaagttatgaagttagttaagtagaacctctccagcctgtgttcactggtagctgcttagggtagaggtaggcgtatcaaagctgggagtt

SEQ ID NO: 91304 - DNA, 599 bp, Chicken  19866894400448_1
  misc_feature (1)..(1): n is any nucleotide
nttcagtttcctatttaggaaaaataatctattcactgtatttttgtgtattttttaatttttgtttgtattcatcttatttggtggaattcaccttatttggcataatattgttatccctttgtatcaaagttattaaaagttatgtatataaagaaccttacattaatttctatataatttctgtttttatctctgtaagtgaatcaaggtgattatcagttattgtatataactggatgtttggcatacctacagcagctgagttaattcttatttttactaattccaggcaaattrattgttttcattcttgtttattgtggaaatgtcwtctttatctggaataattatttctgccatttgcgtgtaataatcaggttatcaagttcatgtgtacttctgaatgtagtatagacacgagttctctctgtgggtaaaactcatgctgtagtgccaggctaatgaagcagcgcagctgagaggtcttcagtgccctggtttgagaagagttggtaattagctggacctataataaatggamacaatcctagtcaatattctattttactttgtttcaaatgaagtgtaaagtatta

SEQ ID NO: 91305 - DNA, 600 bp, Chicken  19866894400448_2
actgtatttttgtgtattttttaatttttgtttgtattcatcttatttggtggaattcaccttatttggcataatattgttatccctttgtatcaaagttattaaaagttatgtatataaagaaccttacattaatttctatataatttctgtttttatctctgtaagtgaatcaaggtgattatcagttattgtatataactggatgtttggcatacctacagcagctgagttaattcttatttttactaattccaggcaaattrattgttttcattcttgtttattgtggaaatgtcwtctttatctggaataattatttctgccatttgcgtgtaataatcaggttatcaagttcatgtgtacttctgaatgtagtatagacacgagttctctctgtgggtaaaactcatgctgtagtgccaggctaatgaagcagcgcagctgagaggtcttcagtgccctggtttgagaagagttggtaattagctggacctataataaatggamacaatcctagtcaatattctattttactttgtttcaaatgaagtgtaaagtattatatatcctccccagccctccttctctgtgaaatgg

SEQ ID NO: 91306 - DNA, 600 bp, Chicken  19866894400448_3
tggcatacctacagcagctgagttaattcttatttttactaattccaggcaaattrattgttttcattcttgtttattgtggaaatgtcwtctttatctggaataattatttctgccatttgcgtgtaataatcaggttatcaagttcatgtgtacttctgaatgtagtatagacacgagttctctctgtgggtaaaactcatgctgtagtgccaggctaatgaagcagcgcagctgagaggtcttcagtgccctggtttgagaagagttggtaattagctggacctataataaatggamacaatcctagtcaatattctattttactttgtttcaaatgaagtgtaaagtattatatatcctccccagccctccttctctgtgaaatggttatttcctgctggactgtaatgaaactgtggtgttaaatgggtcaggtttggctaatgtataataagggggcatgagcacattgcggtggggcttgcaggcctcaaatgaaggtgcccaatgggcgtcactttggtggcctcctttggacgctgtgcacatgggaccttttggggaggataggtggcttgacaccgcaaaacctacagc

SEQ ID NO: 91307 - DNA, 600 bp, Chicken  19866894400450_1
gaacaaaagaaagtctggagttttgcaggctctgtctcaagcaaccagtgtttgcattgaaactcccagaaaagagaaaatccggacttgcaaaaacattgaacaaacacaggttctcttaaatgtgaacgtatgcacagaaatggtttcaaaaaaacagtgtactcgagatacatacgctacttctccttggtttctgatttctctcctcacagtcttcccaatagaacagcatgctatttttctttttaatttcctgagtgtagctattaactggagtaaaaataaataaataatcayggtgacaacatgtaatttcttgcaatgaaatcttcagatctcagttatttcacaagattaatctgaaggcttgcacgtctctgtcttcatctagatgggaagcaggacctaccaccggggctcctttcattttcctgctttttgctttttgaactaccacactcttctttcattttatttcattttttccttttcctgtagtagaaaaccctccttctgataaatccctttttttcctcctgagactctccagcagtctgtcagaagcccagcaaggaatagctcatttctgtcaagagc

SEQ ID NO: 91308 - DNA, 600 bp, Chicken  19866894400455_1
actagttcagaactaaatttcaggcattcatccaaattgaacccaaagcttaaaccttttgacatgagccttcctgtccacaccaagcatttgtgtaattaagattttctttttttaataaaagttttattattattattaaatctaccaaaatacctctatcaaacaagctggaaaagtacagagaagaggagatttttaatgttcagtgggagcccagagtcctccctaacttacataagtgaaggacaagcagtatcttctggaaagtttattcttctgtcatgatccaaactaatratgaagatgacttcacttgtcagaagcattgttccaaaagagggattatgtttctagtgacagagctggccatcccctgtgtgcacaggaccatgattttcttccaattccactgcaagcatcagttgctcttcccatcagccccaaaaagagggaaacctccccccctagccagcagcacccatgaggagcccacagcttatggatgaggctgcccaagcttcatgctgatgtctgaatgctgtgacagcacctggaagagggaggtaaaaatcaactctaagaattgcaagaaacagt

SEQ ID NO: 91309 - DNA, 600 bp, Chicken  19866894400468_1
atagaaaagaagccccggaattaaaagtttttatcagtttttatcacaccaatgggagagagaagggagggagcaggatgggtgggagatgtcatggtgggctggagtgtaattctggtggtggggcaagggattgagacagtactttgtcattatgctttcagtcataaaatgtatttttagtgggtcctatcctgttggcatgtggaggtgatgagattttgcacggcctctctgctcctattgacagcctgatgtttttatattgcaagggagcatttttgttcgagaagggaattwgatgggagtgggtgctaaaccatggggcattctgctcagtaagaactcatagagaacttctgatgatgaaaagagggaagaatgaataggggaggaggaagacgcagtgatgaaatatccaactagtttgtggtgatggaagaatccgctccaataggaaaatgcttgaaatgacagtaggcagggagcagctggagagcagcaggcagcacaagggagagcacatggggaaacggtgagagatggagcatgaagaggagcaattgaaatcgagtgacaagcagagaacacgatgccacc

SEQ ID NO: 91310 - DNA, 600 bp, Chicken  19866894400468_2
agagcagcaggcagcacaagggagagcacatggggaaacggtgagagatggagcatgaagaggagcaattgaaatcgagtgacaagcagagaacacgatgccaccgaagctgttggtgtacagttgttgttttggtttggcccttctctttggctgctccacacaagataggtccaggagtgggcactgggatacagtggctgtgctttcctgtaaaatatctattttaacgccttacgggcaaataccaaacttggtgtctggccaactgtgttgagaaagggaacgctgaaggacagkgttttattgatcacgttaagtttaacaatattggaaggacttataagtagctctgtggttctgcagtgtcgtgtacctcttcccaaagcagtgccacatgaaatggagaaaggttgaagggttactgcagggcatctgagcagcacaggagccgtttgcaggcttccatcagttggtgcttgtcagtaatttcttttttctgttttcattctcccaaatcagagggaatagaattactaaaggaagctgcaagtggtttaataaccctagatgcaaactgctgtgaaataataatgcatt

SEQ ID NO: 91311 - DNA, 566 bp, Chicken  19866894400468_3
gttctgcagtgtcgtgtacctcttcccaaagcagtgccacatgaaatggagaaaggttgaagggttactgcagggcatctgagcagcacaggagccgtttgcaggcttccatcagttggtgcttgtcagtaatttcttttttctgttttcattctcccaaatcagagggaatagaattactaaaggaagctgcaagtggtttaataaccctagatgcaaactgctgtgaaataataatgcatttttatcatgaaaaggaaaatatttagtgataaaggcagcgtcattttttataggtartaggagtaatarcgatattgtaagtcctgttgtcattagcagtcacctgcaactcygtgactgcaagcagtgctatatgagagaagagattagtgccttgcctgtgctacttatttgacaggaccaaaaatatctgcttaaaatcacacagtttgaatacaagtttcagtcctttaaactgatgtgtagaagatgacccatcctacatagatgctaatttcagagctggttggttttaattacagaagcagtacacgttctgttgg

SEQ ID NO: 91312 - DNA, 554 bp, Chicken  19866894400468_4
cgtgtacctcttcccaaagcagtgccacatgaaatggagaaaggttgaagggttactgcagggcatctgagcagcacaggagccgtttgcaggcttccatcagttggtgcttgtcagtaatttcttttttctgttttcattctcccaaatcagagggaatagaattactaaaggaagctgcaagtggtttaataaccctagatgcaaactgctgtgaaataataatgcatttttatcatgaaaaggaaaatatttagtgataaaggcagcgtcattttttataggtartaggagtaatarcgatattgtaagtcctgttgtcattagcagtcacctgcaactcygtgactgcaagcagtgctatatgagagaagagattagtgccttgcctgtgctacttatttgacaggaccaaaaatatctgcttaaaatcacacagtttgaatacaagtttcagtcctttaaactgatgtgtagaagatgacccatcctacatagatgctaatttcagagctggttggttttaattacagaagcagtacacgttctgttgg

SEQ ID NO: 91313 - DNA, 510 bp, Chicken  19866894400468_5
ttgaagggttactgcagggcatctgagcagcacaggagccgtttgcaggcttccatcagttggtgcttgtcagtaatttcttttttctgttttcattctcccaaatcagagggaatagaattactaaaggaagctgcaagtggtttaataaccctagatgcaaactgctgtgaaataataatgcatttttatcatgaaaaggaaaatatttagtgataaaggcagcgtcattttttataggtartaggagtaatarcgatattgtaagtcctgttgtcattagcagtcacctgcaactcygtgactgcaagcagtgctatatgagagaagagattagtgccttgcctgtgctacttatttgacaggaccaaaaatatctgcttaaaatcacacagtttgaatacaagtttcagtcctttaaactgatgtgtagaagatgacccatcctacatagatgctaatttcagagctggttggttttaattacagaagcagtacacgttctgttgg

SEQ ID NO: 91314 - DNA, 600 bp, Chicken  19866894400482_1
acaaattagttaaaggattcctgcattttattaactagcaggactgatttataaatctctttgaaatttgatacaaatgttgtaaggataggcatttgacaattctgaggacaaagcagagcagattgtgtcctgtgctggtgcagagggtaagtgtagctgtaggactcccgatacagtcctcagtgaagttagctgttggtcctctgtttgagatcagtggatcctgaatggggattaacatggcaatcatgtgttttcaggttatgggaatgatattcctcagagaacactgaaaawccccagtgcttatgaatccttagttagaagcatctcataattatcaaaagtagtgtaaaattgtgtgaaggcaaactgttcacttgatttacatagatattagaagatattcatawacataatttcaacttccaactagaagaacgatgaatctagttcacttcaaaacatgaattctccaaagaattttactctttttttttctctcttgcatattgtttgtcaggcagacttccattttcctcagtgccgtcacagtctgtagtttgaccaggaactttcatccttattcatttgtgg

SEQ ID NO: 91315 - DNA, 600 bp, Chicken  19866894400482_2
cagagcagattgtgtcctgtgctggtgcagagggtaagtgtagctgtaggactcccgatacagtcctcagtgaagttagctgttggtcctctgtttgagatcagtggatcctgaatggggattaacatggcaatcatgtgttttcaggttatgggaatgatattcctcagagaacactgaaaawccccagtgcttatgaatccttagttagaagcatctcataattatcaaaagtagtgtaaaattgtgtgaaggcaaactgttcacttgatttacatagatattagaagatattcatawacataatttcaacttccaactagaagaacgatgaatctagttcacttcaaaacatgaattctccaaagaattttactctttttttttctctcttgcatattgtttgtcaggcagacttccattttcctcagtgccgtcacagtctgtagtttgaccaggaactttcatccttattcatttgtggctgtgtgtatttgtaaaggctggtagcttcccacacatttattcaaacaaaactcatccgggcaacaagaactaggcatgaaaattgtgaaagtcattggaaatctgaggtagatg

SEQ ID NO: 91316 - DNA, 599 bp, Chicken  19866894400488_1
  misc_feature (1)..(24): n is any nucleotide
nnnnnnnnnnnnnnnnnnnnnnnnaattaccacggaatggagacgaacttctcccaaacgtataaaggagaacttctgtcacccccagcagagaagctgaggatcctgtactctcatttctcctcctgttttacagccttccccatctgctctcatctttactctctgaagcatcactatgagccaccacttcttcagatttggcgatgggaatttcagttcttcttctgctcactgtggcacactggggagtgggagaggctcctctgccatgagccattgggaagatgatggaggacmaagattcggtggttatggctatgggtatgggcatgggtacggcagcaggagcctccacaacctcagtgggtttaggaacttttctactggtggaatctacggaggagatggagggtggtatggaaggcatggggggtattatgatgggagatacctggacagggacttagggagaagggtgtattttgtgggggaytttcaaggtggggcaggtaggatgtatggaggaggctcaagcaggggaatgctcagtggaggccttcgtgagcaaggggctgggcagggctcggsgcaccctg

SEQ ID NO: 91317 - DNA, 600 bp, Chicken  19866894400488_2
agatttggcgatgggaatttcagttcttcttctgctcactgtggcacactggggagtgggagaggctcctctgccatgagccattgggaagatgatggaggacmaagattcggtggttatggctatgggtatgggcatgggtacggcagcaggagcctccacaacctcagtgggtttaggaacttttctactggtggaatctacggaggagatggagggtggtatggaaggcatggggggtattatgatgggagatacctggacagggacttagggagaagggtgtattttgtgggggaytttcaaggtggggcaggtaggatgtatggaggaggctcaagcaggggaatgctcagtggaggccttcgtgagcaaggggctgggcagggctcggsgcaccctgctgctggtggaggtatcgaggaggtccatgtcaacaccaacctgctgaggccaatacaagtgcaagttgaccccgagttccagagaatgcggtcagatgagaaagagcagattaagacactcaacagcaaatttgcgtcattcatcgataaggtgagtccctgttctttcttcacttatcatgaagtgggaaatgcc

SEQ ID NO: 91318 - DNA, 600 bp, Chicken  19866894400488_3
tggaggacmaagattcggtggttatggctatgggtatgggcatgggtacggcagcaggagcctccacaacctcagtgggtttaggaacttttctactggtggaatctacggaggagatggagggtggtatggaaggcatggggggtattatgatgggagatacctggacagggacttagggagaagggtgtattttgtgggggaytttcaaggtggggcaggtaggatgtatggaggaggctcaagcaggggaatgctcagtggaggccttcgtgagcaaggggctgggcagggctcggsgcaccctgctgctggtggaggtatcgaggaggtccatgtcaacaccaacctgctgaggccaatacaagtgcaagttgaccccgagttccagagaatgcggtcagatgagaaagagcagattaagacactcaacagcaaatttgcgtcattcatcgataaggtgagtccctgttctttcttcacttatcatgaagtgggaaatgccaggggtacttcttagaggttcagccaatgcatctgatcctcccctacatctcatcttctgccccaaaatcacagtgctggctggattcccttctg

SEQ ID NO: 91319 - DNA, 600 bp, Chicken  19866894400488_4
gcaagagaaacaggtggtggatttggacattcttgagtattctgtttctttttctcaagccaagcaaaacgttgtgtttctcccaaccataaaatatggacttatctgcttggagatcttccagatgtcccccacatcgttctttacctctttctttggtctacattcagtacttccacctctgtgtgtgattttaccttctcagtcatccctacacacatgcacgggagaaaaacagcctgaaaaacacttccacccacgcagacttggcgtgtgcctttgtttgggtgttcacgtgtstctgtatagggtggaagctggtgtcacttgttacacatgaagacataagagcctcttgtattaccatacagaaaagatgtcggttacacccagctgttttaaccatgcttgatcctgaaaaatggggtcactttgactctttgttctttattttaaaccttttgcaggagagctgccagtgtatagccttgttcgttgtccctactagagagatgcaattcctctagctttccaaaaggtctttctggctgccttctctaagggaagatatgtttataaagagcattgtcccatgcaatc

SEQ ID NO: 91320 - DNA, 600 bp, Chicken  19866894400488_5
atgggaattgctgcagcagcaaagctcccggccggaggagagcagaagcatcacctccttcttccagtcctacatcaataacctgcagaggcagctggacatgctccagagccagaaagagcagctggatccagaagcctatgaaatgcttcagcttgttgaagattacaaaaagaggtgaatagtcactaaaccaggacaaggcttattgcagagctggagttttccaaggcagtggtatcatgctttgggatggcatggctttctggtcttcactcacgctgtagacttgacagcackgatctgtgataggcttatttggggcttttggagctgaagttaaaagaatgctcgacatgtccactgtttggatgattccctttggtttctgatccatttggctgaagaagtcagataggcaatgagctacctgtttcttctttctgctacagatttgaggacgaaatcaacaagcgtgcatctaaagaagaggaatatgtggagcttaaaaaggtgaagtaacacaagccactgggctaaaccaaagccttggaaataaaacagtaactggttggttgtagaggttttcagaagtaggga

SEQ ID NO: 91321 - DNA, 600 bp, Chicken  19866894400493_1
gtatttcaccagactgaacagtcagaacataacagaagctgggaggaggaagattagttgtcatctattaaaaaggaaagaaaagaaacgtgaccttaaaaaaggcattccaatttggtcggtcaggttttataataataccctaaatgaaccacacaatttgcatattaagagcgatgggaaaacaaaataatgactgtctgaagtagaagctgagatagcaaaacaatattcagaaattctaagtgaagtcagcttgcgtgtatcattctttccataatatgacattgatcctcatcrcaaaaacatctcatgatttggcactcttggcaaacactgcaactttttcaaggtgacagtggttgttttgcatttttttagtacgtggcacgggtgccctgattatttatttctcatcatccgtaacttttctgagatttggggacttctgcatgtgggtgggtttttgtgatagtaaacagctgaagaactttaaaagctgccaaattaaatgcaggacagcacaaggagataatgaagaacaggaactcagcaactgcaagaactgctctttttgtgctacgccagatttttcttctc

SEQ ID NO: 91322 - DNA, 600 bp, Chicken  19866894400493_2
taaatgcaggacagcacaaggagataatgaagaacaggaactcagcaactgcaagaactgctctttttgtgctacgccagatttttcttctccccttaaaagtattgtgacgtaacaactttatctccatttaaacaatgagaacggcttctgagaaataaaagatgctacactacagcaatttttatttaggacttggtaaatattctttatcgtatcgttacttaaatgtgctttcaaaaactgtgtaaaactatacttcttgtacaaggaaaaatgtatctcagctgaaaaaaaaamccctgcattctaacaaaaatttgcagaagtagaatacgtcttgataccctatagaatgaattggtattttaaacccatggcaaaagtgtaaattgcatgattatggaaagttttcttcacttccaggttgttaataaaacagagaaaaagaagaacaaatgaaaatcataacaatgctraagaatatttaaaagttttgctccatctgtgtgaatttccattctgttgtccacagtattttaacatacaaaacaatcctctcctctgagacttctgaaatgcgtggatgaaagggagaat

SEQ ID NO: 91323 - DNA, 600 bp, Chicken  19866894400493_3
aatttttatttaggacttggtaaatattctttatcgtatcgttacttaaatgtgctttcaaaaactgtgtaaaactatacttcttgtacaaggaaaaatgtatctcagctgaaaaaaaaamccctgcattctaacaaaaatttgcagaagtagaatacgtcttgataccctatagaatgaattggtattttaaacccatggcaaaagtgtaaattgcatgattatggaaagttttcttcacttccaggttgttaataaaacagagaaaaagaagaacaaatgaaaatcataacaatgctraagaatatttaaaagttttgctccatctgtgtgaatttccattctgttgtccacagtattttaacatacaaaacaatcctctcctctgagacttctgaaatgcgtggatgaaagggagaatcaaagcaagaatggtagtttcactcattttcagtcttggttttataaccaagttctgaactttctattattcaaaataaatccctgtacaatcccaataactctgtagattgcagcaaaaagaatcccagagttgagaaatarctaggaataactaggaatatccatctacaaagtcct

SEQ ID NO: 91324 - DNA, 600 bp, Chicken  19866894400493_4
gaaaaagaagaacaaatgaaaatcataacaatgctraagaatatttaaaagttttgctccatctgtgtgaatttccattctgttgtccacagtattttaacatacaaaacaatcctctcctctgagacttctgaaatgcgtggatgaaagggagaatcaaagcaagaatggtagtttcactcattttcagtcttggttttataaccaagttctgaactttctattattcaaaataaatccctgtacaatcccaataactctgtagattgcagcaaaaagaatcccagagttgagaaatarctaggaataactaggaatatccatctacaaagtcctctgtctttaaaacttgtttatttccagatttttcttcctagactctaaaatagatttttaataccataaacctcttccccaaagaacagctttagagggacaccaagacagcacaagcacttggttaccgagattctcaaacgacctggtcatttcagatgccactccatttgacagagctccttttcaaatagaaaagctaattaaatgaaaattgaagatgcaattttggattggaaaatgtacaataatatacttcaaaat

SEQ ID NO: 91325 - DNA, 600 bp, Chicken  19866894400493_5
acaataatatacttcaaaatctattttagtacttcatgctaggaattttcaccacctcccaaaatcacagcaactttcattatttttagtaggcaatttttgtttttatgtttcgactgccttcacaacaggacaactgtcagcctgaaccatcctaactgacaagagacaccattccatcagttggtctgtcttcacggggactaatcttcagaaaagtgttttccaatataaggctgaaaagttcttcaaaagagtgagttaatgttgtatgtagatttctcacatagtgtgagccasctcstatcttttcctcctgcgaggagaggaaaggaaaggaataaatcgactagatactctctcatcttagtcctagagggttaataaaaggttaattgcatcattttggaaagaagctgctgatccagagagcctcaggttggcctaagacagatggtagaagccacaaaacaaacctcagtagataaaaagagaacctctttccccaaacatgttacgctactaagaaaaacagtaattgtagtgaaaaagtacatttccataataacaagacttaccatttcagggtcttgactttgt

SEQ ID NO: 91326 - DNA, 600 bp, Chicken  19866894400493_6
taatatacttcaaaatctattttagtacttcatgctaggaattttcaccacctcccaaaatcacagcaactttcattatttttagtaggcaatttttgtttttatgtttcgactgccttcacaacaggacaactgtcagcctgaaccatcctaactgacaagagacaccattccatcagttggtctgtcttcacggggactaatcttcagaaaagtgttttccaatataaggctgaaaagttcttcaaaagagtgagttaatgttgtatgtagatttctcacatagtgtgagccasctcstatcttttcctcctgcgaggagaggaaaggaaaggaataaatcgactagatactctctcatcttagtcctagagggttaataaaaggttaattgcatcattttggaaagaagctgctgatccagagagcctcaggttggcctaagacagatggtagaagccacaaaacaaacctcagtagataaaaagagaacctctttccccaaacatgttacgctactaagaaaaacagtaattgtagtgaaaaagtacatttccataataacaagacttaccatttcagggtcttgactttgtccag

SEQ ID NO: 91327 - DNA, 600 bp, Chicken  19866894400496_1
tgaggacttccttctatttaaagactttatgaccactctatttacaatacttaaattgtcttatactcttttgttatctatgcatgtctgtgagatttagatttcttccgtagtaaacttttcacggaagagtattcttaactgtaaagaagaatcccaagattctttacagatctttctgtaaaggtaatttgccatggcctgtcacagcatcacagaatggttgaggttggcagtgacttctggaggttgtctggtccaacagctgctccagcaggggcacctagagcagagcatgcrggaccacatccaggtggcatcagtagtagattctgcagcttcagtaatatgcaagattctcaagaaattatataggtgtacgttttggtgtagtgcgcatggaacatccatacaaagtattttgtgtggttttgataaaactctgtttttattttcttgaagtttattgaaaggcattaaaacagctctccctgcctctcactgatgaatggaggattgtgggacctttgtcattatgtgagttttctggtttctgcacatctgtaaaactcaaatatatctcttctctagagttgtcag

SEQ ID NO: 91328 - DNA, 600 bp, Chicken  19866894400499_1
aaagaaacttccctctgctggggactcctacaaggcccgtaaaagtttattaaggaaatgccgtaaggcatcgcgcaggaatttcagttcattacattattattatttttttttaatggtagcattaaagttatccatattttgtgagtaaataacagcgtgatttcaagacagctcccctctcctttctctctttttctaaaatggtgcaaatccgctttgcctctgccacgacatacaggacagaggtgaggagacaagtaccagcctcacggttagtccgtgtgcgcaggagaatasgttaaaacctacaattaattaaaacctccagttaataaaaatgccaattcgaataaatattatttgctacggttatttttggttgttgggtttggtgttttttcccaactttgttttactggagcagggaagcacacacacaaaccttgcctgcagtagatgctgctttctttttttttttttttaaacggagcccagatgctggtcaggattaaggttacaccaaacacattctacattgccattttccaaacagaatgaagcagatggaaaagatggaagaggatcgcacaggaacgg

SEQ ID NO: 91329 - DNA, 600 bp, Chicken  19866894400499_2
aagaggatcgcacaggaacggagcagtactgagagcggcaagcgctgcactacggctgtagaggagggagctcggatgccaggagagccagaaagaaacctggcgtgtcagctttacacattgcatttctcgcttttgaaataactatttcagtttaacacctgtcaggatttctgcattaagcctcgtgtttaaaatagagaaagaaaattcggacgcacagttctctgtgtgctcctcagggctcagtcctacaagatgcacagcccattggccccgggccgccagagtgcttcagtrgatgtgcgattttaaacagcagcagtccctgggatttcaagcatatactcccttaaagttaaccacgtactcagcactttgcaggatccgcccctaacactcatagcagctcctcgctcgagaaaacgagtatctatgcattgagaacacaaagaaaatcatcttctgaaaagagcagaagatttctggtttctaaagacagtagttcatctgtggcagggactcagatcacagagaactaagatctcgaggggaggttcgctgaatctctgctcattggtaaaataccccgactgggca

SEQ ID NO: 91330 - DNA, 600 bp, Chicken  19866894400499_3
tccattccgtcaccttgctcagtggtacatgacccaaaagtacagttcttagcttcacaagtacgtacctcagagaagtttactcgcccttagcctggcttcactagaacgtttggaactcattactggcgctgagaaacaaggtcattttttatctagctgttatctctgactttgagaaggcccacaatcaaaccttagcaatattacttcttcacaagggctgatactatcacaggcacctccagtaagacaaaggcgttggttaaagcagagcataccaagcagaaaaccatacarggtgatcaattgcgttcctgccttcggaattagatacctcagtgaaaggtgctccaaaaggtaacaagtgtaacaacacacattatgaaacaaagtgttcaaagcatcatttttctttctttcaggaaacacagttaagccctgctgctggaaaactcaggtcctggatggaatcgctgcaagcgtggcagtgttctccatgtcttcctccagattcactaccttcccactgtatcattttatttattttggctaatcttatactgtattttcttaaggattactttatacatatgtata

SEQ ID NO: 91331 - DNA, 599 bp, Chicken  19866894400512_1
  misc_feature (1)..(17): n is any nucleotide
nnnnnnnnnnnnnnnnntactccctgtagtagacacagcacgtcagtgtttttcccaggggtaaaacatctcattttaaatagcctggtcccttttcttcctgggaaacatgagctggaaacataaagctccttatgcatgatgagaaaaattaaaacttgttaagagatgtttcattattatttctttgttacaatccaggctggatgtggctctgggcagcctgatctggtggttggcgaccctacacatagcaggggcactggaactagatgatcattgtggtccttttcaacccargccattctatgattctacgatcaaatttaaaaaaacacaagtggttaagccataaataaagctgccaccattccagaactgtgaagatacacacctactcttaccaggtcccagcttttttccaaggctccactctggtgcctgcaggagctctgcagtgcagctcctgtatggcaaagcaaccaaggtagtaagcaaacacatcctaagatacatcttcagtgtaccaacgctcaagaaattaataaaaatcagactttgtagataaaaaagaaatataacaaaggaatgttttgcac

SEQ ID NO: 91332 - DNA, 600 bp, Chicken  19866894400514_1
taattctatgcctttctcagataaggaagatactgaagcaggtctggagtgcttcactccttcctgcaaaggctgggctccccagcaacacacaggaaaaacaaaatcttgttccttcatgctccgattgttggggagtatgactgagctctggctcttcaggcagcgcagacatctaatgcacagctgcttccaacagctttaatctgcaacattaggaactttttttggtatttgttgttgttgtttgtttttaccatggctttatgtttctaatatcagcagaaaataaccccaacycctctgcacacactacttctctattcatacagtcacctccrtatagaaaaccraacagctgagatagtcatctcttattctcatcaggtccgtctcagagcaatagaaggttggggagaaagtaaaggaaaaaaagaagaaaaaagattcaggagctactatcaactccatagaaatgcccagagaatggttcaatgagatctgctccttttagatgctgaacaacagtacctcaagtaagcaaacagccttcaactctgaaaacagtagttacagacacagataataattgtaacagaa

SEQ ID NO: 91333 - DNA, 600 bp, Chicken  19866894400514_2
gtctggagtgcttcactccttcctgcaaaggctgggctccccagcaacacacaggaaaaacaaaatcttgttccttcatgctccgattgttggggagtatgactgagctctggctcttcaggcagcgcagacatctaatgcacagctgcttccaacagctttaatctgcaacattaggaactttttttggtatttgttgttgttgtttgtttttaccatggctttatgtttctaatatcagcagaaaataaccccaacycctctgcacacactacttctctattcatacagtcacctccrtatagaaaaccraacagctgagatagtcatctcttattctcatcaggtccgtctcagagcaatagaaggttggggagaaagtaaaggaaaaaaagaagaaaaaagattcaggagctactatcaactccatagaaatgcccagagaatggttcaatgagatctgctccttttagatgctgaacaacagtacctcaagtaagcaaacagccttcaactctgaaaacagtagttacagacacagataataattgtaacagaaggttctgacctttggttagctcagacccctctgagtagtcc

SEQ ID NO: 91334 - DNA, 600 bp, Chicken  19866894400514_3
tcactccttcctgcaaaggctgggctccccagcaacacacaggaaaaacaaaatcttgttccttcatgctccgattgttggggagtatgactgagctctggctcttcaggcagcgcagacatctaatgcacagctgcttccaacagctttaatctgcaacattaggaactttttttggtatttgttgttgttgtttgtttttaccatggctttatgtttctaatatcagcagaaaataaccccaacycctctgcacacactacttctctattcatacagtcacctccrtatagaaaaccraacagctgagatagtcatctcttattctcatcaggtccgtctcagagcaatagaaggttggggagaaagtaaaggaaaaaaagaagaaaaaagattcaggagctactatcaactccatagaaatgcccagagaatggttcaatgagatctgctccttttagatgctgaacaacagtacctcaagtaagcaaacagccttcaactctgaaaacagtagttacagacacagataataattgtaacagaaggttctgacctttggttagctcagacccctctgagtagtcctaagacactgac

SEQ ID NO: 91335 - DNA, 600 bp, Chicken  19866894400524_1
aggttcttaatgaaaaatgtgcactcaaaagatacatatgagctttctacaatctagcatgagcaaagaagcagctattcatagaggcaaatgcccagcagcttatttgaaatactgttcctgctgatagcagtgcaatattcagaacagggagtttgtgtattgtacaaagcattttttatagttactatgtgatacggtaagaagaggtgcaaagaaaggcaatgagaggaaggcaaggacagcactgatgtggcttcatcagaataactgtaattacaaaagttttcagtactgtaygtatgggtgaaaagttccctgttgaatgcttgaaataaaccacctgcacccctggacatgctgacagcagtacactgcaggcaggatggtgtggggacacaatgccaatgctgtcactgtgatattcccttgatcaccacagctgcttcttctgctcttactcaycttgttccagttctgtaaggggaatcaaatcaccctaaatcatattcaaaactgggtccatagcaaagcaattagatcccagcagtagctttcttgactctagaaaattcaaagttaggtggctgcttcaccgct

SEQ ID NO: 91336 - DNA, 600 bp, Chicken  19866894400524_2
tacaaagcattttttatagttactatgtgatacggtaagaagaggtgcaaagaaaggcaatgagaggaaggcaaggacagcactgatgtggcttcatcagaataactgtaattacaaaagttttcagtactgtaygtatgggtgaaaagttccctgttgaatgcttgaaataaaccacctgcacccctggacatgctgacagcagtacactgcaggcaggatggtgtggggacacaatgccaatgctgtcactgtgatattcccttgatcaccacagctgcttcttctgctcttactcaycttgttccagttctgtaaggggaatcaaatcaccctaaatcatattcaaaactgggtccatagcaaagcaattagatcccagcagtagctttcttgactctagaaaattcaaagttaggtggctgcttcaccgctctcaggatcaacacagttctcatattcrggtttaaagatgccacagaatctttccagggaacacttgccttttttgtttgtttgtttttgtttttgtttttaacacttttcaaagaatgatagaatatcttgagttagaaggaacccatagaacccataaggatc

SEQ ID NO: 91337 - DNA, 600 bp, Chicken  19866894400524_3
cttgaaataaaccacctgcacccctggacatgctgacagcagtacactgcaggcaggatggtgtggggacacaatgccaatgctgtcactgtgatattcccttgatcaccacagctgcttcttctgctcttactcaycttgttccagttctgtaaggggaatcaaatcaccctaaatcatattcaaaactgggtccatagcaaagcaattagatcccagcagtagctttcttgactctagaaaattcaaagttaggtggctgcttcaccgctctcaggatcaacacagttctcatattcrggtttaaagatgccacagaatctttccagggaacacttgccttttttgtttgtttgtttttgtttttgtttttaacacttttcaaagaatgatagaatatcttgagttagaaggaacccatagaacccataaggatcatcaagtccaattcacaaaagaaacataattaagaaagcacaattggactttacttagtttttttcaagtaggtttcaaggaaaaacaagctaaagtatttttccaagtcctctggagcaacagagtcagaggagaccacactatgacattcccatatttctt

SEQ ID NO: 91338 - DNA, 600 bp, Chicken  19866894400524_4
gttagaaggaacccatagaacccataaggatcatcaagtccaattcacaaaagaaacataattaagaaagcacaattggactttacttagtttttttcaagtaggtttcaaggaaaaacaagctaaagtatttttccaagtcctctggagcaacagagtcagaggagaccacactatgacattcccatatttctttggtgcccgtacacctctaaaaatggggcaattaaaatgtttcctttcatgctgaaagaagcatttgtaatacgcagtggaaagcattccactgaagtgaatttscttcttttatgtgtgttaagaaagggtcacggtgttcttgtcaccaggtaccttggattgtcttagcagctaccaggagcctttgctgtattcagttcatgtggttttgtctctggtaagtcatgcaataagcaaacaatatgccaactaaataatgcactgtgaaataattttttcaaaataaatttaagttctttttttttttttctgtctgtccatgcactaagagtcctatatgctgcttccattaatgtagctacttatgccatgaaataccactgaaatcaatgggactattta

SEQ ID NO: 91339 - DNA, 599 bp, Chicken  19866894400526_1
  misc_feature (1)..(10): n is any nucleotide
nnnnnnnnnncagtggcacagtggcctcttcacaggttgttttactcgtaaagcgccaattttttcagggaaaggaaaagaaaatctttacaatagaatgcctgcgaactgcaaatatgatatggatagagaataaatgtcatctcagaaatgatgtgttcgtagacactgctttatggtcaaggtttttttgctgccactgcagatggcagacagctgccacttggcctgccctcacccttagagcaattccagaaacatggtgctggagtagctttgcttgaaacaacaaatgaaacraagcactagaaataattacctcaaaactaattctgatttcttatctgtatcaagatgtgttcacacttgtccataccagcagcactaaccagacacaaaacacaagtcgctgtggaagtatcagagagaacacaggcactcggagaggcaggctgagtacttgtgcgtrgtactggctctgtgatggcacaaggcacaggagtaccggggarwtttccaagctcatcgtcttcactccaaaatcaccaagctaccaacatcattatgccatgttttgtatatcacctgggcagtgtgga

SEQ ID NO: 91340 - DNA, 563 bp, Chicken  19866894400526_2
tgctttatggtcaaggtttttttgctgccactgcagatggcagacagctgccacttggcctgccctcacccttagagcaattccagaaacatggtgctggagtagctttgcttgaaacaacaaatgaaacraagcactagaaataattacctcaaaactaattctgatttcttatctgtatcaagatgtgttcacacttgtccataccagcagcactaaccagacacaaaacacaagtcgctgtggaagtatcagagagaacacaggcactcggagaggcaggctgagtacttgtgcgtrgtactggctctgtgatggcacaaggcacaggagtaccggggarwtttccaagctcatcgtcttcactccaaaatcaccaagctaccaacatcattatgccatgttttgtatatcacctgggcagtgtggatgccaaagctgaaagcagtggctcagaagggctgacgtccacacaggtgttgctggctgtgggtggttccatggacaccatggtgtggagagctctgccggcttgtacagggcttttgctatggtgtgcacta

SEQ ID NO: 91341 - DNA, 520 bp, Chicken  19866894400526_3
acagctgccacttggcctgccctcacccttagagcaattccagaaacatggtgctggagtagctttgcttgaaacaacaaatgaaacraagcactagaaataattacctcaaaactaattctgatttcttatctgtatcaagatgtgttcacacttgtccataccagcagcactaaccagacacaaaacacaagtcgctgtggaagtatcagagagaacacaggcactcggagaggcaggctgagtacttgtgcgtrgtactggctctgtgatggcacaaggcacaggagtaccggggarwtttccaagctcatcgtcttcactccaaaatcaccaagctaccaacatcattatgccatgttttgtatatcacctgggcagtgtggatgccaaagctgaaagcagtggctcagaagggctgacgtccacacaggtgttgctggctgtgggtggttccatggacaccatggtgtggagagctctgccggcttgtacagggcttttgctatggtgtgcacta

SEQ ID NO: 91342 - DNA, 519 bp, Chicken  19866894400526_4
cagctgccacttggcctgccctcacccttagagcaattccagaaacatggtgctggagtagctttgcttgaaacaacaaatgaaacraagcactagaaataattacctcaaaactaattctgatttcttatctgtatcaagatgtgttcacacttgtccataccagcagcactaaccagacacaaaacacaagtcgctgtggaagtatcagagagaacacaggcactcggagaggcaggctgagtacttgtgcgtrgtactggctctgtgatggcacaaggcacaggagtaccggggarwtttccaagctcatcgtcttcactccaaaatcaccaagctaccaacatcattatgccatgttttgtatatcacctgggcagtgtggatgccaaagctgaaagcagtggctcagaagggctgacgtccacacaggtgttgctggctgtgggtggttccatggacaccatggtgtggagagctctgccggcttgtacagggcttttgctatggtgtgcacta

SEQ ID NO: 91343 - DNA, 600 bp, Chicken  19866894400528_1
acaacctatatcttctcagatttttgctttcagctataacagaatgaggtagggatgctaagattctattcactgtattccgaaggtatttccggtgcttttggtaaacacgtgcatgcacagaatcctgcaagatacagcttaaaattaagtctaaggctttcctagtacacgtagtaaccatactgataatagttgtagtagcagaaaggctatcttttggctaagttaaaaaatctgagtaacatagaaaaattgccattttctctatagcaaagattgacctttcaggcaaaatgraagttttgaatagtagatgacagacaagtgaattgaagaatcattaaaataggcagagaaatgaaaaaaacaaacaaacccacatttaaaatgtgtgactcaggtacaggagcatattatttcatgttacacaaaatttgttttccataattgttgtagcatacattaagcatagaaatagtaggctgaattcaattcagcctatttcagaactgtgtacgagattttcctgacaacatgtcatatgtattcaaactgcctcatgtactagtgaaaactgcaaaagtttcatcctgtgat

SEQ ID NO: 91344 - DNA, 600 bp, Chicken  19866894400536_1
tctaggctttaatcagccctgctgtgaccatgtttaaaactgttacttaagtttaacggggaattcctgttctgaaagtcactttcaagtaagccacttctaaggcaaatagtatgatttgatctaaatattggtacacactcttgaagttctctttagaactacttgcaagtctttcagaatttgatatcttaccttgtcctacttaagactaagaaacaatgcccaggaaacctttacttcacacaccaaggaaggcagtacctctaggcctactgacttcttcctgtttacatatgyaatgatgacacagggaggagtgggtgcagaggcagacctcccactgttgttttcctacctcgagctccttcttttccctttcagcttcatttccatctctattcccatcttgctatgccacctttgaggccacagcaaggcctctctctcccacacttacacaaacatcaaagcagttgggaaaagaacaggatgtattgcaccctgaagacttgtccctcctcaccattttcacacacaccagtcttgctgtgctgcccctgtgcacttcactcttaatgagtgtgacgtgtcctcatt

SEQ ID NO: 91345 - DNA, 600 bp, Chicken  19866894400538_1
aaaaaaaaaaatggtagcaagtgggttattatagatgcagttattcaagtcatcaagtttgcatgcgatttatcattttgaggatatgaatttataaaccatacttacaattttctttcattatttatattgaaatattcagaaagaagccatgatagaccaaaacatttgacagcttttgtcagctaaggaaaaaaactctcacttcacaaatgcgatgtaagtagaaaccaagacctgctgagaagcttttgacaactgcaaagtaacaaatacagctccatgttcaaaaaaacaaamaaacaaacaaaaaaagaacctcatgctttctgataatcttgtcctgactatggacgctattagtgctctgaaagcttggctgaactccagctgaagagatcagcagcagcagcgtaagtgtgatccagtgaaagcactagcaggaacattaaaaaaaaaaaaaatacatgtgtattttctgttgagacacttgagtaactcttacrgagttgggaacatasatactaaggggagagaaagcacaaacaactcaaatttcagtcccgctgttgctacatctccttcatctgcagctgcatc

SEQ ID NO: 91346 - DNA, 600 bp, Chicken  19866894400538_2
aaaaaaatggtagcaagtgggttattatagatgcagttattcaagtcatcaagtttgcatgcgatttatcattttgaggatatgaatttataaaccatacttacaattttctttcattatttatattgaaatattcagaaagaagccatgatagaccaaaacatttgacagcttttgtcagctaaggaaaaaaactctcacttcacaaatgcgatgtaagtagaaaccaagacctgctgagaagcttttgacaactgcaaagtaacaaatacagctccatgttcaaaaaaacaaamaaamaaacaaaaaaagaacctcatgctttctgataatcttgtcctgactatggacgctattagtgctctgaaagcttggctgaactccagctgaagagatcagcagcagcagcgtaagtgtgatccagtgaaagcactagcaggaacattaaaaaaaaaaaaaatacatgtgtattttctgttgagacacttgagtaactcttacrgagttgggaacatasatactaaggggagagaaagcacaaacaactcaaatttcagtcccgctgttgctacatctccttcatctgcagctgcatcccta

SEQ ID NO: 91347 - DNA, 600 bp, Chicken  19866894400538_3
tcacaaatgcgatgtaagtagaaaccaagacctgctgagaagcttttgacaactgcaaagtaacaaatacagctccatgttcaaaaaaacaaamaaacaaacaaaaaaagaacctcatgctttctgataatcttgtcctgactatggacgctattagtgctctgaaagcttggctgaactccagctgaagagatcagcagcagcagcgtaagtgtgatccagtgaaagcactagcaggaacattaaaaaaaaaaaaaatacatgtgtattttctgttgagacacttgagtaactcttacrgagttgggaacatasatactaaggggagagaaagcacaaacaactcaaatttcagtcccgctgttgctacatctccttcatctgcagctgcatccctacagcctcttaactgaactaagtttgtccatataaatatggcacatgctgtatatatagccaagagtattttatacagtatatgggtatattctgggactatatagagctgggaataccacactcttatgcctttgcacaggacaaagagaaaacctaagtctaacaggaacagatcagactggaacattttttatgacatat

SEQ ID NO: 91348 - DNA, 600 bp, Chicken  19866894400538_4
aagtagaaaccaagacctgctgagaagcttttgacaactgcaaagtaacaaatacagctccatgttcaaaaaaacaaamaaacaaacaaaaaaagaacctcatgctttctgataatcttgtcctgactatggacgctattagtgctctgaaagcttggctgaactccagctgaagagatcagcagcagcagcgtaagtgtgatccagtgaaagcactagcaggaacattaaaaaaaaaaaaaatacatgtgtattttctgttgagacacttgagtaactcttacrgagttgggaacatasatactaaggggagagaaagcacaaacaactcaaatttcagtcccgctgttgctacatctccttcatctgcagctgcatccctacagcctcttaactgaactaagtttgtccatataaatatggcacatgctgtatatatagccaagagtattttatacagtatatgggtatattctgggactatatagagctgggaataccacactcttatgcctttgcacaggacaaagagaaaacctaagtctaacaggaacagatcagactggaacattttttatgacatatctcaaagggtagaga

SEQ ID NO: 91349 - DNA, 600 bp, Chicken  19866894400538_5
agtttgtccatataaatatggcacatgctgtatatatagccaagagtattttatacagtatatgggtatattctgggactatatagagctgggaataccacactcttatgcctttgcacaggacaaagagaaaacctaagtctaacaggaacagatcagactggaacattttttatgacatatctcaaagggtagagacaactgtgaagtttttctttcgtcatctggagagataatgtaaatatatctgacaatacacagactaatcttttacatacacccttgatttagtcaatcccytctcctgcatttgacactggctatagacttcttagtcatttctttaagtttacatttttttctcggtcatttctaacaaaccacagttacatggcagggagatgaaagggggagtgatattctcagggctcaagagtaaagtctctaacaagacacagctgatgtaaagacagacagacaaagatatcaaccatgtgctgaaaataaacagttgcagttaattctctcatgctggggaagaggaggaatcacacatgagctgtgtttgagaaggacactgccactcctctggatctgtgt

SEQ ID NO: 91350 - DNA, 600 bp, Chicken  19866894400538_6
aaagtctctaacaagacacagctgatgtaaagacagacagacaaagatatcaaccatgtgctgaaaataaacagttgcagttaattctctcatgctggggaagaggaggaatcacacatgagctgtgtttgagaaggacactgccactcctctggatctgtgttagtcccatggtaggagcatgttgtttatacagacccagtactcatgtctatctgctgtgcacaacaccttgacctgacacaaatggctgtaatggccagaagtgcagtaatatctcagtaagtccaatcgtcagtsaaagaacagctctgacagacaagaaktgtatactagacatacagcattttagatgttacttacataccttctttmttctgaactacctcacagccagcgttccctaagaaatttgctaatattcataaatctttatgttctttgaaagctactatataataaacacatgcatcaacagaaccacgaaaaacttgaattcatcccaaatcatacagcttgtctaagacaagagatcacgactcctcctatcccatcgatcagactctcatctctttcctaggcagcttaccaagctacgca

SEQ ID NO: 91351 - DNA, 600 bp, Chicken  19866894400538_7
gtaaagacagacagacaaagatatcaaccatgtgctgaaaataaacagttgcagttaattctctcatgctggggaagaggaggaatcacacatgagctgtgtttgagaaggacactgccactcctctggatctgtgttagtcccatggtaggagcatgttgtttatacagacccagtactcatgtctatctgctgtgcacaacaccttgacctgacacaaatggctgtaatggccagaagtgcagtaatatctcagtaagtccaatcgtcagtsaaagaacagctctgacagacaagaaktgtatactagacatacagcattttagatgttacttacataccttctttmttctgaactacctcacagccagcgttccctaagaaatttgctaatattcataaatctttatgttctttgaaagctactatataataaacacatgcatcaacagaaccacgaaaaacttgaattcatcccaaatcatacagcttgtctaagacaagagatcacgactcctcctatcccatcgatcagactctcatctctttcctaggcagcttaccaagctacgcattaaccttacaagtatgtaaacagct

SEQ ID NO: 91352 - DNA, 600 bp, Chicken  19866894400538_8
tgcagttaattctctcatgctggggaagaggaggaatcacacatgagctgtgtttgagaaggacactgccactcctctggatctgtgttagtcccatggtaggagcatgttgtttatacagacccagtactcatgtctatctgctgtgcacaacaccttgacctgacacaaatggctgtaatggccagaagtgcagtaatatctcagtaagtccaatcgtcagtsaaagaacagctctgacagacaagaaktgtatactagacatacagcattttagatgttacttacataccttctttmttctgaactacctcacagccagcgttccctaagaaatttgctaatattcataaatctttatgttctttgaaagctactatataataaacacatgcatcaacagaaccacgaaaaacttgaattcatcccaaatcatacagcttgtctaagacaagagatcacgactcctcctatcccatcgatcagactctcatctctttcctaggcagcttaccaagctacgcattaaccttacaagtatgtaaacagctgttaacaccatgacgtgaatatgcctatcaacatcgagtttaccagttt

SEQ ID NO: 91353 - DNA, 600 bp, Chicken  19866894400552_1
gtagaaaagtgaagctcgaggaatgacaggtatttaggtgtgccatgttgtcattaaagtcagtttagaaagcctacacataggtcgcatgtttagaatcttttgcatctaaattacaattagaggctaccttgttaattattatccagaatttgtgtttcttccttttatattcatctgctcgtttacacgtgcaacaacttgtatgtctggacactgtgagctctgaggtgccattagctggaatttgatttactgctgggccttatgcaaaaagacttcattagttctgctttgtastatgcacagagcagtagtccatgctgtctgctttgggttattgccagttgatatttgatatttgttgacactcttttcggttgtgctcactgcaagggaagtgggcagtcagatggtacaggtgcttaagtctgcacaactttctagagatgttttttgctaagggaaagatgccttggaggtgccctgctgcagcttgttgaaagcagaaaaataaccacttgtgtgaaaggcagttccatgtgtggagggctatcctgcaggaaaagatgtgtaacaaactccagaagaacccagcag

SEQ ID NO: 91354 - DNA, 599 bp, Chicken  19866894400558_1
  misc_feature (1)..(68): n is any nucleotide
nnnnnnnnnnnnnnnnnnnnnnnnnnnnnnnnnnnnnnnnnnnnnnnnnnnnnnnnnnnnnnnnnnnnaacatacgcttgacctattatcagttagaataactaaaaaagcaatgacaaatcaatgcatggatgtaattataactagaatttctgaccgggaaaggagaggttattctagcttactaaaacattgttataacagaaggggttcattatgttagaaactcagatgaagaacacaagaataacatccactgtaagaagttataaagtagaaaaattttaaaggcaagaggcyttatctttccccatatgcatgtaattttgcataacactactttttatgactctaagatcaacatatgtagtttggctacaagtcaagactggtaatcaggcttgtttaaagtcattagttcagcagtgaaagataaattcattgggagaacattttatatgaatatatacatacatttttatacaaatacaasagatgttagctttgccttttgatcttctaattgttgtattgctttgtcgttactactgcttaaatacaattgatataatttttaaaaacttgtactgatagtaaaa

SEQ ID NO: 91355 - DNA, 600 bp, Chicken  19866894400558_2
tgttataacagaaggggttcattatgttagaaactcagatgaagaacacaagaataacatccactgtaagaagttataaagtagaaaaattttaaaggcaagaggcyttatctttccccatatgcatgtaattttgcataacactactttttatgactctaagatcaacatatgtagtttggctacaagtcaagactggtaatcaggcttgtttaaagtcattagttcagcagtgaaagataaattcattgggagaacattttatatgaatatatacatacatttttatacaaatacaasagatgttagctttgccttttgatcttctaattgttgtattgctttgtcgttactactgcttaaatacaattgatataatttttaaaaacttgtactgatagtaaaagacataaaccaacataaaaatgtagaatcttgcaggcagataattaaagaaaaagtaagacttctttgtactgctcagcacgacttcaccccagtcaactgaaaacagtgatcttttttaaatgtttggcctgtactcatacgaaaaacaagagtccttgtacatattcacatactgttgtcaagaagattaaa

SEQ ID NO: 91356 - DNA, 599 bp, Chicken  19866894400564_1
  misc_feature (1)..(58): n is any nucleotide
nnnnnnnnnnnnnnnnnnnnnnnnnnnnnnnnnnnnnnnnnnnnnnnnnnnnnnnnnnggactgctccccgccgccgcgccggatcccgcctgccgctcctcggccgaggcctcgtcggcctccgagtcagagctggagctgccgtaggccgcgaagtagcccagcgggtcctctccctccgccgccatggcggggctgcgcaattcgccgcccgcacggaaaccggccccgcgccgagggttccgcccgccggccccggcctgctttgcgggcggcaaacggcgttcgggagaaggggrtggaaataattgacctttctgcattcgcacttgagtagcgagtgttcaaccccagtaagttagggttttttttttggtgttttttttttttggaaaagaccatagattaaaagagaattagacacgaaactgagacaacctccgtttctctttttcacacctgtcagcttcactagagagaatagagagaaacggcactgccctcagcctcggggcagtagccggcctcgggcaggtaaagctcccaacaccgcccatccagctctggggcgcctccaccaccatcagctcgtggcagc

SEQ ID NO: 91357 - DNA, 599 bp, Chicken  19866894400566_1
  misc_feature (1)..(26): n is any nucleotide
nnnnnnnnnnnnnnnnnnnnnnnnnncactgcaaaatgtaagacgtgctagatttagttttccagactttaattctgctcctttgtgtcttcattcaacgtttataagaaatggacacgagtggacatcacattgagctgtaaagttcactgatatcagatagctaagaacataattgatttggaaaatgaagttcataactatcctatggataattatacacatatattcctgagtaatatgtagatttgatgaaaacgggagtccattcttattttaaagatgttctctggaagtacrtagaggtgaaatgctcaagatcaaataaagacaacacctcagcttaagatgaatatttattgcaaacttcttgtgagaaaagagatcagcgtaaaccacatgttctagtttttttcttccacacaacatagcaagaaaatacatggcaaaaagccaatagtaggcatatgtgactttcaaggacaaaactgcaatgtggacaatgatgtatgtctagtttttttcttgtggtggtgaggatagttttattattattaattacatgtaacatgcatctgcaaaactattctgccagaaca

SEQ ID NO: 91358 - DNA, 599 bp, Chicken  19866894400571_1
  misc_feature (1)..(97): n is any nucleotide
nnnnnnnnnnnnnnnnnnnnnnnnnnnnnnnnnnnnnnnnnnnnnnnnnnnnnnnnnnnnnnnnnnnnnnnnnnnnnnnnnnnnnnnnnnnnnnnnncgccgcgcagcagcccaaccccggctacagctctacgcaaggccccggctgcggcccagcccagactcagcgctccgccacagctcggcagaaggcagccaaccctccctaagagccccccgcccgccctacaggggccaggctaagactacgcgcccaacacagctccccaagagcggatggcggtggatagcaccctctcragccacagccctgcgctccacggctccgccattcttaccttccggggagggaaagagatctacatccgggctcctgcggcctaaagagagcgtggcgcctgacgtcaccgcaccaatcgcggggcacgctgggaattaaagtccgggagggccaggacttctttctctgaggcggtgtgacgcgcggtgatgacgtcagcggtgacatagggcgggccgcgccgcgctctgtgcgctctggggttctcaggccgcagttgttcgcgctcctctcagggcrcccataggccgcgagtagt

SEQ ID NO: 91359 - DNA, 600 bp, Chicken  19866894400571_2
cggtggatagcaccctctcragccacagccctgcgctccacggctccgccattcttaccttccggggagggaaagagatctacatccgggctcctgcggcctaaagagagcgtggcgcctgacgtcaccgcaccaatcgcggggcacgctgggaattaaagtccgggagggccaggacttctttctctgaggcggtgtgacgcgcggtgatgacgtcagcggtgacatagggcgggccgcgccgcgctctgtgcgctctggggttctcaggccgcagttgttcgcgctcctctcagggcrcccataggccgcgagtagtgtgctgtgctgagggggtctgggggccccatgtgagccggcggccggctgcggggcggtggggggcaccgcgacccgccgggcaaaatgacatcgcggaggtgaggcggctgtaagcccggcgttggggtgcgtgtggggggggtggccggtgtgggggctgaagggggtttcttttctctgcctgcagtatgcggtatttgtctgctttccgctgttctctctgggttaaggtaaactcttaaagggaattgctgtggtaacgtggacgttgtattcctt

SEQ ID NO: 91360 - DNA, 600 bp, Chicken  19866894400576_1
aggtttgactgaatgatctgtttggcatctcgtgctacgttcagcagtgaaatgtcgatagcttcaaatccttcctctctgagggaaagtacgattttgttgctcaaacacgtgagggtgctttgtgcactgctcagacactcagcatagctctctcttacagcctacatagctcatcaggcttgagcttgattcactaacactgagagatactgcaaagacacctatgtaatctaggatcatacgcctgcttgtgaaaagaattcacgttcaggaatatttctccctgaaaatccttayggtttaacgcatttctccactacaaactgcagcagaaatacttgagacagcatgcagcttattgagcgtattatagattaaaggaagagttgatagtactctttttagctttcatttggccagatttgaaatcttacatctagctgtggggcccaagaaggtaattgagaagacacaatcaggtccatgaggtgtatagcagaatggtgagaaaacaaatttcaggaaaaaaatgaaaggttccagctagataggaaaaaacaaacaacaaacacaatgaggataataaagcactgaaaa

SEQ ID NO: 91361 - DNA, 600 bp, Chicken  19866894400576_2
gtgccctgccttagtgtggcagagcatgcatggcttacctttctgccttcatatatagctattgtaggctgatgttctgtttttccctaggttgtgtggcatgctatggagcaggagctgctacgtcagtaccaagaatttgaggatctgatccaacgctgctatgtggggtcagggatcactatggaattcactatggaggatttgctgagctacttcaactccatcactctgtccagcacgtagaggcagatgtttatggagaacagctcaggaatcctctgcagctgcacctttagraagctaaacccaaatgtaaaacccttcccaggctggaatttgatatattgagctccgcctcagaaatcattgttcatctaatgagaaaaaactccctagcctcaaatttccaccaaagctagtgcccctgctgtgccccttcaacagactactgcccagtgccacatatagctgaacactgaaagccatcttctctccaggaattctctcctttctattcaccctcagattttacagtgaacccgtgctgaagcacgaggattgcaatgcaccaagctacccmtgtgtatgcagtgttgt

SEQ ID NO: 91362 - DNA, 600 bp, Chicken  19866894400576_3
gcagctgcacctttagraagctaaacccaaatgtaaaacccttcccaggctggaatttgatatattgagctccgcctcagaaatcattgttcatctaatgagaaaaaactccctagcctcaaatttccaccaaagctagtgcccctgctgtgccccttcaacagactactgcccagtgccacatatagctgaacactgaaagccatcttctctccaggaattctctcctttctattcaccctcagattttacagtgaacccgtgctgaagcacgaggattgcaatgcaccaagctacccmtgtgtatgcagtgttgttatatccacgtcagaacatgcactattgctctaccactgggagtgcagaaaatgctgttttagtttctcagggaaactggtttgtcaacaaatgtcttcttmcaaccccatttcattttgaaacctcctcttagaatgttacagtttttatgttatatttttgttttttaaaaaatatggcatttacataattcttgcatcctatgttgatgacctggaggccaacataatrtccatagtatccaaacataaggatagccttatctctaaaaaactgaagacc

SEQ ID NO: 91363 - DNA, 600 bp, Chicken  19866894400576_4
caaatttccaccaaagctagtgcccctgctgtgccccttcaacagactactgcccagtgccacatatagctgaacactgaaagccatcttctctccaggaattctctcctttctattcaccctcagattttacagtgaacccgtgctgaagcacgaggattgcaatgcaccaagctacccmtgtgtatgcagtgttgttatatccacgtcagaacatgcactattgctctaccactgggagtgcagaaaatgctgttttagtttctcagggaaactggtttgtcaacaaatgtcttcttmcaaccccatttcattttgaaacctcctcttagaatgttacagtttttatgttatatttttgttttttaaaaaatatggcatttacataattcttgcatcctatgttgatgacctggaggccaacataatrtccatagtatccaaacataaggatagccttatctctaaaaaactgaagaccttgaactgcttggttcaatgcaaagtgtcaatcaaagcaaataaaagcactgatcacactatttggatggtctgatttcaaagaacccctaaaacatcataaaaagtagggatcatttt

SEQ ID NO: 91364 - DNA, 600 bp, Chicken  19866894400576_5
tacagtgaacccgtgctgaagcacgaggattgcaatgcaccaagctacccmtgtgtatgcagtgttgttatatccacgtcagaacatgcactattgctctaccactgggagtgcagaaaatgctgttttagtttctcagggaaactggtttgtcaacaaatgtcttcttmcaaccccatttcattttgaaacctcctcttagaatgttacagtttttatgttatatttttgttttttaaaaaatatggcatttacataattcttgcatcctatgttgatgacctggaggccaacataatrtccatagtatccaaacataaggatagccttatctctaaaaaactgaagaccttgaactgcttggttcaatgcaaagtgtcaatcaaagcaaataaaagcactgatcacactatttggatggtctgatttcaaagaacccctaaaacatcataaaaagtagggatcattttccagcccaagtgtcagtctccttttccatgcagtcttccccagtgaagccaacccctctccctcccctaagtaggatgaccttgtccatacctcttcttacaaataggctttggacttgttgccctgtaa

SEQ ID NO: 91365 - DNA, 600 bp, Chicken  19866894400576_6
ccagcccaagtgtcagtctccttttccatgcagtcttccccagtgaagccaacccctctccctcccctaagtaggatgaccttgtccatacctcttcttacaaataggctttggacttgttgccctgtaaatcagaccatctgatgtagttctaatgaacctggatgcataccattatcatgcaggtccatagtagcacagggtcaagatccaggacaacaaggcccatagccatgcagaggcacatcagggcctgtagtagagaccaataacactatgttatcactcaaaaagagtctwaaggcccagagctgagctttcattggctcctgggcccaaagatgtgggtggaagtcccaggacagttaaaagctattagtgccctcaaaggctggcctggcctcaatgtcaatattaccagcacctstaagaattgctttaattaaaaaaataggatttttcacttgacagtgagggttggtaagtccatctacatatgtttgtctctctgtctgccagccagtcccactatgtaactgttgaaactcttgatcatgccacctggagcagacagcagagcagaaattgcagagatactta

SEQ ID NO: 91366 - DNA, 600 bp, Chicken  19866894400576_7
taaatcagaccatctgatgtagttctaatgaacctggatgcataccattatcatgcaggtccatagtagcacagggtcaagatccaggacaacaaggcccatagccatgcagaggcacatcagggcctgtagtagagaccaataacactatgttatcactcaaaaagagtctwaaggcccagagctgagctttcattggctcctgggcccaaagatgtgggtggaagtcccaggacagttaaaagctattagtgccctcaaaggctggcctggcctcaatgtcaatattaccagcacctstaagaattgctttaattaaaaaaataggatttttcacttgacagtgagggttggtaagtccatctacatatgtttgtctctctgtctgccagccagtcccactatgtaactgttgaaactcttgatcatgccacctggagcagacagcagagcagaaattgcagagatacttaggtcttacaggcttcagacctttcaaaactccattctatttttggctgattcattttttgtagatttctaactctgcctctggccatagaggtcccctttggacaagtctgcttgcacaaagatgtg

SEQ ID NO: 91367 - DNA, 592 bp, Chicken  19866894400576_8
taagtccatctacatatgtttgtctctctgtctgccagccagtcccactatgtaactgttgaaactcttgatcatgccacctggagcagacagcagagcagaaattgcagagatacttaggtcttacaggcttcagacctttcaaaactccattctatttttggctgattcattttttgtagatttctaactctgcctctggccatagaggtcccctttggacaagtctgcttgcacaaagatgtgtccagaaatgtgtccaaagctgtgcacctcaccctcaggctcctttgctattgyttgttgctatacgctggctgttagcttgacacctttagctcagagattcctttaacagctgggagcacctgggagcttgcagtgctcccagagaaagcaaatgtctcacagggtggtaagaccttagcacactgcatgacataaaataatcctggaggcaaagagttaaagagcaatgttgattgctgcaggggaaggaggctgctgcagctgcttggcatgacttccctaggaacattcttactggcttgttagcagtgtgtcaccccagtctgaaccccaggctcaacag

SEQ ID NO: 91368 - DNA, 599 bp, Chicken  19866894400580_1
  misc_feature (1)..(83): n is any nucleotide
nnnnnnnnnnnnnnnnnnnnnnnnnnnnnnnnnnnnnnnnnnnnnnnnnnnnnnnnnnnnnnnnnnnnnnnnnnnnnnnnnnncttgaataatttatagcagcatgatgcaacagtcactctaagagaatctctgtcatgctcaaagattctatgcattcagaattttccaccttttataccttaagatctttttttcatgcactaaggcaacctttcagttttaaagggcctttcacaagatcatttcaaatgggcaattctaatggtctttcaaacacagctccaggaagacactcawcttacatagcttcaagcaaagaaactgaatttcaggcagcaattttctccttatgcttcattttattccagaatgtaacattaattcaaaaggactataaatacaaaaatttagcagtaacatctatttcttctatctaataatagcatcagaaaaagatgaaagaattaaactacaaaaacgagcctcatacaattactccttgcatttatgtctgtaaggatatgctgttccagtgacttttggctacattttccctcaaaatctaaaataaataccaggacaaattggcaagatac

SEQ ID NO: 91369 - DNA, 599 bp, Chicken  19866894400581_1
  misc_feature (1)..(39): n is any nucleotide
nnnnnnnnnnnnnnnnnnnnnnnnnnnnnnnnnnnnnnnttctgggattgagagacttaattaaatctatacattatatctctatatatcttcattaacatagcgatatagcccagatctgtaattgtattttttgccatttttcaatggtatgtagtagtttcaatatgtagtggatacagttttaaaaaatatattgctatactattatactatactattgctatatattgctatactatactctttgtgttttgatccctgtgggtgaaaagcactatacaaaagctggttttgctwagttttcatttagtggtacatacaaacattttgcctggaaaacagcatcagattgtgctgatttcagaaattacttaaatgataaggtgtgggtgaccttgacttatgcttgtcaaatgttatatggaaaatgctggtagttctagtaacttcagtgattttggctaagcctttctttgttatttcttttactttgcacttctctgatgttaggctcaatgaagtaactagagtgatgtgactgggagccattttgtaagttgttctggaggctgagaaaaaaagtgttgtgaaattac

SEQ ID NO: 91370 - DNA, 599 bp, Chicken  19866894400581_2
  misc_feature (1)..(38): n is any nucleotide
nnnnnnnnnnnnnnnnnnnnnnnnnnnnnnnnnnnnnnttctgggattgagagacttaattaaatctatacattatatctctatatatcttcattaacatagcgatatagcccagatctgtaattgtattttttgccatttttcaatggtatgtagtagtttcaatatgtagtggatacagttttaaaaaatatattgctatactattatactatactattgctatatattgctatactatactctttgtgttttgatccctgtgggtgaaaagcactatacaaaagctggttttgctcwgttttcatttagtggtacatacaaacattttgcctggaaaacagcatcagattgtgctgatttcagaaattacttaaatgataaggtgtgggtgaccttgacttatgcttgtcaaatgttatatggaaaatgctggtagttctagtaacttcagtgattttggctaagcctttctttgttatttcttttactttgcacttctctgatgttaggctcaatgaagtaactagagtgatgtgactgggagccattttgtaagttgttctggaggctgagaaaaaaagtgttgtgaaattact

SEQ ID NO: 91371 - DNA, 599 bp, Chicken  19866894400582_1
  misc_feature (1)..(171): n is any nucleotide
nnnnnnnnnnnnnnnnnnnnnnnnnnnnnnnnnnnnnnnnnnnnnnnnnnnnnnnnnnnnnnnnnnnnnnnnnnnnnnnnnnnnnnnnnnnnnnnnnnnnnnnnnnnnnnnnnnnnnnnnnnnnnnnnnnnnnnnnnnnnnnnnnnnnnnnnnnnnnnnnnnnnnnnnnnnttttgaaagtactgctggcaaatggcagctaacagcatgaggaatgcagtagtggcagtgctcacagagataaattactgttggcagtgatgggaaatttctgaaaaacccattttatagctttatggytccttttgctatttttgggagggcaaataagaattgatcttaaattagagcggcacaggcagacagtaccccacccatgggaaaccctgttgcagcaacagaattcaccagtaagccgtgagaaacttgaacccagcagactgagtccaaagcagcagagtycagagcttgtccatgcacccgtgggcttggcaattccagcacaggcagttcttgcagtgccactctaccaccgttytgctgctgccagtgcatgtggtggttcccatgcagagcwgggcactacatgcacggctcaa

SEQ ID NO: 91372 - DNA, 599 bp, Chicken  19866894400582_2
  misc_feature (1)..(9): n is any nucleotide
nnnnnnnnnttttgaaagtactgctggcaaatggcagctaacagcatgaggaatgcagtagtggcagtgctcacagagataaattactgttggcagtgatgggaaatttctgaaaaacccattttatagctttatggytccttttgctatttttgggagggcaaataagaattgatcttaaattagagcggcacaggcagacagtaccccacccatgggaaaccctgttgcagcaacagaattcaccagtaagccgtgagaaacttgaacccagcagactgagtccaaagcagcagagtycagagcttgtccatgcacccgtgggcttggcaattccagcacaggcagttcttgcagtgccactctaccaccgttytgctgctgccagtgcatgtggtggttcccatgcagagcwgggcactacatgcacggctcaaactgcaaagctactctgtctgtgcaaagatgacaacatcgacactgccaagaccaggtcaaaccccaaccaccctttccactgacgcacaagctcagttcttggrcatggacttgtcccacacttgatagcaggctgtatcctgagtccagtgggaaatcac

SEQ ID NO: 91373 - DNA, 600 bp, Chicken  19866894400582_3
agataaattactgttggcagtgatgggaaatttctgaaaaacccattttatagctttatggytccttttgctatttttgggagggcaaataagaattgatcttaaattagagcggcacaggcagacagtaccccacccatgggaaaccctgttgcagcaacagaattcaccagtaagccgtgagaaacttgaacccagcagactgagtccaaagcagcagagtycagagcttgtccatgcacccgtgggcttggcaattccagcacaggcagttcttgcagtgccactctaccaccgttytgctgctgccagtgcatgtggtggttcccatgcagagcwgggcactacatgcacggctcaaactgcaaagctactctgtctgtgcaaagatgacaacatcgacactgccaagaccaggtcaaaccccaaccaccctttccactgacgcacaagctcagttcttggrcatggacttgtcccacacttgatagcaggctgtatcctgagtccagtgggaaatcacaagccccagagcatgcccacctggacacacagggatctcagtctgtcctgcaagcccagaaacctttacattcaggt

SEQ ID NO: 91374 - DNA, 600 bp, Chicken  19866894400582_4
aacccattttatagctttatggytccttttgctatttttgggagggcaaataagaattgatcttaaattagagcggcacaggcagacagtaccccacccatgggaaaccctgttgcagcaacagaattcaccagtaagccgtgagaaacttgaacccagcagactgagtccaaagcagcagagtycagagcttgtccatgcacccgtgggcttggcaattccagcacaggcagttcttgcagtgccactctaccaccgttytgctgctgccagtgcatgtggtggttcccatgcagagcwgggcactacatgcacggctcaaactgcaaagctactctgtctgtgcaaagatgacaacatcgacactgccaagaccaggtcaaaccccaaccaccctttccactgacgcacaagctcagttcttggrcatggacttgtcccacacttgatagcaggctgtatcctgagtccagtgggaaatcacaagccccagagcatgcccacctggacacacagggatctcagtctgtcctgcaagcccagaaacctttacattcaggtattacaaagggctcagccttgggacagcatttaggtgga

SEQ ID NO: 91375 - DNA, 600 bp, Chicken  19866894400582_5
tcaccagtaagccgtgagaaacttgaacccagcagactgagtccaaagcagcagagtycagagcttgtccatgcacccgtgggcttggcaattccagcacaggcagttcttgcagtgccactctaccaccgttytgctgctgccagtgcatgtggtggttcccatgcagagcwgggcactacatgcacggctcaaactgcaaagctactctgtctgtgcaaagatgacaacatcgacactgccaagaccaggtcaaaccccaaccaccctttccactgacgcacaagctcagttcttggrcatggacttgtcccacacttgatagcaggctgtatcctgagtccagtgggaaatcacaagccccagagcatgcccacctggacacacagggatctcagtctgtcctgcaagcccagaaacctttacattcaggtattacaaagggctcagccttgggacagcatttaggtggagaaaatgattttatttctgtttgtagccttgctcacaagcaatggttatttggttcagtgttggccacactatgcctttgtaaagaggtaaaaatgcaaaatgtacatttaaaaacaaatgaaacct

SEQ ID NO: 91376 - DNA, 600 bp, Chicken  19866894400604_1
tgctgtgaagtctgcaggaccagtgctttcagatgtggtgatgctgctgtctgttggcaggtcctggcctggctttcatagcatacccaacagcagtaacaatgatgcccgtgtctcagctttggtcctgcctcttcttcctcatgctgatcttcttgggactggacagccaggtacagcaaactaaccctccttctccaactcctaagtgcctgttaccactctgagcacctcctcatgcctgtgggaaaggattaggtggttgtatgctttgctggtccctcaaatacattctgcacrctgtccacagctctttcacactatgggtactcacagcatgggctgaagagaggccartgrgtatgtgtggtggcatctctgtttggcatccttatcctcacatgtaggtgagggtgtcccagcacatctccagctgcaagggggaatggtcttgcatccacctcttaccctgcagtactccagggagaaaacccagaagagcagtgtgaaaccctggtatgctggctcaaggggagaggggggtgtcctggcctggctgccaagcagggcatcctgttcaggctctactctgtagcacct

SEQ ID NO: 91377 - DNA, 600 bp, Chicken  19866894400604_2
caggtcctggcctggctttcatagcatacccaacagcagtaacaatgatgcccgtgtctcagctttggtcctgcctcttcttcctcatgctgatcttcttgggactggacagccaggtacagcaaactaaccctccttctccaactcctaagtgcctgttaccactctgagcacctcctcatgcctgtgggaaaggattaggtggttgtatgctttgctggtccctcaaatacattctgcacrctgtccacagctctttcacactatgggtactcacagcatgggctgaagagaggccartgrgtatgtgtggtggcatctctgtttggcatccttatcctcacatgtaggtgagggtgtcccagcacatctccagctgcaagggggaatggtcttgcatccacctcttaccctgcagtactccagggagaaaacccagaagagcagtgtgaaaccctggtatgctggctcaaggggagaggggggtgtcctggcctggctgccaagcagggcatcctgttcaggctctactctgtagcacctaaacctctggatctccatttctctccattccctgaatcaaggtcccctcttgcctca

SEQ ID NO: 91378 - DNA, 600 bp, Chicken  19866894400604_3
gtcctggcctggctttcatagcatacccaacagcagtaacaatgatgcccgtgtctcagctttggtcctgcctcttcttcctcatgctgatcttcttgggactggacagccaggtacagcaaactaaccctccttctccaactcctaagtgcctgttaccactctgagcacctcctcatgcctgtgggaaaggattaggtggttgtatgctttgctggtccctcaaatacattctgcacrctgtccacagctctttcacactatgggtactcacagcatgggctgaagagaggccartgrgtatgtgtggtggcatctctgtttggcatccttatcctcacatgtaggtgagggtgtcccagcacatctccagctgcaagggggaatggtcttgcatccacctcttaccctgcagtactccagggagaaaacccagaagagcagtgtgaaaccctggtatgctggctcaaggggagaggggggtgtcctggcctggctgccaagcagggcatcctgttcaggctctactctgtagcacctaaacctctggatctccatttctctccattccctgaatcaaggtcccctcttgcctcacct

SEQ ID NO: 91379 - DNA, 599 bp, Chicken  19866894400615_1
  misc_feature (1)..(19): n is any nucleotide
nnnnnnnnnnnnnnnnnnncacggagagctcactgccaaaccgtactggtgggaggtggtggatgcacagatttgtacacacaggcttgtgcagggcaggaggagggttttaaaggtcactttgcggtcaagagaagcaagggggtttggcctgccatgatgaggtgaatctgcaaggagaagcctgcaagcagggcactcacatacagctacggaacgagcagtgagggctgggcaagggtgctgcctcttgcaaggcacgaagcccccagaaacaccatagccccacccctgcccccygctgtaattctgctccatgtggacatacacttgctgtaggtccccagcaaagtgctgcccacagcacmgaagcccaaacccaggtaacaacagaagcaggctacacagggaagaggcaggcagccagcaccccaggagacactgcgacccacctccagaaagattcatttagtgtcaaatcacattgcatcacgggacgctgcgagaagccggcagtgaccctcactgaaaaacactctaaaatgaacagcaaagtactcgtcmagcccagagaagggctgtccttggctccacacccc

SEQ ID NO: 91380 - DNA, 600 bp, Chicken  19866894400615_2
agatttgtacacacaggcttgtgcagggcaggaggagggttttaaaggtcactttgcggtcaagagaagcaagggggtttggcctgccatgatgaggtgaatctgcaaggagaagcctgcaagcagggcactcacatacagctacggaacgagcagtgagggctgggcaagggtgctgcctcttgcaaggcacgaagcccccagaaacaccatagccccacccctgcccccygctgtaattctgctccatgtggacatacacttgctgtaggtccccagcaaagtgctgcccacagcacmgaagcccaaacccaggtaacaacagaagcaggctacacagggaagaggcaggcagccagcaccccaggagacactgcgacccacctccagaaagattcatttagtgtcaaatcacattgcatcacgggacgctgcgagaagccggcagtgaccctcactgaaaaacactctaaaatgaacagcaaagtactcgtcmagcccagagaagggctgtccttggctccacaccccctgtcgggatctctgcctgctctggtcactactgcaccccaaaagaagagtctgcagggaggcgaacag

SEQ ID NO: 91381 - DNA, 600 bp, Chicken  19866894400615_3
gcccccagaaacaccatagccccacccctgcccccygctgtaattctgctccatgtggacatacacttgctgtaggtccccagcaaagtgctgcccacagcacmgaagcccaaacccaggtaacaacagaagcaggctacacagggaagaggcaggcagccagcaccccaggagacactgcgacccacctccagaaagattcatttagtgtcaaatcacattgcatcacgggacgctgcgagaagccggcagtgaccctcactgaaaaacactctaaaatgaacagcaaagtactcgtcmagcccagagaagggctgtccttggctccacaccccctgtcgggatctctgcctgctctggtcactactgcaccccaaaagaagagtctgcagggaggcgaacagggctggggacgagctgctgcaggaggagctggccctgcccagccagcaggtcagagcaaggaggtggtaaaggcagagaggaaggagtcctgagtccctcgtccccatacaccatacaaccagcatggcagcagtccgcaggggtgacaggagatctaattccgtaaggcagccaacctggaagggaaaaaacaag

SEQ ID NO: 91382 - DNA, 599 bp, Chicken  19866894400617_1
  misc_feature (1)..(44): n is any nucleotide
nnnnnnnnnnnnnnnnnnnnnnnnnnnnnnnnnnnnnnnnnnnnataaggctttgtcattgtttattgctctattaaatgaaggtgatcagatgcatgttcttctaaacttagcctccctaaaacttgtgaaggacgtagtggtcttctgtgttacggaatgcagaacattttactgtttctgtcatgtgttttcttacacaccagataggtgacgtgcaggctttattttttctctagaactgtatccccttgcaaattttaaaagtaggtcaccctacttccctatttggaagaaacwatcattcatttagctgcatgtgtaaacacttgctttcaaagacaaagacgtcatctgaacaaatagtaagtcataggatttgcaatataattgattatgmaaaggctttttgaagagcccatttwaattgaaagagtaayattactgttattttaaccacgcttattagaatgcatggaatgttattagtaagtgtactcattgagacaatcaagaactttcacttttttcttcccatcccactttgtttcctaatttaggtcacagcgtgaggaatatccaagcgttttccgtccttc

SEQ ID NO: 91383 - DNA, 600 bp, Chicken  19866894400617_2
cttctaaacttagcctccctaaaacttgtgaaggacgtagtggtcttctgtgttacggaatgcagaacattttactgtttctgtcatgtgttttcttacacaccagataggtgacgtgcaggctttattttttctctagaactgtatccccttgcaaattttaaaagtaggtcaccctacttccctatttggaagaaacwatcattcatttagctgcatgtgtaaacacttgctttcaaagacaaagacgtcatctgaacaaatagtaagtcataggatttgcaatataattgattatgmaaaggctttttgaagagcccatttwaattgaaagagtaayattactgttattttaaccacgcttattagaatgcatggaatgttattagtaagtgtactcattgagacaatcaagaactttcacttttttcttcccatcccactttgtttcctaatttaggtcacagcgtgaggaatatccaagcgttttccgtccttcagaatgcatttttgaaagcaaaaactagctatctagcacaaattatccttgatgccatcaygaatatttacatggcggacaatgccaattacttcattttg

SEQ ID NO: 91384 - DNA, 600 bp, Chicken  19866894400617_3
ttgtgaaggacgtagtggtcttctgtgttacggaatgcagaacattttactgtttctgtcatgtgttttcttacacaccagataggtgacgtgcaggctttattttttctctagaactgtatccccttgcaaattttaaaagtaggtcaccctacttccctatttggaagaaacwatcattcatttagctgcatgtgtaaacacttgctttcaaagacaaagacgtcatctgaacaaatagtaagtcataggatttgcaatataattgattatgmaaaggctttttgaagagcccatttwaattgaaagagtaayattactgttattttaaccacgcttattagaatgcatggaatgttattagtaagtgtactcattgagacaatcaagaactttcacttttttcttcccatcccactttgtttcctaatttaggtcacagcgtgaggaatatccaagcgttttccgtccttcagaatgcatttttgaaagcaaaaactagctatctagcacaaattatccttgatgccatcaygaatatttacatggcggacaatgccaattacttcattttggaatcacagcacacattgtctcagt

SEQ ID NO: 91385 - DNA, 600 bp, Chicken  19866894400617_4
tggtcttctgtgttacggaatgcagaacattttactgtttctgtcatgtgttttcttacacaccagataggtgacgtgcaggctttattttttctctagaactgtatccccttgcaaattttaaaagtaggtcaccctacttccctatttggaagaaacwatcattcatttagctgcatgtgtaaacacttgctttcaaagacaaagacgtcatctgaacaaatagtaagtcataggatttgcaatataattgattatgmaaaggctttttgaagagcccatttwaattgaaagagtaayattactgttattttaaccacgcttattagaatgcatggaatgttattagtaagtgtactcattgagacaatcaagaactttcacttttttcttcccatcccactttgtttcctaatttaggtcacagcgtgaggaatatccaagcgttttccgtccttcagaatgcatttttgaaagcaaaaactagctatctagcacaaattatccttgatgccatcaygaatatttacatggcggacaatgccaattacttcattttggaatcacagcacacattgtctcagtttgcagagaaaattt

SEQ ID NO: 91386 - DNA, 600 bp, Chicken  19866894400617_5
aaatagtaagtcataggatttgcaatataattgattatgmaaaggctttttgaagagcccatttwaattgaaagagtaayattactgttattttaaccacgcttattagaatgcatggaatgttattagtaagtgtactcattgagacaatcaagaactttcacttttttcttcccatcccactttgtttcctaatttaggtcacagcgtgaggaatatccaagcgttttccgtccttcagaatgcatttttgaaagcaaaaactagctatctagcacaaattatccttgatgccatcaygaatatttacatggcggacaatgccaattacttcattttggaatcacagcacacattgtctcagtttgcagagaaaatttctaaacttccagaagtgcagaccaaatactttgagatgctggaatttgttgtcttcagcttgaattacataccctgtaaagaactgatcagtgtgagcatccttttaaaatccagcacttcttatcactgtagcatcattgccatgaagacgctcctgaaattcacccgtcacgactacatctttaaggatgtcttcagggaggtggggcttttggaggt

SEQ ID NO: 91387 - DNA, 600 bp, Chicken  19866894400617_6
gttgtcttcagcttgaattacataccctgtaaagaactgatcagtgtgagcatccttttaaaatccagcacttcttatcactgtagcatcattgccatgaagacgctcctgaaattcacccgtcacgactacatctttaaggatgtcttcagggaggtggggcttttggaggtgatggtaaatcttcttcataaatatgcagcccttctgaaagatcccactcaggctttgaatgatcaaggtagtgtgtggtcttccattttactaatgcatgtatttttggctgggaatgttggaggrtgatggatatgaggaaaaggaagaaagttggaatgtgtctcttaagggcagagttctggcaggtactcctgtgccatcctataaacacactggggttccctcttcctttctgtccttcacagtgcaatctcagaaaatcaaagtaagagttcatactttactttttcaaagactttcgatatattgcttttaatgttaaagttactgtacgtcaaaagaaagagtgaacaaacaatacgtagcctgcccatttctcccctgcttcaccctaattgtcttgcctggccccctaggaatgct

SEQ ID NO: 91388 - DNA, 599 bp, Chicken  19866894400629_1
  misc_feature (1)..(145): n is any nucleotide
nnnnnnnnnnnnnnnnnnnnnnnnnnnnnnnnnnnnnnnnnnnnnnnnnnnnnnnnnnnnnnnnnnnnnnnnnnnnnnnnnnnnnnnnnnnnnnnnnnnnnnnnnnnnnnnnnnnnnnnnnnnnnnnnnnnnnnnnnnnnnnnnncccaccatttccaactctgggcacagatttacccgtgtacatttcacaatgcacaaagtgcctgagaaatcgcatacagggccaagcagagcagaatgttggattgtgcatctcccctcgtcggcatgagactactgagactactgtgtgaagargaagggtaaatgcaatcactggaacctatctggtgactctttgaccttcactgaaatgttgttcagcctcacttctccctcttgtatgctttccttatcagagccatcacgtaagccaaaattctacttcatactgttatgatgcaaattgtctctccagtgctacccatggcacctacacagtaattgtacaaggcaatgaagaagtgaagaccttaaccaaccttgttatcaataatgaaagcaacagctgcataagcgcatttctccacaacagagctggggatgccttcaaggca

SEQ ID NO: 91389 - DNA, 600 bp, Chicken  19866894400631_1
agggaagtccaacacccaacctccacgctcttcatgtcatatcactatataacactgacgaaggacttagttgcctgtggaaatgctgaaagtattagttttgtggtctgattttccatttttagacagataggaagtttcttgatttcaccgacaatttgaggtacgctaagtttattctactactactgcagcatcagaaaatgactaattagagaacaggttaagaatagcaatgttagatgccatcttccttgctttcttcacccaacatgcaaaaaaaaaaagcttaaaagcaayttaagcatctcaataaattaaacttctcttttagaagactcctctaattagatttatcatcaataacatgaggttataaagttcctttttactgttcaatcaggtaaataaatccttattatttaaatgactctctgaataataaaaggtagataaattacgtgagatttttgcagcatttataacagccccatctggaatgcatacatatagctctaaaaaataattgcatacagtatccaycaagtgctaaaaagaaagttttgtttgcttttaatggagtaagaaaaatatgaccca

SEQ ID NO: 91390 - DNA, 600 bp, Chicken  19866894400631_2
tgccatcttccttgctttcttcacccaacatgcaaaaaaaaaaagcttaaaagcaayttaagcatctcaataaattaaacttctcttttagaagactcctctaattagatttatcatcaataacatgaggttataaagttcctttttactgttcaatcaggtaaataaatccttattatttaaatgactctctgaataataaaaggtagataaattacgtgagatttttgcagcatttataacagccccatctggaatgcatacatatagctctaaaaaataattgcatacagtatccaycaagtgctaaaaagaaagttttgtttgcttttaatggagtaagaaaaatatgacccaaaaaaacaactaaaatttaatttggattatataccaataataagttttatctaacagtactgttagggatgaaagcaaatctgcctattaaagatgtgaccacagattgaagcttgcaatttcagccttcatcaattgctttctcaagtgactcatgaagtcagcgttacctgaaaagtcaatatcgagaaaccaggtaaaccaataaatactccttttagtcacagaattgctaccaaacac

SEQ ID NO: 91391 - DNA, 599 bp, Chicken  19866894400636_1
  misc_feature (1)..(181): n is any nucleotide
nnnnnnnnnnnnnnnnnnnnnnnnnnnnnnnnnnnnnnnnnnnnnnnnnnnnnnnnnnnnnnnnnnnnnnnnnnnnnnnnnnnnnnnnnnnnnnnnnnnnnnnnnnnnnnnnnnnnnnnnnnnnnnnnnnnnnnnnnnnnnnnnnnnnnnnnnnnnnnnnnnnnnnnnnnnnnnnnnnnnnctcagcaaacacgaatgtgctgagtacaacacgtgctggtaaaactaaagacctggccttggtaactttctgctgagaaaagggttgaaaaaaattggaatatcaattggaatgatggraaggcaatcacagccttgccaacactgatttgctgactgctggccgaagcacaccagtagctctttgaacacccagtgctcggtgctggcccagttctttgggttacacatccctggcatgaccgggcagagggcagcccaatggcaatcatatgttcatggggagcccttgggagaagtgtttccatttgctgctttgcctaaaaccagcatggtggtggggattccagaatgtcatacgggagagccaagctggaggggtcaaaacacacacacacagtgcatacttcccaggctgt

SEQ ID NO: 91392 - DNA, 407 bp, Chicken  19866894400636_2
agaatgtcatacgggagagccaagctggaggggtcaaaacacacacacacagtgcatacttcccaggctgtcattattgccaaactttctgctgttcagatgaatacgaaataaaaatatatatagcttgctgaaggaatggagttgagtcagtgtggtcggactgcttccttctccttctcctttctcttcaaaatagctccagggacctgtctgaaggtaggcaacatgggaggcagagggcaaaagcaggaagtaagagtccactgctctgtgaacttgtttgtaggactgtccttsctcttatcatcccagtcagaggcagggaaatacaggaaaataacatttcctccctcctcttgctgctgggaattttcagggaaaacaagagccagcccagaagaaag

SEQ ID NO: 91393 - DNA, 600 bp, Chicken  19866894400649_1
gatttcaaccagatgctgccatccagcattttgaacagagaatcagaaaggttagcaaatactttgagcacctgtagctgttaaagcagctaaaacatttacctttttttttcttttcttttctttacacagtttgtttaggaggaaatgtccacttaactctgacccagctttgatgctagccctgttttaagcaggcatcagctgtatatgacctccagtgctccttacatcctggtttgttctatgactctaagctatgtgtagtggaaatgctaagtcatggcctaaagcagtgaytgagcacctggtgggacggcagggccaacccaggggagctcaggtgcatgcaatgtacctgagtgacaggaaggggataagccaggatccagcccttcccagatctcttttaagggttggcagtggaggtaagggcttctctagatatccctgtgtatcttaggccttctgaaggtaagcagcttcttttcttttctttttttcattgtgtccttcattgttgtatttgagcaagtcctcacttgctgcagcctgggaccttgctgctctgctgtcattgctgtgatttctattgcgtta

SEQ ID NO: 91394 - DNA, 600 bp, Chicken  19866894400650_1
gctttctcccttttaattctttcctagacatctttctcactgcactggcactctgcctcatcttggggcaggaccctgtgtctgatattcgcgtgtcccttgctaaggttggcagagacagcatcactcagcctgatgtgtccaggctgctgccctgctgattggatgtgactgtcactgacgtgagagccttttgctcatctgcccatgaggaaatcactggtgctgccgccagggtatgcgatgattgccagcaatgtcagcagcacagaggagtgctcgctaattgtgcaccatcakatgctccacaggagatctgcagccctgagatgctgccagaggagaccttggccctgagagttctggcagagctcaagcacaagggattatgagcctattttccttcttattgatctggggataagccagagcagttcactgagctctgcaaatccagcccaaatgaggaacacaagtgggaatgggagagctcatctgcggggccaccacctctcctggctttgcttcctggggggcatctctccctggtggccctgcctggttggtgtaagcagtaagggcagcagcttctgctttata

SEQ ID NO: 91395 - DNA, 600 bp, Chicken  19866894400651_1
actgagtacgctgttttgcttcagagaaaacaaactcattcccaaaaaggacttcctagtggaaataacttttataccataccttgatgactgctccaaaagcccccttgccaagtaattttagctcttcgaactcattgtagtagcgtgaaaattgtctctgtgtttctgtgaagaatgaagcactggatatctggctgctgggcacaactgtctcaatgcaatctatacctgccgaatctgaaatgaggacatcgcagttaccagcactggtagaacggggtggtaaggcaccaggcmstgtcaaataggcattaggaagaagataagccctaaacaaccaagtgtaactaaatctgaaatatagaagtgctctgctgaggagagttaagctctggtacaaayataaaccttactgcagtgtttaattattaacattaattatagtggacaaaggaactgattctaacagaatatggtgagaaaagatgtttcactggaatataattttccaggaagaaaattaagactggcatttacaccacrtagcttcctctgctgatgagaatacagcagtctgaccaccccatctgtccatgg

SEQ ID NO: 91396 - DNA, 600 bp, Chicken  19866894400651_2
ctgagtacgctgttttgcttcagagaaaacaaactcattcccaaaaaggacttcctagtggaaataacttttataccataccttgatgactgctccaaaagcccccttgccaagtaattttagctcttcgaactcattgtagtagcgtgaaaattgtctctgtgtttctgtgaagaatgaagcactggatatctggctgctgggcacaactgtctcaatgcaatctatacctgccgaatctgaaatgaggacatcgcagttaccagcactggtagaacggggtggtaaggcaccaggcmstgtcaaataggcattaggaagaagataagccctaaacaaccaagtgtaactaaatctgaaatatagaagtgctctgctgaggagagttaagctctggtacaaayataaaccttactgcagtgtttaattattaacattaattatagtggacaaaggaactgattctaacagaatatggtgagaaaagatgtttcactggaatataattttccaggaagaaaattaagactggcatttacaccacrtagcttcctctgctgatgagaatacagcagtctgaccaccccatctgtccatgga

SEQ ID NO: 91397 - DNA, 600 bp, Chicken  19866894400651_3
ccttgccaagtaattttagctcttcgaactcattgtagtagcgtgaaaattgtctctgtgtttctgtgaagaatgaagcactggatatctggctgctgggcacaactgtctcaatgcaatctatacctgccgaatctgaaatgaggacatcgcagttaccagcactggtagaacggggtggtaaggcaccaggcmstgtcaaataggcattaggaagaagataagccctaaacaaccaagtgtaactaaatctgaaatatagaagtgctctgctgaggagagttaagctctggtacaaayataaaccttactgcagtgtttaattattaacattaattatagtggacaaaggaactgattctaacagaatatggtgagaaaagatgtttcactggaatataattttccaggaagaaaattaagactggcatttacaccacrtagcttcctctgctgatgagaatacagcagtctgaccaccccatctgtccatggacctaaaagctagtgtggtcttaaatttcctgattagttactgtaaagcatttgcagaaacatggtcttgtgatgatctagcacagttcagttcttctcttactg

SEQ ID NO: 91398 - DNA, 600 bp, Chicken  19866894400651_4
tgaggacatcgcagttaccagcactggtagaacggggtggtaaggcaccaggcmstgtcaaataggcattaggaagaagataagccctaaacaaccaagtgtaactaaatctgaaatatagaagtgctctgctgaggagagttaagctctggtacaaayataaaccttactgcagtgtttaattattaacattaattatagtggacaaaggaactgattctaacagaatatggtgagaaaagatgtttcactggaatataattttccaggaagaaaattaagactggcatttacaccacrtagcttcctctgctgatgagaatacagcagtctgaccaccccatctgtccatggacctaaaagctagtgtggtcttaaatttcctgattagttactgtaaagcatttgcagaaacatggtcttgtgatgatctagcacagttcagttcttctcttactgcagaagtggtccagttatttagtagaatacataaataaaagagtttctcaccatctagattttcttctgctacgggtattttcattcgtggaatgtttataaaactatgttgtaatagttgctgaggagtccacctttcct

SEQ ID NO: 91399 - DNA, 600 bp, Chicken  19866894400654_1
agattattagctacctgtctgtggacattttcaacttctttctattttctcagtgaaagacaagagcaagtgcagagacttgcaaatgaggaggaataatcccatgtaccagtacagcttaggggatgacctgctggagaggacctctgtgggctactacttgggtttcctggtggacaacaggttggccattagccagcagtgtgcccttgtagtcaagtaaaccaatgagatcccagggtgcattaaaaagtgtaaggccagcaggttgagggaagtgatctttcccctctactctgscaaaatttagattaatgtgtccacttcaggtctccgtattcaaaaaaagacaggaatctccttgaaggagtccagcagaggtccacaaagatgataagaggcctggagcatctcccttaggaagaaaggctgagtaacctgactctgttcagcgtggggaaaacactgagaggggatctgattaatgtttataaatatctgaagagtggggggaggcaaatggatgagtccaagctcttcttggtggtgtacactgataagacaagaagcaatggcctaatcctgaacataagaagttcc

SEQ ID NO: 91400 - DNA, 600 bp, Chicken  19866894400659_1
tactgtaagcttctgcagagtgactgcactgtcacagcagccttgcctgaataactagggtggaaaaaagtgtccacaaggccttaaattgtgctggagaaaggacagcgcctagcactgtgaaatcctgttagtgcctggagtagcaggtatggctgcaatacagctacataataataatgaattctcaacttctcccccagccccggaagaatgacagccgaatccttctcacccccagcctttcaaacaagcagctccaacccactgcagcgttacgggtaatcaatggctgcttakagtaaatcatatctcaaaatttagagctggctcctcgtccacrgaagcctcaggaagttgagaagtgtgggaaggacttttctgttctgaatgaatggaaaaaaatcaaatatttggaggaaaggcagtctcaaataataaataatgcaaaaactccaatataccttttaaagcttcagtgcccttataatttaatgtttaaatgctatgctgttcctttggaagccttttctatctcactgctgatgatggtctgtcttctcagacacttgaataatgtctctcttcctcttctaacat

SEQ ID NO: 91401 - DNA, 600 bp, Chicken  19866894400659_2
tgcctgaataactagggtggaaaaaagtgtccacaaggccttaaattgtgctggagaaaggacagcgcctagcactgtgaaatcctgttagtgcctggagtagcaggtatggctgcaatacagctacataataataatgaattctcaacttctcccccagccccggaagaatgacagccgaatccttctcacccccagcctttcaaacaagcagctccaacccactgcagcgttacgggtaatcaatggctgcttakagtaaatcatatctcaaaatttagagctggctcctcgtccacrgaagcctcaggaagttgagaagtgtgggaaggacttttctgttctgaatgaatggaaaaaaatcaaatatttggaggaaaggcagtctcaaataataaataatgcaaaaactccaatataccttttaaagcttcagtgcccttataatttaatgtttaaatgctatgctgttcctttggaagccttttctatctcactgctgatgatggtctgtcttctcagacacttgaataatgtctctcttcctcttctaacatcttccttgactacccctcatgcatagtaatgctaataatcgtg

SEQ ID NO: 91402 - DNA, 600 bp, Chicken  19866894400659_3
tactgctgcccattatgagctgttcatgttccatttagcggtatgcagaagaatcaagctaattgattacttatattgaataaatcgtggcgaagcactaatgatgcagtcgagattagctcgctattatgatgaatactgtacatatatatatgtaagcataatccctcttgaaagaacttaatcgttttcatcattagatagggacattttgcatccgaaacagagtcagtacccagcactgacacagcggatagcgccacgtgcagccatgcagaaggacaccttttgtacgacctratcggcatgaagttttacagttctttcctcagaggtgtattcagattcattcaatcacctcctaaatgtaataatgtaaatatggacgatagataagtactaagcccatttgtcaaggagaaccaggaaattcatctcaggtcctgaatgaaggaaggaccaaacatgcaagtagaatccgagatgtaactgttagtcttgtcctttcaccagcagggaacacacaaatgtgctttgtgcttctaagttatttttaagcaccttcatggccatcattaaatgttaaaaggatcttgtatc

SEQ ID NO: 91403 - DNA, 599 bp, Chicken  19866894400668_1
  misc_feature (1)..(216): n is any nucleotide
nnnnnnnnnnnnnnnnnnnnnnnnnnnnnnnnnnnnnnnnnnnnnnnnnnnnnnnnnnnnnnnnnnnnnnnnnnnnnnnnnnnnnnnnnnnnnnnnnnnnnnnnnnnnnnnnnnnnnnnnnnnnnnnnnnnnnnnnnnnnnnnnnnnnnnnnnnnnnnnnnnnnnnnnnnnnnnnnnnnnnnnnnnnnnnnnnnnnnnnnnnnnnnnnnnnnnnnntgttttgctgtaatgtgtattattctctcttcctagttgctatggatctttctccttctagaaaggaaagataaagggtttgcrggttgaaaacttactrtagaagtcttgttactttgaaaaatygcttttcaatacatcaagaagaaacagtgattttgttactgtactcctactaagcaagtaactttaaatatatatatatattaatgtttgatgttctgattcccctaatttattttggatgttgtagttctgattctctaccagtttggttgtcactgtttatactgttgcagtgtgttaatgcatgatgcagttattcgtgatagagttctgtaagttcacattgtccctgcagaaatgaatgcatggctcccgtc

SEQ ID NO: 91404 - DNA, 599 bp, Chicken  19866894400668_2
  misc_feature (1)..(200): n is any nucleotide
nnnnnnnnnnnnnnnnnnnnnnnnnnnnnnnnnnnnnnnnnnnnnnnnnnnnnnnnnnnnnnnnnnnnnnnnnnnnnnnnnnnnnnnnnnnnnnnnnnnnnnnnnnnnnnnnnnnnnnnnnnnnnnnnnnnnnnnnnnnnnnnnnnnnnnnnnnnnnnnnnnnnnnnnnnnnnnnnnnnnnnnnnnnnnnnnnnnnnnnntgttttgctgtaatgtgtattattctctcttcctagttgctatggatctttctccttctagaaaggaaagataaagggtttgcrggttgaaaacttactrtagaagtcttgttactttgaaaaatygcttttcaatacatcaagaagaaacagtgattttgttactgtactcctactaagcaagtaactttaaatatatatatatattaatgtttgatgttctgattcccctaatttattttggatgttgtagttctgattctctaccagtttggttgtcactgtttatactgttgcagtgtgttaatgcatgatgcagttattcgtgatagagttctgtaagttcacattgtccctgcagaaatgaatgcatggctcccgtctgtgaatgctgccttt

SEQ ID NO: 91405 - DNA, 599 bp, Chicken  19866894400668_3
  misc_feature (1)..(174): n is any nucleotide
nnnnnnnnnnnnnnnnnnnnnnnnnnnnnnnnnnnnnnnnnnnnnnnnnnnnnnnnnnnnnnnnnnnnnnnnnnnnnnnnnnnnnnnnnnnnnnnnnnnnnnnnnnnnnnnnnnnnnnnnnnnnnnnnnnnnnnnnnnnnnnnnnnnnnnnnnnnnnnnnnnnnnnnnnnnnnntgttttgctgtaatgtgtattattctctcttcctagttgctatggatctttctccttctagaaaggaaagataaagggtttgcrggttgaaaacttactrtagaagtcttgttactttgaaaaatygcttttcaatacatcaagaagaaacagtgattttgttactgtactcctactaagcaagtaactttaaatatatatatatattaatgtttgatgttctgattcccctaatttattttggatgttgtagttctgattctctaccagtttggttgtcactgtttatactgttgcagtgtgttaatgcatgatgcagttattcgtgatagagttctgtaagttcacattgtccctgcagaaatgaatgcatggctcccgtctgtgaatgctgccttttcctgagccgtcaactgctccaatca

SEQ ID NO: 91406 - DNA, 600 bp, Chicken  19866894400671_1
caaaaacagaggtggagcttgcacactaattgtgtaatgggatttaggacttttatacagtcacgtgatgtccatttggtcctgttcttgacactgaatacttagagggatgaacggtagcatttaaagagtttaccacctgcagctaattggtcctctgccttttcttttttccttgatcaaggttatagccttctcaggagaacgtcagcacaaaacacgtgaatgatccacagacactttgcggcagtcaagtatcttactgtaaatttttgatagaggtgagatttaaataatctktcaggttttggaattggacttgatgtggcaacatgtggacttgcatttgatcacacaactcttagccaggagctgtttgggtttttttggctgagcagttgtagcacaggtcatcatactgtatatgatagacctttttttgcaaacagtgtaatattctgataacgtctcaatctcctagatcctcagagacctttcaggggaggcacctgtctgttttcccccattacctcctttaatccttcttaaataaagctggctgagttgacataacctgccagtacttggctatggatgatg

SEQ ID NO: 91407 - DNA, 599 bp, Chicken  19866894400676_1
  misc_feature (1)..(10): n is any nucleotide
nnnnnnnnnntgtttttaacgctgttggtactgctaaatgtgttaggcatgagtgttcttgtttgtgtttttagcataggctagaggctgttttttagcttgtgtttctttgtaatcatcagatgtcaccattagccataaaggcacagaactgagatcattcaactgtggtttccttttcttggaattgatttaactagcaaaaactcctttcctctcttcactttatttccagcttcccttcacagattttacatcagccatgtgagaacgtgcgtatgtcatgttctacatcatttrtcttaaagtgcttccagataatttggtgttgttaattcttaactaggtgatgatttggataagctgctagagaaaatgctacagcagagaggggaaagtgtcattattccttttaatggagatgtgagtgagtgtgtgtcatctcaggaggcagttgccatggtatctacacaagaaccaggtaatgctttttacatgcaagatgtgaaatgagtaggttgttaaatgtcaaaatgcatatgccttagaagagtctgaaggctgcagtcactgtgccaaccttcaaatactaatactgc

SEQ ID NO: 91408 - DNA, 600 bp, Chicken  19866894400686_1
acctagattctactggtatctaaatcatgagcacagatacagaatggaactggacacacagagatataattcagttgtatgttacataaagagagaattactctttaatcatagaatctaataagcaattgctaagagatctattagacaacatctgtggaataaaaaaggtagacctctttggatgatgatggcaaaaaaaaaaaactagaagtacagggcataatgcaaaaaaggcagcagaatgcttatactaaaacaaagctcactcagagctatgtgtcttctgctttacagtawaattctgtacacttcttaaataaaaagggattttcaactcccatatgagatgttcagcaattaataacattaatggattcagatgaatttgaaagactggtatggacgagccacatgagaaatgcacagcattaataatgcagtgtgctttccctccctcygctcctcyaaggagacaagtcaagacaaatacatcttttgttcttaaaagttcacctcaatagcagactttaaaagtgtctttttcaagatgttttccttttgcaacaattcaatatacttgtgagaaaaataatacta

SEQ ID NO: 91409 - DNA, 600 bp, Chicken  19866894400686_2
ataaaaaaggtagacctctttggatgatgatggcaaaaaaaaaaaactagaagtacagggcataatgcaaaaaaggcagcagaatgcttatactaaaacaaagctcactcagagctatgtgtcttctgctttacagtawaattctgtacacttcttaaataaaaagggattttcaactcccatatgagatgttcagcaattaataacattaatggattcagatgaatttgaaagactggtatggacgagccacatgagaaatgcacagcattaataatgcagtgtgctttccctccctcygctcctcyaaggagacaagtcaagacaaatacatcttttgttcttaaaagttcacctcaatagcagactttaaaagtgtctttttcaagatgttttccttttgcaacaattcaatatacttgtgagaaaaataatactacagctgctatatcattatgaaagtcttcatactggacttagcagactaattgctatcagaggttcagagtaaaatgatttacaatgctatactactactggaaacattcataaaagctgggcattatagacgttctgtaattaatatgagggttcattgta

SEQ ID NO: 91410 - DNA, 600 bp, Chicken  19866894400686_3
ggtagacctctttggatgatgatggcaaaaaaaaaaaactagaagtacagggcataatgcaaaaaaggcagcagaatgcttatactaaaacaaagctcactcagagctatgtgtcttctgctttacagtawaattctgtacacttcttaaataaaaagggattttcaactcccatatgagatgttcagcaattaataacattaatggattcagatgaatttgaaagactggtatggacgagccacatgagaaatgcacagcattaataatgcagtgtgctttccctccctcygctcctcyaaggagacaagtcaagacaaatacatcttttgttcttaaaagttcacctcaatagcagactttaaaagtgtctttttcaagatgttttccttttgcaacaattcaatatacttgtgagaaaaataatactacagctgctatatcattatgaaagtcttcatactggacttagcagactaattgctatcagaggttcagagtaaaatgatttacaatgctatactactactggaaacattcataaaagctgggcattatagacgttctgtaattaatatgagggttcattgtagccaactt

SEQ ID NO: 91411 - DNA, 600 bp, Chicken  19866894400686_4
tcttaaaagttcacctcaatagcagactttaaaagtgtctttttcaagatgttttccttttgcaacaattcaatatacttgtgagaaaaataatactacagctgctatatcattatgaaagtcttcatactggacttagcagactaattgctatcagaggttcagagtaaaatgatttacaatgctatactactactggaaacattcataaaagctgggcattatagacgttctgtaattaatatgagggttcattgtagccaactttctagagtgctattgctgtctatccctaataaygcttcttgcttcatcaggaagcatcaaaacatgcaggagatccaatgaacccaatgctggtaattaatgatgctaaagctgttaaaatttttattttctccttgcargcatctcttctctcttttcaagtaaaatgtttatattacaggttttggacttcttccaaccacgtgctagaacccattagcagaagatgggaaaaaaagatgcattttagtggtgaaatacacacattcaatctgatgttgtgtacaaacttcttcaacgacttcatataaggtattacacatgaatagatat

SEQ ID NO: 91412 - DNA, 600 bp, Chicken  19866894400686_5
tatcattatgaaagtcttcatactggacttagcagactaattgctatcagaggttcagagtaaaatgatttacaatgctatactactactggaaacattcataaaagctgggcattatagacgttctgtaattaatatgagggttcattgtagccaactttctagagtgctattgctgtctatccctaataaygcttcttgcttcatcaggaagcatcaaaacatgcaggagatccaatgaacccaatgctggtaattaatgatgctaaagctgttaaaatttttattttctccttgcargcatctcttctctcttttcaagtaaaatgtttatattacaggttttggacttcttccaaccacgtgctagaacccattagcagaagatgggaaaaaaagatgcattttagtggtgaaatacacacattcaatctgatgttgtgtacaaacttcttcaacgacttcatataaggtattacacatgaatagatatttctgcttaataatctctaataaaaaacactaaatgagaccataaaaggaggtagaagaatatgtggaatgaacagagaaaaggagaggcagaaatgcctacatgcc

SEQ ID NO: 91413 - DNA, 584 bp, Chicken  19866894400695_1
atactcaaatgttaagataaaagatataaattaggaatatgaataaaatcagtttgggtaaggccatctggagttccttctgtctcaaattcacaaggagctatgaaagtgaagtagaaaagacatgtctgaagtggaattaatggaaacattcccttaatgaactgccaaaccatttacttatcattatgtcaataatggatgaatatcctcactttcagaaatgatttgtatgcatacaatggtgcagcaccacagcagtatcacagcaaggtgatatgagactgtgtattgcaaaaygtgagcaagcattactttttacaagtaaaggtgggaagctttcctatctggtgctttcttttgttgttatttgataaagcaaagagcggatggaacaagttagcttcatacagcacagtatacaaaggccacctcagttcaatttattttccgtgatgatgtcaataccctaaaagttctcagttggcagctgtctctaaaaggtaaagaggcatgcttttgatcttcatgtgtatttaaaggatactggagatcacctgaaaaattcatttcatattcctaaa

SEQ ID NO: 91414 - DNA, 600 bp, Chicken  19866894400702_1
tacagcacattttgtcagcatcagctgttgtcagaatgatccttacagtctgagatacccatcctgaactcccttgtacccagacgtgcagagctcttggcactatatccattgatccacaaaaggaggcaaacaaaccagcagagccatcacagctagagaaatggtagccattcatctttgcatactttagtattagtcactcagatcttacactttatcaataaactaatagtgagcagtaaggtcagaatagcagaaaatgttccagacatgctagcactagagggaattgtactytttttaaagatatctcatagaatcctaggaacaaaaatccaacaagtttagtaatgcaatgtccagtttatggaatagaatcttgctgcagtacttgtccaggtaagccttttcataatagaaaaggtggcagtgataccaaggaacaagacaccaagaatagactaagaatgacctaaactgaattaaaaagtagataggaagaaaaaagaaaaataacacagaagtctgtcagaggaaataaaggtgagttgtatttctcattgctattgaaccaactgactcatctgtagaatcctg

SEQ ID NO: 91415 - DNA, 599 bp, Chicken  19866894400705_1
  misc_feature (1)..(60): n is any nucleotide
nnnnnnnnnnnnnnnnnnnnnnnnnnnnnnnnnnnnnnnnnnnnnnnnnnnnnnnnnnnnagcttttttctgcggctccttgatggggtactttacaaactgaaaacggtacaaaagaaagaagacaaatgaacagcgttgcattagcaaatagctgatagattttagtttgcttttcacactcctaaaagtctccaacatcaaaacaaatcctcctgcaatggacagaaagtattactgacccaaagctacccatccgtagcactgatccccagctaagcaaaccaaagctagcattaygccagcaggtaaatggctctgtcttcctaaaacaaggctctgagaccagaactcactcacatgcacttagatatacaaggaaaggttgttactgaggaaggtcattcraggcagaacctgcaagctcagatgttttggtttcaaaccatgacacrcaagaacatgtgaaaaatgtaaactgcttccacacaacacagttctattttagcatcctcagaggtcgagctatccccttgctgctgctttctgaaatctattttccttgtatccagaactgcactgcgttacactaacccaat

SEQ ID NO: 91416 - DNA, 600 bp, Chicken  19866894400705_2
gtacaaaagaaagaagacaaatgaacagcgttgcattagcaaatagctgatagattttagtttgcttttcacactcctaaaagtctccaacatcaaaacaaatcctcctgcaatggacagaaagtattactgacccaaagctacccatccgtagcactgatccccagctaagcaaaccaaagctagcattaygccagcaggtaaatggctctgtcttcctaaaacaaggctctgagaccagaactcactcacatgcacttagatatacaaggaaaggttgttactgaggaaggtcattcraggcagaacctgcaagctcagatgttttggtttcaaaccatgacacrcaagaacatgtgaaaaatgtaaactgcttccacacaacacagttctattttagcatcctcagaggtcgagctatccccttgctgctgctttctgaaatctattttccttgtatccagaactgcactgcgttacactaacccaatggtccatattgacataatgaagattttgccgtgttaatgacccaggggtatgctggcagtgttctttaacacattcgtgccaccagcagatcrgttcaggttcagccag

SEQ ID NO: 91417 - DNA, 600 bp, Chicken  19866894400705_3
tgatagattttagtttgcttttcacactcctaaaagtctccaacatcaaaacaaatcctcctgcaatggacagaaagtattactgacccaaagctacccatccgtagcactgatccccagctaagcaaaccaaagctagcattaygccagcaggtaaatggctctgtcttcctaaaacaaggctctgagaccagaactcactcacatgcacttagatatacaaggaaaggttgttactgaggaaggtcattcraggcagaacctgcaagctcagatgttttggtttcaaaccatgacacrcaagaacatgtgaaaaatgtaaactgcttccacacaacacagttctattttagcatcctcagaggtcgagctatccccttgctgctgctttctgaaatctattttccttgtatccagaactgcactgcgttacactaacccaatggtccatattgacataatgaagattttgccgtgttaatgacccaggggtatgctggcagtgttctttaacacattcgtgccaccagcagatcrgttcaggttcagccaggcagatttgcgagctgatctgcagaaggaacagaatggcggaggttg

SEQ ID NO: 91418 - DNA, 600 bp, Chicken  19866894400705_4
tgaggaaggtcattcraggcagaacctgcaagctcagatgttttggtttcaaaccatgacacrcaagaacatgtgaaaaatgtaaactgcttccacacaacacagttctattttagcatcctcagaggtcgagctatccccttgctgctgctttctgaaatctattttccttgtatccagaactgcactgcgttacactaacccaatggtccatattgacataatgaagattttgccgtgttaatgacccaggggtatgctggcagtgttctttaacacattcgtgccaccagcagatcrgttcaggttcagccaggcagatttgcgagctgatctgcagaaggaacagaatggcggaggttgccatggcaacacggtacaactacacacctctctatggcaaccaggcctccctggaatactaaagagtgcccatggcaacacaaagctaacgacaagacgtctgcagaccaaatatttcatgtatcatttataacaaaggctataaatatatttgtacgtttcctgtgtgagatttgacgggtttggagccctgcaaaatgttacatctgcagccaacgtgtcaaaatggtacagcca

SEQ ID NO: 91419 - DNA, 600 bp, Chicken  19866894400705_5
cagaaggaacagaatggcggaggttgccatggcaacacggtacaactacacacctctctatggcaaccaggcctccctggaatactaaagagtgcccatggcaacacaaagctaacgacaagacgtctgcagaccaaatatttcatgtatcatttataacaaaggctataaatatatttgtacgtttcctgtgtgagatttgacgggtttggagccctgcaaaatgttacatctgcagccaacgtgtcaaaatggtacagccacagcttaaacagaaaatcctatttcaaggcaacgctraggatggcattcaattccacagacaaagaacatggagtcaacacacccaaagagcgcatcaccatgcacacgagcactgctgtcaacccgtaacgcactgcagctatctgcgcacaacgctgtgtgttcagtgaccatcagaaaggcactgcccctccccagcacacagcactgcagtgagcacagctctgttttccatatggcaactgctgcaatttgtgttccaaagtcaggaagcattgctttggcatacagggaagactcatggcaaggattcctgtcacttcttaggaatgttcc

SEQ ID NO: 91420 - DNA, 600 bp, Chicken  19866894400717_1
aatatccattttcattacagttaattgagttcagcaaagaagccttaatatcagtgaaaaaagcagaattcatcagtgtccaaaatattcagttatgtctaaatttaaatgaagtaaatggaaaatagcccaaatccaacataccattgacaaatttcatgtttcacttagtttttatttaacttgttatttttttcaactttctcctgcaatgttacagaaataaataataaaaacaaggcattcatgtatgagaagtaataaagaagctgtttaaaaattcccctccttcgactgtarttccrtaccaacactcattaagtgaatcagatagaaagatggaagaaattgacttcttatttgcttccttaattttgacacctctaaaatatattttagcagagaagacactataataataataataatatatttttacacgagttgtatctttttttaaggcttcattttcttcttgatcttctcatccacatgagcaaatctttcaaactacttcctatggatatgaggctgctaagaaaataatacatttcaccactaggtgatgctgatagtaagccaacagagccgttttatctg

SEQ ID NO: 91421 - DNA, 600 bp, Chicken  19866894400717_2
ccattttcattacagttaattgagttcagcaaagaagccttaatatcagtgaaaaaagcagaattcatcagtgtccaaaatattcagttatgtctaaatttaaatgaagtaaatggaaaatagcccaaatccaacataccattgacaaatttcatgtttcacttagtttttatttaacttgttatttttttcaactttctcctgcaatgttacagaaataaataataaaaacaaggcattcatgtatgagaagtaataaagaagctgtttaaaaattcccctccttcgactgtarttccrtaccaacactcattaagtgaatcagatagaaagatggaagaaattgacttcttatttgcttccttaattttgacacctctaaaatatattttagcagagaagacactataataataataataatatatttttacacgagttgtatctttttttaaggcttcattttcttcttgatcttctcatccacatgagcaaatctttcaaactacttcctatggatatgaggctgctaagaaaataatacatttcaccactaggtgatgctgatagtaagccaacagagccgttttatctgatacg

SEQ ID NO: 91422 - DNA, 586 bp, Chicken  19866894400722_1
tataggcaaggaatgttttcttgtcttttcaccaattttttgtgaggtagaagtgttctgtcgatcagtttattatgatgaggttttgctgcaattgcaagtgaaatctcttggtgttgcaaaaatgtgatttatatatgacagtggagtgtgtgagctgtaggtcaaacagtaaatattctactgcatttaggatagttctgtgtctaaggcattatctgtttgcctgctttctactatggtccccatagctatgttttctcatcactgggtgtaatttctgatgttgtagattttcargatgatcttagttaaaatcttccagtgtcagtttccaattttttaaaaattaggtatttccatatgctagagagtgtcaggagcatgaagtttgtatttcttgttgttggagaagacgggagaaataagtgacagagggaatgtcaatgttactgagagcacgcttagaaaacactaaaagaatggaaagcaatggcagcagttgatactgtcatttaaatttaattttaacaacaaaagcagaaattagaaactggaatgcacaaataaacatcatttctataca

SEQ ID NO: 91423 - DNA, 599 bp, Chicken  19866894400726_1
  misc_feature (1)..(7): n is any nucleotide
nnnnnnngaagtggtggagtcactattgctagaggtgttcaagaaacattttgatgttgtactgagggacattgtttagtgcgaaacacttgcacaacttgtcatcaccaagaggcttccatcagaacacaacaaaatcttctcaaaatgcagaagtctttgcgtttcaaccttcttgctctgtcagtgaatactactgcaaagagcatggctccatctgcctttccaacagatacttgtgcacatggatgagacctcctctgatcttcacacaacacacactccaagcccttacacatmtctaaggtcccttactggactctccccagtaccctcttacaygggggagggcagagctggacccagcactccagatgaggtctcaacaatgttgagaggaagggctacccccctctacctgctgacaccactgttcctgtcacagatgagtagttgttgactatctgccacaagtgcacattgctagcttatggccatcttggtgtcgaccagaagctctgaaaccaatctagttagcttcattttccagtgtaagagtaagatcgtaactgttttagatgaaagttacagaacttcat

SEQ ID NO: 91424 - DNA, 600 bp, Chicken  19866894400726_2
gaaacattttgatgttgtactgagggacattgtttagtgcgaaacacttgcacaacttgtcatcaccaagaggcttccatcagaacacaacaaaatcttctcaaaatgcagaagtctttgcgtttcaaccttcttgctctgtcagtgaatactactgcaaagagcatggctccatctgcctttccaacagatacttgtgcacatggatgagacctcctctgatcttcacacaacacacactccaagcccttacacatmtctaaggtcccttactggactctccccagtaccctcttacaygggggagggcagagctggacccagcactccagatgaggtctcaacaatgttgagaggaagggctacccccctctacctgctgacaccactgttcctgtcacagatgagtagttgttgactatctgccacaagtgcacattgctagcttatggccatcttggtgtcgaccagaagctctgaaaccaatctagttagcttcattttccagtgtaagagtaagatcgtaactgttttagatgaaagttacagaacttcatccaaattagaacacagctgtatyactccttgaatattactttc

SEQ ID NO: 91425 - DNA, 600 bp, Chicken  19866894400726_3
tccccagtaccctcttacaygggggagggcagagctggacccagcactccagatgaggtctcaacaatgttgagaggaagggctacccccctctacctgctgacaccactgttcctgtcacagatgagtagttgttgactatctgccacaagtgcacattgctagcttatggccatcttggtgtcgaccagaagctctgaaaccaatctagttagcttcattttccagtgtaagagtaagatcgtaactgttttagatgaaagttacagaacttcatccaaattagaacacagctgtatyactccttgaatattactttcctcatcaatcacatctggagatgaaaaaattgagtgattacatggcattgatggagaaaaaaggcagctactatacactgatagagtagcaccccttcagcaaactgtactacttcatgttagtaaatagaatttgatttccctatgaataacagctgtggtaaatctagagacaaagttctacagcagaggaattctaaccctgctataagcagaaaacaaggcaatattagaaataagagattggctcatttgtctctacagtaatatctacttttcc

SEQ ID NO: 91426 - DNA, 599 bp, Chicken  19866894400727_1
  misc_feature (1)..(28): n is any nucleotide
nnnnnnnnnnnnnnnnnnnnnnnnnnnncaccacactcccaccttccgtaggcagccaacatgcggcagtggggccgagggcagtgcagacaaggagtgaatgccagccccatttgtcaccagctctgacaatacctggggagttcagaccatgctgtgcttctccaaagctcagtcaccgcactgtgacatttaatcacaaacacggctgtgaaactgctgggtggtgggggaagattccaagcagattttggttccttttgtagattcccatttcctttaaatgctgtgtgtgaccgygtgctgtatcttccttgctaggaggacttgaaatgttcacgatttcaggcttgcttttgtaattaagagcttaagaaaactgtcccaaggaaaactgcaatttaacgccacatttttaaacatcttgctgataagcgtggaatatgtggaaatcctgaacgaaacaaaacaaataacactaacttggctgtctccatactgcacttcctgcctgccgcctccctcgtcccctccttgtgtgcttccctctcctccacctctgactcctctggtctgaagggactggatcagggaacagc

SEQ ID NO: 91427 - DNA, 600 bp, Chicken  19866894400731_1
tctcacccagttccccagcttctctcctgaagtgtatttccctgcaatggattctagatagataaggtgcaatcaccattacatagcacagtttggcaagttttgactcaacttccctgtatgtgattaattattaaatatacctccactgcttcttctcattttcttagtacttggacaacaacagtatccaaaaccagatcctttgtaaaaaatggcatgtaaagcaaatgattttcagagtcctgaattactaactgcagcacgatctgattgcccacaacagaagtactgctaccraaacacacctgctggtagccccgtgtcccccagccctggttcgagtccatccccagctaacgtaacgccacwctgctcacagggctatctcctgtcctaattaaccacgagtctcagctgaactctccgctggattttaattacagagttattaattcatggggaaaatactgacagatgtttcaggttggtcatagcaaattaaaaggcaggtgcctggcaccaagagtcagaaatgattaaacaaatgactcatggatgttcagctgttccacagcaaacagcgtccgcagctccgct

SEQ ID NO: 91428 - DNA, 600 bp, Chicken  19866894400731_2
tcaccattacatagcacagtttggcaagttttgactcaacttccctgtatgtgattaattattaaatatacctccactgcttcttctcattttcttagtacttggacaacaacagtatccaaaaccagatcctttgtaaaaaatggcatgtaaagcaaatgattttcagagtcctgaattactaactgcagcacgatctgattgcccacaacagaagtactgctaccraaacacacctgctggtagccccgtgtcccccagccctggttcgagtccatccccagctaacgtaacgccacwctgctcacagggctatctcctgtcctaattaaccacgagtctcagctgaactctccgctggattttaattacagagttattaattcatggggaaaatactgacagatgtttcaggttggtcatagcaaattaaaaggcaggtgcctggcaccaagagtcagaaatgattaaacaaatgactcatggatgttcagctgttccacagcaaacagcgtccgcagctccgctcggcattctgcagggcagggtgacttctcaggataaaaataactgcaacagatttcactatctcacttttaa

SEQ ID NO: 91429 - DNA, 600 bp, Chicken  19866894400742_1
ttcacactactcccaaaattgcagcccagccatttaaatcccacagatgactccaaagtgccgcacgcagaaccaagccagctgtttactctgcaaagcccgcggtggtttctgcattgataaactatataaccccccacacacagaagggattttagctctgccagacctcattgctctgtcctggtctctttatgcgctgtcacaggataaaaatgatcctaacacaaaccctgaaataataacttgctccagaaaggacatctttgtagatatttcctgaataactgccaaaaagawtttttttttttttttttgcccattcatcctttcaaagttttgctacagacacggccaaaattgtctgggagtcatccgaaatgacccaaacgtgtcccagcaagctgctgggaaggtgcaccctcacctattgctgctctsccggcgcaggggaagagcaagtatcaaggcacgttttgccaaaggagcaaaaaagaggctttaaaaactgccttgtggtttacgtttgctcttaagatttgaaagtaaatactctgtgaaggggtgtttaacttttgcactctttccgcctcgctattt

SEQ ID NO: 91430 - DNA, 600 bp, Chicken  19866894400742_2; identical to SEQ ID NO: 91429

SEQ ID NO: 91431 - DNA, 600 bp, Chicken  19866894400742_3; identical to SEQ ID NO: 91429

SEQ ID NO: 91432 - DNA, 598 bp, Chicken  19866894400742_4
cacagaagggattttagctctgccagacctcattgctctgtcctggtctctttatgcgctgtcacaggataaaaatgatcctaacacaaaccctgaaataataacttgctccagaaaggacatctttgtagatatttcctgaataactgccaaaaagattttttttttttttttttgcccattcatcctttcaaagttttgctacagacacggccaaaattgtctgggagtcatccgaaatgacccaaacgtgtcccagcaagctgctgggaaggtgcaccctcacctattgctgctctsccggcgcaggggaagagcaagtatcaaggcacgttttgccaaaggagcaaaaaagaggctttaaaaactgccttgtggtttacgtttgctcttaagatttgaaagtaaatactctgtgaaggggtgtttaacttttgcactctttccgcctcgctatttagaccgccctgtatttaattctgctggaagcacacttcgatttacgaagaaatgcaacagctctgcagttaaacctcacttattcccttccctccatgcaataaagcgtgcaagtagatctcccccttctgccagcaaa

SEQ ID NO: 91433 - DNA, 600 bp, Chicken  19866894400746_1
ccctacagggaggagcagccagtgccgttggaggtgctcaactcccagcatcctaccctggatgggcccagctggtttccagcacacacagcacgcgaggatggggctcacattcttgtaggtgaggtctgcagggactccgaagggacagatggtagtgagggagctggaggcagacggtggcctggtgggagctgtaggatcttggctgatctggttgcaccctttggtctccctgggaatggagcactgatgttaccattcctgctaagggaaagggaccccagcaggagaggcagsgacctccctggcctcacctccctggcggctgctgtgccaggcagttggagccaccagcactggcctgatgggactggagatgcaggctggccttcyggactgtcaccaagggcctgagggtgaggacgtgagggcagagctgggcagtggtcagtagtgcaggtacagtgcccgtggtctgacccaggggctgcacgctactcacggccttggggctgtggccagaagtctgtcacaggagatgcacttcatgggttcaaagaggtgcctgcaaaacaggggcagctgctaagcatccca

SEQ ID NO: 91434 - DNA, 600 bp, Chicken  19866894400746_2
gaggatggggctcacattcttgtaggtgaggtctgcagggactccgaagggacagatggtagtgagggagctggaggcagacggtggcctggtgggagctgtaggatcttggctgatctggttgcaccctttggtctccctgggaatggagcactgatgttaccattcctgctaagggaaagggaccccagcaggagaggcagsgacctccctggcctcacctccctggcggctgctgtgccaggcagttggagccaccagcactggcctgatgggactggagatgcaggctggccttcyggactgtcaccaagggcctgagggtgaggacgtgagggcagagctgggcagtggtcagtagtgcaggtacagtgcccgtggtctgacccaggggctgcacgctactcacggccttggggctgtggccagaagtctgtcacaggagatgcacttcatgggttcaaagaggtgcctgcaaaacaggggcagctgctaagcatcccactggcatgcagggaccgtgtgaggtcccacaggcagccagcatcccataggcagggtgggacaaacaggatctgtatgggatggacagggcaggat

SEQ ID NO: 91435 - DNA, 600 bp, Chicken  19866894400756_1
catccacaacctctctgggaaaccagcgcttcaccaccttctgcgtgaaaagcttcctcctaaatagatgaataggtgcctaggtatcccaaggaaaagagcctaggagcataaagaatagtacatccaggtgaagggacaggactcaaggctcttttctggactcgtgtgctattacttgaagatgaaacccacagccatgcctggctatgctcagaactattttatttgtagctttacctcagttaaaaattcattgtaaaaattaaaaacccgattctataatcgcacagcatatgrggacaaccctgcattgtttctattgtcaccaaagctgatgcacacatgagcaagcccccctgtttttttcttgaacccattaacactgactctaaagktttaaagaagtcctaccctgagcaaaatttcaaagagtactccagagaacaaacagtttttctgttgcctacaaaaagaaaagccacagggaaaggaagaaaaaaagaaaaagaaaaaaacaaaacagcacacactgcagtctactcctaagaatacccttacatctgcctgcagtcctgctccgtaaaaccctcccccaat

SEQ ID NO: 91436 - DNA, 600 bp, Chicken  19866894400756_2
gagcctaggagcataaagaatagtacatccaggtgaagggacaggactcaaggctcttttctggactcgtgtgctattacttgaagatgaaacccacagccatgcctggctatgctcagaactattttatttgtagctttacctcagttaaaaattcattgtaaaaattaaaaacccgattctataatcgcacagcatatgrggacaaccctgcattgtttctattgtcaccaaagctgatgcacacatgagcaagcccccctgtttttttcttgaacccattaacactgactctaaagktttaaagaagtcctaccctgagcaaaatttcaaagagtactccagagaacaaacagtttttctgttgcctacaaaaagaaaagccacagggaaaggaagaaaaaaagaaaaagaaaaaaacaaaacagcacacactgcagtctactcctaagaatacccttacatctgcctgcagtcctgctccgtaaaaccctcccccaattacccaagcagacaactggtttaaggattagcgagaactgatttttctccctgcgggtctcctgtttcactgttgttagatgagggtgggtgacggac

SEQ ID NO: 91437 - DNA, 599 bp, Chicken  19866894400759_1
  misc_feature (1)..(185): n is any nucleotide
nnnnnnnnnnnnnnnnnnnnnnnnnnnnnnnnnnnnnnnnnnnnnnnnnnnnnnnnnnnnnnnnnnnnnnnnnnnnnnnnnnnnnnnnnnnnnnnnnnnnnnnnnnnnnnnnnnnnnnnnnnnnnnnnnnnnnnnnnnnnnnnnnnnnnnnnnnnnnnnnnnnnnnnnnnnnnnnnnnnnnnnnnctgcacatagcaggggggttgaaactcgatgatcactgtggtccttttcaacccaggccattctatgattctgtgattctatgatcaaagaagaaaaaggttaaatttctgagamtctggaaacaccgatcgtgtgaatacatgaggaatgcaattgttacagtgctctgagtgttagcagggtatttaagagctagttaatgttgtatcagcacgaggaggaaggtttataggggtttcagatatgctacatatgtcatttgttcttcattcttgttatttgcggttaggtagtgacttgtgcaaatagtgcaagtgtacagcatgttatcctgtagtgtgagggggaaaaaaagagaaagtgaatgatactgcaatgattgccaggctgtgataaaccaaaaatgccagatc

SEQ ID NO: 91438 - DNA, 600 bp, Chicken  19866894400763_1
aagatgatggaaggacatgctttagttgaaatgtcagtgcccattgaagtaaaaccatgggtctaatgccatgccatgccatatgtcacgtttcttcctgtagttcttcctcagcataccagctttgacctttggtcttgaggcctttcagaccaacagaggtgaaaaaaatgtataaatatatatatatatatttatttacttggtaattggtgatcaaagtggaagcgtgagaactcctttagacaaactcaaatccccttgctctagtgtttggttttttttaaactgtccactgayggggggggtgctcatcgtttcatgctcctacttcttgttgtatgttcacccttatccactccatgcacagcaagctctgcatcccctgtccttgtcttcctggtgcatagccctgatgaactttccccacttgttctaccacatgcatcttctagttgttgtgaatggtattgtcaagaggagcagacacagagttttcagtgaaaactcttctggaaagctcttgtattagcatattctgttcttaaagaagatcactaaaatacagatatttattttctgaagagctcagagttaaag

SEQ ID NO: 91439 - DNA, 599 bp, Chicken  19866894400769_1
  misc_feature (1)..(14): n is any nucleotide
nnnnnnnnnnnnnntaggaaactgaagggctaccaaaaaaaaaaaaggcattttaatttcatctgtttgggaggtttatgaagttgttcctgcctggtgagagctcttgctgttttgtgctgcaaggtcagaggctgctgctcagcatcactactgcctggagcatggctcactgctgtgggacagctgctgcctgggagccacgggttcatgccattgcccagctgtgtcttccagagtcctgctgggagagctctatggcaaccaagtaaaatatgggcccttgctgggaaagccagrgaactsaagtctagcagcagccragagttattagtaatatgtgataaatatctgaaagtttcttgtcactaatacccaatgacagtgaccatttctctagtacttttgaaaaggtgcttacrgttccgcactgttggcccaataaccaacaaaatacagaaggaatgaggcgttagttacatttacaaagctagtaagtgcaagattaaaaggtgtaaaaattctgctctgatcttcagctctrtatgttgacccatttgagtgtgtgtaaggcttcaaattgcaccaggggatgttca

SEQ ID NO: 91440 - DNA, 599 bp, Chicken  19866894400769_2
  misc_feature (1)..(8): n is any nucleotide
nnnnnnnntaggaaactgaagggctaccaaaaaaaaaaaaggcattttaatttcatctgtttgggaggtttatgaagttgttcctgcctggtgagagctcttgctgttttgtgctgcaaggtcagaggctgctgctcagcatcactactgcctggagcatggctcactgctgtgggacagctgctgcctgggagccacgggttcatgccattgcccagctgtgtcttccagagtcctgctgggagagctctatggcaaccaagtaaaatatgggcccttgctgggaaagccagrgaactsaagtctagcagcagccragagttattagtaatatgtgataaatatctgaaagtttcttgtcactaatacccaatgacagtgaccatttctctagtacttttgaaaaggtgcttacrgttccgcactgttggcccaataaccaacaaaatacagaaggaatgaggcgttagttacatttacaaagctagtaagtgcaagattaaaaggtgtaaaaattctgctctgatcttcagctctrtatgttgacccatttgagtgtgtgtaaggcttcaaattgcaccaggggatgttcaggttgg

SEQ ID NO: 91441 - DNA, 600 bp, Chicken  19866894400769_3
gaagggctaccaaaaaaaaaaaaggcattttaatttcatctgtttgggaggtttatgaagttgttcctgcctggtgagagctcttgctgttttgtgctgcaaggtcagaggctgctgctcagcatcactactgcctggagcatggctcactgctgtgggacagctgctgcctgggagccacgggttcatgccattgcccagctgtgtcttccagagtcctgctgggagagctctatggcaaccaagtaaaatatgggcccttgctgggaaagccagrgaactsaagtctagcagcagccragagttattagtaatatgtgataaatatctgaaagtttcttgtcactaatacccaatgacagtgaccatttctctagtacttttgaaaaggtgcttacrgttccgcactgttggcccaataaccaacaaaatacagaaggaatgaggcgttagttacatttacaaagctagtaagtgcaagattaaaaggtgtaaaaattctgctctgatcttcagctctrtatgttgacccatttgagtgtgtgtaaggcttcaaattgcaccaggggatgttcaggttgggcactaggaaaaatttct

SEQ ID NO: 91442 - DNA, 600 bp, Chicken  19866894400769_4
caaggtcagaggctgctgctcagcatcactactgcctggagcatggctcactgctgtgggacagctgctgcctgggagccacgggttcatgccattgcccagctgtgtcttccagagtcctgctgggagagctctatggcaaccaagtaaaatatgggcccttgctgggaaagccagrgaactsaagtctagcagcagccragagttattagtaatatgtgataaatatctgaaagtttcttgtcactaatacccaatgacagtgaccatttctctagtacttttgaaaaggtgcttacrgttccgcactgttggcccaataaccaacaaaatacagaaggaatgaggcgttagttacatttacaaagctagtaagtgcaagattaaaaggtgtaaaaattctgctctgatcttcagctctrtatgttgacccatttgagtgtgtgtaaggcttcaaattgcaccaggggatgttcaggttgggcactaggaaaaatttcttctccataagagtagtgaggcaattcccagggagtggtggagtcaccaaccctggaggtgttcagggaacatgtagatgttgtgctgagggacgtggtt

SEQ ID NO: 91443 - DNA, 600 bp, Chicken  19866894400769_5
ctgggagagctctatggcaaccaagtaaaatatgggcccttgctgggaaagccagrgaactsaagtctagcagcagccragagttattagtaatatgtgataaatatctgaaagtttcttgtcactaatacccaatgacagtgaccatttctctagtacttttgaaaaggtgcttacrgttccgcactgttggcccaataaccaacaaaatacagaaggaatgaggcgttagttacatttacaaagctagtaagtgcaagattaaaaggtgtaaaaattctgctctgatcttcagctctrtatgttgacccatttgagtgtgtgtaaggcttcaaattgcaccaggggatgttcaggttgggcactaggaaaaatttcttctccataagagtagtgaggcaattcccagggagtggtggagtcaccaaccctggaggtgttcagggaacatgtagatgttgtgctgagggacgtggtttagtgggaaatattggtggtaggtgggtggttggactggatggtcttggaggtcttttccaaccttggtgtttctatgattctagggacatgcaaaaacccaacagaacaccttgaattcca

SEQ ID NO: 91444 - DNA, 600 bp, Chicken  19866894400772_1
tgccttaactctgcaggagcagcacagtgagctctgggccagtgctgagcctggaagcagcatacgttcatatgttcaaatgttgcagtactgaagctgttaaacccagccaggtaaagagcaggttttaaacagagccagagtggtatatctgcagctgtgacacaactgtgatagtctagataaaattagatcaagtgtccctggcttcatatatgcaacaaatacccagaagcaggacaaaccttttagatttagtaatgtattcatagtatattggactatctgtagaattctctyagaaatgttgaccttattcagcatttttgatatgtgctgtataattgcagcaatgtaaatgctggagctaagctagtacataaatgacgtgcagtgtgttttttgttaacaggcatggatggtcagaagcacttgctggtatcaaaagcccccatgtaaaatacatttgcccacacgcgtgagtttgtaacttctcttgtttcatcttttctgtacttgtgcagacagtgaaatcacatggggtttgggatggctacacttttcaactaagaagacatttaagacagttttgatgctatt

SEQ ID NO: 91445 - DNA, 600 bp, Chicken  19866894400773_1
aaactgtagaaggcaataggattgttaagcacaatttcctcttctcaaatccacatggactactcccagtcacctacttgtctttcatgtgtttgaaaatggtttccaggggaatttcctttatcatgtcatgcttgaacatctttggatctttcttatgctttgtgaagatacaagtgatatttttgttctcagacttcagtaacctctcccagctgacacaatcatttgaagataatcaagagtcatcttgcaatgacatcagccactgctgagcacatgtgtgtgcaacctgtcagmctctatttacattcactttgcttaagtgctatcctcagagtcgggaagtctttcttccttcagacactccctctgctttcaggggctgggattcctcaaggttggttttactgctaaaaactgatgctgtgctgtctgctgaccttgtcccacagctctttctcttggtggcacagttccttgcaaatcttctgcagcatgtcccagcttcagtgagaggccccaggcatcctttccattccgagtctcggtgagctgcatcctcctgaagctgcctgtgtccaaggaactgacagcaaa

SEQ ID NO: 91446 - DNA, 600 bp, Chicken  19866894400774_1
ttgaagacaacagcccaacattaagcaaaggttttcagttacatgacataacttctaagccttacatttcaaagttatattctgagagctcggtgtggatgactttggttttaatatgaatgttatctttttcctcaggaaatacttattatctggaattacagtcattttcttggttacagatattttaagatttatgtctcataaatcttaatcaaactcagcatttgactgcacacagaactgccacacattgccccccaagagaactctgctagtttgtgtgctgtaggcatacamttgagaagcagctctctaacacctacagccagctttaaaatagtattacctgtatcatttccttctttatgattataaacataaagaaaacagaagacacttaagaactgactgtcatccattaagattcataagtgaacaatagcatatttgccagaccacattccaatctttttcatagaatacaaatagtttggcatagcagtagttgtttggtaagtacagtatctgtagttcatagacacaaaacacatccataagcaaaaagcctgctggtgaatgccaagttatggtagaccc

SEQ ID NO: 91447 - DNA, 600 bp, Chicken  19866894400793_1
ctcagttagactgaccctgagctcatcccttccttccaggaagcactttgcaaagaggaccagttgcagacctgtgttcaaggagaggggctggggctcttgctcctaaatggagaggaagcaaagaactgaagtatatttaaaaaaaaaatctatgagggctggaaggaattctctgtctagagactttctagaaaacagagaaagataccctgcagctaacaaagaggttgcagccaattgcctggaagtagaagcactgctgcatgctcagatgttcagggggtgtttcaggtgcarcctgggactgcctggcagtggttggcagggggctggggagctgccccccaacacgtctcactggcaccataaggctttgagcagacatctgcccatgatgcctccctggcacttcctaagagctgaggggcacagagaaaagccctgttgagaaatctaggggcttgcaaagcaggggcaaccatccagcatagcccacagctcagggcactgcaacccctgctccttctgccctctctgcacaaaacaggggcatgaatctgtgagtgaggttgtcccaaatcgggtgcaggacaccca

SEQ ID NO: 91448 - DNA, 599 bp, Chicken  19866894400798_1
  misc_feature (1)..(102): n is any nucleotide
nnnnnnnnnnnnnnnnnnnnnnnnnnnnnnnnnnnnnnnnnnnnnnnnnnnnnnnnnnnnnnnnnnnnnnnnnnnnnnnnnnnnnnnnnnnnnnnnnnnnnngaagcattaacttacttagctgccttgagaatcgaactcaaaaagctgtgggttttttcatacttcagtctgaatacgctaccagctcagaggcatttttcatcaaatttattgttttcacattatctaaaagaccaaagttcttctgctgtggtttaaaaaagaaatatgtctctgtgatgcatttaaatcttactstaagtagggaaatgtagcccaaacagattctgctctgcccagtgctcaaaatctccatcaggaactctaaagcagattagtgctgagagcatgagagaattacagctctcagaagacatcttgagtgaggcatataggcgtcagcagctaagattagtggttctcaaggttctcataactccctggataattaagaggcagccacayggcatttgaacacgtacaagcaaactaaccggaatcgatgtaccataatgaattatgagctctctaacccagcaagcagctgacgaaagagc

SEQ ID NO: 91449 - DNA, 600 bp, Chicken  19866894400798_2
aatttattgttttcacattatctaaaagaccaaagttcttctgctgtggtttaaaaaagaaatatgtctctgtgatgcatttaaatcttactstaagtagggaaatgtagcccaaacagattctgctctgcccagtgctcaaaatctccatcaggaactctaaagcagattagtgctgagagcatgagagaattacagctctcagaagacatcttgagtgaggcatataggcgtcagcagctaagattagtggttctcaaggttctcataactccctggataattaagaggcagccacayggcatttgaacacgtacaagcaaactaaccggaatcgatgtaccataatgaattatgagctctctaacccagcaagcagctgacgaaagagctgatgaaagccctaccagcacctcagtatttctaagcagcagtgccagaattgtcatgtgttgtgactgcccatgtgccacccagttggcagccattaggctgaccctcccaattaccttcaagggaaataccctcacctctgctgttayggaaccaagagcatttggtcacagttgcaggtggcagctcagagctaagtaggtctgg

SEQ ID NO: 91450 - DNA, 600 bp, Chicken  19866894400798_3
aagattagtggttctcaaggttctcataactccctggataattaagaggcagccacayggcatttgaacacgtacaagcaaactaaccggaatcgatgtaccataatgaattatgagctctctaacccagcaagcagctgacgaaagagctgatgaaagccctaccagcacctcagtatttctaagcagcagtgccagaattgtcatgtgttgtgactgcccatgtgccacccagttggcagccattaggctgaccctcccaattaccttcaagggaaataccctcacctctgctgttayggaaccaagagcatttggtcacagttgcaggtggcagctcagagctaagtaggtctggaagcgcctgcctcacaaatctgagaaagaacagaaaagggaatatttatgtatgtatgtatgtatttatttatttattctggccaggtttctattcccaagggcatctctaggagtagtatagcagaaccaagcagaataggcagccacagaaagcagcaaaatgtgtctgatttacctgtggccgccctgtaagaaaaatgccctcccactgagtttgttttgggaggattccacctcagc

SEQ ID NO: 91451 - DNA, 599 bp, Chicken  19866894400799_1
  misc_feature (1)..(83): n is any nucleotide
nnnnnnnnnnnnnnnnnnnnnnnnnnnnnnnnnnnnnnnnnnnnnnnnnnnnnnnnnnnnnnnnnnnnnnnnnnnnnnnnnnnaacagaacattgctttctatcttcagcagtatgtgaagttttgcataaacttcctgacagtcaaagacatgcagaagtctataacactacagcctaactcaacaaaaatccatcttccagatcacatccctcactacgaaccttttgaaggctcacaggtattgagacaaccaaaaaacctccctgttcaagtctagggcttttctgctcaacctamtgtagagaagctgcttttagctcaatctccagaggtcccttccaacacctgtgtatgattctatgatattaagggatttacacataacagcagaaataattactgaagaaattttaaagactctacccacaagcaagcagaacatatgaaattatgtcagccagacaaacgcttctcttgtaagagctatgcaagccacaacaaagtgttctcaaaattaatactaaggtgacacgtatgtatttgcttccactttgcaaacaaaatactgaaggtgtttccaaatttattaagattaa

SEQ ID NO: 91452 - DNA, 600 bp, Chicken  19866894400807_1
gagggaacagcagtgatatgtgctagaaagcactggacagtttttaggtttttcttgaagatctattagagcattctccatgaggatgccttccttgaggtttgttctgcccggcagaagtgttgcagggagctgaggaaagataccaatgttcaaaggcaaatacatggtggagattgtagcagctgactgtgctcctccaggaacggaggagaacagtaaagtgtccaaggcaagtgagtgaagacagtaatccactcctttcttgtcactgaaacctctattacaacaaggagccargctctactgcactgaccctgaatgcagctggatgttctgctcagctctctgggtttctcacagagtgcaaagatggatttgaagactaacagcactgaggataggagcatagcaagaaaatatttacagtagtcccaggacacactgacatgagtacagcgactagaaataacaagagataagatttaattaaaatcctacatagcactcaggtttacctgcagtaagctttgtgaggctggttcctctgccctcagggaagggatggttgtatgcttactttagatttactttgatctt

SEQ ID NO: 91453 - DNA, 600 bp, Chicken  19866894400818_1
cacactgccctaaaggcaggacagggagcagtcattccagttctcagtgattaaaatggcagcaaaaaacaacacatgtaggtaagatggtaaaatggaaatcaagcacatagaaggtgacagaggctcatgtcccagaggtacccgtgggtgggtatctcttcctcccaagaaatgcttcaactcacccattttaatgcagactaaaataaatttggataccttgagactgacatcaaatgctattatcatcaagtgaattctcaaagtgctcttcacttcattttaaaaacaaagggraaaaaaacccaggttgctcagcactcagtgtgtttctttttcagatttcaacgttttctccctaatttcaaggcaccaaacccagggctcaccccaaacaatgcagccattagctctgttttcccctcttttcggcagctggcaggcagccagcacatttcagtttgcagacaggttggacggtaacacctgttcctattacagcagcacccatgggtaatgcacttcagttgtcaccatctccactgacaacctttcatcacaacatcagtgagcttccctaattttcccagagacgtt

SEQ ID NO: 91454 - DNA, 599 bp, Chicken  19866894400828_1
  misc_feature (1)..(94): n is any nucleotide
nnnnnnnnnnnnnnnnnnnnnnnnnnnnnnnnnnnnnnnnnnnnnnnnnnnnnnnnnnnnnnnnnnnnnnnnnnnnnnnnnnnnnnnnnnnnnnaattatacattgtctttcacaatacaaatctaacttatgaatttttccaagtaaagggactgctcatgtgaataagtacattcactggtcaaatctgtaaatggtgctcaggccttgtgaaggatgactggagagaagggtactgtttggtgcagcatgttatgtatatgggtcttcatatagcttttctacctcttgcaactaaraaatactcatagagatcatgacgttcctgttactactcaccaaaagggcaaagctggaacgtaacagcagcaagatttcaaatctttagtctttcagatgaaatagaatcacagaaacatggaatcattaaggttggaaaagaccactaagatcatctagtgcaaccatcacatcatgcccactaaccatgaccctctgtgccacatccatagggttcttaaagacctccagggacggtgactccaacatctctctgggcagcctgtgccagtgcccgaccacactttctgagaagaaa

SEQ ID NO: 91455 - DNA, 600 bp, Chicken  19866894400829_1
tgacatagctttaagtataggaaattctaggaagtgttttctctccattgctcttttgttgtgagatagataagctgcacatctagagcagcgtcccactatgttgtggaagtgtccataactgcatgcaccatacttctgttaccacttcctgtatgttttcattttttggtagtgttactaaacataggcagtttgcagcatttccagaaagcatgtccacagcagggggttgcaactggatgatctttagggtcacttccagcataagctattctatgattctagaagcaaagcacrgtatttcraagtttgtcatatatgtgcagttatctgtctmtyaagatagataactgaagtgttgcagctgtgttaagctaccattgataccttggtgtttgtttgacagatgtgtttgccttcaattaggagtgttagcactgtaaggattatgctgtcatcactctaaagatggaagttgcagaggctgagaacctctaaaggccacttgtttcagggcttctgggtggtggcacagaggccccagcctgttaaaggaaacaccttgtgtctgtcgtggcagagggaacatagcaggtg

SEQ ID NO: 91456 - DNA, 600 bp, Chicken  19866894400829_2
ctttaagtataggaaattctaggaagtgttttctctccattgctcttttgttgtgagatagataagctgcacatctagagcagcgtcccactatgttgtggaagtgtccataactgcatgcaccatacttctgttaccacttcctgtatgttttcattttttggtagtgttactaaacataggcagtttgcagcatttccagaaagcatgtccacagcagggggttgcaactggatgatctttagggtcacttccagcataagctattctatgattctagaagcaaagcacrgtatttcraagtttgtcatatatgtgcagttatctgtctmtyaagatagataactgaagtgttgcagctgtgttaagctaccattgataccttggtgtttgtttgacagatgtgtttgccttcaattaggagtgttagcactgtaaggattatgctgtcatcactctaaagatggaagttgcagaggctgagaacctctaaaggccacttgtttcagggcttctgggtggtggcacagaggccccagcctgttaaaggaaacaccttgtgtctgtcgtggcagagggaacatagcaggtgtagtggaa

SEQ ID NO: 91457 - DNA, 600 bp, Chicken  19866894400829_3
ctctccattgctcttttgttgtgagatagataagctgcacatctagagcagcgtcccactatgttgtggaagtgtccataactgcatgcaccatacttctgttaccacttcctgtatgttttcattttttggtagtgttactaaacataggcagtttgcagcatttccagaaagcatgtccacagcagggggttgcaactggatgatctttagggtcacttccagcataagctattctatgattctagaagcaaagcacrgtatttcraagtttgtcatatatgtgcagttatctgtctmtyaagatagataactgaagtgttgcagctgtgttaagctaccattgataccttggtgtttgtttgacagatgtgtttgccttcaattaggagtgttagcactgtaaggattatgctgtcatcactctaaagatggaagttgcagaggctgagaacctctaaaggccacttgtttcagggcttctgggtggtggcacagaggccccagcctgttaaaggaaacaccttgtgtctgtcgtggcagagggaacatagcaggtgtagtggaacccattgctctataaatcaggctgaattttgt

SEQ ID NO: 91458 - DNA, 600 bp, Chicken  19866894400829_4
ctccattgctcttttgttgtgagatagataagctgcacatctagagcagcgtcccactatgttgtggaagtgtccataactgcatgcaccatacttctgttaccacttcctgtatgttttcattttttggtagtgttactaaacataggcagtttgcagcatttccagaaagcatgtccacagcagggggttgcaactggatgatctttagggtcacttccagcataagctattctatgattctagaagcaaagcacrgtatttcraagtttgtcatatatgtgcagttatctgtctmtyaagatagataactgaagtgttgcagctgtgttaagctaccattgataccttggtgtttgtttgacagatgtgtttgccttcaattaggagtgttagcactgtaaggattatgctgtcatcactctaaagatggaagttgcagaggctgagaacctctaaaggccacttgtttcagggcttctgggtggtggcacagaggccccagcctgttaaaggaaacaccttgtgtctgtcgtggcagagggaacatagcaggtgtagtggaacccattgctctataaatcaggctgaattttgtcc

SEQ ID NO: 91459 - DNA, 599 bp, Chicken  19866894400834_1
  misc_feature (1)..(195): n is any nucleotide
nnnnnnnnnnnnnnnnnnnnnnnnnnnnnnnnnnnnnnnnnnnnnnnnnnnnnnnnnnnnnnnnnnnnnnnnnnnnnnnnnnnnnnnnnnnnnnnnnnnnnnnnnnnnnnnnnnnnnnnnnnnnnnnnnnnnnnnnnnnnnnnnnnnnnnnnnnnnnnnnnnnnnnnnnnnnnnnnnnnnnnnnnnnnnnnnnnntaaggaaatatgagaagaatttgatcagatttagtgatattttcagggacagagtttaatcactgtcagcctgaaagctcttagatattatttgcaggtctgatycgatgacactgaagtaagaggacagactgcagtgagctacatgggtttaacatgggttttaaatgtgacataccacagctttatcaaaatctacatgttaaataagttttattatttttagttcaggaaggaaggaagtcagaggacccaccaggctctggttgtgcaaatggtgtgtgtttctggtgcgtaggtaggtgttcagtaggcaacagccctttccgctgatggcagcgcacatctctggtttttgagaggtgacagtatcggtgtcctttggatgtgaatgcttctttcac

SEQ ID NO: 91460 - DNA, 600 bp, Chicken  19866894400840_1
ttttgtttttctgtacaattctgtttatttagttgtattgcaagaggtcttagaagacccaagaaaggattagaaacacactgtgtcagtgctacagaaatacaaaacagggacttcaatgggtttgtctttctaattgaagcgtgtaagatttaagtatgtacatctgacctcgttacctgtctctcttcacatatacagaggcaggaaactattctgaaacctgattctcattatatatctaaccaattccttttgagaatgagaaaacgtattgactaaacatgtttagttctcacmattgactgtaaatcagtgtatttctatatcacagcagtgcggaatggttagtgttggcagggaccttgaaggttatcaggtccaacctccttcctcaagcagggccacctacagcaggtcgtccaggacatccagatgacttttgagtatctcaaagagggagactccagttctctagaaaacctattcccttgctcagtcactgtcataataaagaagtattccctgatggtctgatagaacctcctgcatttcattttgtgcccacaaactctttgttgttgggcattactgggcgtc

SEQ ID NO: 91461 - DNA, 599 bp, Chicken  19866894400841_1
  misc_feature (1)..(140): n is any nucleotide
nnnnnnnnnnnnnnnnnnnnnnnnnnnnnnnnnnnnnnnnnnnnnnnnnnnnnnnnnnnnnnnnnnnnnnnnnnnnnnnnnnnnnnnnnnnnnnnnnnnnnnnnnnnnnnnnnnnnnnnnnnnnnnnnnnnnnnnnnnnngcccagcacgcttcccgctgcgccactctgctgttataatcttcctcagaagcaagcaaaatgaatggctgctttacagaacctgtcatctgcactttaattacagggttggtgcaagtgccatcatagcattttcacacctggaaatgctcagggttcwgaacctgttctgaactggtcaagtgctatttattcccgctgctcttttctctgatttccccaaatgatatcatttttttgcaatcccactgcagatgtgtgtaaacacgctggcttttatttgtaactccggctttttgttgcgactgctaatctggtcgcagccagaattctgtaatttgacagagatgtcactcagaaattgcatcagattacagaaatattctgctgtggcagataggaattagcctgaagagaaagttgccgatggccattacacacaaagcaacagaccttaat

SEQ ID NO: 91462 - DNA, 600 bp, Chicken  19866894400846_1
atgcagctgattcttaaaaaaccaaaactaataagatggtgatgggatattctgacctgaagtgctccttgcagcagtaagggggacaggttcactgaaagcagcagcgtgcccttcttcagctgcatcaggggaaactgttctccaggcctctctggctctgtgttcctccatgtcctgccatgttgtccttgtggtatcagagcaatctgactgtgacatgacaccttttctccttgctgtgacttaagatgctctggaatgtaaaagggaagacaaccatttttattcttttcaaayggagtgtggaaatactgaaagaatactgcatagatgagatacctcggaactgaagatgggagggagcccagatgagtgtaagcaaaggtggaagaaatragggaatgctgaagatgacagcagggtggggaaggtggaggttcacctgaccagagtaaagaagccacttctgttgaccgggctcttagattaggttgtacatcatctcgaggtaggcagttgtttcagaagtacagaaatagatgagcctgccaggtacctacagagaaaccttgcacattgtctctcttgacaactccc

SEQ ID NO: 91463 - DNA, 600 bp, Chicken  19866894400846_2
agcagcagcgtgcccttcttcagctgcatcaggggaaactgttctccaggcctctctggctctgtgttcctccatgtcctgccatgttgtccttgtggtatcagagcaatctgactgtgacatgacaccttttctccttgctgtgacttaagatgctctggaatgtaaaagggaagacaaccatttttattcttttcaaayggagtgtggaaatactgaaagaatactgcatagatgagatacctcggaactgaagatgggagggagcccagatgagtgtaagcaaaggtggaagaaatragggaatgctgaagatgacagcagggtggggaaggtggaggttcacctgaccagagtaaagaagccacttctgttgaccgggctcttagattaggttgtacatcatctcgaggtaggcagttgtttcagaagtacagaaatagatgagcctgccaggtacctacagagaaaccttgcacattgtctctcttgacaactccccttatacaacatctgctctgtaagtaatgcctcccattttcttatattgatccataacattggagacagatgttgattgcatggcagtagaggtagaac

SEQ ID NO: 91464 - DNA, 582 bp, Chicken  19866894400857_1
tggggttcaacagtcataaaacccctagcagtttatggttataaaacaaaaatacaaatactaatttggagatcagagcaaaaacttcctagaaggtattagagtactgatgctaaacttttacattgcaattctgataaaaacatgctttcttctgaagtccatccctaacttcaggaaataatatcttaaaaatagacaacttgccaaaagtattgtcctctcctctgttctgtttttatattgcattcaccccttctcaaaggcttattgcttataatgacaagaaaataaatatgygtttttgaacatgttatggtgctgctaagggtttagagtttaggaagattggatttaattaaaagaatgtgctgtaagatgcaggatgagactgactttgggaactcttgcttaggttataaagtaaggttatatattctgtttctggcttcagaacctagaaagcacgtgcattgtctagcaaactgaaaattgctattttcatcagtgatgaagcgaggacctcgaatactgcaagcatcagtatctggagggaccacacgtactatcctgaagataagg

SEQ ID NO: 91465 - DNA, 600 bp, Chicken  19866894400860_1
agtttggagttgctctgtgctagaatcattacagaagacatttcagattccactgcttcatttgttacagaagacaaaagggtgcaggtgtattccccactgtggaatgagagtgaaaattcaactgcagttcaacattggcacttaggagtgcagctgccatgattgtcactgtacataattgtagcaacattgttatatgtgacagaattcagcctgctacttccagaaataacttcaggaccttctaagtcttcttcagattccctacctgatgtgcgtgcatgaaacgctttaatkatgcctggcttcttttttcatctttcttgtaatgttttgcatctcccacttcagtttatttattttatttttaaccttctttgcctcaaccagatatacttgttacattccacgggctaagctaggtagttaaaagaattaaaagttagtagaaagagaatggatgatttcttgtctaaggcagtttaaacctgccctaaggaattagatgctatctctgacctgcaaacttcttatacaacagcaagccactcaaagcaatttttgttagtgatcactaaatgagtgttctttatgcat

SEQ ID NO: 91466 - DNA, 599 bp, Chicken  19866894400867_1
  misc_feature (1)..(66): n is any nucleotide
nnnnnnnnnnnnnnnnnnnnnnnnnnnnnnnnnnnnnnnnnnnnnnnnnnnnnnnnnnnnnnnnnnattgcaaatcctcctggtactttacatttaatcacaagcaatttatggtaatatattccacatgtctgataccactgagaaaaaaaagttgcaaatgaagcttgctgatgcctccaggaagaaagctgctcattctgttctagcagactacagcaacgcaatgtatagcgttcactccacacccccaaatgctggaagccattgtttcatgctcatacagaaccagtgtgagcrttgggcaccgaatgggctgtgagaatatctgtcacatgaatcctgggtgacttagaaatatcaagaattgaaaaagaaactttgctgatgtttcactgcaaccatagaagagtatcagtattaatgtgccttttttcatarttgaatgatgtttcagagtgcraaagtatttctgaatacagcatacattctcccttcttgatattacacctactcacagatggtttttaaatcagccagattttagaaaagcaaaatcattttaaaccaggctactgcaatactgctggaacactcac

SEQ ID NO: 91467 - DNA, 600 bp, Chicken  19866894400867_2
tgagaaaaaaaagttgcaaatgaagcttgctgatgcctccaggaagaaagctgctcattctgttctagcagactacagcaacgcaatgtatagcgttcactccacacccccaaatgctggaagccattgtttcatgctcatacagaaccagtgtgagcrttgggcaccgaatgggctgtgagaatatctgtcacatgaatcctgggtgacttagaaatatcaagaattgaaaaagaaactttgctgatgtttcactgcaaccatagaagagtatcagtattaatgtgccttttttcatarttgaatgatgtttcagagtgcraaagtatttctgaatacagcatacattctcccttcttgatattacacctactcacagatggtttttaaatcagccagattttagaaaagcaaaatcattttaaaccaggctactgcaatactgctggaacactcaccaaagatgggtgatagatgctttgtaggaatttgatggcactgagatattcactgattagctctctcttgaccccagatgaaaccagggcacctgrctctccctcaatttacagttcagaattaaccaggaaacctggcaca

SEQ ID NO: 91468 - DNA, 600 bp, Chicken  19866894400867_3
aagcttgctgatgcctccaggaagaaagctgctcattctgttctagcagactacagcaacgcaatgtatagcgttcactccacacccccaaatgctggaagccattgtttcatgctcatacagaaccagtgtgagcrttgggcaccgaatgggctgtgagaatatctgtcacatgaatcctgggtgacttagaaatatcaagaattgaaaaagaaactttgctgatgtttcactgcaaccatagaagagtatcagtattaatgtgccttttttcatarttgaatgatgtttcagagtgcraaagtatttctgaatacagcatacattctcccttcttgatattacacctactcacagatggtttttaaatcagccagattttagaaaagcaaaatcattttaaaccaggctactgcaatactgctggaacactcaccaaagatgggtgatagatgctttgtaggaatttgatggcactgagatattcactgattagctctctcttgaccccagatgaaaccagggcacctgrctctccctcaatttacagttcagaattaaccaggaaacctggcacactcaacttttaatttgggaaag

SEQ ID NO: 91469 - DNA, 600 bp, Chicken  19866894400867_4
ctgcaaccatagaagagtatcagtattaatgtgccttttttcatarttgaatgatgtttcagagtgcraaagtatttctgaatacagcatacattctcccttcttgatattacacctactcacagatggtttttaaatcagccagattttagaaaagcaaaatcattttaaaccaggctactgcaatactgctggaacactcaccaaagatgggtgatagatgctttgtaggaatttgatggcactgagatattcactgattagctctctcttgaccccagatgaaaccagggcacctgrctctccctcaatttacagttcagaattaaccaggaaacctggcacactcaacttttaatttgggaaagggaaacactgtttggcaagcttgcaaggctgctgaccctgctctgctggaaccacacaaaccattctgctctgcaccgcatcctgagctactcagtctttccttacatgagtcctttgaatctgatctatgtgaacaggaacttacagagcagagccacagggtcttctcatcattccatgcctggctgtaggtgcaggagttgggcagcactatgatatgattttatctgt

SEQ ID NO: 91470 - DNA, 599 bp, Chicken  19866894400873_1
  misc_feature (1)..(192): n is any nucleotide
nnnnnnnnnnnnnnnnnnnnnnnnnnnnnnnnnnnnnnnnnnnnnnnnnnnnnnnnnnnnnnnnnnnnnnnnnnnnnnnnnnnnnnnnnnnnnnnnnnnnnnnnnnnnnnnnnnnnnnnnnnnnnnnnnnnnnnnnnnnnnnnnnnnnnnnnnnnnnnnnnnnnnnnnnnnnnnnnnnnnnnnnnnnnnnnnaagcaatgatgctgatgaaattagtagttctatatatgcagtatacaggaggatgagagtctggctcgtgtgtatatacatacacgcacacagacaagtaaatactgwaatcttgcactagacagtcttgcttggagttgcacgaggattctagaggatagttctagaaacagtctaacaagcagtaccagtagtagcaaaactgtgggccttgcatatcgagtactatcctgtcagccactctgcttagaatgttgtaataatctgatgttcttagctgctttctgttgaggcagcactatagcagaatcaacacaggcctgaagcctctagcaaaagactgagcttttgtagaaaaactgatgtactggcttagatgtgctacagaaatggatggggtgagagct

SEQ ID NO: 91471 - DNA, 600 bp, Chicken  19866894400885_1
agtaaagtcaaggtccccccttttgtgtgaaggaacacagctttcccaaagcccagcccacagtgcagcgctctcctacctgttgattcaatcatatatacagccttacatcctgtttttgaacagtgctttaaatccacaaacaacctccccaggtaagtttggggctcggccctacaggatttattttgaagtatccaaggatgtattgtattcaggcagctgtgtctgcgtttgctggcagataagcagaggattccatttgtagactgtcaatccagcacctttctactggcatcrcattccctttaattaaaagtagaaagctctgacagtctgttaaaaatggaaacacttgcaggcaactgtactattaactgagaactgtttccaagtttctattgttaattattatcattactaagtattcagagcagggaacacatttacgctactgctctgtactcagcatcagtctgcaattaatttccaagagtaagtgttaccactgtgattaaaatgaactagatgtatacacccccatctctgtattgttcccttgatgtccctccagcagagtgatgctctgaggtgtttgat

SEQ ID NO: 91472 - DNA, 600 bp, Chicken  19866894400892_1
agaacctgtatatccatcacatttggcaatgatgcccaattactcagtacagcccactgaatcaccaaaaccacttcctgccatggactttcctgtaaatcacctctcaaatactgaccaagcccagccttgcttagtcgtatgaaatcatacccttaggtggtgcgactgcaagcacaaacagtgtacatctgtcatatcagctcacttagtaatccagttgctttctgcagaattaagcctttctctcaaggctgtcagtagatgtagtcttataagaacaataacagtagtgaaacrgtagtgcaatagtctgaatagagtatatgcaaatatcagcattatttcttttatctattctggtcaatgatgaaaaaacatggtgcacaacagtggtagatgttgatggtaatttcctattctgactacttactagttatctattgttaaaatttagaaatgaagatctaaaaaaggataactgatgccactatggtacaattttatgaacaaacgtaggtttaaggacttactgagagtcttcaacaacattaaatagagacaattttttcaagatagagtgtttaaatttaggtatct

SEQ ID NO: 91473 - DNA, 599 bp, Chicken  19866894400895_1
  misc_feature (1)..(84): n is any nucleotide
nnnnnnnnnnnnnnnnnnnnnnnnnnnnnnnnnnnnnnnnnnnnnnnnnnnnnnnnnnnnnnnnnnnnnnnnnnnnnnnnnnnntttgtgcagactgtgatccgcgcagcagaaaagctacaaataagctttcattcctgttctactgctcattagttacctctcccttcccttctcttcttttcttttcccagacaaaatagaaattgcctcagagaaagcaaattctatactcaaatgtcacatctccgtttccaggggaggccaaagtagatgtttaggtggacgaaattagcagarcaaacttagagtaattcctatttctttagcctttgtccttcgagaaatcagatagggggatatctttgtaactgttgccttgagaagaaaaacatgagagagaggctgactttgtttgttttcttatgtaatttaaattctgccttgatgcttgagtcattggatagtcttttaaatcatcagttctttggggcagcatttatcatatgtgaagctcatttctggttgtaatttgattaattgcctactaccaataaaggtgatggtaagaaattttgaatgcctgtgcctttagtttc

SEQ ID NO: 91474 - DNA, 600 bp, Chicken  19866894400898_1
acgaataataaactttccctttatcagaaccatgggacatgccaggttgggtgtctctgactactccaccttctcaccttcccaaaacaacatgagtcttgctttcctgcaagtttatccattaactaataatgaaagtcagtattttccctaatttctcctttgagtttatgttaatttcactggggctttattgtttaataaataaataaatccattttttcaaagatttttcttaaaaattaatcctgagaaagtcaggaaaatgtatgggattatgagtttgtatcagcatgcatytgggaggaaaaaaaaatcagaactcttacaacagtgctttaacgctgcctgtttaattaatatggcaaattatcaacattaatataaaaacaagcactgaatacaccttcttcactgtatttctaattatataagtagaacaaattattcatttttaaaccttgtaggccaagaggtgcagacgagaagctcatcatgagctcagaacaaactaccagcctggatctgacagcagggtggaggaagtcacagtattcacgtttctgtggctgtccatgctcaacagcacggtaaaataca

SEQ ID NO: 91475 - DNA, 600 bp, Chicken  19866894400905_1
aaggaaagaagtatggaaaagagttctcctttgtcatgatagacagtaattggttacaatgataggaacatgtgggtacagtttgaactcttttatactgacgaaactcttaatagttactataaggcctataaggcatggcttgatattgaattaactgtaatttaaattcttattaaatgtttaaagagaaaaaatagaaagatattaaaaaaaatgaaacagagcaaaactcatgttaaccaacataatcttctaatagagaatttactttcagtgcttgggatttcaaataacctygactgcaatgcatttttcttgtcttccctaggtgcatttttattgtcatgatggaaatgccttgtcagaagtttggaatctggaatttatataaaataaaataaaaaatgcaatagtattttatcttaactagttgcttcacataattygagtgtgcttgggctaaaaaaaaaagcatgtgagtatgaaatagttcaactatggaaatatttagttagctttatttccagttatattacatcatgagaactggtcttcyctgaatagcactggcactaaataatttagcacataacaagc

SEQ ID NO: 91476 - DNA, 600 bp, Chicken  19866894400905_2
tgaattaactgtaatttaaattcttattaaatgtttaaagagaaaaaatagaaagatattaaaaaaaatgaaacagagcaaaactcatgttaaccaacataatcttctaatagagaatttactttcagtgcttgggatttcaaataacctygactgcaatgcatttttcttgtcttccctaggtgcatttttattgtcatgatggaaatgccttgtcagaagtttggaatctggaatttatataaaataaaataaaaaatgcaatagtattttatcttaactagttgcttcacataattygagtgtgcttgggctaaaaaaaaaagcatgtgagtatgaaatagttcaactatggaaatatttagttagctttatttccagttatattacatcatgagaactggtcttcyctgaatagcactggcactaaataatttagcacataacaagcaaatgggcagtataattttctaacaagtctagggctgcacagtaactgatgcaaattacgtaggactcaacatttgcccaaatrtaaggatctttgtaaataatgttacagagaactcattcttcagaataggggttttatttttacca

SEQ ID NO: 91477 - DNA, 600 bp, Chicken  19866894400905_3
tagagaatttactttcagtgcttgggatttcaaataacctygactgcaatgcatttttcttgtcttccctaggtgcatttttattgtcatgatggaaatgccttgtcagaagtttggaatctggaatttatataaaataaaataaaaaatgcaatagtattttatcttaactagttgcttcacataattygagtgtgcttgggctaaaaaaaaaagcatgtgagtatgaaatagttcaactatggaaatatttagttagctttatttccagttatattacatcatgagaactggtcttcyctgaatagcactggcactaaataatttagcacataacaagcaaatgggcagtataattttctaacaagtctagggctgcacagtaactgatgcaaattacgtaggactcaacatttgcccaaatrtaaggatctttgtaaataatgttacagagaactcattcttcagaataggggttttatttttaccaattaaaataatctgtttgacagaattagtgcaagattttggaccttatagacaaactttttaaaaagaattttatgtgaagagctggaagcattttcttctttccttaaa

SEQ ID NO: 91478 - DNA, 600 bp, Chicken  19866894400905_4
atttatataaaataaaataaaaaatgcaatagtattttatcttaactagttgcttcacataattygagtgtgcttgggctaaaaaaaaaagcatgtgagtatgaaatagttcaactatggaaatatttagttagctttatttccagttatattacatcatgagaactggtcttcyctgaatagcactggcactaaataatttagcacataacaagcaaatgggcagtataattttctaacaagtctagggctgcacagtaactgatgcaaattacgtaggactcaacatttgcccaaatrtaaggatctttgtaaataatgttacagagaactcattcttcagaataggggttttatttttaccaattaaaataatctgtttgacagaattagtgcaagattttggaccttatagacaaactttttaaaaagaattttatgtgaagagctggaagcattttcttctttccttaaaattggcaaatgcattatattttcatgkaaaaaaggcaggagcaaaccttaacattttggcttttgtttcaggttcataacttcatacaaacaagatataaaactgagatattcattgtttgttta

SEQ ID NO: 91479 - DNA, 600 bp, Chicken  19866894400905_5
agcacataacaagcaaatgggcagtataattttctaacaagtctagggctgcacagtaactgatgcaaattacgtaggactcaacatttgcccaaatrtaaggatctttgtaaataatgttacagagaactcattcttcagaataggggttttatttttaccaattaaaataatctgtttgacagaattagtgcaagattttggaccttatagacaaactttttaaaaagaattttatgtgaagagctggaagcattttcttctttccttaaaattggcaaatgcattatattttcatgkaaaaaaggcaggagcaaaccttaacattttggcttttgtttcaggttcataacttcatacaaacaagatataaaactgagatattcattgtttgtttaatgctaaggcaaatcaaaagtaaacaggccattgtataacactggctttatataagaacagacaataagcactcttgtagttctagtgagaactcgggacagataactggatttgtcccttacaaacatttcactgttccatcatcaaacagacagtcaatatattcattgttataatgaccatcaggccatattccacctg

SEQ ID NO: 91480 - DNA, 600 bp, Chicken  19866894400907_1
atcaactggaaccttctctaaataatgcacatttttactgacttagggagcacaatgctctaaagtttatacagcttgctaggaggtaagttagtgctgcctcagaactattccccgcatcactgcatgattctcagttataatactcagaggaaaaattcagcttaatgagcactaatgaatcaccgaaactcatgttattatgaacaaaaagctgacccagcagctttttgtttatttatttgaaagtgaagatagtaaatacttgctggtcatgtccctggaggtgttcaagaaccrtgtggatgtgrcacatgagggacatgattagtggcatggcggggacgggctggtggttggacttggtgatctgagaggtctgttccaaccttaatcactctacgattctgcgtgtgagcaaactaaattttacacagcagggtaaaccgaggcatttgcatataagaagtattactaggctattcttcccacatccaaagcaatttttcctttcacctctgcccataggatggtgactgtatcccttgacccccaggattacaaaatatggctgcatatctgctgcccttgcctgtaact

SEQ ID NO: 91481 - DNA, 600 bp, Chicken  19866894400907_2
ccttctctaaataatgcacatttttactgacttagggagcacaatgctctaaagtttatacagcttgctaggaggtaagttagtgctgcctcagaactattccccgcatcactgcatgattctcagttataatactcagaggaaaaattcagcttaatgagcactaatgaatcaccgaaactcatgttattatgaacaaaaagctgacccagcagctttttgtttatttatttgaaagtgaagatagtaaatacttgctggtcatgtccctggaggtgttcaagaaccrtgtggatgtgrcacatgagggacatgattagtggcatggcggggacgggctggtggttggacttggtgatctgagaggtctgttccaaccttaatcactctacgattctgcgtgtgagcaaactaaattttacacagcagggtaaaccgaggcatttgcatataagaagtattactaggctattcttcccacatccaaagcaatttttcctttcacctctgcccataggatggtgactgtatcccttgacccccaggattacaaaatatggctgcatatctgctgcccttgcctgtaactagagatamaac

SEQ ID NO: 91482 - DNA, 548 bp, Chicken  19866894400907_3
tgrcacatgagggacatgattagtggcatggcggggacgggctggtggttggacttggtgatctgagaggtctgttccaaccttaatcactctacgattctgcgtgtgagcaaactaaattttacacagcagggtaaaccgaggcatttgcatataagaagtattactaggctattcttcccacatccaaagcaatttttcctttcacctctgcccataggatggtgactgtatcccttgacccccaggattacaaaatatggctgcatatctgctgcccttgcctgtaactagagatamaacttctggatacagttcatctcctgttatctgacctacaggaaaagctgactttaggataattttctaagtttcttttattgcaactgaagagaggcagtcacctcagagcataggtgtagcatctgtagacacctgacttaaacaaggtggtttttcactgtaaagacacttgtgactgtcaagcgatcgtgtggaaaaacccggaccactagctgagatagagaaaggattttaaactgtctaaa

SEQ ID NO: 91483 - DNA, 600 bp, Chicken  19866894400911_1
atgagtaactgctctttcttcctatggctttgcagttctgctgcaaaatttactgaatacaattaatagccacttttctgcattttgatgttccgcctgtaaatgtgaattaactgcatctgacactaatacagagaaaagtgacatggaatgcaactatgaaaacatacaagtatgagaaaggatcattttttgttacatagaaacatatagttaatgagagcacaaactttgaaaaaagccacagtttaaaaagcttttggtaaaatttggaggaaatggggagaaaaaaaaaaaaamaaaaaracatgatcgaagttccccctcagattgctaattccwtatgttctacccaaaatgtgtcagagctgagtgtgactttaaagttcacatctagttttgggcatcagaatatacagagctgttgatacattgctgggagtgtggaatagtttaaacttgtaaatcaatcaggagtgtactttctcacagctcacattgtctactgaagagaaaagcacaaagttcagtgacattgaaataaaaatcttgcctctaatgtaatggcctttcattacagtggccagacctgtattcaca

SEQ ID NO: 91484 - DNA, 600 bp, Chicken  19866894400911_2
aactgctctttcttcctatggctttgcagttctgctgcaaaatttactgaatacaattaatagccacttttctgcattttgatgttccgcctgtaaatgtgaattaactgcatctgacactaatacagagaaaagtgacatggaatgcaactatgaaaacatacaagtatgagaaaggatcattttttgttacatagaaacatatagttaatgagagcacaaactttgaaaaaagccacagtttaaaaagcttttggtaaaatttggaggaaatggggagaaaaaaaaaaaaacaaaaaracatgatcgaagttccccctcagattgctaattccwtatgttctacccaaaatgtgtcagagctgagtgtgactttaaagttcacatctagttttgggcatcagaatatacagagctgttgatacattgctgggagtgtggaatagtttaaacttgtaaatcaatcaggagtgtactttctcacagctcacattgtctactgaagagaaaagcacaaagttcagtgacattgaaataaaaatcttgcctctaatgtaatggcctttcattacagtggccagacctgtattcacaggggct

SEQ ID NO: 91485 - DNA, 586 bp, Chicken  19866894400911_3
gcaaaatttactgaatacaattaatagccacttttctgcattttgatgttccgcctgtaaatgtgaattaactgcatctgacactaatacagagaaaagtgacatggaatgcaactatgaaaacatacaagtatgagaaaggatcattttttgttacatagaaacatatagttaatgagagcacaaactttgaaaaaagccacagtttaaaaagcttttggtaaaatttggaggaaatggggagaaaaaaaaaaaaacaaaaaracatgatcgaagttccccctcagattgctaattccwtatgttctacccaaaatgtgtcagagctgagtgtgactttaaagttcacatctagttttgggcatcagaatatacagagctgttgatacattgctgggagtgtggaatagtttaaacttgtaaatcaatcaggagtgtactttctcacagctcacattgtctactgaagagaaaagcacaaagttcagtgacattgaaataaaaatcttgcctctaatgtaatggcctttcattacagtggccagacctgtattcacaggggcttgaggcaaattatcagaggtat

SEQ ID NO: 91486 - DNA, 600 bp, Chicken  19866894400928_1
gtacaaagcatattttattaaggcaacatcttccctcaaagcgtgattcttaaagtaaaatgctgacgttttactcgctggctccccagcacctctctggcctacttttaaacttgatatacagtcacgagtgcaggtcttcatcacttgcagtagctttcagcatatgtcattgctagatttagctgctgctctccacatatcatcaagcatcttgaagcaaattcattaccagaaggctggtgtgtgtccttgctacattttccagcttatctaaattgctgaaatagtcaagcaacrtgcttttaaaagtagaagtccaaaagtatcaagctaagtttcagctggtaggtaagtaaagatgcaaaggacatttaccatttgctccttatcaaatcctgtaatggagataatggaacatcaccatgagaaggccctcgctgttttcaccagaagcaaacaaaactagtgaagtcaggtaaaggagatcatgactatattttattaaatgttgtaaccgttgccatgcgtgagtttacaagtctgtcatatgaagtacatttgaatctttcttctaattgcatttggagcaggccctgg

SEQ ID NO: 91487 - DNA, 600 bp, Chicken  19866894400930_1
tcttaggcataaagtcacttctttgtatggctaaaaaccctctacaacactcaacaatactgaataatgtttagaaaatgcaatcaatttccactgcacccttttattttcttattgcattctaacctcactccatggaacaatgaaaggtggtatgagaatatcagcatcctcctagttatgaacagacctcaaaacataggtcctgctgcctcaaatggtctttgtgactgtgaagagctttgtttttctcacccaaaatgagtaattccaactgcctgataaagtcgtgacagaacracggagcagycacaaaatcattcggtgagaaattttaagactcgggtatgtataagaattgttcaacatacattcaactccatttcaccacactgtaggaggggaaaaaagaagacaattatgcaatggacttttgaattaatttttcatgctgaacaaaaaagttctggtttaagttaaattcattcataacttaatatccttttttgtccatttctttgggattctgttctcattttccaaattccaacagaattttaatgggcatctcaattcaaatgaaagaacaatgagctgaaa

SEQ ID NO: 91488 - DNA, 600 bp, Chicken  19866894400930_2
aaagtcacttctttgtatggctaaaaaccctctacaacactcaacaatactgaataatgtttagaaaatgcaatcaatttccactgcacccttttattttcttattgcattctaacctcactccatggaacaatgaaaggtggtatgagaatatcagcatcctcctagttatgaacagacctcaaaacataggtcctgctgcctcaaatggtctttgtgactgtgaagagctttgtttttctcacccaaaatgagtaattccaactgcctgataaagtcgtgacagaacracggagcagycacaaaatcattcggtgagaaattttaagactcgggtatgtataagaattgttcaacatacattcaactccatttcaccacactgtaggaggggaaaaaagaagacaattatgcaatggacttttgaattaatttttcatgctgaacaaaaaagttctggtttaagttaaattcattcataacttaatatccttttttgtccatttctttgggattctgttctcattttccaaattccaacagaattttaatgggcatctcaattcaaatgaaagaacaatgagctgaaatcacaatcat

SEQ ID NO: 91489 - DNA, 600 bp, Chicken  19866894400937_1
aatccactgcagccagcagaaaagttcaatgacctaagctttatctcacatatttcattcccttaatttcctgtaatatcatactttcatctaggttaaatactgaactgcgtgataggttataaatctggaagcagtttgacttactattccatagttatcatctttggtttcagagtaataatattccatttagcctgcaggacaaagattccactttttaggtataaacgtagacaagcacaccctggttttactgctacattgcttgtgtgattacttgggcaatacatttttttyctatcctaatcacaaatactgttttgtgtttagtttcaattccaaattatgcccatggatatattgctgcttctttattcttcttaatgtgatttactattattagtaaaattttattctgttttattatatagttatgttttatttttggtaggcctgaatgatattttgaagcatcatctaaaccaggtttgctttggaggtaatttggtgctttgccatttaaaggtcacaatgaaacaacttttagtttatttctcttatttattattatctttgtttacttcttgttactgaagt

SEQ ID NO: 91490 - DNA, 600 bp, Chicken  19866894400953_1
ttactatgccattacgcttctgtagaaatgtgtttgttttctttttatgtcataagtcataacaattcttacaaatatttagacctactatacatacacctgtatccttttaagtaactactgtctatatgatcatatatagataggaatatccataaatgatacatatatatagcacattgagcaacatctaacaaatgtgtggtttgttttctagatcacaatacattcttttacattgtaatttgcttttatgtgtttacttttatatatttgttagataataacattgcaattgcmgagtatgttttagcataagtagtgttttcatttcacagacacgttatgatactcaaactaagaataacaggtaggatttaggacagtttcagcattggtctttctatgcacactgatgaagctacaggtcccattggaaaaacrgaayagaaaggcagagtagaatagagtagcatagagtagagtagaacagaatagagtagaacagagtagagcagagtagaatagagtagagtagagtagagtatttcacttggaagggacctacaaagatcattgagtctagctgccttatcactt

SEQ ID NO: 91491 - DNA, 600 bp, Chicken  19866894400953_2
aggaatatccataaatgatacatatatatagcacattgagcaacatctaacaaatgtgtggtttgttttctagatcacaatacattcttttacattgtaatttgcttttatgtgtttacttttatatatttgttagataataacattgcaattgcmgagtatgttttagcataagtagtgttttcatttcacagacacgttatgatactcaaactaagaataacaggtaggatttaggacagtttcagcattggtctttctatgcacactgatgaagctacaggtcccattggaaaaacrgaayagaaaggcagagtagaatagagtagcatagagtagagtagaacagaatagagtagaacagagtagagcagagtagaatagagtagagtagagtagagtatttcacttggaagggacctacaaagatcattgagtctagctgccttatcacttcagggttaaccaaatagaatgttatagagagcataatccaaatgcttctttagcactgtcagatatgggacatcaatcagctcactaggaaaattttcccagtgtttgaccactctgacaacaaaataatttttcctaatgccc

SEQ ID NO: 91492 - DNA, 600 bp, Chicken  19866894400953_3
atatccataaatgatacatatatatagcacattgagcaacatctaacaaatgtgtggtttgttttctagatcacaatacattcttttacattgtaatttgcttttatgtgtttacttttatatatttgttagataataacattgcaattgcmgagtatgttttagcataagtagtgttttcatttcacagacacgttatgatactcaaactaagaataacaggtaggatttaggacagtttcagcattggtctttctatgcacactgatgaagctacaggtcccattggaaaaacrgaayagaaaggcagagtagaatagagtagcatagagtagagtagaacagaatagagtagaacagagtagagcagagtagaatagagtagagtagagtagagtatttcacttggaagggacctacaaagatcattgagtctagctgccttatcacttcagggttaaccaaatagaatgttatagagagcataatccaaatgcttctttagcactgtcagatatgggacatcaatcagctcactaggaaaattttcccagtgtttgaccactctgacaacaaaataatttttcctaatgcccagcc

SEQ ID NO: 91493 - DNA, 600 bp, Chicken  19866894400965_1
gcaaatattaaagcatttgaagaacattaaggaaatattatttttcctccaaagattaatttctctggtatagcctgaaaatgttcataaggattttagtattttctacatctcagctgtggaaggttgaagaggaagaacagattctgctccttgtgtcaacactgagtatgttttttattttaacaaacaacctgaggtctaggaaatggaaaggattgctcatgttcatttggactccattttgaagagctgaattgcaagtagccaacacagaaactggatggtgtttaacaaaarcattcacaatatttttgataaatataatgaaatacatactgtctgtcattaaaattcattttaaaaaggtatttcacattctgcaacagaaaaaaatgtagccatatcctataactaaaatcaaaaagacattaacttcagtagtgacattggtgtttgaggtactttagaagatgtaaaayaaacctactacattctatgtcatccaacagaagaagaaggtcacttttccaaaaaaacactggatatttgtctaccattaggcattaatttacgttgtgtgtgttttgtttgttttct

SEQ ID NO: 91494 - DNA, 600 bp, Chicken  19866894400965_2
ttaacaaacaacctgaggtctaggaaatggaaaggattgctcatgttcatttggactccattttgaagagctgaattgcaagtagccaacacagaaactggatggtgtttaacaaaarcattcacaatatttttgataaatataatgaaatacatactgtctgtcattaaaattcattttaaaaaggtatttcacattctgcaacagaaaaaaatgtagccatatcctataactaaaatcaaaaagacattaacttcagtagtgacattggtgtttgaggtactttagaagatgtaaaayaaacctactacattctatgtcatccaacagaagaagaaggtcacttttccaaaaaaacactggatatttgtctaccattaggcattaatttacgttgtgtgtgttttgtttgttttcttgttggtttgtttgtttgttttttccttaactccttgacaggaaataaccttgtgttttctgttttaaaaacattgctactactgccatgcagtgaaagtctggcttgagcaagtcagctgaaatacattccgaattttatccccagtatgtaattaactttccttctaaagatattccaat

SEQ ID NO: 91495 - DNA, 600 bp, Chicken  19866894400972_1
gcaggtttgctaccgctgtttattttgtgtcttttaaaattagataatggcagagcagtgccctttgtcaataataaatagttcgagtaggtttgtattggaaaaaacagagttgtcagtggaatggtattatttgtcacaacagcggttaacaaccgagtattttatattgccaggctgttatcagctgggaggcaattttattagctggaaagcagcagtttggcagggcagcagctgtgctccacggagaagtcagcgtgagtgctgagtgcgggtcgctgtgcccggcgtcggggygatgagctgcygggctgtgtgcagtggcacagtgctgctgggagctgcagcatcacacagctgtgtgcgggtggctgcactggggccgagcactccggaacgcccctaacagacatcatcttctgtccgttgtttctctgcctgctgatcacgcctaaggttcccctactgtttggatgacttaatgcattttaaaatcacatttataacccgaatccctttcaggccyaggagctygagagcttacacacaaggaggcccagaagaatatcccccatccacagttgttcccctgctggc

SEQ ID NO: 91496 - DNA, 600 bp, Chicken  19866894400972_2
accgctgtttattttgtgtcttttaaaattagataatggcagagcagtgccctttgtcaataataaatagttcgagtaggtttgtattggaaaaaacagagttgtcagtggaatggtattatttgtcacaacagcggttaacaaccgagtattttatattgccaggctgttatcagctgggaggcaattttattagctggaaagcagcagtttggcagggcagcagctgtgctccacggagaagtcagcgtgagtgctgagtgcgggtcgctgtgcccggcgtcggggygatgagctgcygggctgtgtgcagtggcacagtgctgctgggagctgcagcatcacacagctgtgtgcgggtggctgcactggggccgagcactccggaacgcccctaacagacatcatcttctgtccgttgtttctctgcctgctgatcacgcctaaggttcccctactgtttggatgacttaatgcattttaaaatcacatttataacccgaatccctttcaggccyaggagctygagagcttacacacaaggaggcccagaagaatatcccccatccacagttgttcccctgctggctgaggctgtga

SEQ ID NO: 91497 - DNA, 600 bp, Chicken  19866894400972_3
ggcagcagctgtgctccacggagaagtcagcgtgagtgctgagtgcgggtcgctgtgcccggcgtcggggygatgagctgcygggctgtgtgcagtggcacagtgctgctgggagctgcagcatcacacagctgtgtgcgggtggctgcactggggccgagcactccggaacgcccctaacagacatcatcttctgtccgttgtttctctgcctgctgatcacgcctaaggttcccctactgtttggatgacttaatgcattttaaaatcacatttataacccgaatccctttcaggccyaggagctygagagcttacacacaaggaggcccagaagaatatcccccatccacagttgttcccctgctggctgaggctgtgaagttgtacctccctgaggccgagggcatggcagtacctccactgagctgccagctggcagtgtgcaaggttggcaggggctgtgcagctgtgagggacacccacaacgccctgctggcacccagcaaaaaggctatcccttggtacaggtgatgggctctgctgctttcagggacgtgttctccgcacagcatttttccttgcatcactgtgttctct

SEQ ID NO: 91498 - DNA, 600 bp, Chicken  19866894400972_4
ctgtgctccacggagaagtcagcgtgagtgctgagtgcgggtcgctgtgcccggcgtcggggygatgagctgcygggctgtgtgcagtggcacagtgctgctgggagctgcagcatcacacagctgtgtgcgggtggctgcactggggccgagcactccggaacgcccctaacagacatcatcttctgtccgttgtttctctgcctgctgatcacgcctaaggttcccctactgtttggatgacttaatgcattttaaaatcacatttataacccgaatccctttcaggccyaggagctygagagcttacacacaaggaggcccagaagaatatcccccatccacagttgttcccctgctggctgaggctgtgaagttgtacctccctgaggccgagggcatggcagtacctccactgagctgccagctggcagtgtgcaaggttggcaggggctgtgcagctgtgagggacacccacaacgccctgctggcacccagcaaaaaggctatcccttggtacaggtgatgggctctgctgctttcagggacgtgttctccgcacagcatttttccttgcatcactgtgttctctgctaatag

SEQ ID NO: 91499 - DNA, 600 bp, Chicken  19866894400987_1
tgtttttcttggagtcactgaaagtacacaatgaaatctctgctatttgccactctcaggggaccaggttgggacaaatggtataacttacttctatgagttgttttgacattagggcccagctagagattaattcaaacctatatgtgactttttaagaaaacatgagaaaaatacacagtctattttggtttcagaacataggcacacccatttgttaaattttacatcatagctcaaaatctaataatttcagcaaatttctggtgctctgaaaccttcacaaatgttttgaaaggyatgcatactgctgttaaagcataccatggagccttccatgaacaacaccaaaaggacaattcccatagagtaatgttaaaatatgctacacrcaaatcagtctcaccagaaatatgagctttctttcctaggtacrgcttataagcctcaataacagcatgaagtacaggacaagcagaaattcttgcataattcatgttactttcaggtgacctccctcagtcctcacacaagacacagctgaaaacagctctgtagatgccaagaatttgaaagagtacaaaagcacttacatcagca

SEQ ID NO: 91500 - DNA, 600 bp, Chicken  19866894400987_2
tctatgagttgttttgacattagggcccagctagagattaattcaaacctatatgtgactttttaagaaaacatgagaaaaatacacagtctattttggtttcagaacataggcacacccatttgttaaattttacatcatagctcaaaatctaataatttcagcaaatttctggtgctctgaaaccttcacaaatgttttgaaaggyatgcatactgctgttaaagcataccatggagccttccatgaacaacaccaaaaggacaattcccatagagtaatgttaaaatatgctacacrcaaatcagtctcaccagaaatatgagctttctttcctaggtacrgcttataagcctcaataacagcatgaagtacaggacaagcagaaattcttgcataattcatgttactttcaggtgacctccctcagtcctcacacaagacacagctgaaaacagctctgtagatgccaagaatttgaaagagtacaaaagcacttacatcagcagaacaggatcttaattatataaaaaagtacaattttaatgaaaagatagtgttttgagttagatagtactaatgtacgccacacgtgcaaag

SEQ ID NO: 91501 - DNA, 600 bp, Chicken  19866894400987_3
aaacctatatgtgactttttaagaaaacatgagaaaaatacacagtctattttggtttcagaacataggcacacccatttgttaaattttacatcatagctcaaaatctaataatttcagcaaatttctggtgctctgaaaccttcacaaatgttttgaaaggyatgcatactgctgttaaagcataccatggagccttccatgaacaacaccaaaaggacaattcccatagagtaatgttaaaatatgctacacrcaaatcagtctcaccagaaatatgagctttctttcctaggtacrgcttataagcctcaataacagcatgaagtacaggacaagcagaaattcttgcataattcatgttactttcaggtgacctccctcagtcctcacacaagacacagctgaaaacagctctgtagatgccaagaatttgaaagagtacaaaagcacttacatcagcagaacaggatcttaattatataaaaaagtacaattttaatgaaaagatagtgttttgagttagatagtactaatgtacgccacacgtgcaaagttttggccttatccatcctctgaggtgcttgcagtacttgacca

SEQ ID NO: 91502 - DNA, 597 bp, Chicken  19866894400992_1
  misc_feature (1)..(68): n is any nucleotide
nnnnnnnnnnnnnnnnnnnnnnnnnnnnnnnnnnnnnnnnnnnnnnnnnnnnnnnnnnnnnnnnnnnntgagagtaaaagatcccattatttgtaagaagaaaagtcacaaagctgagatgataaaccacctccggagctgagctgctcataagtgtccctgaggagcagacaccgctcacagcactccggccctgctcagagccgtgcagggacggctgctgccttacagttacacaaaccaactacagttctgcttacttaacctcggcccacggctggtcaggcaagccctaacgcyttctgagttacagtgcacgcccagttgttgtggtacgaggttaatgaggtctcttcatcgccaaagaacggcgcttggggtagtaaaacgaaccaaacgctaaaacaatgaaccacagagcggtttgggtgggaaggaccccaaagacgacccggaattagcatcagccaaagcaactcgcaggacagcggacaccgctccgtgctgaagtacgactgctgtaccgccggggcccgcgcagcggcgtcaccgcgcgtcgcatcgccggagcggagcgctcgggctgagcccacagcc

SEQ ID NO: 91503 - DNA, 599 bp, Chicken  19866894401000_1
  misc_feature (1)..(83): n is any nucleotide
nnnnnnnnnnnnnnnnnnnnnnnnnnnnnnnnnnnnnnnnnnnnnnnnnnnnnnnnnnnnnnnnnnnnnnnnnnnnnnnnnnntcctcttgctgctatacaagtgtctggcatatcagaagagagaaaagagagccctttaattgacattcatatccagctgattcattcccagctcagtgtggatcttttaattatgctttggcttagatggaaatcattaaaagattttgtctttgaaccaaatgaaaactttgcactcaatggggctgcaagagtgagactgcaaactaaatacagrctctgttcagttagcaagaagatattttacctcttcctattctatatccacaatactgtatactttcataacctgaaatcctgaagttggcacttaagcatgcactcagatttacatgtatcacatgaatgtacttgaaatgattatgagaatggtaagaatatgtttgcaactactaattaggtgtccacatacttttgaagaaaattacctggtttgtgcatgcaattgcaataaaagtctttaagaatatttttgtagttttcactttttttaagcaataaagctatttacattaa

SEQ ID NO: 91504 - DNA, 600 bp, Chicken  19866894401009_1
taggaaagtagatttaaaagggagatcaagatctgctgttttcctttgtggtggcttgtgcttcccgtctgcatgaagaaactgggcccttccagcagagagtggagtcacctccattgccagatcaaaggacctcatgtgctgctgtcccaactttaaagaacatctaaagatcatcagttatcctctatgcagtgcgtcttcattaggtgcaggggaacagctcacctgccccaacctgcaagttaaaatcaggactgcattggcactaaaggaaatctagaaaaagggattttaaargaaaatcaaagagctttaagcatcaaaaagcaaacaggccaatgaaatatacatgaaaacacacaaaaaccctcaatcycggcattayctgtctcccgttgaatcattaattcatggggtattgctatcaaggaaagtgaactccttaaatgggttctttcactgggtcttccctttggtaagcagaactgccagagcagtcccactcatcactccggctgaatggaatgcttgtggcttcctatgacatcccataagtattcctttgccttaattagacgatcttgcttaacaaaggga

SEQ ID NO: 91505 - DNA, 600 bp, Chicken  19866894401009_2
aactgggcccttccagcagagagtggagtcacctccattgccagatcaaaggacctcatgtgctgctgtcccaactttaaagaacatctaaagatcatcagttatcctctatgcagtgcgtcttcattaggtgcaggggaacagctcacctgccccaacctgcaagttaaaatcaggactgcattggcactaaaggaaatctagaaaaagggattttaaargaaaatcaaagagctttaagcatcaaaaagcaaacaggccaatgaaatatacatgaaaacacacaaaaaccctcaatcycggcattayctgtctcccgttgaatcattaattcatggggtattgctatcaaggaaagtgaactccttaaatgggttctttcactgggtcttccctttggtaagcagaactgccagagcagtcccactcatcactccggctgaatggaatgcttgtggcttcctatgacatcccataagtattcctttgccttaattagacgatcttgcttaacaaagggaagacccagtgatgttcatatctaaaaccaagtttctataattacaaattaatcagggaaaagctctctgtaatctttcc

SEQ ID NO: 91506 - DNA, 600 bp, Chicken  19866894401009_3
cttccagcagagagtggagtcacctccattgccagatcaaaggacctcatgtgctgctgtcccaactttaaagaacatctaaagatcatcagttatcctctatgcagtgcgtcttcattaggtgcaggggaacagctcacctgccccaacctgcaagttaaaatcaggactgcattggcactaaaggaaatctagaaaaagggattttaaargaaaatcaaagagctttaagcatcaaaaagcaaacaggccaatgaaatatacatgaaaacacacaaaaaccctcaatcycggcattayctgtctcccgttgaatcattaattcatggggtattgctatcaaggaaagtgaactccttaaatgggttctttcactgggtcttccctttggtaagcagaactgccagagcagtcccactcatcactccggctgaatggaatgcttgtggcttcctatgacatcccataagtattcctttgccttaattagacgatcttgcttaacaaagggaagacccagtgatgttcatatctaaaaccaagtttctataattacaaattaatcagggaaaagctctctgtaatctttccttgctaagt

SEQ ID NO: 91507 - DNA, 600 bp, Chicken  19866894401012_1
ccaacagcctattcacagtattaggcacaaaattactcaagacaaggactggcaacagccatgtgttcgtgcagtgccttgaacaggtgctgagcaccctctaatgtgtctctgcatgcagtgacagtgctgtggatgaggatttatttgaggaaaggattcatagcaatgagcaaagataacttttttcctgagtaggagaaatattttacactgtacaatgtgttgtaaacaagagataagaattaccagcaggaaaatctatcttgaaaaagagtatttttaagcaaattatctttstaaaaatgctagcagcaatggtatttaatgcactgtatttccatgggtatactgtacatcttatacttctctattatttatttttctcttacttgttttactggtcacagttcattgaattaaaagggctttgatgggaatgaagggaagcaagggatgtctgtctaactgcctgtgggagtgtaccagagtttccactgctattttcctgtattttcaaagcaggttaggatagaatgtatatctgctggtttcatcttaaatgcttagtaggaagcatggagcagaataatagtatat

SEQ ID NO: 91508 - DNA, 600 bp, Chicken  19866894401014_1
acccctgtgggtctcagcagctttgccaaaccccacagagcccaacgatggctgggcacctgaggctttgcactctgtgtggaggagctccaccaccccgactcctgcgttacctaaacacagtaattacagaagctcatctaacctaatgactgtaatctctctattgtattttaagcacctaatgtagtgccataaaatccccaaatttatgagtttgaacagaggcaatatttctctctattccctatagacggtatgggggagtgtatatgtcaagactgtttgtactaatcggartgatttaaagggaacttgacagggatttatttttaattgagagcttgtccttttgctttcctatgccatttataaaaaggtctgaaatgttagatttccccttttcatttttcagcttgttacattaataattttgaatttgattttctctgttgttgctttctggaaagaagaaacatccttctgtgtggcacaggaacatccatgcatatctaagcagagctactggtttggaacagagctgaggacacgtcatatactgattaaaaacggatgcttgggggaacccataaccagact

SEQ ID NO: 91509 - DNA, 600 bp, Chicken  19866894401024_1
atctggtgactggggaaggggactgagcttgctgcaggagcacatgctaaggtgatcctgggtcattagctcctatgagaggcaaaagcagagcaagcctccccagggggagaacaggtgtcagatgttagaagcaactgagtttcagtagggaggaagagggaatgtaacctctgcagggctccagctggtaccttcagcagttagcaaggttttaccgtgataggagaatctgctcctgggctcagagggcttccttgcagcttccactgctccctgacaggtgtgcatatggaggargcctcagataatgcagacctaaggtctgatccacaaaatcagctcccacgctcagtgtgaacttggcctcttgtttgtacatggcgtgaggttcagtgcaagttggtggtgtggaactaatgcagtaaagaggcaagtcctgacacttggagtaagagttttagagagtgcactgccaaagagcatgagtgccagccagtctgttgttaactgtgtaaccatgtgcttttaattccctgctgaagccatgtattgtggtgcatagcctggcttgtttgtgcagtcagcccaggtgtgctg

SEQ ID NO: 91510 - DNA, 600 bp, Chicken  19866894401024_2
tctagcaccacaatcttttctagactgtgaaatacctgtgttcagcatatgtcatccctcttgcagtaggtaggggtcccctcagggactgcacttgctaaaataacatcagttggatgagaaagaggatgacagagctcaggaggagaaggtaaaatgcacacaactcagcaatagcactttgtcctgcagcagcaggtgagcaggcatcttgcagtcaggtttacagatgcagtagaactgctgaaagactccaaaacaactgcaaaagagtggttgtagtcatccagtttggaatgygtattaacaaacaggctaaagaggttcattgcttgcaaatgacttyggtgcaaactcactttagggaaagaaacatgctaataagagctcatatagagggtaccgtaacattaaatctgataaaatagcacgtgctgcttttattcacgtgctgttattgcagtaccatggttgtgctgagaccctgaaggaagcagcactgctgcccgaggaaatgctctctgtgggagctttactgcagggcatgcttgtgttctgggaaggagcacatctgcactcctggctctttcatgtcctgag

SEQ ID NO: 91511 - DNA, 600 bp, Chicken  19866894401024_3
atatgtcatccctcttgcagtaggtaggggtcccctcagggactgcacttgctaaaataacatcagttggatgagaaagaggatgacagagctcaggaggagaaggtaaaatgcacacaactcagcaatagcactttgtcctgcagcagcaggtgagcaggcatcttgcagtcaggtttacagatgcagtagaactgctgaaagactccaaaacaactgcaaaagagtggttgtagtcatccagtttggaatgygtattaacaaacaggctaaagaggttcattgcttgcaaatgacttyggtgcaaactcactttagggaaagaaacatgctaataagagctcatatagagggtaccgtaacattaaatctgataaaatagcacgtgctgcttttattcacgtgctgttattgcagtaccatggttgtgctgagaccctgaaggaagcagcactgctgcccgaggaaatgctctctgtgggagctttactgcagggcatgcttgtgttctgggaaggagcacatctgcactcctggctctttcatgtcctgagtgctctgttgaaatcgttgtttctacagaaattctccagagcagat

SEQ ID NO: 91512 - DNA, 600 bp, Chicken  19866894401031_1
aggctgccttttggtgtggaaatttacactagagcatttggagatgcagtaactatacttattttagttataacagttccagagacattttctctctgattctgcctacagcaggaactttcagcacaaggacaactttttaactgccctgtctctccaatttaatgttgtatggtattcatgcccacaagttctgatcagcgtgtgcatgtggccaacactatccagacctgttggctccatagatttgtgttttccatgttaaatgcatgtctactagtactgtgatgtttctaattratttcccagcatcctaccctcttccttttgtctaacctgttttcaagaatatctttttctgaatcttacatttggctgaacactaagtaatctcttgttatctaagataatggctcatttttactgaaacaaaattacccacttaaaaacttttaaatcaagtcaggaatcacagcactggactgtgctaagcagcaggattctgtgtactgcatttgtgtattttggctgttatcttctttttaaagggggagagggttctgctttacataaggagtaatctagcagctttgagtgggg

SEQ ID NO: 91513 - DNA, 600 bp, Chicken  19866894401032_1
acaaaaaaaccctgtaagtaacaaaagtattacccgcaatggctttaaaacatatatctagcagaaatatttcctaaatctgtatggttatgtcactacttgaatgctcaccttgtgttttaatgactcaagaaaacaattctacgagctctcatttttcaaactcatggaagaatacaagcatatatacatatatacacacatgcacacacttcttttttttttttttttttagagagagatttcttctaaaatttgagcttaaaaaatacatatatttctattgcttcagagattcarccatgctaatgattctcgttatgattcttggtaccgtctttttgacggagcttagcttgggaggactataaagctcttcatcctgagcttgcaagtagtcctgctgcatggctcttcaaagaatgcaacctaggaattgtggtacagagaagtccaagctaatgctgctcacagccagccatgccatgtggtgtggtgctgagccactagggaaggtacagcttgagcttcaagatgtatcagggttctgctagactgcacatcactacatcacactgcacgagagtctaacacaagtgc

SEQ ID NO: 91514 - DNA, 600 bp, Chicken  19866894401038_1
ccggaggttggggaagaagaggagagcgccgagcgccaggaggaagaaggggagaggtgagcagccccagtgccagcgctgagcagcctgcaaggggtcggccccccagtgtggggctgggcgggggtcccagccgttcacacgctcttgctttggcagatgcttgcgggaaggacggagcagcagggatgccgtcgccgacgtgggagttgcggtgagtgctgcttggccaacctgccccccattgctgcagggcctggcgtcagggccacgggtgggtgctgtgctggggtcgtggcygggggctgtgctgcgggcatggcggcagcgggtcccctcatctcctccatttcctcctgcaggacgagcccacgggaaaggagcaggaagccacccygggccccgctggcatccatgctgtccctgggctccctcgatgcatcttcttcctcctcctgttcctccctctactcctccccagagccctggcctggtgcagttggtgcaactgtcagagttggctgcccttgcacctcggatcgccccagagccacaaccagagcctgaggcagaggcagagccagaggcagagccagccct

SEQ ID NO: 91515 - DNA, 600 bp, Chicken  19866894401038_2
tcggccccccagtgtggggctgggcgggggtcccagccgttcacacgctcttgctttggcagatgcttgcgggaaggacggagcagcagggatgccgtcgccgacgtgggagttgcggtgagtgctgcttggccaacctgccccccattgctgcagggcctggcgtcagggccacgggtgggtgctgtgctggggtcgtggcygggggctgtgctgcgggcatggcggcagcgggtcccctcatctcctccatttcctcctgcaggacgagcccacgggaaaggagcaggaagccacccygggccccgctggcatccatgctgtccctgggctccctcgatgcatcttcttcctcctcctgttcctccctctactcctccccagagccctggcctggtgcagttggtgcaactgtcagagttggctgcccttgcacctcggatcgccccagagccacaaccagagcctgaggcagaggcagagccagaggcagagccagccctgtgcccaagcccagagcccttggctctcccagcagcagcccccagcccccttcactgcccacagccaagtgagcagagctcccccaggaatggagcg

SEQ ID NO: 91516 - DNA, 600 bp, Chicken  19866894401049_1
tttttttctcctttaagttcattttctgctaggaagggaagatgtagacaactctcacttgttcataagcctcttattaatgtgtattttgatactgtatttaagcacttatgaatacgagtttcagtctggaaccaaacagaaattgctacattacctgcaacctatcaaatctatccactataacattacattctggacctggtctttccataaagcttcaataatcaaaacattggcataaataccaatcctcaaactcatatgagattaatgtaggattcatatactcataatatygttcagaattcataagtctcccttttaaggaaaaataaactgaagaaacacgaatcctcgaaaatcaaagtcgaacacaggtgataaatctatactttaatcctggattggctgtgagctgctctgtggaagaaaatcttgctacrttattatcttctccaaagctgtttctcaaatctgttattacagggaatctgccattcttttcattattttttaaagtttctgttacccacgcattctttcctgttcatcactggcagcagtaagggactgcttcccagaagcagtgattttttg

SEQ ID NO: 91517 - DNA, 600 bp, Chicken  19866894401049_2
tgctacattacctgcaacctatcaaatctatccactataacattacattctggacctggtctttccataaagcttcaataatcaaaacattggcataaataccaatcctcaaactcatatgagattaatgtaggattcatatactcataatatygttcagaattcataagtctcccttttaaggaaaaataaactgaagaaacacgaatcctcgaaaatcaaagtcgaacacaggtgataaatctatactttaatcctggattggctgtgagctgctctgtggaagaaaatcttgctacrttattatcttctccaaagctgtttctcaaatctgttattacagggaatctgccattcttttcattattttttaaagtttctgttacccacgcattctttcctgttcatcactggcagcagtaagggactgcttcccagaagcagtgattttttgtcaaggaaaccgaatgacatttgctacctttcggtgctaagcagtgcctcaaggatgcaactatcctctgacagcatctctgtcaccaggatcctagggccaaaaagccagctgacctggcagaaaaatactgctgcaatggcact

SEQ ID NO: 91518 - DNA, 600 bp, Chicken  19866894401056_1
ctcatctgaatggttctgtatagccaaaggggctcacaggattttaatcctgagtgtctagtgagctcagatatgacagagttaggccgtcctgaaaatcagcagaatagatttttttttttttctggaagttttagtggattttcagttccagaggtgtgacttgtccataatgacatgaacagctgtattagtcagatgttgctggaatgctacatttctactgtacataaggaatagtgaaaggaacatcagaaaaaatttaaattattcccttttctctttggcattccactgccyatcagctactctctgaccttttcagtgttgagcatgctaataattttatttgtaagtcagagaagcaaattatttatttggaatttttatttaccacaaaatattttcctgattactttcaaaccaagctctatgtaacttgcttagcaatctacaacatatgttatgcaaattagaacagaaactcctcttttctatagaacttgcttaaaactcattaataagacagaatttctcattcttaaactggtcttacttaaattttttttttttttaaacctgttacggattacaacaact

SEQ ID NO: 91519 - DNA, 599 bp, Chicken  19866894401059_1
  misc_feature (1)..(59): n is any nucleotide
nnnnnnnnnnnnnnnnnnnnnnnnnnnnnnnnnnnnnnnnnnnnnnnnnnnnnnnnnnncatgctgctctggaagtgttactcgtgtgtgtacatgtgcctgggtgtatgcacttgccaacacagaagccagagtatgtgtagcctttctgtatttcaaggtgctgggagctttgggttgcacagagagtgaatgatccagaccagagcgaggagacgggagaagagagaggtgtggagcagtcagactggcgtcccttggctcttctgtaacgtgggtgagtgttttctttcagctccmtgagaagcaggtgagcgtgttccttctgagtggcctgataattgtgttacaaagggagacgtgcctgccttctaggaattccttcctctctgttattacagatttctcattcttctcgggtgatcaagaagaatgtggaggaatctgggagggcaaatgaaagcagctcagcttttgttaatctgaaaagttcagaagttcttccttgacttgaaaccttaacgagcatctgaagcaatgccttttaatttagatcgtcgcattgaattttgcaaagaaaactgagtcccaatttctag

SEQ ID NO: 91520 - DNA, 600 bp, Chicken  19866894401067_1
agctccatcatcaacatgaaatgatggttggacttctaactatgtatgttttcaattgttagtgttaattaaatggccttcagcaacatgtattttatagctattattgaagttcaactgatggtaagaatataatattttaattggataataaaaattcaaacatgttagaataatcgatcaaagcaggatggcctctcagggtagaatttggaaatttccttttaaaagccacgaccaaatacttccatttaaaaattgtacactcttgtcctagaagtccacgtttcaacaacctcwgagagcaacgctggtaattctgctaagctatttcaagtgtatttaggagcttctttaatttggttgcaaatcttaactctggatcaatgtaagaaatttaagcacataaatttcacaatgattacagagcgacaacacactgcagtgattacttaacgcttcggtatttctgcagaaygttagcagcagccttgccaagacttgctgaaggagaaggcagacctcaaaaacacatgaagcaagaggcttgttgaaaatgcactaaggcagtggaaagtgtgagagtgatggctgaatgga

SEQ ID NO: 91521 - DNA, 600 bp, Chicken  19866894401067_2
gatcaaagcaggatggcctctcagggtagaatttggaaatttccttttaaaagccacgaccaaatacttccatttaaaaattgtacactcttgtcctagaagtccacgtttcaacaacctcwgagagcaacgctggtaattctgctaagctatttcaagtgtatttaggagcttctttaatttggttgcaaatcttaactctggatcaatgtaagaaatttaagcacataaatttcacaatgattacagagcgacaacacactgcagtgattacttaacgcttcggtatttctgcagaaygttagcagcagccttgccaagacttgctgaaggagaaggcagacctcaaaaacacatgaagcaagaggcttgttgaaaatgcactaaggcagtggaaagtgtgagagtgatggctgaatggagaaatattggtggtaggtggacggttggactggatgaccttggaggtcatttctaaccttggtgattctatgattttaatgagctttgcaccagatagaaaatacatattatccwagatgcagggtttgctacaaaaacattcacctggtatatcacatctttactcttgtttccgct

SEQ ID NO: 91522 - DNA, 600 bp, Chicken  19866894401067_3
caatgattacagagcgacaacacactgcagtgattacttaacgcttcggtatttctgcagaaygttagcagcagccttgccaagacttgctgaaggagaaggcagacctcaaaaacacatgaagcaagaggcttgttgaaaatgcactaaggcagtggaaagtgtgagagtgatggctgaatggagaaatattggtggtaggtggacggttggactggatgaccttggaggtcatttctaaccttggtgattctatgattttaatgagctttgcaccagatagaaaatacatattatccwagatgcagggtttgctacaaaaacattcacctggtatatcacatctttactcttgtttccgctatatttagaatagaattttcagagcatgagtacatagaaatggcttatcagttacataatcagaattaggaagagtttaagacagaaatcagccccctgggaccgcacaacctctcctgccattgctgctgctgctaaggaagatctgatatccgtacttttagtgctatttcagtaactatccagctaagcagctctcagacataatgcacatttgaaaagcagaaaaacgtctga

SEQ ID NO: 91523 - DNA, 600 bp, Chicken  19866894401077_1
cagcgcaagtgagataaaatctgaacgcatgcatcttaacgtaccctttaaaaatatcttctctcccctcctacaggcctcaaatttgtgacagattaagttcttctctgcaagagacagttaacgctaagcaaacattgacagtcagaactgcagaagacagcggctgacagatgctttccctggcttgtcccgtctcagatctgtgagacatattagatgaatttgtttttgtctgaaatgtagctataaatgttccactttctcttaggcagcttattcaacattttccccttaatrtgaattttatctcggaaaatgatgaggaggctaaaacaccccagcagcatggccatgaaacataacccagctgctctcatcagttaggaayacagtctaggttttcaaggcaatgtaattttttttgctctccaaccaccatttgtttccttccttctgacattcatttctgcacgccttgaagctataccttgaacttcacatatctaaaggcagctgttcaaccactctcccaaaaactgcttacacgtttcttctcgctaccatcgacattctcctctactcccacatccctttcac

SEQ ID NO: 91524 - DNA, 600 bp, Chicken  19866894401077_2
cagattaagttcttctctgcaagagacagttaacgctaagcaaacattgacagtcagaactgcagaagacagcggctgacagatgctttccctggcttgtcccgtctcagatctgtgagacatattagatgaatttgtttttgtctgaaatgtagctataaatgttccactttctcttaggcagcttattcaacattttccccttaatrtgaattttatctcggaaaatgatgaggaggctaaaacaccccagcagcatggccatgaaacataacccagctgctctcatcagttaggaayacagtctaggttttcaaggcaatgtaattttttttgctctccaaccaccatttgtttccttccttctgacattcatttctgcacgccttgaagctataccttgaacttcacatatctaaaggcagctgttcaaccactctcccaaaaactgcttacacgtttcttctcgctaccatcgacattctcctctactcccacatccctttcacastggactgaaacctgtggtttcacttcaactgcaccttcacctttaccatgaagacagactcacagaaaaatgtaggtttgatacagtgt

SEQ ID NO: 91525 - DNA, 600 bp, Chicken  19866894401077_3
gttaacgctaagcaaacattgacagtcagaactgcagaagacagcggctgacagatgctttccctggcttgtcccgtctcagatctgtgagacatattagatgaatttgtttttgtctgaaatgtagctataaatgttccactttctcttaggcagcttattcaacattttccccttaatrtgaattttatctcggaaaatgatgaggaggctaaaacaccccagcagcatggccatgaaacataacccagctgctctcatcagttaggaayacagtctaggttttcaaggcaatgtaaytttttttgctctccaaccaccatttgtttccttccttctgacattcatttctgcacgccttgaagctataccttgaacttcacatatctaaaggcagctgttcaaccactctcccaaaaactgcttacacgtttcttctcgctaccatcgacattctcctctactcccacatccctttcacastggactgaaacctgtggtttcacttcaactgcaccttcacctttaccatgaagacagactcacagaaaaatgtaggtttgatacagtgtctggatgtcactgaatacaaacacccgc

SEQ ID NO: 91526 - DNA, 600 bp, Chicken  19866894401077_4
aattttatctcggaaaatgatgaggaggctaaaacaccccagcagcatggccatgaaacataacccagctgctctcatcagttaggaayacagtctaggttttcaaggcaatgtaattttttttgctctccaaccaccatttgtttccttccttctgacattcatttctgcacgccttgaagctataccttgaacttcacatatctaaaggcagctgttcaaccactctcccaaaaactgcttacacgtttcttctcgctaccatcgacattctcctctactcccacatccctttcacastggactgaaacctgtggtttcacttcaactgcaccttcacctttaccatgaagacagactcacagaaaaatgtaggtttgatacagtgtctggatgtcactgaatacaaacacccgctgaccccagactgggccaatttcaaggtttgatccaagtctaaagtctggagcagactgctccgggtcacattttgttaagtcctgagtacctctaaggactccctagtctccctgggcagttttgctgtatcagaactgtatctgtatctgctgtacaaaatattagccaatggcttgagga

SEQ ID NO: 91527 - DNA, 600 bp, Chicken  19866894401078_1
ccttctgtgatcaaagcttaggatacatcattcttgtggttgacatatataaaataattccatcagatgcacaatgtgcaatagatggatatctgacattctttgtaacctaaataatcagcatcgttttgtgagctcgtgcccattcccaggctgaaagtgctccttaacttgagccccagagttttgagtatgggccataaacagcacacacagtcagctagtgcaggagaaacaggatggtgataataaaccatacataagccaataaaccgtaactgtgggaaaataacagactcryttcacatggatctgtaacatactgatggtttttttccaaggtggaggaaatgattgcagacatacgtggtgtttttatagaaaccttagatgatctcacctggatggatgcagaaaccaaaaagaaggcagaacaaaaagtaagttaaatcttaaacactggaaatactgtgggtttctctagaaaataagtatacagctgttcgttttccagaagagaaaagcagtaacacttttatatgcatrtatgtatacacatacatacataaatgcatgtatttctgtttatagaggcataac

SEQ ID NO: 91528 - DNA, 600 bp, Chicken  19866894401078_2
cttctgtgatcaaagcttaggatacatcattcttgtggttgacatatataaaataattccatcagatgcacaatgtgcaatagatggatatctgacattctttgtaacctaaataatcagcatcgttttgtgagctcgtgcccattcccaggctgaaagtgctccttaacttgagccccagagttttgagtatgggccataaacagcacacacagtcagctagtgcaggagaaacaggatggtgataataaaccatacataagccaataaaccgtaactgtgggaaaataacagactcryttcacatggatctgtaacatactgatggtttttttccaaggtggaggaaatgattgcagacatacgtggtgtttttatagaaaccttagatgatctcacctggatggatgcagaaaccaaaaagaaggcagaacaaaaagtaagttaaatcttaaacactggaaatactgtgggtttctctagaaaataagtatacagctgttcgttttccagaagagaaaagcagtaacacttttatatgcatrtatgtatacacatacatacataaatgcatgtatttctgtttatagaggcataaca

SEQ ID NO: 91529 - DNA, 495 bp, Chicken  19866894401078_3
taataaaccatacataagccaataaaccgtaactgtgggaaaataacagactcryttcacatggatctgtaacatactgatggtttttttccaaggtggaggaaatgattgcagacatacgtggtgtttttatagaaaccttagatgatctcacctggatggatgcagaaaccaaaaagaaggcagaacaaaaagtaagttaaatcttaaacactggaaatactgtgggtttctctagaaaataagtatacagctgttcgttttccagaagagaaaagcagtaacacttttatatgcatrtatgtatacacatacatacataaatgcatgtatttctgtttatagaggcataacagcttgcagaccttgtatgtcagattcaaactgcatgggcgggggcctctctggagataagagtacaaaactggagttatctacatgaaagatacagaccttccaggcaaatcagtggattaagtggatagataatgaata

SEQ ID NO: 91530 - DNA, 600 bp, Chicken  19866894401102_1
aacactgtactgccaatgctgtgcacactcatgtctatggttatcttttagcacacttgtcccctcgggcagctcagcctccccaggcactcatgctgctgctgtggtaccacacatcccaccaagacctcctcttccctcccactgtatgagctgtcttggggaccagaagcatcacaccaccagccttacatctcccttctcactccatccctcttattgcaccactgctccaaaccctcagtgttctgagcgctgaacattttcaccctttgagagaaaggatgttgttttcaaaaygggttaatgagcatttttagatgtttttctcccttctttgtcatctacaaaaatttcatttttaaaagaatttacaaaatgttttctgttttgaaggtcagggatttaatactgttacaatctcttttctgaagcctgaatactaacatacttcaagcccacaatgattaaggggagatataaggaaaggaggggggctataagaaagaaggggacagactctatagcagggtctgtgatgataagacaaggggaaatgggttcaagcaaaagaggggagatttaggctggatataagcc

SEQ ID NO: 91531 - DNA, 600 bp, Chicken  19866894401120_1
agataaagaacataatattccatctcagtgtattatattagatcagtttgaattcaacctcatttttaaagtaaattgaatttctagtaagatcaaatcaggactggataatgcagttaagatttacagattatgtctatgcccacatctatacataccaccaggtatactgcaagtttagttagctactttctttgtcttttcaatttgtagtttgggaacacatgatctggcaatttaatgttactggtgattgtcaaaatctgatacttcacattccaacagtattttcctcttatytgaacactcttgcactttcatcatttttagagactagcgagctcagcagacaatgacatctttggcaattgtcaggaataaaaaatatgaaacaatgtacataatatttcacaagtaaaaaataatggaaccaagcaagaaaaattattctccacttttgccacataaataacatatatagtttccaaactcttaggtctgatctttgttttcctatccttctctttctcagttcctctctttttctctccttctctctctctctacgtcagctaaaaaatcaaggtcctccatatattt

SEQ ID NO: 91532 - DNA, 600 bp, Chicken  19866894401131_1
tattaataaacaattagttgattcacaacctttataattaaccaacatgcctgtttcactgtactgaatttttctttaaatgaccaataagtgtctttatgattttgaatgtagatttccctaagaaaataaaggagaaaatgaaactaaggaaaagatattatattaggaaaaaaaaaaaacatgtaaggtaagataaatctgtccttatatggcaccatcctttaataacaccatagaaggcatacacagtgtacagatttaataatgtcagtaatatcagtgaaggacaacagttayctttattttaaatttagttgatgattcataatcagaaatttctagaaaattactgacaatgcagcagatacaagatcatacttacataaggaaaggtttgagttgttccaggtactacctcccccccaaaaaaacaaaacttggttttctttctctgtgttattcacaaatgtaggtactttgcaaatacgcagttaatattcaaatcaagtagcttactcatggtagtaaaattaaattagtccaaatacatgaaaaacaatacagtattggggtgaaggccatttcttcttaatttgg

SEQ ID NO: 91533 - DNA, 600 bp, Chicken  19866894401131_2
ggtactttgcaaatacgcagttaatattcaaatcaagtagcttactcatggtagtaaaattaaattagtccaaatacatgaaaaacaatacagtattggggtgaaggccatttcttcttaatttggccagctcagtacacaagtaatgactgacctatctttatggcaaggcttgcattatattcaagtaacatatttagtgactgcacaacacatgatgatgcgaagaagaggttgagagaactgggattgttcaagctaaagaagagaagataaaggggaaatcttactgccttctayagctacctaataaagggtcatagggtttataagagaagatgaaaataaattattcttagaagtgcagtaagtggaaagagcacaggagaggcaactgcaagatagaacaagaatacctccaactagatatcagaaaataaaaataaaattgtggtaaccagagactagagtgagtgcccagaaagatctgtaataatcatcttttaactgtaacttggccaaggcacttgagaagcctaagtaggacttgctttgagtgagagctagaccacacgacctccagagttctctctcaaacta

SEQ ID NO: 91534 - DNA, 600 bp, Chicken  19866894401139_1
aataaaaaaaaataaacccaattagtgttgattgccaacagtacagcacgtctatggtacgtttcctaatacatgagagaacggaaatgtttgaaaatcaattaaaataagaatcacaaaacagaattagtgttagagcagttcaaggattcccagtctgtcagtatctagcccaagcagcgctacccaaacacagtatgagccatttagtgttttcataacgagaagaaaaacattcaaatattaaagctgcgacaaacacacaaaagcaaggaaaggacatctgttctgtacacagcygcgtcacaccagggtacggcgtggtgggagtttgcccccagtgcactgtgtgtgctgtgatacctggatacaactgtaatggaarcagttctcaagtttccttgctgttgtggtttcatgttataccattcaagttataacagctttgtgtaatttgttttcctgaagggaagaagagagagaagttcataaggaaatttaaaaaatgctactaaaatcccgtaagttggacacaatttactgctttagsagctatctattgtgtcactgcacaatacaggagcggcctaccaaccgctg

SEQ ID NO: 91535 - DNA, 600 bp, Chicken  19866894401139_2
aatgtttgaaaatcaattaaaataagaatcacaaaacagaattagtgttagagcagttcaaggattcccagtctgtcagtatctagcccaagcagcgctacccaaacacagtatgagccatttagtgttttcataacgagaagaaaaacattcaaatattaaagctgcgacaaacacacaaaagcaaggaaaggacatctgttctgtacacagcygcgtcacaccagggtacggcgtggtgggagtttgcccccagtgcactgtgtgtgctgtgatacctggatacaactgtaatggaarcagttctcaagtttccttgctgttgtggtttcatgttataccattcaagttataacagctttgtgtaatttgttttcctgaagggaagaagagagagaagttcataaggaaatttaaaaaatgctactaaaatcccgtaagttggacacaatttactgctttagsagctatctattgtgtcactgcacaatacaggagcggcctaccaaccgctgaactaccaaccggtgtggcggaacgtattggccatcgtgctttgaaaactggtactttaaaacccgccagtactccttaacaagg

SEQ ID NO: 91536 - DNA, 600 bp, Chicken  19866894401139_3
tgcgacaaacacacaaaagcaaggaaaggacatctgttctgtacacagcygcgtcacaccagggtacggcgtggtgggagtttgcccccagtgcactgtgtgtgctgtgatacctggatacaactgtaatggaarcagttctcaagtttccttgctgttgtggtttcatgttataccattcaagttataacagctttgtgtaatttgttttcctgaagggaagaagagagagaagttcataaggaaatttaaaaaatgctactaaaatcccgtaagttggacacaatttactgctttagsagctatctattgtgtcactgcacaatacaggagcggcctaccaaccgctgaactaccaaccggtgtggcggaacgtattggccatcgtgctttgaaaactggtactttaaaacccgccagtactccttaacaaggcagaaacaaggcctgcgggtttcaaatgctaccatccttatgtaaagtagtaaatgtgcatttctagtggcaaaattcaaatctctgcctctgctgcttcagttcttaaaacgagacttttatcagagcttccgttcttctgtattatcccgaagcacgtttatg

SEQ ID NO: 91537 - DNA, 600 bp, Chicken  19866894401139_4
accaaaaccccagaaaatgtcatagcttatactgaaagtttgattcatgctcattttgttcatctaaaaatactctttggaaactgtcaactcctgcagacaacttagtgatacatctttccctgttaaaataaagataactcatattcacctctaccccatgctaagctctactgctaatatacacttcattacttgctcacgtcaccatctaacacgtatctttacagacttctacgtcgtgcccagggcttatttttcaccaaacggaatttgacaactattacacttcggagtttwtactgaggattcttgtttttttttggtgttctagccttttcattgcaacttacagtgatatccatagctcagaccattttcccatgctaactcaggagaaaattttcagaaagttttttcctattaaagaatctaaactcattcggataaaaaactgaaaaccagaagagagattggacgcgttggtcactgttgaattgtttctgctactttaaaatgcattttaaaatcataaatagcacacttagattctaattcaatgtcttgcaaagaagcatgaaaaataagccactggtcatg

SEQ ID NO: 91538 - DNA, 600 bp, Chicken  19866894401148_1
aacagcgaactactgaggtaataatggcactgcagtatgaaactttctggctttccccaacttatatttctctttctctttatatattcttgagcctttaaaagtcaagtcctggactatcaggtatataaaagtggagcatggagaagtttgggtaagcaaaataaccttcaccttgcttgtagcagacagatggcctgaggtctgtttcagcttgagctgaagctgctatagattaacatggcattcagtatttatttttaggttccctaaaatccattaaaaatactcatttttctmtctctgcttcacccatgaatgctaagattgctattgcatcctgagctggttcccacatttgagccaagactccgctgtccacagctacgggaagtatcagtctgcacacatcaccagcttgagcagatcctcaattacatggagagatctgaactgggagtcactagggataagttcccattcttagctctgtagagctgcaaaaacactgcttcagtgctttatgggaccaacccatgggaattatccaactctgcatgcagtagcattaggcttgagacaggacatccagagaaaggc

SEQ ID NO: 91539 - DNA, 600 bp, Chicken  19866894401152_1
cctctgtattatgtagacaagattttcttatgcaagacaagtagctgcacaatcaggattgccttcgatatttttttattttttatttttattttttcctatgcgtccatgaattacttttccacaagctgtcaggactgaatcatttttttaaatgttagctctttttatattgaccagccttataactgctcatatgcctgtgtcttcagctgacacatcagagggatcaggtttctaaccttcactatttccttgacaattacagtgctgtgaagcctctcaaaatgatgtcatatytgggacagttttgttttatttcaactagccacactgggatattttccttaataaggtaatatgtgaagggtgttgttcacagtaaatatttatgtagacaagcactcagagatgaaagaaaggttatctgtcattgttttttaagattagttccttattctctatgacatacttagtacagttcctctgtaaggccatttggagattgagagaaaacaaaatcccaaggcataggtagcaaaatgatgtgaacagctggggaggggatgggacttttctgttctttgtatcctgttgaag

SEQ ID NO: 91540 - DNA, 600 bp, Chicken  19866894401158_1
ctctgtcctgatctgcaagtgattaaattactgggttttgtggcatgtgatttggaggggagcagggtgcttttccctgttttcccccattactggaagtttgatgaaatttcagagcttgtatcgcttggttggttggtttacttgtttattaacgtttatcatggtaggaagtgctgatctctagcagaggaatgctggctattttggtgggctgactaaggcattgtcctcttgctcccaaagtaattgtgttacttgggcaagcttgcagcttgtcgtagtgctttccatgcaagygtgtctccttgctggactgagtccaacgtgcctgaagtgttgactgtggtctgatgtttgacagcacaatgtaatggacgtcaccccaaataaatggagcctggaatcctgcgaagagcttttgacaggagcagcttagctcaggactttgtagaagctcacaattaaattggtatttctgttagacttgtgcatgaatacttggagtgcagaagaagtttggttgcacctgtctgtcccccttttgccccttcrcagaggtggcagaagatcctgtggatcatctgtaaagcttgtgtg

SEQ ID NO: 91541 - DNA, 600 bp, Chicken  19866894401158_2
tacttgggcaagcttgcagcttgtcgtagtgctttccatgcaagygtgtctccttgctggactgagtccaacgtgcctgaagtgttgactgtggtctgatgtttgacagcacaatgtaatggacgtcaccccaaataaatggagcctggaatcctgcgaagagcttttgacaggagcagcttagctcaggactttgtagaagctcacaattaaattggtatttctgttagacttgtgcatgaatacttggagtgcagaagaagtttggttgcacctgtctgtcccccttttgccccttcrcagaggtggcagaagatcctgtggatcatctgtaaagcttgtgtgactgctagtgtcaacatragggagcttcctgcacaacggggcctccyttccctgtaggtagctttcactgataacccagttasagctatttcctaagtgctttgctgacgtccttccaggcaggctgcatttgtagctactgtgcagattttgtatgatatgttagcaggaggtctgctgaggggacagaagttcttactgtatgagctgtacttggaaggcagttgtttgttaaggtgttgtctggctctaata

SEQ ID NO: 91542 - DNA, 600 bp, Chicken  19866894401158_3
gagtccaacgtgcctgaagtgttgactgtggtctgatgtttgacagcacaatgtaatggacgtcaccccaaataaatggagcctggaatcctgcgaagagcttttgacaggagcagcttagctcaggactttgtagaagctcacaattaaattggtatttctgttagacttgtgcatgaatacttggagtgcagaagaagtttggttgcacctgtctgtcccccttttgccccttcrcagaggtggcagaagatcctgtggatcatctgtaaagcttgtgtgactgctagtgtcaacatragggagcttcctgcacaacggggcctccyttccctgtaggtagctttcactgataacccagttasagctatttcctaagtgctttgctgacgtccttccaggcaggctgcatttgtagctactgtgcagattttgtatgatatgttagcaggaggtctgctgaggggacagaagttcttactgtatgagctgtacttggaaggcagttgtttgttaaggtgttgtctggctctaataaaatgttagtgtccacaaaaggagagcttgcagtatctgtgctgctctgctggctggcagtga

SEQ ID NO: 91543 - DNA, 600 bp, Chicken  19866894401158_4
gttgactgtggtctgatgtttgacagcacaatgtaatggacgtcaccccaaataaatggagcctggaatcctgcgaagagcttttgacaggagcagcttagctcaggactttgtagaagctcacaattaaattggtatttctgttagacttgtgcatgaatacttggagtgcagaagaagtttggttgcacctgtctgtcccccttttgccccttcrcagaggtggcagaagatcctgtggatcatctgtaaagcttgtgtgactgctagtgtcaacatragggagcttcctgcacaacrgggcctccyttccctgtaggtagctttcactgataacccagttasagctatttcctaagtgctttgctgacgtccttccaggcaggctgcatttgtagctactgtgcagattttgtatgatatgttagcaggaggtctgctgaggggacagaagttcttactgtatgagctgtacttggaaggcagttgtttgttaaggtgttgtctggctctaataaaatgttagtgtccacaaaaggagagcttgcagtatctgtgctgctctgctggctggcagtgaaggaaatggctttgccattc

SEQ ID NO: 91544 - DNA, 600 bp, Chicken  19866894401158_5
ggtctgatgtttgacagcacaatgtaatggacgtcaccccaaataaatggagcctggaatcctgcgaagagcttttgacaggagcagcttagctcaggactttgtagaagctcacaattaaattggtatttctgttagacttgtgcatgaatacttggagtgcagaagaagtttggttgcacctgtctgtcccccttttgccccttcrcagaggtggcagaagatcctgtggatcatctgtaaagcttgtgtgactgctagtgtcaacatragggagcttcctgcacaacggggcctccyttccctgtaggtagctttcactgataacccagttasagctatttcctaagtgctttgctgacgtccttccaggcaggctgcatttgtagctactgtgcagattttgtatgatatgttagcaggaggtctgctgaggggacagaagttcttactgtatgagctgtacttggaaggcagttgtttgttaaggtgttgtctggctctaataaaatgttagtgtccacaaaaggagagcttgcagtatctgtgctgctctgctggctggcagtgaaggaaatggctttgccattcggtgtgtca

SEQ ID NO: 91545 - DNA, 600 bp, Chicken  19866894401158_6
ccccaaataaatggagcctggaatcctgcgaagagcttttgacaggagcagcttagctcaggactttgtagaagctcacaattaaattggtatttctgttagacttgtgcatgaatacttggagtgcagaagaagtttggttgcacctgtctgtcccccttttgccccttcrcagaggtggcagaagatcctgtggatcatctgtaaagcttgtgtgactgctagtgtcaacatragggagcttcctgcacaacggggcctccyttccctgtaggtagctttcactgataacccagttasagctatttcctaagtgctttgctgacgtccttccaggcaggctgcatttgtagctactgtgcagattttgtatgatatgttagcaggaggtctgctgaggggacagaagttcttactgtatgagctgtacttggaaggcagttgtttgttaaggtgttgtctggctctaataaaatgttagtgtccacaaaaggagagcttgcagtatctgtgctgctctgctggctggcagtgaaggaaatggctttgccattcggtgtgtcagagtttgaagcatactctggtttgacagcagatcgt

SEQ ID NO: 91546 - DNA, 600 bp, Chicken  19866894401167_1
tatgtcctcaaatgagcttcatctggaagctcatcttgaaaaatgaccctcttttttatatggtgtttgttctacatttcaaaagccaccaaatgactctttgaattaagaatcactttctgaacaacctttcagcagagattatcaagatatgctggctgatatatgactaatacaccagtaagtagttagcttttgtaatctgaagaaatgctgtctttatttaaatgttatggagttttgaaaccttgccagaagtcatctaaaagctggaatggccttggagtgttaaattttccstttttttccagctgaaaccaatgatacattcactcttatgattatgaaaacactttgtcacagcatattgatctttatttcaaaaactactactcatttaacaatcttagtatagagatgtttcaaggtatgtggtgctgtgggtagattgtgtgatctttcattgaaaattgagtaataatcaccatcataagttgctgactgtgagatataaattattctcttatacaattaggtagttgaagactccccaaatcacctaagtgtattttcatagcaaactggattagataaatggta

SEQ ID NO: 91547 - DNA, 600 bp, Chicken  19866894403171_1
cattcccttccgggagggaataaatggttgcaatcttccttttcttcatctacataaaaaggtaaaatttaaagatctcccaacaaaaaggcagaaggcataatggggtttgttttaagagcggagcatcccatgagagtgcgggggaacacttcggattccatggaaaggcagtggttgaagttacgaaagtagatcataggaccgcagcagctctgctgtccgacggcacccgggcgcctccgagcagtgccttcatccggacaaagccattggccacagctgacgttccccaaacasaagcagtccgcaccgcccaccgcatcacgacgggcggctgcggccgcgcggcgcgacgggaacgcggcagttgtcagccggcagcaaaacagcgcgcacagcaaaattaatcatcggagaaggaggagaagggaagggacggcaggagggccgggagcggggccggtgtcagcgccggggcagggcgcgctcgtgccagcgcagcgctcagcgccgcctgcgccctgccagcaccgccccgtggctgcgcaccctcgccccgtgagtcagaggcgctgcgggagctctgtgcagccttat

SEQ ID NO: 91548 - DNA, 599 bp, Chicken  19866894403176_1
  misc_feature (1)..(179): n is any nucleotide
nnnnnnnnnnnnnnnnnnnnnnnnnnnnnnnnnnnnnnnnnnnnnnnnnnnnnnnnnnnnnnnnnnnnnnnnnnnnnnnnnnnnnnnnnnnnnnnnnnnnnnnnnnnnnnnnnnnnnnnnnnnnnnnnnnnnnnnnnnnnnnnnnnnnnnnnnnnnnnnnnnnnnnnnnnnnnnnnnnnaggagggagggagggatgcgggccggatggaggggtggaggaagagatggatggatggatagatggagggatacgtgggtacagatctagggatggggtggtcgatggatggtggagggayggagggatgaatgggtggaggaatgargggagaaaaggctggagggatcgatggagagagggataaataggtggaggaatagatggagggatgggtggagggacacgtggatggttggagtgatagttggagggatggaggaaatgaggaagggatggagggatagatagagggacggaaggttggatggagggacggacgcaagaacagatagatggtcagatgtagggaggtacagatgcagggagaaacayggaatcacagacttgtggaatggcttgggttgaagggacctcaaa

SEQ ID NO: 91549 - DNA, 599 bp, Chicken  19866894403176_2
  misc_feature (1)..(152): n is any nucleotide
nnnnnnnnnnnnnnnnnnnnnnnnnnnnnnnnnnnnnnnnnnnnnnnnnnnnnnnnnnnnnnnnnnnnnnnnnnnnnnnnnnnnnnnnnnnnnnnnnnnnnnnnnnnnnnnnnnnnnnnnnnnnnnnnnnnnnnnnnnnnnnnnnnnnnnnnaggagggagggagggatgcgggccggatggaggggtggaggaagagatggatggatggatagatggagggatacgtgggtacagatctagggatggggtggtcgatggatggtggagggayggagggatgaatgggtggaggaatgargggagaaaaggctggagggatcgatggagagagggataaataggtggaggaatagatggagggatgggtggagggacacgtggatggttggagtgatagttggagggatggaggaaatgaggaagggatggagggatagatagagggacggaaggttggatggagggacggacgcaagaacagatagatggtcagatgtagggaggtacagatgcagggagaaacayggaatcacagacttgtggaatggcttgggttgaagggacctcaaagatcatctggttccagaaggatggagg

SEQ ID NO: 91550 - DNA, 600 bp, Chicken  19866894403176_3
tgggtacagatctagggatggggtggtcgatggatggtggagggayggagggatgaatgggtggaggaatgargggagaaaaggctggagggatcgatggagagagggataaataggtggaggaatagatggagggatgggtggagggacacgtggatggttggagtgatagttggagggatggaggaaatgaggaagggatggagggatagatagagggacggaaggttggatggagggacggacgcaagaacagatagatggtcagatgtagggaggtacagatgcagggagaaacayggaatcacagacttgtggaatggcttgggttgaagggacctcaaagatcatctggttccagaaggatggagggatggaaggatggagagatggatgcaggaacagatgaatggagggagaggtgaatggacaggtggagggatagaaggctggatggacaaaagaatggatggacttatgggtgtttgctctgtctctctccccaccaggacactggcaaaaagcaatccctgtgctgaaccctcttggctggtagccttggtcccattggcagcccccaacacagagatgcgcaggggg

SEQ ID NO: 91551 - DNA, 599 bp, Chicken  19866894403198_1
  misc_feature (1)..(68): n is any nucleotide
nnnnnnnnnnnnnnnnnnnnnnnnnnnnnnnnnnnnnnnnnnnnnnnnnnnnnnnnnnnnnnnnnnnnacgtgcttcttggtcctgcatctttcatcccgtgttggctaagctcgtccctgccctgaagaggcagaggatgctttttctggctttgacttctcagcatctgcaggcaggaggcagtgagcagacggagccctgggaggatgcagacagccggggagtgggctgctcaccatcaggagagcctccagccccaacctgtgtgccacccccagggagtgacctgcagtggctktgcccaaaaagcatgctctgtgcaggggatgtcactccttagcaatgtcagtttgccccaatgtgctcagcatctccccatgtccattccctgcctgcccagctggctctggagccaggaggaatgctcacagcccattaacgctgctctgagtggctccccggrtgataccataattcaggttgtgcccaagaactcctttctccggtgaaggctgcctgcatcctgtgactcactggtgcccacctgctccgctgggttcacccagggactgagaaaggtctttgctttcctcgctg

SEQ ID NO: 91552 - DNA, 600 bp, Chicken  19866894403198_2
catctgcaggcaggaggcagtgagcagacggagccctgggaggatgcagacagccggggagtgggctgctcaccatcaggagagcctccagccccaacctgtgtgccacccccagggagtgacctgcagtggctktgcccaaaaagcatgctctgtgcaggggatgtcactccttagcaatgtcagtttgccccaatgtgctcagcatctccccatgtccattccctgcctgcccagctggctctggagccaggaggaatgctcacagcccattaacgctgctctgagtggctccccggrtgataccataattcaggttgtgcccaagaactcctttctccggtgaaggctgcctgcatcctgtgactcactggtgcccacctgctccgctgggttcacccagggactgagaaaggtctttgctttcctcgctgaggcggtgactgtcccactgtggcggtgttctcagctctctggaaccacaatgggtgtctcctccgctgcccagctctgccccatccaccccacccagctcagcctgctgacctgcaatgcctcctggtgacacccagtccccagaccaccccttcctcctctgtg

SEQ ID NO: 91553 - DNA, 599 bp, Chicken  19866894403213_1
  misc_feature (1)..(46): n is any nucleotide
nnnnnnnnnnnnnnnnnnnnnnnnnnnnnnnnnnnnnnnnnnnnnnatgacagcccaccagataaggtttgtaatagtccagattgcacgtgattttatgtacttgctggctagtagatgaccaccagtctttagtgaagccacaccaccttgtcagctccctacttatcacctgtgttttttgcatccttttgagaaataagtgtggatctttttagacatgccatcttgctaatcatcaggatgctggtgttgctgcaccgtagagttttggagaatgttgcagccctgaaccatgcragtttactctatgttgcagtcaaaccacttcaagtggatggagatgtggctcttgctttctcatcttctttaccttggggcttcctcactgyctgcctgcttttgggcttatggacaaagagccatggtagtttcaaggtcaggtatcccaggaaaacacccaatgcttgtaagtagaaagcagggcagcgggacttcttgctttgatttaccgtggaaataggatttcttaacaagaggtttctaatgcaaacacatttgcgttgggtgtctggcttgttgtgttcatgctcgcacac

SEQ ID NO: 91554 - DNA, 600 bp, Chicken  19866894403213_2
attttatgtacttgctggctagtagatgaccaccagtctttagtgaagccacaccaccttgtcagctccctacttatcacctgtgttttttgcatccttttgagaaataagtgtggatctttttagacatgccatcttgctaatcatcaggatgctggtgttgctgcaccgtagagttttggagaatgttgcagccctgaaccatgcragtttactctatgttgcagtcaaaccacttcaagtggatggagatgtggctcttgctttctcatcttctttaccttggggcttcctcactgyctgcctgcttttgggcttatggacaaagagccatggtagtttcaaggtcaggtatcccaggaaaacacccaatgcttgtaagtagaaagcagggcagcgggacttcttgctttgatttaccgtggaaataggatttcttaacaagaggtttctaatgcaaacacatttgcgttgggtgtctggcttgttgtgttcatgctcgcacacgtgttgtaaaactgcaggcactgttgatggaagtctgagaaactgggtttcctctcctgcctaagcatgggatcgtccctgcccacccacccc

SEQ ID NO: 91555 - DNA, 600 bp, Chicken  19866894403218_1
ctcttttccctagttaaatttctaagaatgtgaatgttcttgtacagcatgtattaaatggaattgctccaagaactgtggtgtaaagtctggtacatatcagttgtgcttctcttaaaatctttggaacaatggtaattccagataacttcctcttcagaaacatttctccttgcagtgaatagccatgtgaggtggtgatcagtaacaagtagtgacagttagagttcacagggttatccgccacaaagggagtctagcatgcagccaagaactatttgtgccacaatacttaaagaktataatggctttgtgaaagtttgcttcctgcatgggctgcaatgttcagtgtgagcacagcatttcctgtaaaaggcaagatacatagccttgtaaaacttgtttgttcatacagtttgcttccaaagaacttccttatttttgctcccttgccttcttagcaaaggtacagagcacactcagcatttgtggctggcacaagatttaagtacggttatgtatatatgacatatttatgtatagttatagatggccatgtctttaggttaaagaagttcttttagtgcctgcagctgaaaa

SEQ ID NO: 91556 - DNA, 599 bp, Chicken  19866894403225_1
  misc_feature (1)..(50): n is any nucleotide
nnnnnnnnnnnnnnnnnnnnnnnnnnnnnnnnnnnnnnnnnnnnnnnnnnaattttagtaacctgatttcatttaatttatacttacgcttacctctgagttctgaattttcttgaagtattgcacctgctaatattggtatatactgtgccattcatgtgtaattgtgttgattctttgctttatgtagaagactttacatcatctgaaaatgatagtatttatccattaacaggaaggctagaacatgaaatctgtggttaaagagatgtgtgtgcatgtgtgtgtatatgctccccyctccctcctcttcarttgtgytgttagaaataaatcctgaaatgctgcactaagcccccgctgaarcaraactagttagtaaatatttcatgttctgatgaccggcccttcctcataatctgcaattcataaatttgccgttcacattttctcaatttgttacagtctcattacttatgtttaaaaacaccatccccagttgagctaaaatatccattgtctggtggatagaatcagttaggctgacctggaaagaccttccatatatctgcttatttgaaacacaaaagataatctgc

SEQ ID NO: 91557 - DNA, 599 bp, Chicken  19866894403225_2
  misc_feature (1)..(35): n is any nucleotide
nnnnnnnnnnnnnnnnnnnnnnnnnnnnnnnnnnnaattttagtaacctgatttcatttaatttatacttacgcttacctctgagttctgaattttcttgaagtattgcacctgctaatattggtatatactgtgccattcatgtgtaattgtgttgattctttgctttatgtagaagactttacatcatctgaaaatgatagtatttatccattaacaggaaggctagaacatgaaatctgtggttaaagagatgtgtgtgcatgtgtgtgtatatgctccccyctccctcctcttcarttgtgytgttagaaataaatcctgaaatgctgcactaagcccccgctgaarcaraactagttagtaaatatttcatgttctgatgaccggcccttcctcataatctgcaattcataaatttgccgttcacattttctcaatttgttacagtctcattacttatgtttaaaaacaccatccccagttgagctaaaatatccattgtctggtggatagaatcagttaggctgacctggaaagaccttccatatatctgcttatttgaaacacaaaagataatctgctgcagaaataaaaat

SEQ ID NO: 91558 - DNA, 599 bp, Chicken  19866894403225_3
  misc_feature (1)..(29): n is any nucleotide
nnnnnnnnnnnnnnnnnnnnnnnnnnnnnaattttagtaacctgatttcatttaatttatacttacgcttacctctgagttctgaattttcttgaagtattgcacctgctaatattggtatatactgtgccattcatgtgtaattgtgttgattctttgctttatgtagaagactttacatcatctgaaaatgatagtatttatccattaacaggaaggctagaacatgaaatctgtggttaaagagatgtgtgtgcatgtgtgtgtatatgctccccyctccctcctcttcarttgtgytgttagaaataaatcctgaaatgctgcactaagcccccgctgaarcaraactagttagtaaatatttcatgttctgatgaccggcccttcctcataatctgcaattcataaatttgccgttcacattttctcaatttgttacagtctcattacttatgtttaaaaacaccatccccagttgagctaaaatatccattgtctggtggatagaatcagttaggctgacctggaaagaccttccatatatctgcttatttgaaacacaaaagataatctgctgcagaaataaaaatagaatc

SEQ ID NO: 91559 - DNA, 600 bp, Chicken  19866894403225_4
tttcatttaatttatacttacgcttacctctgagttctgaattttcttgaagtattgcacctgctaatattggtatatactgtgccattcatgtgtaattgtgttgattctttgctttatgtagaagactttacatcatctgaaaatgatagtatttatccattaacaggaaggctagaacatgaaatctgtggttaaagagatgtgtgtgcatgtgtgtgtatatgctccccyctccctcctcttcarttgtgytgttagaaataaatcctgaaatgctgcactaagcccccgctgaarcaraactagttagtaaatatttcatgttctgatgaccggcccttcctcataatctgcaattcataaatttgccgttcacattttctcaatttgttacagtctcattacttatgtttaaaaacaccatccccagttgagctaaaatatccattgtctggtggatagaatcagttaggctgacctggaaagaccttccatatatctgcttatttgaaacacaaaagataatctgctgcagaaataaaaatagaatctgagttatccagaggaggcagagaatgatgcaactggattatagcg

SEQ ID NO: 91560 - DNA, 600 bp, Chicken  19866894403225_5
catttaatttatacttacgcttacctctgagttctgaattttcttgaagtattgcacctgctaatattggtatatactgtgccattcatgtgtaattgtgttgattctttgctttatgtagaagactttacatcatctgaaaatgatagtatttatccattaacaggaaggctagaacatgaaatctgtggttaaagagatgtgtgtgcatgtgtgtgtatatgctccccyctccctcctcttcarttgtgytgttagaaataaatcctgaaatgctgcactaagcccccgctgaarcaraactagttagtaaatatttcatgttctgatgaccggcccttcctcataatctgcaattcataaatttgccgttcacattttctcaatttgttacagtctcattacttatgtttaaaaacaccatccccagttgagctaaaatatccattgtctggtggatagaatcagttaggctgacctggaaagaccttccatatatctgcttatttgaaacacaaaagataatctgctgcagaaataaaaatagaatctgagttatccagaggaggcagagaatgatgcaactggattatagcgctg

SEQ ID NO: 91561 - DNA, 600 bp, Chicken  19866894403226_1
tattgaagaaaaagcagatatcgttttaagccctgcaatctaaatcataaccaaaaattaaaacatactaattctgaaaagaagtgcacacattccccttcccagttactttttaagaaacaaaaagaaatcttactataagctgaaagaaatccatattctacagacaaaagtacttcacaaattccccttagagagcacagtggggagacagaactaatctatttactaatgaagatctaaaatttaagcaaacctatcaactaactttcaatctttaaataaataaatgaatagaastcctctaaaaataaccctactcatgtaagtagtacaaagacaggcagaagttacatgttatggctttaatttctttcttatggataatgaatgcatgcacagtcatgacatgagcttctatggtctttaatcacatcagggaccaattacagatacacaaatagcaatttggctaattgaagacaggtttcaaggactgctttcaatgcctaagtgaaacccatctgtcacagaagaaaaacacgtaaatcccacaggtcctgcataacttacagctctttatgtctgtcctagatcacc

SEQ ID NO: 91562 - DNA, 600 bp, Chicken  19866894403227_1
ctgaggagagaactgaggtcatgaagaagcttttgttccagtgccccgtcattcctggagttcgagaccctttctttaaatacagacatgttctgttaaaggcagccttcactaagatgccatagctgatggccttcctcttgtcaaatctcatttaactccttcatggcatgaaaagataaggggtcaaaggcagtctaggttttttctttctcattttagaactatgacctgtgtttggtgttacatccaaccccatgagaagtcacaaaatatgacagaataaaaagaaaatcagtwtttcccacagcagaactcaaactattattctaaaaaagtctcattttctcactagattattaataacaatcttgtaagtaatctggaaaagattcctgttccaaaaaatattgtttttttctaaactgtctccctttctatttgcagcaatgaaatgctttctgtatgtttatacaaatgtcagtgagataaaataagtatccttaaataaataaattgcccagatgtgaagtttctacattatttttaatgtaattgcactaactcgatatgtatcatttatgtattttggagggttca

SEQ ID NO: 91563 - DNA, 599 bp, Chicken  19866894403228_1
  misc_feature (1)..(157): n is any nucleotide
nnnnnnnnnnnnnnnnnnnnnnnnnnnnnnnnnnnnnnnnnnnnnnnnnnnnnnnnnnnnnnnnnnnnnnnnnnnnnnnnnnnnnnnnnnnnnnnnnnnnnnnnnnnnnnnnnnnnnnnnnnnnnnnnnnnnnnnnnnnnnnnnnnnnnnnnnnnnntttctctatggatttgcagccctctcctcccatagggacacccactttcttcagctacagcaaaaatccctcctgataaaaatgctataatctttagcccgagaggaatagcagcttaggcatttaaatgtagaaagcacacrcacttaaacagcgtgaaaatgaaaattactaaatcattcaggccctttgtgggattcttgggttacaccatttaggctgcacaaccaaaaagtttagagctgtgcaaaatctgctcaaagcatacacatcatgcagccgccacaaactgctcatgctggttgtacttgaaatgtacaaaaatgagtatgctgatttactttgaaatatrgctagaaaatgaaaatgtgcttgctggtttgtagcttgatggtgggatccggagaaaatatttatgattagctcagaaaatctctgaaga

SEQ ID NO: 91564 - DNA, 600 bp, Chicken  19866894403228_2
agctacagcaaaaatccctcctgataaaaatgctataatctttagcccgagaggaatagcagcttaggcatttaaatgtagaaagcacacrcacttaaacagcgtgaaaatgaaaattactaaatcattcaggccctttgtgggattcttgggttacaccatttaggctgcacaaccaaaaagtttagagctgtgcaaaatctgctcaaagcatacacatcatgcagccgccacaaactgctcatgctggttgtacttgaaatgtacaaaaatgagtatgctgatttactttgaaatatrgctagaaaatgaaaatgtgcttgctggtttgtagcttgatggtgggatccggagaaaatatttatgattagctcagaaaatctctgaagaacactgtttagaatagcagtagtgacatgacgctgacttctgaattttgttctgcagaggaacaaatggcactgtctgatagatgccccaggtgcatgtgatagatattacatgtgtttcctgacaaacaactgattttaaaaaatgtttgtaagtagcagggtattttttattagagcctggggctggcaagtatagccattaaggtat

SEQ ID NO: 91565 - DNA, 600 bp, Chicken  19866894403230_1
cctgggagctgacagtagtctagcaaaaagtaccaacagcacttgtagctgatgtgtccagcatgggtgtgtaaatactgtgggacaaaaacatgtcctaatctgatgtttgcaatttgttgcctaatctcagtcaagtcaagacccccagcttttcctcccagtgggtcagattggatagggctctgggcacccctgatcaaagcaaggggttggaactcaatgtgctttaagatcccttccaacctaagccattttatgattctacaatctcagtggcaataaggtagattctcgttytctaacaatatctgcacaggacagacccactctgcatgccttagcgtctctgttttagtcagacttcaaggagtccagtcatggcatgcttatgattagaggacaaaatattgttaattccagggttggcagaaaaacttrattgttagtggtttgtttgtttgtttttccagaggctttgcccattgctgaacgttagagtgtctgtgtcttttcctagaaataaggcaaatggagatgatcctggtaggtgccagttcacctcagggcactgtgacaggaaaaacagctcttaaatct

SEQ ID NO: 91566 - DNA, 600 bp, Chicken  19866894403230_2
agacccccagcttttcctcccagtgggtcagattggatagggctctgggcacccctgatcaaagcaaggggttggaactcaatgtgctttaagatcccttccaacctaagccattttatgattctacaatctcagtggcaataaggtagattctcgttytctaacaatatctgcacaggacagacccactctgcatgccttagcgtctctgttttagtcagacttcaaggagtccagtcatggcatgcttatgattagaggacaaaatattgttaattccagggttggcagaaaaacttrattgttagtggtttgtttgtttgtttttccagaggctttgcccattgctgaacgttagagtgtctgtgtcttttcctagaaataaggcaaatggagatgatcctggtaggtgccagttcacctcagggcactgtgacaggaaaaacagctcttaaatctctggtatgatttttcacataacagatagtcagtttgggtaaactttattgaaatgacttcaaaaaagcttccttgttcctcagtctgaaatagttttctgctttgaaagcagtttcctatctctgtaggagctatctgcag

SEQ ID NO: 91567 - DNA, 599 bp, Chicken  19866894403232_1
  misc_feature (1)..(116): n is any nucleotide
nnnnnnnnnnnnnnnnnnnnnnnnnnnnnnnnnnnnnnnnnnnnnnnnnnnnnnnnnnnnnnnnnnnnnnnnnnnnnnnnnnnnnnnnnnnnnnnnnnnnnnnnnnnnnnnnnnnnaacaagttttacctccctgtgaggtgcttcagtttcctggaagaaaagtgatgatgtatgagtctccttactatttaatgagtaaaatctgctaggacaagtctatcattttgttttatatttgtacagcacttgtacaatgtgggtctttctttgttactagaacttgaaggtacttgcaggrcattagaagtatacagttatactttcagttattatcctttcagtayctataggggggctataagaaagaaggggacagactgtttagcagggtctgttgtgataggacaaggggaaatggcttcagactaaaagaggagagatttagactggctataaggaagaatttttttataatgarggtggtgaggcactggaacaggttgccctatccctggagaaattcaaggtcaggctgsatggagctctgagcagcctgatggagctgtaggtgtccctgttcattccaggggagttgga

SEQ ID NO: 91568 - DNA, 599 bp, Chicken  19866894403232_2
  misc_feature (1)..(70): n is any nucleotide
nnnnnnnnnnnnnnnnnnnnnnnnnnnnnnnnnnnnnnnnnnnnnnnnnnnnnnnnnnnnnnnnnnnnnnaacaagttttacctccctgtgaggtgcttcagtttcctggaagaaaagtgatgatgtatgagtctccttactatttaatgagtaaaatctgctaggacaagtctatcattttgttttatatttgtacagcacttgtacaatgtgggtctttctttgttactagaacttgaaggtacttgcaggrcattagaagtatacagttatactttcagttattatcctttcagtayctataggggggctataagaaagaaggggacagactgtttagcagggtctgttgtgataggacaaggggaaatggcttcagactaaaagaggagagatttagactggctataaggaagaatttttttataatgarggtggtgaggcactggaacaggttgccctatccctggagaaattcaaggtcaggctgsatggagctctgagcagcctgatggagctgtaggtgtccctgttcattccaggggagttggactatgtgacccttaaaggttccttccaactcaagtttaattccatg

SEQ ID NO: 91569 - DNA, 600 bp, Chicken  19866894403232_3
tccttactatttaatgagtaaaatctgctaggacaagtctatcattttgttttatatttgtacagcacttgtacaatgtgggtctttctttgttactagaacttgaaggtacttgcaggrcattagaagtatacagttatactttcagttattatcctttcagtayctataggggggctataagaaagaaggggacagactgtttagcagggtctgttgtgataggacaaggggaaatggcttcagactaaaagaggagagatttagactggctataaggaagaatttttttataatgarggtggtgaggcactggaacaggttgccctatccctggagaaattcaaggtcaggctgsatggagctctgagcagcctgatggagctgtaggtgtccctgttcattccaggggagttggactatgtgacccttaaaggttccttccaactcaagtttaattccatgattctgtgataccaataactgatactatcattacattatatactgacagattagagggccattataaacaaagctgatattgtgattggttatatgtcaataggaaaaattaaaaatgacatatgcaataacatt

SEQ ID NO: 91570 - DNA, 593 bp, Chicken  19866894403232_4
tgtacagcacttgtacaatgtgggtctttctttgttactagaacttgaaggtacttgcaggrcattagaagtatacagttatactttcagttattatcctttcagtayctataggggggctataagaaagaaggggacagactgtttagcagggtctgttgtgataggacaaggggaaatggcttcagactaaaagaggagagatttagactggctataaggaagaatttttttataatgarggtggtgaggcactggaacaggttgccctatccctggagaaattcaaggtcaggctgsatggagctctgagcagcctgatggagctgtaggtgtccctgttcattccaggggagttggactatgtgacccttaaaggttccttccaactcaagtttaattccatgattctgtgataccaataactgatactatcattacattatatactgacagattagagggccattataaacaaagctgatattgtgattggttatatgtcaataggaaaaattaaaaatgacatatgcaataacatttggtgagatattatgcaaaaattctttatttagccttctaaaggatgaaat

SEQ ID NO: 91571 - DNA, 600 bp, Chicken  19866894403254_1
actcctaagatgattaagagggatgggaaaagggccaaaggagcacacacagaggacagcaactgacatccacaaccaatgggattactctgctgcagcacaaggacccaaattgaaataaactctttctggtttgggcatggagactgctcatgctgctccatgcaagggaatgggcactgcattccatcttctaacaaagagaaaggaaacgcatctggaaaaatcttcagaagtaatgtaacactgaaaagatggaagaatttaattcaggctccagcacccctcactgactgcacrtgcagcacaggtgtccaccatccctggtctctggccatttttatttcctagagaaggatagagagctcagccctcttcaaggagacacctgaggacacccaacccactcacccacgcacaagtcagacatgtgcctacctgcattctgagccctcttttggggctgtgcaaatctggtctaatactgggctaagatccaagagtggattcccttggctagtcaagcagcgcagagatgctgcctagcaatttagttagcgctggggtaggagaactcagcttggtgttttttaaacacat

SEQ ID NO: 91572 - DNA, 600 bp, Chicken  19866894403256_1
ggtagatcacacccccaccagccccatcaatttccttaaagcttgggaaaaacatgaagtaaaaacctatcatgtcaactaacagctcctctgccaaagtgggtcaactgaattaagcccattaatgccagctgatagagaaaccttttctcaaaaccaagctgtagtgcttccgctgcattcatttatttgtctctgatattgagaaacaatgggttacaagaggtagcctggaggacagcacacatttaactcctagtctttctctgcaatgcattaatacaaataaaaatcccacartttcttagtggcagttctcacaatgcagggcaagtgctgcaaaggccactgccctgtgctgcctgcattcccagcaacatcagctgcaagtttccctccctaatctccgacccgtaggaggaaataacattcccacaatgctgygtagatggcacagagaccaaagcacatctgacctctatgaacaccaatgccattatgggttagattgcctccagttcattagctcatgaaacatcagagctggagatgtgcttaacgtctgctttaacacgactgctgaagcttacaaaaratctt

SEQ ID NO: 91573 - DNA, 600 bp, Chicken  19866894403256_2
cttttctcaaaaccaagctgtagtgcttccgctgcattcatttatttgtctctgatattgagaaacaatgggttacaagaggtagcctggaggacagcacacatttaactcctagtctttctctgcaatgcattaatacaaataaaaatcccacartttcttagtggcagttctcacaatgcagggcaagtgctgcaaaggccactgccctgtgctgcctgcattcccagcaacatcagctgcaagtttccctccctaatctccgacccgtaggaggaaataacattcccacaatgctgygtagatggcacagagaccaaagcacatctgacctctatgaacaccaatgccattatgggttagattgcctccagttcattagctcatgaaacatcagagctggagatgtgcttaacgtctgctttaacacgactgctgaagcttacaaaaratcttaggcaaaaaggaatttgtcgcatcagggttcatccagctgcctcccacttcttattcacagcttgwctcagaactgaaagtgcatctgaacccaatgcacagctaacccaactcagctcactggaarccaaacctcacacagga

SEQ ID NO: 91574 - DNA, 561 bp, Chicken  19866894403256_3
cacartttcttagtggcagttctcacaatgcagggcaagtgctgcaaaggccactgccctgtgctgcctgcattcccagcaacatcagctgcaagtttccctccctaatctccgacccgtaggaggaaataacattcccacaatgctgygtagatggcacagagaccaaagcacatctgacctctatgaacaccaatgccattatgggttagattgcctccagttcattagctcatgaaacatcagagctggagatgtgcttaacgtctgctttaacacgactgctgaagcttacaaaaratcttaggcaaaaaggaatttgtcgcatcagggttcatccagctgcctcccacttcttattcacagcttgwctcagaactgaaagtgcatctgaacccaatgcacagctaacccaactcagctcactggaarccaaacctcacacaggacaaatccactgcaggtctgaaagccacacagctgtgctcactggggtagtttttactaaggttacatggtgcaaatacagctagcctgcttctcaccacactggtaagacag

SEQ ID NO: 91575 - DNA, 490 bp, Chicken  19866894403256_4
attcccagcaacatcagctgcaagtttccctccctaatctccgacccgtaggaggaaataacattcccacaatgctgygtagatggcacagagaccaaagcacatctgacctctatgaacaccaatgccattatgggttagattgcctccagttcattagctcatgaaacatcagagctggagatgtgcttaacgtctgctttaacacgactgctgaagcttacaaaaratcttaggcaaaaaggaatttgtcgcatcagggttcatccagctgcctcccacttcttattcacagcttgwctcagaactgaaagtgcatctgaacccaatgcacagctaacccaactcagctcactggaarccaaacctcacacaggacaaatccactgcaggtctgaaagccacacagctgtgctcactggggtagtttttactaaggttacatggtgcaaatacagctagcctgcttctcaccacactggtaagacag

SEQ ID NO: 91576 - DNA, 429 bp, Chicken  19866894403256_5
cattcccacaatgctgygtagatggcacagagaccaaagcacatctgacctctatgaacaccaatgccattatgggttagattgcctccagttcattagctcatgaaacatcagagctggagatgtgcttaacgtctgctttaacacgactgctgaagcttacaaaaratcttaggcaaaaaggaatttgtcgcatcagggttcatccagctgcctcccacttcttattcacagcttgwctcagaactgaaagtgcatctgaacccaatgcacagctaacccaactcagctcactggaarccaaacctcacacaggacaaatccactgcaggtctgaaagccacacagctgtgctcactggggtagtttttactaaggttacatggtgcaaatacagctagcctgcttctcaccacactggtaagacag

SEQ ID NO: 91577 - DNA, 600 bp, Chicken  19866894403260_1
acacagaaaacgttccccaaaatgtatgcactgccagcggtttgttgaacaatctccagggtggcacaagggaggaattcttctgacatcatctggttttgtctacattttattaaaaaacaatttacattcagcaaggaaagctgtcttaaagacctattgttttcccttgtttcgagcagcatcaatggctcattcctgctcttcctgaacttaacaccctcggctccgtcattgtataagcggccggggctgctaaggctgtgcgaggcggccctcagccatctgcacctgaggcayggcygcaggaggcagcagcaggcctygttccagcctctgtctcaggctccctctgcaactttgggcattttatcattatttgttgtgtttttcttcccccctgcacgcatcgtacgtgtgagccttatggcaccggctttgccatggatggaggtctctggctttcttgatgcatgcagtcagaagtaacattgacttcaaagattgtaaagcacggcaaatagcagatttgcagtgcactttgtgcttcatttggaatactgatgggaaatacgttgttatttaaaatcagattaaatt

SEQ ID NO: 91578 - DNA, 600 bp, Chicken  19866894403260_2
agaaaacgttccccaaaatgtatgcactgccagcggtttgttgaacaatctccagggtggcacaagggaggaattcttctgacatcatctggttttgtctacattttattaaaaaacaatttacattcagcaaggaaagctgtcttaaagacctattgttttcccttgtttcgagcagcatcaatggctcattcctgctcttcctgaacttaacaccctcggctccgtcattgtataagcggccggggctgctaaggctgtgcgaggcggccctcagccatctgcacctgaggcayggcygcaggaggcagcagcaggcctygttccagcctctgtctcaggctccctctgcaactttgggcattttatcattatttgttgtgtttttcttcccccctgcacgcatcgtacgtgtgagccttatggcaccggctttgccatggatggaggtctctggctttcttgatgcatgcagtcagaagtaacattgacttcaaagattgtaaagcacggcaaatagcagatttgcagtgcactttgtgcttcatttggaatactgatgggaaatacgttgttatttaaaatcagattaaattaaac

SEQ ID NO: 91579 - DNA, 600 bp, Chicken  19866894403260_3
tgcactgccagcggtttgttgaacaatctccagggtggcacaagggaggaattcttctgacatcatctggttttgtctacattttattaaaaaacaatttacattcagcaaggaaagctgtcttaaagacctattgttttcccttgtttcgagcagcatcaatggctcattcctgctcttcctgaacttaacaccctcggctccgtcattgtataagcggccggggctgctaaggctgtgcgaggcggccctcagccatctgcacctgaggcayggcygcaggaggcagcagcaggcctygttccagcctctgtctcaggctccctctgcaactttgggcattttatcattatttgttgtgtttttcttcccccctgcacgcatcgtacgtgtgagccttatggcaccggctttgccatggatggaggtctctggctttcttgatgcatgcagtcagaagtaacattgacttcaaagattgtaaagcacggcaaatagcagatttgcagtgcactttgtgcttcatttggaatactgatgggaaatacgttgttatttaaaatcagattaaattaaaccatttctataatgcaaaacagt

SEQ ID NO: 91580 - DNA, 600 bp, Chicken  19866894403263_1
gacttttcctatttgtccagagcagaaaaatgcaacatcatggtgaggacaggtccccttggccatacagagcacatccccttaagcctcagacatcccttcatctaggtacctgcagcacaatcttaattctacagggagtctaacactggtttcttcaggggagcagccctggtgcctcctgctccaagtagggcaggaactgtgattatagcgttcaagcagcagtatggaggagggaaagggacagaggtgagatgcagaagctggctgaaaggaataaagccaagagcagaagayagggtaagggcagggaattrtatactgagacaagttaaggagccagtcctgggtggataatatttaacctgtctccctgtgatactactaggcmgtactccaagtattaaacagatagcttgatagataatagctgcttagccaagctgtgccttgctcctctgactaccatgcatgaacctgtaactgtgctgcttactggcagcctgcagagcagctgggcctgycatcccaatctgtcctggggacactgcttctgcccaggagacagccacaragaggcacaccatgtgctttact

SEQ ID NO: 91581 - DNA, 600 bp, Chicken  19866894403263_2
agcagaaaaatgcaacatcatggtgaggacaggtccccttggccatacagagcacatccccttaagcctcagacatcccttcatctaggtacctgcagcacaatcttaattctacagggagtctaacactggtttcttcaggggagcagccctggtgcctcctgctccaagtagggcaggaactgtgattatagcgttcaagcagcagtatggaggagggaaagggacagaggtgagatgcagaagctggctgaaaggaataaagccaagagcagaagayagggtaagggcagggaattrtatactgagacaagttaaggagccagtcctgggtggataatatttaacctgtctccctgtgatactactaggcmgtactccaagtattaaacagatagcttgatagataatagctgcttagccaagctgtgccttgctcctctgactaccatgcatgaacctgtaactgtgctgcttactggcagcctgcagagcagctgggcctgycatcccaatctgtcctggggacactgcttctgcccaggagacagccacaragaggcacaccatgtgctttactgagccttgctcttacttttc

SEQ ID NO: 91582 - DNA, 600 bp, Chicken  19866894403263_3
atcccttcatctaggtacctgcagcacaatcttaattctacagggagtctaacactggtttcttcaggggagcagccctggtgcctcctgctccaagtagggcaggaactgtgattatagcgttcaagcagcagtatggaggagggaaagggacagaggtgagatgcagaagctggctgaaaggaataaagccaagagcagaagayagggtaagggcagggaattrtatactgagacaagttaaggagccagtcctgggtggataatatttaacctgtctccctgtgatactactaggcmgtactccaagtattaaacagatagcttgatagataatagctgcttagccaagctgtgccttgctcctctgactaccatgcatgaacctgtaactgtgctgcttactggcagcctgcagagcagctgggcctgycatcccaatctgtcctggggacactgcttctgcccaggagacagccacaragaggcacaccatgtgctttactgagccttgctcttacttttcagagcacaagatggactcttggtaccacacaagctagagagcagaaatcagtttgtgaaatccttacgggaggc

SEQ ID NO: 91583 - DNA, 600 bp, Chicken  19866894403263_4
gtatggaggagggaaagggacagaggtgagatgcagaagctggctgaaaggaataaagccaagagcagaagayagggtaagggcagggaattrtatactgagacaagttaaggagccagtcctgggtggataatatttaacctgtctccctgtgatactactaggcmgtactccaagtattaaacagatagcttgatagataatagctgcttagccaagctgtgccttgctcctctgactaccatgcatgaacctgtaactgtgctgcttactggcagcctgcagagcagctgggcctgycatcccaatctgtcctggggacactgcttctgcccaggagacagccacaragaggcacaccatgtgctttactgagccttgctcttacttttcagagcacaagatggactcttggtaccacacaagctagagagcagaaatcagtttgtgaaatccttacgggaggcatttgagcataccctcaaagaggtgagcacaatctccatctttgcatctccatccacttcactgggcaccaacctggaagcagctaggaattaccttacctttagaggacatccacagcagggggatttgtcc

SEQ ID NO: 91584 - DNA, 563 bp, Chicken  19866894403263_5
gaataaagccaagagcagaagayagggtaagggcagggaattrtatactgagacaagttaaggagccagtcctgggtggataatatttaacctgtctccctgtgatactactaggcmgtactccaagtattaaacagatagcttgatagataatagctgcttagccaagctgtgccttgctcctctgactaccatgcatgaacctgtaactgtgctgcttactggcagcctgcagagcagctgggcctgycatcccaatctgtcctggggacactgcttctgcccaggagacagccacaragaggcacaccatgtgctttactgagccttgctcttacttttcagagcacaagatggactcttggtaccacacaagctagagagcagaaatcagtttgtgaaatccttacgggaggcatttgagcataccctcaaagaggtgagcacaatctccatctttgcatctccatccacttcactgggcaccaacctggaagcagctaggaattaccttacctttagaggacatccacagcagggggatttgtcctaaacagcccagt

SEQ ID NO: 91585 - DNA, 600 bp, Chicken  19866894403266_1
tggtctcagggttgcctgtggaagttgggtcaatcctttgttactcttagggtatgagtagctggttttgtacctgtgggtgttggtcaggcaacagtctgcatcctattcagaagggaacttgtgttttttgcttgtccttggcattcaggttgtacttctgcctcttctttctaggctggcagagctgcaagccagtgaccttgttgttctgccctgaggagcatctgctgattgtgatcaggtggtgcttagccaaagtggcttgtggctgcagtgagtgttgtgtgagtctcttcrtggattagatcagctgacagaaacaaggaacccaggtggaaaccaggaggtgactttgcaataatgaggtgcctcactccctcactgctcaggagattttgggggcttttgcctcagtatttgtcagcaggacctagtcagagtcctaacctcagtcccaagcagtcatctttgaggcagagctgcagtgcaagacccgggctgttgactgcccctgatgtggtcagctactggcaaaaggtgtttgagaagaatgggatccctgaagcacgagaatccagtgaatacatcgtgtcgttt

SEQ ID NO: 91586 - DNA, 599 bp, Chicken  19866894403274_1
  misc_feature (1)..(125): n is any nucleotide
nnnnnnnnnnnnnnnnnnnnnnnnnnnnnnnnnnnnnnnnnnnnnnnnnnnnnnnnnnnnnnnnnnnnnnnnnnnnnnnnnnnnnnnnnnnnnnnnnnnnnnnnnnnnnnnnnnnnnnnnnnnnncgagaattaaagagtcagtttcacacagtgtattatgaagaatttaatgaagctcaggtactgtaccgactactgtagctagagctacagactatagagagggtggtgtcagactggaacaggttgcccaaggaagttgtggatgccccatccctggaggcattcaaggccaggmtggatgtggctctgggcaccctggtctggtggttggcgacmmtgcacacagcaggggggttgaaactagatgatctttgggatccttttcaacccaggccattctatgattctgtgattttatgactatggggtggtttttgttgctgatttctttgtaaaatcaccattcttttgagaagttgcttctgtgctccctgtttatgagtttggtatttatccctgcaagcacaatcagtggcttgtgaaggactccataatgacaacttagcttcctgaattatcgctgtttacaaatga

SEQ ID NO: 91587 - DNA, 599 bp, Chicken  19866894403274_2
  misc_feature (1)..(84): n is any nucleotide
nnnnnnnnnnnnnnnnnnnnnnnnnnnnnnnnnnnnnnnnnnnnnnnnnnnnnnnnnnnnnnnnnnnnnnnnnnnnnnnnnnnncgagaattaaagagtcagtttcacacagtgtattatgaagaatttaatgaagctcaggtactgtaccgactactgtagctagagctacagactatagagagggtggtgtcagactggaacaggttgcccaaggaagttgtggatgccccatccctggaggcattcaaggccaggmtggatgtggctctgggcaccctggtctggtggttggcgacmmtgcacacagcaggggggttgaaactagatgatctttgggatccttttcaacccaggccattctatgattctgtgattttatgactatggggtggtttttgttgctgatttctttgtaaaatcaccattcttttgagaagttgcttctgtgctccctgtttatgagtttggtatttatccctgcaagcacaatcagtggcttgtgaaggactccataatgacaacttagcttcctgaattatcgctgtttacaaatgaaaggctcgattaacattaaactgtttggtgttttacagaaa

SEQ ID NO: 91588 - DNA, 599 bp, Chicken  19866894403274_3
  misc_feature (1)..(83): n is any nucleotide
nnnnnnnnnnnnnnnnnnnnnnnnnnnnnnnnnnnnnnnnnnnnnnnnnnnnnnnnnnnnnnnnnnnnnnnnnnnnnnnnnnncgagaattaaagagtcagtttcacacagtgtattatgaagaatttaatgaagctcaggtactgtaccgactactgtagctagagctacagactatagagagggtggtgtcagactggaacaggttgcccaaggaagttgtggatgccccatccctggaggcattcaaggccaggmtggatgtggctctgggcaccctggtctggtggttggcgacmmtgcacacagcaggggggttgaaactagatgatctttgggatccttttcaacccaggccattctatgattctgtgattttatgactatggggtggtttttgttgctgatttctttgtaaaatcaccattcttttgagaagttgcttctgtgctccctgtttatgagtttggtatttatccctgcaagcacaatcagtggcttgtgaaggactccataatgacaacttagcttcctgaattatcgctgtttacaaatgaaaggctcgattaacattaaactgtttggtgttttacagaaat

SEQ ID NO: 91589 - DNA, 599 bp, Chicken  19866894403279_1
  misc_feature (1)..(93): n is any nucleotide
nnnnnnnnnnnnnnnnnnnnnnnnnnnnnnnnnnnnnnnnnnnnnnnnnnnnnnnnnnnnnnnnnnnnnnnnnnnnnnnnnnnnnnnnnnnnnttttcaaggtctcagatatgtgctaatgtccctttggctatgttcagtggtatcagggtagtcaagtgcccacctacttctccttttttcaccatcagcttcatcactgaaaccttcactttttcccagtttggaagatttccaatgctaattatgccataatgagccactttttaaaaacgatgtatgtggatcccgaaggaaaaygtccttgcatgttttgagacaaaagataaaagtattctgttgtgactccagtacttctcatgaggcaaaatcattgaggcagaatataaaagtattctgttatgtccccagtrcaaaattattgaggaaaaacaagactgttacccactaaagctgaaatggatagttttagagctatcacttcaggattccttttgttaaactaatatattgggtattaaacgaatgtactgatctctattgctaagcaaaccaacctatatcacccactgatttgaaaaggggaaacgtaaccccca

SEQ ID NO: 91590 - DNA, 600 bp, Chicken  19866894403279_2
tgctaatgtccctttggctatgttcagtggtatcagggtagtcaagtgcccacctacttctccttttttcaccatcagcttcatcactgaaaccttcactttttcccagtttggaagatttccaatgctaattatgccataatgagccactttttaaaaacgatgtatgtggatcccgaaggaaaaygtccttgcatgttttgagacaaaagataaaagtattctgttgtgactccagtacttctcatgaggcaaaatcattgaggcagaatataaaagtattctgttatgtccccagtrcaaaattattgaggaaaaacaagactgttacccactaaagctgaaatggatagttttagagctatcacttcaggattccttttgttaaactaatatattgggtattaaacgaatgtactgatctctattgctaagcaaaccaacctatatcacccactgatttgaaaaggggaaacgtaacccccattttcaagaagggaaaaaagattcagggaactacagaccagtcaatctcacctctgtgcctggcaagatcttggagcagatcctcctgaaggccctactaaggcaggtggaaaa

SEQ ID NO: 91591 - DNA, 600 bp, Chicken  19866894403279_3
aatggatagttttagagctatcacttcaggattccttttgttaaactaatatattgggtattaaacgaatgtactgatctctattgctaagcaaaccaacctatatcacccactgatttgaaaaggggaaacgtaacccccattttcaagaagggaaaaaagattcagggaactacagaccagtcaatctcacctctgtgcctggcaagatcttggagcagatcctcctgaaggccctactaaggcaggtggaaaataaaggtgaggtgattggtggtaaccagcgtggcttcaccaagsgcaaattgtacctgacaaacttggtggcctttatgatggagttacagcatcactggataaaggaagagtaactgatgtcatctacctggacttgtgcaaagtgactgacactgtcccgcacgacatcctggttttcaaactggagaaaaatggatctgatggatggaccactcggtggataaggagttggctggatggtcacgctcagagaggttgcagtcagtgactcaatgtccaagtggagactggtgacaacctggtgttcctcaggggatcagtgctggggactgttactgagta

SEQ ID NO: 91592 - DNA, 590 bp, Chicken  19866894403280_1
aaataaaatgtgcattgaattaatctcatatttctatgctcctacacattgtcaagaatccctgagtaatgtgcttatcaagaattgacagagtgttatgcaagcattgactttttattgcagcttcgatctggatttatgccaaaaaaactctgttacattgttattttgagtaacgagagacatttataatgcagtgaagcatgaacaaatgttggaggcaacttttatatctctctgaggtctttagtatgctgagactctgtagttgaagtcttccaggcacaagcatttctacartggtgagaattcagagttttttagatgtgaattagggatgttttcacagtatggagatattaggcatgtttcttgagatttttttttttttttagtattctagaataatttgaaaccatattttcaatttcctggaaaaccaaaaattatacacacatgcacatgaaattgttctaaaatatggaatggaatggaatgagattgtgaaatttcaggtggagcaaaagggctaaaatttgcttttgaagaaatcgtagtgttttttccagcttcttttaatgtgttttaat

SEQ ID NO: 91593 - DNA, 600 bp, Chicken  19866894403287_1
gcgaggctctgggcagtgagatgggacagcagagcagcctgctggctcccagccatgtgccagctctgcagcacgccctggttttgcagcgaggccctgggagatgcgtggcgtaggggatgtgcccagacagcacaagagcagacgtgtgcgcagcgccttgcacagagcttccaggcttggttcagtccggcacgtgcccgtgagagagagagaacagctgaactcttggaaataggctcgcacagcacgtcgatgctggagatagcaggtgataaagcaggcgaggctgccagcgaygtgttgtgtgggcagaggagcccgaggcagctgytgccttccaggacagggcctctctccgtccgtgcttgttgcctgacgctggctttgtgcctcttccacctggaggcaccactcaggccctgstaatgggcactactgaccatctgtggtcattaattaaggtgttgggagtacttcctggtttagccgtatttctgccaaccaacccgcactgaatgttgttttcttgcctttcagtcctttcaaggaagccaaggacgagcatacctcttcaattcagtgtgagtagaactccgt

SEQ ID NO: 91594 - DNA, 600 bp, Chicken  19866894403287_2
cagcctgctggctcccagccatgtgccagctctgcagcacgccctggttttgcagcgaggccctgggagatgcgtggcgtaggggatgtgcccagacagcacaagagcagacgtgtgcgcagcgccttgcacagagcttccaggcttggttcagtccggcacgtgcccgtgagagagagagaacagctgaactcttggaaataggctcgcacagcacgtcgatgctggagatagcaggtgataaagcaggcgaggctgccagcgaygtgttgtgtgggcagaggagcccgaggcagctgytgccttccaggacagggcctctctccgtccgtgcttgttgcctgacgctggctttgtgcctcttccacctggaggcaccactcaggccctgstaatgggcactactgaccatctgtggtcattaattaaggtgttgggagtacttcctggtttagccgtatttctgccaaccaacccgcactgaatgttgttttcttgcctttcagtcctttcaaggaagccaaggacgagcatacctcttcaattcagtgtgagtagaactccgtgcacttcacctttgcatgtctttaaggtgcattt

SEQ ID NO: 91595 - DNA, 600 bp, Chicken  19866894403287_3
cagacagcacaagagcagacgtgtgcgcagcgccttgcacagagcttccaggcttggttcagtccggcacgtgcccgtgagagagagagaacagctgaactcttggaaataggctcgcacagcacgtcgatgctggagatagcaggtgataaagcaggcgaggctgccagcgaygtgttgtgtgggcagaggagcccgaggcagctgytgccttccaggacagggcctctctccgtccgtgcttgttgcctgacgctggctttgtgcctcttccacctggaggcaccactcaggccctgstaatgggcactactgaccatctgtggtcattaattaaggtgttgggagtacttcctggtttagccgtatttctgccaaccaacccgcactgaatgttgttttcttgcctttcagtcctttcaaggaagccaaggacgagcatacctcttcaattcagtgtgagtagaactccgtgcacttcacctttgcatgtctttaaggtgcatttaagaaaactctcataagtagtacagaaaagttttcctgtagaaagcctctgcccgagccttgtgagcctgctgaaagcagttggagaaaggc

SEQ ID NO: 91596 - DNA, 600 bp, Chicken  19866894403290_1
gataacaccacagtcagtgaatacagctcatatcctgctgaaatcctgacagctctcagccatcccatagagccatgctgaaggcagcccttcctgcacacctcaccccagagaagactgtgacgtaccagcgatgctgtgcgtatagtagcaaagtgctctcgattgcgataatgagacttgtggcgggatacttggggaggagactggggttctgatgccctcgttcgaggatccgattcctctctgtagttttcttcctccttatcagcaaatattaacacggcagaagaagaattyygattactaaaggcttttattttggtctggttcaaaaggcatttgaaggaaaagaaagcagatccattttacactcattaggctggacagaggaatgtactgcaatgggagctgtgatctagggtctttaatttggagattttgttgtgcaattttattactgggaggaaaattactaattactgctgtaaatgagaaaaataaatggaaaacagaaaactgaggaaaatagtttacttcaagaaaacataaaagctatcaagtagattatatcaagtcggagagacaaaaacaatatct

SEQ ID NO: 91597 - DNA, 600 bp, Chicken  19866894403290_2
ataacaccacagtcagtgaatacagctcatatcctgctgaaatcctgacagctctcagccatcccatagagccatgctgaaggcagcccttcctgcacacctcaccccagagaagactgtgacgtaccagcgatgctgtgcgtatagtagcaaagtgctctcgattgcgataatgagacttgtggcgggatacttggggaggagactggggttctgatgccctcgttcgaggatccgattcctctctgtagttttcttcctccttatcagcaaatattaacacggcagaagaagaattyygattactaaaggcttttattttggtctggttcaaaaggcatttgaaggaaaagaaagcagatccattttacactcattaggctggacagaggaatgtactgcaatgggagctgtgatctagggtctttaatttggagattttgttgtgcaattttattactgggaggaaaattactaattactgctgtaaatgagaaaaataaatggaaaacagaaaactgaggaaaatagtttacttcaagaaaacataaaagctatcaagtagattatatcaagtcggagagacaaaaacaatatctc

SEQ ID NO: 91598 - DNA, 599 bp, Chicken  19866894403305_1
  misc_feature (1)..(43): n is any nucleotide
nnnnnnnnnnnnnnnnnnnnnnnnnnnnnnnnnnnnnnnnnnnacttctatcctgggatgcctatgaagccccctccccatgtcctgcccccctgtaggatagaaatgagaagttagaaggagctcttggaaattagaccagggcaagtttccaccctgtatttagagttgaatataagcttatatatagatatatagatacataactgcataacatatttactgtacagtatatagaaatattcatacaatttggggaagagttagaaatctttctgttgcttgctttcagcagggatrggaagaggtgctcctccctaggagaacactgttttaatgtttgagtccatataatacacacaaaacattaaaagaaagtttattttctgtttatcttggcaaatctcatgtgtctgagtttatttgtgtctagctgtattttctccagctttgtgggtacacttgactccagcccaaatctgccatttggacctctttactccctgctagctcattcctgagctgctacctgcttcactcatgaatcacagatctttctaggagctcattattttttctacagatacagaaaattatcc

SEQ ID NO: 91599 - DNA, 599 bp, Chicken  19866894403316_1
  misc_feature (1)..(21): n is any nucleotide
nnnnnnnnnnnnnnnnnnnnnctttgtcagtgtgctttgccctccgctatgtaccatctgcctgctcagcttctgtaagttcaactcagcccatttctgagagacaaaagaggacgccttttgcgcatcactgactgcttccagctgagagtaaacaaattagcacgttctgttagttagtgacagaggtcatttaagcttttagatgcgatatacctgtgcaaatagtatagaaatggtgcattagtgaagctattttcacaaatgttgaaattctctccatgaggagagagttacaargggaactttaggtaggacagtggcctacaaagggcagtgcatgagacaatccactgaggtgcaggaagaaaatttatttttgggactgttagtaaacaaaagaagaaaaatttagaatagcgtttatttaatcttttaatttccatctttgtgtatattttatagggcatgtaatatttgtacagttgtacatgatttataaayraatgaggatacctggtacatgctcaattttttttactgatggttacaagaccaaaaaaatttgagatcactaaaccagattatcccaaggggga

SEQ ID NO: 91600 - DNA, 600 bp, Chicken  19866894403316_2
gatgcgatatacctgtgcaaatagtatagaaatggtgcattagtgaagctattttcacaaatgttgaaattctctccatgaggagagagttacaargggaactttaggtaggacagtggcctacaaagggcagtgcatgagacaatccactgaggtgcaggaagaaaatttatttttgggactgttagtaaacaaaagaagaaaaatttagaatagcgtttatttaatcttttaatttccatctttgtgtatattttatagggcatgtaatatttgtacagttgtacatgatttataaayraatgaggatacctggtacatgctcaattttttttactgatggttacaagaccaaaaaaatttgagatcactaaaccagattatcccaagggggacttttcctccaacatttccatagtacacactgtattttggtattaattctataaagaaatgtctaattaatcctgaacttagtttgagaaagttgtatgtaatcaacaagaacatagatcttttagactagtttctacttcagataagtttctcaacattattaaaatcttgcattaaacagaaagcccttcaaaccggatccag

SEQ ID NO: 91601 - DNA, 600 bp, Chicken  19866894403316_3
atgcgatatacctgtgcaaatagtatagaaatggtgcattagtgaagctattttcacaaatgttgaaattctctccatgaggagagagttacaargggaactttaggtaggacagtggcctacaaagggcagtgcatgagacaatccactgaggtgcaggaagaaaatttatttttgggactgttagtaaacaaaagaagaaaaatttagaatagcgtttatttaatcttttaatttccatctttgtgtatattttatagggcatgtaatatttgtacagttgtacatgatttataaayraatgaggatacctggtacatgctcaattttttttactgatggttacaagaccaaaaaaatttgagatcactaaaccagattatcccaagggggacttttcctccaacatttccatagtacacactgtattttggtattaattctataaagaaatgtctaattaatcctgaacttagtttgagaaagttgtatgtaatcaacaagaacatagatcttttagactagtttctacttcagataagtttctcaacattattaaaatcttgcattaaacagaaagcccttcaaaccggatccaga

SEQ ID NO: 91602 - DNA, 578 bp, Chicken  19866894403317_1
ttctaattttattttttttctgagatgaaatgggaataactgtactatggagatggtgtatagcagacacagttcttcctacaatgtcctcatatcagcttagatgatgccaaaaacaatcgcatgggttttgctgagattgccatgaccctgctttgtctagatggcaagacagtatggagataaccacagggcccacaaccaacctctttaagaacttacaagaaatatctaaagttttcttaatcactgacttccactaggcactaagagtggtggaaagcttttattggacccaawaagagttttcatatcacgttcaggaaggcagaagaagaagaaaatattccctacacagacatcatagaaaatcagtctctacctgatgacactctcttccaagctctcttcaaatttttcatctagtagtatgagcctggatgacaggaatcgagcacaagcctaagccttcactgatagataagaataactaatgggtcaagtttaaatcatgttaaaagcttctacatgaaggcaagcgctaaaatttctacacatctttcctgcttccagcatca

SEQ ID NO: 91603 - DNA, 599 bp, Chicken  19866894403321_1
  misc_feature (1)..(239): n is any nucleotide
nnnnnnnnnnnnnnnnnnnnnnnnnnnnnnnnnnnnnnnnnnnnnnnnnnnnnnnnnnnnnnnnnnnnnnnnnnnnnnnnnnnnnnnnnnnnnnnnnnnnnnnnnnnnnnnnnnnnnnnnnnnnnnnnnnnnnnnnnnnnnnnnnnnnnnnnnnnnnnnnnnnnnnnnnnnnnnnnnnnnnnnnnnnnnnnnnnnnnnnnnnnnnnnnnnnnnnnnnnnnnnnnnnnnnnnnnnnnnnnaacggcagtcaaatatgataggagtacagagcttaagagagctgaactcagacaataaagrgtaaaawgcataacactgattttcattccagtgatttctttttatgaagtcaggtgttaagataaagtctttstaaagcttctgttgtttycaawaggcacagtacttactctgctcagcaaaagttcagtttgataactaccacaatgtcactgatgtgaaatgttaaggaggaaattggtcatgaattatcctttgagcatgcgtcttcagtactcatgtcagaaaggaatacagtactgcccagtgaaagacaggtgaacctcattcactgttttctaaatattgcctcacctgaa

SEQ ID NO: 91604 - DNA, 599 bp, Chicken  19866894403321_2
  misc_feature (1)..(232): n is any nucleotide
nnnnnnnnnnnnnnnnnnnnnnnnnnnnnnnnnnnnnnnnnnnnnnnnnnnnnnnnnnnnnnnnnnnnnnnnnnnnnnnnnnnnnnnnnnnnnnnnnnnnnnnnnnnnnnnnnnnnnnnnnnnnnnnnnnnnnnnnnnnnnnnnnnnnnnnnnnnnnnnnnnnnnnnnnnnnnnnnnnnnnnnnnnnnnnnnnnnnnnnnnnnnnnnnnnnnnnnnnnnnnnnnnnnnnnnnaacggcagtcaaatatgataggagtacagagcttaagagagctgaactcagacaataaagrgtaaaawgcataacactgattttcattccagtgatttctttttatgaagtcaggtgttaagataaagtctttstaaagcttctgttgtttycaawaggcacagtacttactctgctcagcaaaagttcagtttgataactaccacaatgtcactgatgtgaaatgttaaggaggaaattggtcatgaattatcctttgagcatgcgtcttcagtactcatgtcagaaaggaatacagtactgcccagtgaaagacaggtgaacctcattcactgttttctaaatattgcctcacctgaatgtaaca

SEQ ID NO: 91605 - DNA, 599 bp, Chicken  19866894403321_3
  misc_feature (1)..(166): n is any nucleotide
nnnnnnnnnnnnnnnnnnnnnnnnnnnnnnnnnnnnnnnnnnnnnnnnnnnnnnnnnnnnnnnnnnnnnnnnnnnnnnnnnnnnnnnnnnnnnnnnnnnnnnnnnnnnnnnnnnnnnnnnnnnnnnnnnnnnnnnnnnnnnnnnnnnnnnnnnnnnnnnnnnnnnnaacggcagtcaaatatgataggagtacagagcttaagagagctgaactcagacaataaagrgtaaaawgcataacactgattttcattccagtgatttctttttatgaagtcaggtgttaagataaagtctttstaaagcttctgttgtttycaawaggcacagtacttactctgctcagcaaaagttcagtttgataactaccacaatgtcactgatgtgaaatgttaaggaggaaattggtcatgaattatcctttgagcatgcgtcttcagtactcatgtcagaaaggaatacagtactgcccagtgaaagacaggtgaacctcattcactgttttctaaatattgcctcacctgaatgtaacaggtctacaaatacacattttgaactgtttgctttaatgcagataacagttgataattaatatattc

SEQ ID NO: 91606 - DNA, 599 bp, Chicken  19866894403321_4
  misc_feature (1)..(148): n is any nucleotide
nnnnnnnnnnnnnnnnnnnnnnnnnnnnnnnnnnnnnnnnnnnnnnnnnnnnnnnnnnnnnnnnnnnnnnnnnnnnnnnnnnnnnnnnnnnnnnnnnnnnnnnnnnnnnnnnnnnnnnnnnnnnnnnnnnnnnnnnnnnnnnnnnnnnaacggcagtcaaatatgataggagtacagagcttaagagagctgaactcagacaataaagrgtaaaawgcataacactgattttcattccagtgatttctttttatgaagtcaggtgttaagataaagtctttstaaagcttctgttgtttycaawaggcacagtacttactctgctcagcaaaagttcagtttgataactaccacaatgtcactgatgtgaaatgttaaggaggaaattggtcatgaattatcctttgagcatgcgtcttcagtactcatgtcagaaaggaatacagtactgcccagtgaaagacaggtgaacctcattcactgttttctaaatattgcctcacctgaatgtaacaggtctacaaatacacattttgaactgtttgctttaatgcagataacagttgataattaatatattccaatcaggtacattttca

SEQ ID NO: 91607 - DNA, 599 bp, Chicken  19866894403321_5
  misc_feature (1)..(144): n is any nucleotide
nnnnnnnnnnnnnnnnnnnnnnnnnnnnnnnnnnnnnnnnnnnnnnnnnnnnnnnnnnnnnnnnnnnnnnnnnnnnnnnnnnnnnnnnnnnnnnnnnnnnnnnnnnnnnnnnnnnnnnnnnnnnnnnnnnnnnnnnnnnnnnnnaacggcagtcaaatatgataggagtacagagcttaagagagctgaactcagacaataaagrgtaaaawgcataacactgattttcattccagtgatttctttttatgaagtcaggtgttaagataaagtctttstaaagcttctgttgtttycaawaggcacagtacttactctgctcagcaaaagttcagtttgataactaccacaatgtcactgatgtgaaatgttaaggaggaaattggtcatgaattatcctttgagcatgcgtcttcagtactcatgtcagaaaggaatacagtactgcccagtgaaagacaggtgaacctcattcactgttttctaaatattgcctcacctgaatgtaacaggtctacaaatacacattttgaactgtttgctttaatgcagataacagttgataattaatatattccaatcaggtacattttcaagca

SEQ ID NO: 91608 - DNA, 600 bp, Chicken  19866894403321_6
cacagtacttactctgctcagcaaaagttcagtttgataactaccacaatgtcactgatgtgaaatgttaaggaggaaattggtcatgaattatcctttgagcatgcgtcttcagtactcatgtcagaaaggaatacagtactgcccagtgaaagacaggtgaacctcattcactgttttctaaatattgcctcacctgaatgtaacaggtctacaaatacacattttgaactgtttgctttaatgcagataacagttgataattaatatattccaatcaggtacattttcaagcacaaytgtgataactgagcatgacgttatctgtatgtgttaacttgacagacaaaaaamactttggattagaaagaaagtgacattatgtttttagggttttcttcctgctaaattcacccatttgactgcccagaaggcacactctgtctamacaatgtaagaccataagacatactgcaacatacaaagattatatctgttttaccgttttaatagaactccttgatttttcttcccaaacactactgctcagctccattgtgcagtgaacatttgtttccttttcataggatccaaatataa

SEQ ID NO: 91609 - DNA, 600 bp, Chicken  19866894403321_7
ctgatgtgaaatgttaaggaggaaattggtcatgaattatcctttgagcatgcgtcttcagtactcatgtcagaaaggaatacagtactgcccagtgaaagacaggtgaacctcattcactgttttctaaatattgcctcacctgaatgtaacaggtctacaaatacacattttgaactgtttgctttaatgcagataacagttgataattaatatattccaatcaggtacattttcaagcacaaytgtgataactgagcatgacgttatctgtatgtgttaacttgacagacaaaaaamactttggattagaaagaaagtgacattatgtttttagggttttcttcctgctaaattcacccatttgactgcccagaaggcacactctgtctamacaatgtaagaccataagacatactgcaacatacaaagattatatctgttttaccgttttaatagaactccttgatttttcttcccaaacactactgctcagctccattgtgcagtgaacatttgtttccttttcataggatccaaatataaataacctgaaacagaaaagcctattgtaagcattgtaacactattacatatccc

SEQ ID NO: 91610 - DNA, 600 bp, Chicken  19866894403321_8
gtgaaagacaggtgaacctcattcactgttttctaaatattgcctcacctgaatgtaacaggtctacaaatacacattttgaactgtttgctttaatgcagataacagttgataattaatatattccaatcaggtacattttcaagcacaaytgtgataactgagcatgacgttatctgtatgtgttaacttgacagacaaaaaamactttggattagaaagaaagtgacattatgtttttagggttttcttcctgctaaattcacccatttgactgcccagaaggcacactctgtctamacaatgtaagaccataagacatactgcaacatacaaagattatatctgttttaccgttttaatagaactccttgatttttcttcccaaacactactgctcagctccattgtgcagtgaacatttgtttccttttcataggatccaaatataaataacctgaaacagaaaagcctattgtaagcattgtaacactattacatatcccagatatcgtgctaaagtcactgctcttcccttatccgttccccttatacagttttcaatgtgcacaaacaagcccacataagcaattcacaaaa

SEQ ID NO: 91611 - DNA, 599 bp, Chicken  19866894403333_1
  misc_feature (1)..(117): n is any nucleotide
nnnnnnnnnnnnnnnnnnnnnnnnnnnnnnnnnnnnnnnnnnnnnnnnnnnnnnnnnnnnnnnnnnnnnnnnnnnnnnnnnnnnnnnnnnnnnnnnnnnnnnnnnnnnnnnnnnnnntgatggagaagacttgtaaaaaatgaacttcaggagacagaggagaataacgtgtaactaccagtttgaccatgtcttcttgacagtgttgtctccgtgtaccacacaccacctcaccccacacatttttttgcaaagtttttttttttttctataggtaaatgtacacaggctacacacacrtggcttcttggtggactgtgctgttgatatattttcctaggactgagatgtaatgctgtggcctggactctagccacttgcatcgctgttctatcttttgtgttcattcttgggcatggctgtttctcaagtcaaaaaaaggggggggggaggggaaatatcacccgaggaaaaccaagcattggagcaggttgcatgggatagctgtgcagtctatacctttggaggttttcagactggacaaagccctaatcaaattgctctgaactcagtgttgtccctgcttttagaacaagatg

SEQ ID NO: 91612 - DNA, 600 bp, Chicken  19866894403334_1
tacaggcaccccatgaagcttgtgtggtgccccagttttgatggagaaatatgaccctcacgcactgcctgcagctcaggacaggatggccatgtagtccccctgaactcaccagtacccaatgcgtgaagagtgctgctccctgcccagtggatgtgccttgaagagggaccttttatgcacacttgttgctaatctgaatcaagcaagacaaggtggcagaaaaaacaaaaatgatgtttcctacagttactctggtctgagctctgtgtaggaagggacttggcctgacaagagtcragcactcagagaaaatgttattgaagcatttcaaactggagmtctgttgcttttgctattccactttgcatcacagtatctgggctaacatgaactgtaaaagtgctgtaaaatgaggaaggtaatgactaaatctggggaaagaaatgactttcctgggtttctgaaagagacaagatgagcacatgagatagatctgaaaagcgtgatttggtgctcttcctgatagtgctcccactcttgtgaaaaggtgacctcactggggcccaatcctgctccttcttgcagcactggtggtct

SEQ ID NO: 91613 - DNA, 600 bp, Chicken  19866894403334_2
ggagaaatatgaccctcacgcactgcctgcagctcaggacaggatggccatgtagtccccctgaactcaccagtacccaatgcgtgaagagtgctgctccctgcccagtggatgtgccttgaagagggaccttttatgcacacttgttgctaatctgaatcaagcaagacaaggtggcagaaaaaacaaaaatgatgtttcctacagttactctggtctgagctctgtgtaggaagggacttggcctgacaagagtcragcactcagagaaaatgttattgaagcatttcaaactggagmtctgttgcttttgctattccactttgcatcacagtatctgggctaacatgaactgtaaaagtgctgtaaaatgaggaaggtaatgactaaatctggggaaagaaatgactttcctgggtttctgaaagagacaagatgagcacatgagatagatctgaaaagcgtgatttggtgctcttcctgatagtgctcccactcttgtgaaaaggtgacctcactggggcccaatcctgctccttcttgcagcactggtggtcttggtactgattctcatggtgagccctcagtagagcatgcaca

SEQ ID NO: 91614 - DNA, 599 bp, Chicken  19866894403347_1
  misc_feature (1)..(42): n is any nucleotide
nnnnnnnnnnnnnnnnnnnnnnnnnnnnnnnnnnnnnnnnnntaactgctgctgctggatgtcaaacatcctacgtccatccaaaccctttggcactaatgcagaatgtgccagctagagcatcctgccttgctccagcccatgtaatgctgtgcgtggccctggggtgagcacttttccagcaaagctgctctcctgcaaacagctctgaaaagagagcttggctttagcagggggaaatgctcactgacaattcacagcctgcaaattggcaggtggagggggggttgaatatggggraaaatcaggctaattgattggcctgtggccagttcacagccagagagagatggaatgaatgggattgttggcttttttattttttttttaagttattcttgctcagatttttgagcgctaagaggttacgtttggtttagaatatatttaattcattaaaacgttgatcttctctgctgcagagttcagatctgatcccaggctttactccttatctaaatgcaaaggtttcttgccaaatacacaaagcaggaaaagccttggtgcttacgaaaaatgacatgatgaagagagaatgg

SEQ ID NO: 91615 - DNA, 600 bp, Chicken  19866894403347_2
ccaaaccctttggcactaatgcagaatgtgccagctagagcatcctgccttgctccagcccatgtaatgctgtgcgtggccctggggtgagcacttttccagcaaagctgctctcctgcaaacagctctgaaaagagagcttggctttagcagggggaaatgctcactgacaattcacagcctgcaaattggcaggtggagggggggttgaatatggggraaaatcaggctaattgattggcctgtggccagttcacagccagagagagatggaatgaatgggattgttggcttttttartttttttttaagttattcttgctcagatttttgagcgctaagaggttacgtttggtttagaatatatttaattcattaaaacgttgatcttctctgctgcagagttcagatctgatcccaggctttactccttatctaaatgcaaaggtttcttgccaaatacacaaagcaggaaaagccttggtgcttacgaaaaatgacatgatgaagagagaatggtgctagactgcattccagtgcaggaacccactgctacttcaagcaacatccgtaccggtgcgtgctcagcttgcccatgct

SEQ ID NO: 91616 - DNA, 600 bp, Chicken  19866894403350_1
gctttgttcatcaccccatcctctcatccagtatccaacacaatgattgttcaaggcaaacaaaaagaaaaattaaagaactggcacacacccatttactagtttgagaagacacctttctctgtttggccagtctggggggcttgcattggaattaaaataaaattcaatgtcaatattgtaagagcctttatttacttgggccaaattattgcattaagtgtattttcttctttcctttgttctagggtagaaagggaatgtaaaataattcttaccaggcaatgtttaggatgggargactttctggttgacaataccagatctaagacaagcataaaagaatcygtaaagctgttattakaacttacggagggaataaataatgaggatacagctaacaggcagcatgcagggaggagaaataaaaaaacaggtttaaagctatttttttatcagatattatggattgactggctagaaaacaacctttctacttatatcagtaccctgtgcccasagaatagcaatgactttgtttcaaggatgctagctgcctggcaggtaggatttctgcttgatgccctgtgcagaaatgct

SEQ ID NO: 91617 - DNA, 600 bp, Chicken  19866894403350_2
gttcaaggcaaacaaaaagaaaaattaaagaactggcacacacccatttactagtttgagaagacacctttctctgtttggccagtctggggggcttgcattggaattaaaataaaattcaatgtcaatattgtaagagcctttatttacttgggccaaattattgcattaagtgtattttcttctttcctttgttctagggtagaaagggaatgtaaaataattcttaccaggcaatgtttaggatgggargactttctggttgacaataccagatctaagacaagcataaaagaatcygtaaagctgttattakaacttacggagggaataaataatgaggatacagctaacaggcagcatgcagggaggagaaataaaaaaacaggtttaaagctatttttttatcagatattatggattgactggctagaaaacaacctttctacttatatcagtaccctgtgcccasagaatagcaatgactttgtttcaaggatgctagctgcctggcaggtaggatttctgcttgatgccctgtgcagaaatgctgctctgggggatgtcagtgagtgagtgtctgtctagcaccaaatactt

SEQ ID NO: 91618 - DNA, 600 bp, Chicken  19866894403350_3
aagaaaaattaaagaactggcacacacccatttactagtttgagaagacacctttctctgtttggccagtctggggggcttgcattggaattaaaataaaattcaatgtcaatattgtaagagcctttatttacttgggccaaattattgcattaagtgtattttcttctttcctttgttctagggtagaaagggaatgtaaaataattcttaccaggcaatgtttaggatgggargactttctggttgacaataccagatctaagacaagcataaaagaatcygtaaagctgttattakaacttacggagggaataaataatgaggatacagctaacaggcagcatgcagggaggagaaataaaaaaacaggtttaaagctatttttttatcagatattatggattgactggctagaaaacaacctttctacttatatcagtaccctgtgcccasagaatagcaatgactttgtttcaaggatgctagctgcctggcaggtaggatttctgcttgatgccctgtgcagaaatgctgctctgggggatgtcagtgagtgagtgtctgtctagcaccaaatacttagaaatcccccttcat

SEQ ID NO: 91619 - DNA, 464 bp, Chicken  19866894403350_4
gtgtattttcttctttcctttgttctagggtagaaagggaatgtaaaataattcttaccaggcaatgtttaggatgggargactttctggttgacaataccagatctaagacaagcataaaagaatcygtaaagctgttattakaacttacggagggaataaataatgaggatacagctaacaggcagcatgcagggaggagaaataaaaaaacaggtttaaagctatttttttatcagatattatggattgactggctagaaaacaacctttctacttatatcagtaccctgtgcccasagaatagcaatgactttgtttcaaggatgctagctgcctggcaggtaggatttctgcttgatgccctgtgcagaaatgctgctctgggggatgtcagtgagtgagtgtctgtctagcaccaaatacttagaaatcccccttcatcttggtaacatcagatatta

SEQ ID NO: 91620 - DNA, 599 bp, Chicken  19866894403354_1
  misc_feature (1)..(181): n is any nucleotide
nnnnnnnnnnnnnnnnnnnnnnnnnnnnnnnnnnnnnnnnnnnnnnnnnnnnnnnnnnnnnnnnnnnnnnnnnnnnnnnnnnnnnnnnnnnnnnnnnnnnnnnnnnnnnnnnnnnnnnnnnnnnnnnnnnnnnnnnnnnnnnnnnnnnnnnnnnnnnnnnnnnnnnnnnnnnnnnnnnnnntaaaacatcaaaaatgttaagatacattcacagaaaaaaaacaatgcttacaagttattcaagaccatcacattctaaatgcacctttcttggtaggtttcttctgctccccccccatyaaggtttcagtacttattacacagccttctgcggagcagctttctgtgccacacatgagggwggggacatctttattggaggcctttacagcagatgcttaggatcccaaacaccgagcaacgtggggcagcaacctgtgcggtcacaagtggggaggccctgaggggcagcgcttgtggcccaagctagatagcagaactcctgctttcaacatcccgtaacgtgggacagagccagtgggcaggattttccctttttgtttagttaaaaaaaccaagctgcacatttctgaatggtg

SEQ ID NO: 91621 - DNA, 599 bp, Chicken  19866894403354_2
  misc_feature (1)..(119): n is any nucleotide
nnnnnnnnnnnnnnnnnnnnnnnnnnnnnnnnnnnnnnnnnnnnnnnnnnnnnnnnnnnnnnnnnnnnnnnnnnnnnnnnnnnnnnnnnnnnnnnnnnnnnnnnnnnnnnnnnnnnnnntaaaacatcaaaaatgttaagatacattcacagaaaaaaaacaatgcttacaagttattcaagaccatcacattctaaatgcacctttcttggtaggtttcttctgctccccccccatyaaggtttcagtacttattacacagccttctgcggagcagctttctgtgccacacatgagggwggggacatctttattggaggcctttacagcagatgcttaggatcccaaacaccgagcaacgtggggcagcaacctgtgcggtcacaagtggggaggccctgaggggcagcgcttgtggcccaagctagatagcagaactcctgctttcaacatcccgtaacgtgggacagagccagtgggcaggattttccctttttgtttagttaaaaaaaccaagctgcacatttctgaatggtgagcgcaaggactcagtcaccgctaaaaattgttcttttgatgacttgtctgaggaacgtgac

SEQ ID NO: 91622 - DNA, 600 bp, Chicken  19866894403363_1
tgttttctggtcctgagagatctcactgttgttctttaagtttcagcattgctggctaaaaaatattttcattttatctgtaaaattaattttccatgcaaaagatttttgttatgtgccttgttaggcagcaacacagtctatgcattttcagtatgaagtgagtcatctgctgttttcagtgctaaactcttctctatccatatctattgttctttcagttcaaataagttaatcaattaagctgctagagtaattatactgtcagctagctgaacaaaagtctgtgtaattttgagsgggagaagaagagaaggaaaaagagaccatcagtccaatatcgaaatatttggattctttcgtagaaacaaaaagaaacaacctggaatgttttgttcaaggccaagctgagtgtaggttccggtaggtactcttcaagtggaaagctgacagaaaataaaatctctggttttagttttagttagtgcttgctagcatgtgcacaccaaaaacattgcatttctgccttacagagagcatgataaagccagaggcagttaagatataaatggtgagtataatgttacagcactctacgtt

SEQ ID NO: 91623 - DNA, 600 bp, Chicken  19866894403369_1
ccggatttctaggaccatgactgcctcaatttcaattgtctgttaattttttataatttttttgaggattattttgttatttttttaatggatgtttattgccatctcataaggaaactattagccttcagttttcttgtttttatatactagacttccaatggaaattagaacttatatatttttgttttgttttctttcttatttcataggttcttttctgacaccttaggtatggtttctgtgtactgtgcatgttacacatcagtttgcacagtagagaggctctagtttttcaakctatagtacagatagatcttggggaaaggttttatagatgttcaagtgaaaatgcttttcacacatgttctcctaccagttgcatttaatgtttcagtgctctcaagccgatttttccaaaattaggagttatgctaaggtcagtttcatgaaaccacacactagacaactaatcttggggatagtggcttgcaacatttttaactgctattataccagaagctgtaaacaatgacattttaaacttacttgaagtagaaaggcactgaggtttttgatcatctttgtrgattaaacatg

SEQ ID NO: 91624 - DNA, 600 bp, Chicken  19866894403369_2
agtttttcaakctatagtacagatagatcttggggaaaggttttatagatgttcaagtgaaaatgcttttcacacatgttctcctaccagttgcatttaatgtttcagtgctctcaagccgatttttccaaaattaggagttatgctaaggtcagtttcatgaaaccacacactagacaactaatcttggggatagtggcttgcaacatttttaactgctattataccagaagctgtaaacaatgacattttaaacttacttgaagtagaaaggcactgaggtttttgatcatctttgtrgattaaacatggtgggagacagttctgtgtcaggagatgctgcatgtttcagttagtggaatatccagtgtgaaaacacctcatgaaagaatctcactgtagaaaaagctgaagaaaactttcaagtcccctatataaaaagcttgaagtactccttttaaagagagttacaaattaaatatcttgctggattcatttataatgacctgcaactgatcctttcctcttccagtccagttcctgcagtgataccagtgggatttttgatagagggatttgttttttgcatccttcactcta

SEQ ID NO: 91625 - DNA, 599 bp, Chicken  19866894403377_1
  misc_feature (1)..(99): n is any nucleotide
nnnnnnnnnnnnnnnnnnnnnnnnnnnnnnnnnnnnnnnnnnnnnnnnnnnnnnnnnnnnnnnnnnnnnnnnnnnnnnnnnnnnnnnnnnnnnnnnnnnattagaagcaggtgccttttttcgtgacgtaaacaagagatcactcggtctgctgcgtgtatacccatagcagcagagcactgaggtggcagaaaagggagtctgctgtgagtgcagggcagccctggagttctatggaattataaatttaattttataaatggacttgtttgcattcctttcccaaataggtaatcgagytgggagcagcagaacatcctcatcacattggtttttgtttcccagtgcaaacaattatgtgctgtcagctgactgcttcttcaaattaaaaggtattctgtcaagaaggcaccagagggaaagattaagggaaaaaaaatgcaaccctgtgacactaaatgacagtgtaacaggttgtatgatttattctaagacaatactgacccaaatggtactacattttacttggaacctttgaaagtggtaattccagagatctctcaagagtctcataatacttagcctgyccagactcctct

SEQ ID NO: 91626 - DNA, 600 bp, Chicken  19866894403377_2
taggtaatcgagytgggagcagcagaacatcctcatcacattggtttttgtttcccagtgcaaacaattatgtgctgtcagctgactgcttcttcaaattaaaaggtattctgtcaagaaggcaccagagggaaagattaagggaaaaaaaatgcaaccctgtgacactaaatgacagtgtaacaggttgtatgatttattctaagacaatactgacccaaatggtactacattttacttggaacctttgaaagtggtaattccagagatctctcaagagtctcataatacttagcctgyccagactcctctggccatttaactaaaaataatccttttcatcayttatcyttgatcactgatgagtaacattaatggtgttactcttaagtctcattgcattgcagctgtaacagtacaacactgtctaggtgcacaatataggaccgtatgcggttgcagtttgaatagaactttaaattatttggaaattaaaggtcatagtgcaaaattattatttgtattgttgctggaggtagatttcttcaatcaaattttttcaagcagatgacaaattcagccatactgcaattcagaact

SEQ ID NO: 91627 - DNA, 600 bp, Chicken  19866894403377_3
ttttgtttcccagtgcaaacaattatgtgctgtcagctgactgcttcttcaaattaaaaggtattctgtcaagaaggcaccagagggaaagattaagggaaaaaaaatgcaaccctgtgacactaaatgacagtgtaacaggttgtatgatttattctaagacaatactgacccaaatggtactacattttacttggaacctttgaaagtggtaattccagagatctctcaagagtctcataatacttagcctgyccagactcctctggccatttaactaaaaataatccttttcatcayttatcyttgatcactgatgagtaacattaatggtgttactcttaagtctcattgcattgcagctgtaacagtacaacactgtctaggtgcacaatataggaccgtatgcggttgcagtttgaatagaactttaaattatttggaaattaaaggtcatagtgcaaaattattatttgtattgttgctggaggtagatttcttcaatcaaattttttcaagcagatgacaaattcagccatactgcaattcagaactgaccgatctttaataactgaagttactgctcagttcagtgccaca

SEQ ID NO: 91628 - DNA, 600 bp, Chicken  19866894403377_4
ttcccagtgcaaacaattatgtgctgtcagctgactgcttcttcaaattaaaaggtattctgtcaagaaggcaccagagggaaagattaagggaaaaaaaatgcaaccctgtgacactaaatgacagtgtaacaggttgtatgatttattctaagacaatactgacccaaatggtactacattttacttggaacctttgaaagtggtaattccagagatctctcaagagtctcataatacttagcctgyccagactcctctggccatttaactaaaaataatccttttcatcayttatcyttgatcactgatgagtaacattaatggtgttactcttaagtctcattgcattgcagctgtaacagtacaacactgtctaggtgcacaatataggaccgtatgcggttgcagtttgaatagaactttaaattatttggaaattaaaggtcatagtgcaaaattattatttgtattgttgctggaggtagatttcttcaatcaaattttttcaagcagatgacaaattcagccatactgcaattcagaactgaccgatctttaataactgaagttactgctcagttcagtgccacaaaaaac

SEQ ID NO: 91629 - DNA, 600 bp, Chicken  19866894403397_1
agatcttcaaaaattttgcttcactgaagaacctacaaacattcacagactcctttcctctttttccttaagaaaggctgaagaaactgccaagctaacacaacccaatcatgctggtctgtccactcctctccccacaagtcatacaatggtgagtgcagtatactatcatgcaggctgttgagtgatcattcgaatgaagttccaatttacatttttttgctggaaagccagcagccctgaatggagcagcaggaaaggagagctcaagaaagagcaggcaggaagattgggaggacraaaagccagctgctctccaggcaccaagaaccctctggaaaccctgcctgaaatgcagtaaagaaagagaagcttcaggctgctgcacgacagaggtagaagccaagacgctgggggatgcttgggtgcaggtacggcattctgcccagagccatcaccccaacaacaaacacaagaccaatgtatattgtagctgcttactgacctgtcactgttcttacacaacatatatacccctgaaggtgaacgtgggataggcattggtgctcagcaataagggatcacagtcgtgcccgtgcc

SEQ ID NO: 91630 - DNA, 600 bp, Chicken  19866894403409_1
cccctgacccagtggccaagtggggtaccatagacagcaatacgagggcaacccctcatcccacagctggatcctggagtgctgatgggctgcagagcacaggtgggaagcacgggtggtactggcacactcagcaagcagctgtgcaaccagcgccttcgtcaaatatttaccctttgtttcaatcctgacctccccgcctctcaaggtaaataatttagtgtgggagccttgaaggttaatcttgcatttgtttaatgttacaggacacttggctcacttgcagctaaaagccctgcrtggtggttgttagtttattaaatccgagtgccgttttcttcactctcttctctttggattgttgaaagaaaggatgkaggaaggaagcrgagggaagacttatctgtatgtggccttttgttcctgctgcatactccttcaggagcagcaccccagggaactgtcactccacgtgcaccagctcagataggtgctcatctatgctccttagatatattgggcaaagcagctggaatagaagccaagcacatggagcagactgactgctgaagtcaggttggcttttgtggcctagcccat

SEQ ID NO: 91631 - DNA, 564 bp, Chicken  19866894403409_2
agtgctgatgggctgcagagcacaggtgggaagcacgggtggtactggcacactcagcaagcagctgtgcaaccagcgccttcgtcaaatatttaccctttgtttcaatcctgacctccccgcctctcaaggtaaataatttagtgtgggagccttgaaggttaatcttgcatttgtttaatgttacaggacacttggctcacttgcagctaaaagccctgcrtggtggttgttagtttattaaatccgagtgccgttttcttcactctcttctctttggattgttgaaagaaaggatgkaggaaggaagcrgagggaagacttatctgtatgtggccttttgttcctgctgcatactccttcaggagcagcaccccagggaactgtcactccacgtgcaccagctcagataggtgctcatctatgctccttagatatattgggcaaagcagctggaatagaagccaagcacatggagcagactgactgctgaagtcaggttggcttttgtggcctagcccatcagtctgcatcagacgctcagtgttagctgctctctcccag

SEQ ID NO: 91632 - DNA, 552 bp, Chicken  19866894403409_3
ctgcagagcacaggtgggaagcacgggtggtactggcacactcagcaagcagctgtgcaaccagcgccttcgtcaaatatttaccctttgtttcaatcctgacctccccgcctctcaaggtaaataatttagtgtgggagccttgaaggttaatcttgcatttgtttaatgttacaggacacttggctcacttgcagctaaaagccctgcrtggtggttgttagtttattaaatccgagtgccgttttcttcactctcttctctttggattgttgaaagaaaggatgkaggaaggaagcrgagggaagacttatctgtatgtggccttttgttcctgctgcatactccttcaggagcagcaccccagggaactgtcactccacgtgcaccagctcagataggtgctcatctatgctccttagatatattgggcaaagcagctggaatagaagccaagcacatggagcagactgactgctgaagtcaggttggcttttgtggcctagcccatcagtctgcatcagacgctcagtgttagctgctctctcccag

SEQ ID NO: 91633 - DNA, 600 bp, Chicken  19866894403412_1
acagcagtggagggcagagggtgaggctggggaagataagtacagacatgcagtacagaccccgggagtccagctgtgtcagtgccaggccagcttagttaccaaccacgtactgcagtgccattctgtgatataatgcagctggtgtcaagcaggggagtgggatgagtttcaaactcaaactgcaccatgcacacagccaaagcattttgtgttttgtagataactgattattgatgctctttttagatgacaacattattggaaagtgtatgtcaaggagcacgctatacattagaytggggctagtccacattcttgactgagttttctgtctgaaaagatcagagttactcatgcccaatgttttatccaactgaggcacttccagacaagtgcactaatgcataacccagagtctcttgtccagctttccactacccaacacctctacactcttctacttcattaagaatcagcagaagtaaataagagatcacttcccaccattttttcctgaaaggacaggtatcttggcttaaagaagctctcatcatccatgaaagctggagyattttccagtgatttttttttctctgg

SEQ ID NO: 91634 - DNA, 600 bp, Chicken  19866894403412_2
tgtcaaggagcacgctatacattagaytggggctagtccacattcttgactgagttttctgtctgaaaagatcagagttactcatgcccaatgttttatccaactgaggcacttccagacaagtgcactaatgcataacccagagtctcttgtccagctttccactacccaacacctctacactcttctacttcattaagaatcagcagaagtaaataagagatcacttcccaccattttttcctgaaaggacaggtatcttggcttaaagaagctctcatcatccatgaaagctggagyattttccagtgatttttttttctctgggagcagcaaaattgatcaaaaaggagctgacagctggaggtttgttacttactgcattgccaagaacggggttcctaagaacccattttggagaccaaacttcctggaaaaggggagtgtccttacaatatatatatatatatgaatggtatgaggaggcacttatatgacttcagttcttgtataatatgtcttttgaattactgtcttttgtgatcttagtatctgtaggacctgtattattttatttccttatgaaaagggaacataaag

SEQ ID NO: 91635 - DNA, 600 bp, Chicken  19866894403425_1
ggctgagtggtgtaatagatcctatgctctaattttcactccattaagagggttttttggtgtgcttttgtgtgttattttattaggataatcagtaagccttgaacaaaacatgtgaagcagagaactgcaagatgcattatgaaccttaacgtgctaagaaaggcatggaaacttgttaagatgtttttctcaactgattttaatgacaaatataatggtctaaactttgatatcctgtgcataaaaatggaggcacatgttcctgtgctgcggcagtcagctccagggctccatgtrtacttcttgtgtgttactcactgcaccctttcctggtgttctgacwgcytaccttggaattgcttctccttattgatgtttgagctctttctcctttgctctttagttctgtgttggggaaaaatataaaatgcatctatgttggatgggaaaagctagcagagttcccatgttctttcctccccactgagtttagttcttgcttgaaagctgtgttgtctaatttagctttcctgctcctgttctcttgcagcctgcttctgggatgccttgattcaactgaacaagaaaacagggcaa

SEQ ID NO: 91636 - DNA, 600 bp, Chicken  19866894403425_2
agagggttttttggtgtgcttttgtgtgttattttattaggataatcagtaagccttgaacaaaacatgtgaagcagagaactgcaagatgcattatgaaccttaacgtgctaagaaaggcatggaaacttgttaagatgtttttctcaactgattttaatgacaaatataatggtctaaactttgatatcctgtgcataaaaatggaggcacatgttcctgtgctgcggcagtcagctccagggctccatgtrtacttcttgtgtgttactcactgcaccctttcctggtgttctgacwgcytaccttggaattgcttctccttattgatgtttgagctctttctcctttgctctttagttctgtgttggggaaaaatataaaatgcatctatgttggatgggaaaagctagcagagttcccatgttctttcctccccactgagtttagttcttgcttgaaagctgtgttgtctaatttagctttcctgctcctgttctcttgcagcctgcttctgggatgccttgattcaactgaacaagaaaacagggcaatgcactcaattcactgaggactatgtattcatttttactggcttgc

SEQ ID NO: 91637 - DNA, 600 bp, Chicken  19866894403425_3
gggttttttggtgtgcttttgtgtgttattttattaggataatcagtaagccttgaacaaaacatgtgaagcagagaactgcaagatgcattatgaaccttaacgtgctaagaaaggcatggaaacttgttaagatgtttttctcaactgattttaatgacaaatataatggtctaaactttgatatcctgtgcataaaaatggaggcacatgttcctgtgctgcggcagtcagctccagggctccatgtrtacttcttgtgtgttactcactgcaccctttcctggtgttctgacwgcytaccttggaattgcttctccttattgatgtttgagctctttctcctttgctctttagttctgtgttggggaaaaatataaaatgcatctatgttggatgggaaaagctagcagagttcccatgttctttcctccccactgagtttagttcttgcttgaaagctgtgttgtctaatttagctttcctgctcctgttctcttgcagcctgcttctgggatgccttgattcaactgaacaagaaaacagggcaatgcactcaattcactgaggactatgtattcatttttactggcttgcaca

SEQ ID NO: 91638 - DNA, 599 bp, Chicken  19866894403436_1
  misc_feature (1)..(100): n is any nucleotide
nnnnnnnnnnnnnnnnnnnnnnnnnnnnnnnnnnnnnnnnnnnnnnnnnnnnnnnnnnnnnnnnnnnnnnnnnnnnnnnnnnnnnnnnnnnnnnnnnnnntggtgatctgatgctgaaaaaaaatgtgcttctaatgttagcattttgtggaaagaaaaaaaatactttgccaaatttcagcagtatatttagaaatataaacatgtgagaagaaaaacatggtagttttcttggagagcttttaagcttcttccaaacttactgggttttttttgtgggtattttttttcttctttgtktgtatgtgtgtgttaagcagtagttataatcctgctcaaacccattcttatttaaacacaggctcagctttaaaatgctcttgcactgctactcccttgtgcacaattctctattgcagatccacaatctgrctttttagtatcaccttaatcctattcaaatgacaagtgatttactgggaaatatttatgaacgctaaatcacaaatatccctaaggcatacacacaagcacagyggtgatttttttctctttattagatatrctgtcatctattayggaccaaatccaagaacaca

SEQ ID NO: 91639 - DNA, 600 bp, Chicken  19866894403436_2
taatgttagcattttgtggaaagaaaaaaaatactttgccaaatttcagcagtatatttagaaatataaacatgtgagaagaaaaacatggtagttttcttggagagcttttaagcttcttccaaacttactgggttttttttgtgggtattttttttcttctttgtktgtatgtgtgtgttaagcagtagttataatcctgctcaaacccattcttatttaaacacaggctcagctttaaaatgctcttgcactgctactcccttgtgcacaattctctattgcagatccacaatctgrctttttagtatcaccttaatcctattcaaatgacaagtgatttactgggaaatatttatgaacgctaaatcacaaatatccctaaggcatacacacaagcacagyggtgatttttttctctttattagatatrctgtcatctattayggaccaaatccaagaacacaatctacatgcaacatcagaaacctcgtagatctgagacagatgtacgttagacagatgtttaatgtytgtgattctacttcaaaccttaacagatcatttccacttacctagacattgtgtcagaggtaagaa

SEQ ID NO: 91640 - DNA, 600 bp, Chicken  19866894403436_3
agcttttaagcttcttccaaacttactgggttttttttgtgggtattttttttcttctttgtktgtatgtgtgtgttaagcagtagttataatcctgctcaaacccattcttatttaaacacaggctcagctttaaaatgctcttgcactgctactcccttgtgcacaattctctattgcagatccacaatctgrctttttagtatcaccttaatcctattcaaatgacaagtgatttactgggaaatatttatgaacgctaaatcacaaatatccctaaggcatacacacaagcacagyggtgatttttttctctttattagatatrctgtcatctattayggaccaaatccaagaacacaatctacatgcaacatcagaaacctcgtagatctgagacagatgtacgttagacagatgtttaatgtytgtgattctacttcaaaccttaacagatcatttccacttacctagacattgtgtcagaggtaagaatttactttcaaagaaacccaggctacmaaaattgcatttgttattaaacttctagctgattcatcatccttaataaatcacatgagaaaacagtcacttgatacg

SEQ ID NO: 91641 - DNA, 600 bp, Chicken  19866894403436_4
ggttttttttgtgggtattttttttcttctttgtktgtatgtgtgtgttaagcagtagttataatcctgctcaaacccattcttatttaaacacaggctcagctttaaaatgctcttgcactgctactcccttgtgcacaattctctattgcagatccacaatctgrctttttagtatcaccttaatcctattcaaatgacaagtgatttactgggaaatatttatgaacgctaaatcacaaatatccctaaggcatacacacaagcacagyggtgatttttttctctttattagatatrctgtcatctattayggaccaaatccaagaacacaatctacatgcaacatcagaaacctcgtagatctgagacagatgtacgttagacagatgtttaatgtytgtgattctacttcaaaccttaacagatcatttccacttacctagacattgtgtcagaggtaagaatttactttcaaagaaacccaggctacmaaaattgcatttgttattaaacttctagctgattcatcatccttaataaatcacatgagaaaacagtcacttgatacgtagtacttcaaatcgaatatctgaaagc

SEQ ID NO: 91642 - DNA, 600 bp, Chicken  19866894403436_5
gtattttttttcttctttgtktgtatgtgtgtgttaagcagtagttataatcctgctcaaacccattcttatttaaacacaggctcagctttaaaatgctcttgcactgctactcccttgtgcacaattctctattgcagatccacaatctgrctttttagtatcaccttaatcctattcaaatgacaagtgatttactgggaaatatttatgaacgctaaatcacaaatatccctaaggcatacacacaagcacagyggtgatttttttctctttattagatatrctgtcatctattayggaccaaatccaagaacacaatctacatgcaacatcagaaacctcgtagatctgagacagatgtacgttagacagatgtttaatgtytgtgattctacttcaaaccttaacagatcatttccacttacctagacattgtgtcagaggtaagaatttactttcaaagaaacccaggctacmaaaattgcatttgttattaaacttctagctgattcatcatccttaataaatcacatgagaaaacagtcacttgatacgtagtacttcaaatcgaatatctgaaagcaaaaatggaatatt

SEQ ID NO: 91643 - DNA, 586 bp, Chicken  19866894403436_6
gctttaaaatgctcttgcactgctactcccttgtgcacaattctctattgcagatccacaatctgrctttttagtatcaccttaatcctattcaaatgacaagtgatttactgggaaatatttatgaacgctaaatcacaaatatccctaaggcatacacacaagcacagyggtgatttttttctctttattagatatrctgtcatctattayggaccaaatccaagaacacaatctacatgcaacatcagaaacctcgtagatctgagacagatgtacgttagacagatgtttaatgtytgtgattctacttcaaaccttaacagatcatttccacttacctagacattgtgtcagaggtaagaatttactttcaaagaaacccaggctacmaaaattgcatttgttattaaacttctagctgattcatcatccttaataaatcacatgagaaaacagtcacttgatacgtagtacttcaaatcgaatatctgaaagcaaaaatggaatattcttatccagtaaccctttttttacattcttgcttttgtgaggcaaaaatcatgctacacaagcactcaaaatt

SEQ ID NO: 91644 - DNA, 493 bp, Chicken  19866894403436_7
aaatgacaagtgatttactgggaaatatttatgaacgctaaatcacaaatatccctaaggcatacacacaagcacagyggtgatttttttctctttattagatatrctgtcatctattayggaccaaatccaagaacacaatctacatgcaacatcagaaacctcgtagatctgagacagatgtacgttagacagatgtttaatgtytgtgattctacttcaaaccttaacagatcatttccacttacctagacattgtgtcagaggtaagaatttactttcaaagaaacccaggctacmaaaattgcatttgttattaaacttctagctgattcatcatccttaataaatcacatgagaaaacagtcacttgatacgtagtacttcaaatcgaatatctgaaagcaaaaatggaatattcttatccagtaaccctttttttacattcttgcttttgtgaggcaaaaatcatgctacacaagcactcaaaatt

SEQ ID NO: 91645 - DNA, 600 bp, Chicken  19866894403445_1
atttccactctccaaaacaacccttcagtccaaaactagcaaaaccacgtcagcaccaacctgataaacttgtttacagaagtgacttcaaggtgtcacctgtaagctggcactgaacctttttgggggtgaagctccatgtgcaccaggtgccaaagtgaggggagcagagacagctctgcaggatgggtcagtgcagagagaggcattgatgagcacaaccagccatgggttatccactgcctgtctggaggtttttgcactgtcaggatgttctccagcacagataatcatttcaayctgaaactcctcagaacaaaactatacagtgagcaattcccttaccagttaggaaaggaagaaagaagcccaagacacaatttaagcctatgtacaacggaaggagcccacaggacaagcygcagtgctgatgtcagggagcatatggtgggcatgctgggtgctggacggagcaggaagacctcagcatcctcagccaggtctcctgcttggagaggggacaaggcaacaaggacatttgaggctgcagggccagtcctggggctgactgggtaatgctttcagacccaagagcccttc

SEQ ID NO: 91646 - DNA, 543 bp, Chicken  19866894403445_2
tttgggggtgaagctccatgtgcaccaggtgccaaagtgaggggagcagagacagctctgcaggatgggtcagtgcagagagaggcattgatgagcacaaccagccatgggttatccactgcctgtctggaggtttttgcactgtcaggatgttctccagcacagataatcatttcaayctgaaactcctcagaacaaaactatacagtgagcaattcccttaccagttaggaaaggaagaaagaagcccaagacacaatttaagcctatgtacaacggaaggagcccacaggacaagcygcagtgctgatgtcagggagcatatggtgggcatgctgggtgctggacggagcaggaagacctcagcatcctcagccaggtctcctgcttggagaggggacaaggcaacaaggacatttgaggctgcagggccagtcctggggctgactgggtaatgctttcagacccaagagcccttccccatcaccatcatcaggacatgatgttgcaaagcctttgtgctcccacactccctatttacag

SEQ ID NO: 91647 - DNA, 600 bp, Chicken  19866894403479_1
agaaggagtgtgaggaagtgcattgtgggagagggaagtgaatttggggggggggggaagggttggaattgtggaggaaaacagcaaacaacaacaaaaaaccaaaacaaaaccctaagaactcgacacaagcttaacacacacagaagaatcaaaccacacacctatgtaacagagccatgaagtcaacgccaaacagggagaggatgcggatgcatgtcccaccgcagggaaggtgaccaaagtgaaggtggcagcgagaggagttcccagctttcggcatcgcagtcctgaggcctygccaagtggtgatgtttgctcccggccgaacacagggtcgtcatttggagggggaaaaaaaaagagatgaaacagcaaaagccatgaaagaagccttcatcggtgaacgtctgctgcgtgtttgacacagcctacaggggataaagccctgcygcagcgtgggctcaggtctgcaggatgctggaggagatgccgttggaaaactccctttgctgtgctgcagcagagggtcctgccagcttacaccaaaacctgctggccaccctgctggggtatgcaacggcttggtcccaaaccctc

SEQ ID NO: 91648 - DNA, 600 bp, Chicken  19866894403479_2
ggaagggttggaattgtggaggaaaacagcaaacaacaacaaaaaaccaaaacaaaaccctaagaactcgacacaagcttaacacacacagaagaatcaaaccacacacctatgtaacagagccatgaagtcaacgccaaacagggagaggatgcggatgcatgtcccaccgcagggaaggtgaccaaagtgaaggtggcagcgagaggagttcccagctttcggcatcgcagtcctgaggcctygccaagtggtgatgtttgctcccggccgaacacagggtcgtcatttggagggggyaaaaaaaagagatgaaacagcaaaagccatgaaagaagccttcatcggtgaacgtctgctgcgtgtttgacacagcctacaggggataaagccctgcygcagcgtgggctcaggtctgcaggatgctggaggagatgccgttggaaaactccctttgctgtgctgcagcagagggtcctgccagcttacaccaaaacctgctggccaccctgctggggtatgcaacggcttggtcccaaaccctcttgtcccctgggtgcttggctttgggctaccctcagctgctggcccagagcccag

SEQ ID NO: 91649 - DNA, 600 bp, Chicken  19866894403479_3
ggaattgtggaggaaaacagcaaacaacaacaaaaaaccaaaacaaaaccctaagaactcgacacaagcttaacacacacagaagaatcaaaccacacacctatgtaacagagccatgaagtcaacgccaaacagggagaggatgcggatgcatgtcccaccgcagggaaggtgaccaaagtgaaggtggcagcgagaggagttcccagctttcggcatcgcagtcctgaggcctygccaagtggtgatgtttgctcccggccgaacacagggtcgtcatttggagggggaaaaaaaaayagatgaaacagcaaaagccatgaaagaagccttcatcggtgaacgtctgctgcgtgtttgacacagcctacaggggataaagccctgcygcagcgtgggctcaggtctgcaggatgctggaggagatgccgttggaaaactccctttgctgtgctgcagcagagggtcctgccagcttacaccaaaacctgctggccaccctgctggggtatgcaacggcttggtcccaaaccctcttgtcccctgggtgcttggctttgggctaccctcagctgctggcccagagcccagcacacgttg

SEQ ID NO: 91650 - DNA, 600 bp, Chicken  19866894403479_4
aaaccacacacctatgtaacagagccatgaagtcaacgccaaacagggagaggatgcggatgcatgtcccaccgcagggaaggtgaccaaagtgaaggtggcagcgagaggagttcccagctttcggcatcgcagtcctgaggcctygccaagtggtgatgtttgctcccggccgaacacagggtcgtcatttggagggggaaaaaaaaagagatgaaacagcaaaagccatgaaagaagccttcatcggtgaacgtctgctgcgtgtttgacacagcctacaggggataaagccctgcygcagcgtgggctcaggtctgcaggatgctggaggagatgccgttggaaaactccctttgctgtgctgcagcagagggtcctgccagcttacaccaaaacctgctggccaccctgctggggtatgcaacggcttggtcccaaaccctcttgtcccctgggtgcttggctttgggctaccctcagctgctggcccagagcccagcacacgttgagacatcacgagtccacccacagaggggcaatgcagcatatcctccactcctgggcggctcctgtgctccatgcctggaggaggagcat

SEQ ID NO: 91651 - DNA, 560 bp, Chicken  19866894403482_1
gtctaattctggagaattatggatctttttttttttccaaatgcactcaacaaagttacgttcttagacagatcggcataaaatggagttcattagtctgccccaaattataagcagtcttccttcgagttccatgttagagtaatgaaaattctaagacaagcagtcatatttaaaatgtttgctgcagctggtttcaaagcagatgttaatgattggaaatgtgtaaatgttaattttgagagaccaattaagttttcagttaaatattaatgcatgcttggtttatgagaaatttcrtgcaataacagaagcatagaatatcccaacttggaagggacccacaaggatcatagcgtccaaaccctgcttccacacaagaccacccaaaaaccaaaccctatgtctgagggcattgtccaaatgctccttgaactctggcagctcagggctgtgcccactgccctgggcagcctgttccagtgcccgaacaccccctggtgcagaccccttccctgacacagctccgtgccgttccctcgggccctgtcgctgtcaca

SEQ ID NO: 91652 - DNA, 600 bp, Chicken  19866894403491_1
atggatgcctggtgctcttttactttcccatagcagtcaaaggggcctagcagatgttgcataggtctaatggaaaacctgtgcattttggggccagcgcgtgtaggctggatcagcagcaatgatgctgtttagacagtcgaatcttactctcagtgcatatttacagcctggatggagcaacccagcttgggcaccttctgcttctacttggaaggcaaaagagcaaagcttgactgcaggctccgagtgaaaatcagtttaattcagaattcaggaagaaaaaagagacatgtaaargcatatgctgctctgaaaccatgtgaggctccatgagctctacttggccagagatgctctgatctattttacaggtagcagcaataagtcatcatctgcaggtccctggagagcccttctgggccaccagtctctcagaccatcacaaccatgtgtattgggtgctgtcagctcccttcggctctgtttacactcaacatttccaaagccctttgtgataccatgggcaggaaggcagccagggcatcaccagtgctgcaaaggaccagttctgatgggcgttaatgctgtggccacagc

SEQ ID NO: 91653 - DNA, 600 bp, Chicken  19866894403496_1
cattgaactgcctagtgtatatactgtagaccaaagtatcttcacaaaatatttcatgtcattctggaatagtttcctgaaaactgaatagttttctgtaagattaatgcaaatccatctttaaatattttatcttttacatacttgttactgaacaccaaattttattgtatctgtgcaagggaactgcaaagcaaactgccttgaatatagaagtgatcaacagaagtagaggtctagatatgatgaccttcatttacaaaaggacaagttgaggagtttattatataacttcataartttgtttgcatcttctgaaaaacgttaattgctgagcttatgaggaaatacaaaattttcttttacgatagtgtaccttgcagtagagttgtaggtttttattacctatttggtattatacatgtaagagaatggctttgttctcatgctagtggtaattttctactcttaaagtcctctttcttcactgtcagctgttctttgcattgattggtggcttctttagtaatccaagaaaagctgttgaagttactttttacttagaaactaatacatgggcccggtgatagcggtgaagtt

SEQ ID NO: 91654 - DNA, 574 bp, Chicken  19866894403500_1
ccctgcagagcagtgttcataatggggttatcctcatgaatggacataacctccacagcttgacttcccttctggaagcttccatagacaggcagtgaaatgtaacctgcacggggaagggttactctttgcccccatctctgtggatggagggagggctgccacactgctcagggatcacccgtcatctcggtgccatgctgattctgtggttcagggggagggtgttgcggggtgcttgcacagctcctgacaccaacactgcacccatgtccaagcacagaacctgcagccctgtgygctgctgcatcccggtgagaagagctcagagagacgggagagaacatctgtctgcaaagggtggaataggaggggtagctcagcacctccctttcccttcccacctgctcaagcaagggagtccaaggagaagaaagcagactggggctgagccctggattttggttcgggttcttttttctgaatgggtttcaccctgggctatgagatgcactgctctatgggaggccaagggagatgcaggctctggccatcattcacaggcaggcaggga

SEQ ID NO: 91655 - DNA, 599 bp, Chicken  19866894403505_1
  misc_feature (1)..(4): n is any nucleotide
nnnnggctgtgcggggccctactgccggtttgcactgctcgtggggcagggcctggctggctgcctctgcactgggtgcactcctcatttctcagtggtaccagttacacagcgaggagccagccgttgttcgtcttctgcatgcaaacatggctgcgaaggggaaacgttagtttccattccttgtattttttataaacagcctgatgaaaagccttctgcaatgtgattcagcttgcagctaagttatgaagacagaattgatatgaactgttgctttatccaatagcagaacataasagtatttacactgatgtggggttttccagagctgtgtggaacgtgtgccaaaaaatcttctatctttataaatgtgccttatctgaggacagactactctgttaattcttaacaaacttcttaagttgtaatctagctgaacgggcagatatttatggtctgaatgctttttctttatycttttagaggacaataagggctgtttgtttccctcagagcttttagtgctggctgtgctggatgtgctgccccatggcgttctgtttgtgtgctttccagggccaagcagaagtcttctg

SEQ ID NO: 91656 - DNA, 530 bp, Chicken  19866894403505_2
ttccttgtattttttataaacagcctgatgaaaagccttctgcaatgtgattcagcttgcagctaagttatgaagacagaattgatatgaactgttgctttatccaatagcagaacataasagtatttacactgatgtggggttttccagagctgtgtggaacgtgtgccaaaaaatcttctatctttataaatgtgccttatctgaggacagactactctgttaattcttaacaaacttcttaagttgtaatctagctgaacgggcagatatttatggtctgaatgctttttctttatycttttagaggacaataagggctgtttgtttccctcagagcttttagtgctggctgtgctggatgtgctgccccatggcgttctgtttgtgtgctttccagggccaagcagaagtcttctgctgggttttcttcttatagtcactgaaactggctcacattgaagtgcagccagcttttagcatcaacttacatgaatgcagacactcggttccttctcatttgtttgcat

SEQ ID NO: 91657 - DNA, 600 bp, Chicken  19866894403524_1
ttagcccaatggtgccagtacagctcagaacactcatgacctcttaaaagaaaaggagaaatgatcaaaccgagtttcacagcatcctacacaaaagaatcactggggcagaagaacaactgatcatatttttggtttggatgtactcccacaaagtggaaaatggaatgactggtaattagtgatgaacattgaaggcagaagcaggctatgtgagtgaggatcactcacaatacatgaaaaaatcatctaaattgacagtatagtccgaagacacaaaccagtgactggcagcatttyagagaaatgtagaaaccaatgtagagaaataactacaatattcttaaagaatttttaaaattacagttttgtagtgatctctatagcatggttgcctagttacagagcagaatccttggaatgacagagaaagtagcagtcatatgwgtttaactctccycaactatcagcaatggcttggcttgtctataaatcagagtaatgtgagcttatagtctggtatcccacaatatgcctgagctcacacaagcattttacacaattttatgcctgttctgagttaaagcatctatttatagt

SEQ ID NO: 91658 - DNA, 600 bp, Chicken  19866894403524_2
cccacaaagtggaaaatggaatgactggtaattagtgatgaacattgaaggcagaagcaggctatgtgagtgaggatcactcacaatacatgaaaaaatcatctaaattgacagtatagtccgaagacacaaaccagtgactggcagcatttyagagaaatgtagaaaccaatgtagagaaataactacaatattcttaaagaatttttaaaattacagttttgtagtgatctctatagcatggttgcctagttacagagcagaatccttggaatgacagagaaagtagcagtcatatgwgtttaactctccycaactatcagcaatggcttggcttgtctataaatcagagtaatgtgagcttatagtctggtatcccacaatatgcctgagctcacacaagcattttacacaattttatgcctgttctgagttaaagcatctatttatagttttaaattattcatatcagatcatgagcaatcactgtgcggagtggaatccatcagtcatagatgttggaccactgaggtggacagagattcagcaattcaaggaagagataggaaacagattttttcagtgtattttattaagtgc

SEQ ID NO: 91659 - DNA, 600 bp, Chicken  19866894403524_3
aaatggaatgactggtaattagtgatgaacattgaaggcagaagcaggctatgtgagtgaggatcactcacaatacatgaaaaaatcatctaaattgacagtatagtccgaagacacaaaccagtgactggcagcatttyagagaaatgtagaaaccaatgtagagaaataactacaatattcttaaagaatttttaaaattacagttttgtagtgatctctatagcatggttgcctagttacagagcagaatccttggaatgacagagaaagtagcagtcatatgwgtttaactctccycaactatcagcaatggcttggcttgtctataaatcagagtaatgtgagcttatagtctggtatcccacaatatgcctgagctcacacaagcattttacacaattttatgcctgttctgagttaaagcatctatttatagttttaaattattcatatcagatcatgagcaatcactgtgcggagtggaatccatcagtcatagatgttggaccactgaggtggacagagattcagcaattcaaggaagagataggaaacagattttttcagtgtattttattaagtgccgcagatgactcc

SEQ ID NO: 91660 - DNA, 599 bp, Chicken  19866894403526_1
  misc_feature (1)..(72): n is any nucleotide
nnnnnnnnnnnnnnnnnnnnnnnnnnnnnnnnnnnnnnnnnnnnnnnnnnnnnnnnnnnnnnnnnnnnnnnnaatgcaggaagtgtgcattgcagtgcacagcatatttttaaagagaagtacccttattaagttgtttcctgaggagggatgaggttaggaatgtttttaattgtttttctgaaccggtgccacagagtttggctgccataccacattccataggaaaccctgatccctcagcacagcgctgcttctggggccacggtggttgagcagtaggagggtatatctcagtasagtgttaaacaaaatccttacaaacagcctatgatgctatgaaatatcttcytgttgaaactacatgtgactagataggaggaaaaataaaccagtctctaatcagcatgagcatgtgttctggaatggaaggaagaagggtgaaatgaagggttgttttttttttttctctccaatcctatgactcagattgtcattccctcttgtggcagaagggcagactaggagctgcttcaataacctgaaacatcactaattatcatgtgagatcttgtgagaagtgaagtgtggagaagcgc

SEQ ID NO: 91661 - DNA, 599 bp, Chicken  19866894403526_2
  misc_feature (1)..(20): n is any nucleotide
nnnnnnnnnnnnnnnnnnnnaatgcaggaagtgtgcattgcagtgcacagcatatttttaaagagaagtacccttattaagttgtttcctgaggagggatgaggttaggaatgtttttaattgtttttctgaaccggtgccacagagtttggctgccataccacattccataggaaaccctgatccctcagcacagcgctgcttctggggccacggtggttgagcagtaggagggtatatctcagtasagtgttaaacaaaatccttacaaacagcctatgatgctatgaaatatcttcytgttgaaactacatgtgactagataggaggaaaaataaaccagtctctaatcagcatgagcatgtgttctggaatggaaggaagaagggtgaaatgaagggttgttttttttttttctctccaatcctatgactcagattgtcattccctcttgtggcagaagggcagactaggagctgcttcaataacctgaaacatcactaattatcatgtgagatcttgtgagaagtgaagtgtggagaagcgctgcagttaaggcgagagcttcctcttttatatttatttgctttgctgttgaa

SEQ ID NO: 91662 - DNA, 600 bp, Chicken  19866894403529_1
cttttcttttctttttgctttggtttttttttttcctatgtctttcagcaagacactgtgtgaagaaaatgcttccccatgcacagagctggcagtgtgttaacctgaggaagattcaggtacttgtaaacctacatctgtgtgataacagtgcttcaggtgccagggaatctgtgggaacacatagagcaggggcacaggattaaagtgagaaagggtaagggcaagaaaaaggaaacaggatgtattgctgctttcatgtcaagtttgcttatgtatattatctataatagagagtgytgggagaggaaaccaaagaagcagtgacaaagcacagctacagagcctggtggtttggggatatggttgagcacagaacttaggagtttgtatttaaacgtacacgggcaacataacagtgagaggcagcccaggaaggagtctcatgagaactgcactgcaaactttctcttgcacaggaggaccaaaagcgaatcagtcagattgaaagagacaatgagaggctgatggagaaccttgctgccatccagcgagggccggcaagggtggattgttggaacgaatactttcagagaaggt

SEQ ID NO: 91663 - DNA, 600 bp, Chicken  19866894403538_1
tattctgcattatgttcccattcataaaggaatactcatttaagtggacaaactcttccagctaagtgaagctgtgtccccagtagcttgaagctattggcaataagcagttaggtgacaggtgacaaaagggtccaaaaaggttggggaaaggctaaggaatgaagtgagacttacaggaccacaatcaccttaagcaaagcctttcttctgggtgtcattgtaggctcagagcttcctggttcctttttgcaaagcttatggggatgtggtcaaacaagccatgctaaaagatggggmaattttcccagtacgtgatgcatctgtgcaaacagacaaaygatctgcagctggtctagggagaaagaaccactctgctggactgcaacaatcttttccttttttctttcatattttttcctattgagcacagagggaaatataaaaccaataatttggtttgtatgggctgggagtgatctctgtgctccagagaagcccctgtcttgtgatgccagtgagatttggaagatggagtctgccagtacagggaaggaggaagagaaaggtagaccagagggtcctgtttgctgctgggag

SEQ ID NO: 91664 - DNA, 600 bp, Chicken  19866894403538_2
aagtggacaaactcttccagctaagtgaagctgtgtccccagtagcttgaagctattggcaataagcagttaggtgacaggtgacaaaagggtccaaaaaggttggggaaaggctaaggaatgaagtgagacttacaggaccacaatcaccttaagcaaagcctttcttctgggtgtcattgtaggctcagagcttcctggttcctttttgcaaagcttatggggatgtggtcaaacaagccatgctaaaagatggggmaattttcccagtacgtgatgcatctgtgcaaacagacaaaygatctgcagctggtctagggagaaagaaccactctgctggactgcaacaatcttttccttttttctttcatattttttcctattgagcacagagggaaatataaaaccaataatttggtttgtatgggctgggagtgatctctgtgctccagagaagcccctgtcttgtgatgccagtgagatttggaagatggagtctgccagtacagggaaggaggaagagaaaggtagaccagagggtcctgtttgctgctgggaggtgccaggcatgcctagtggagaaatcttttcccccagagc

SEQ ID NO: 91665 - DNA, 600 bp, Chicken  19866894403538_3
tagaccagagggtcctgtttgctgctgggaggtgccaggcatgcctagtggagaaatcttttcccccagagcagttctggaaaatgttgatacaacataataacctgtggctcttaggcagcattacttgacagagggttctgcagagcactgggctaatatcttcacatctgcacgtgttagtgcaggccaacagtatcacagaggtcgatgtgatgagtttcaccacatagtgcagaaatatcctccatatcttaaatgcttctacacagcagtcagaaaagtctctctgcaaagatsaaggtgcaggaaacaaacaaacaaacaaaaaacctacctcaaaaagatcaaataatactactttaatatatactaacttctcccgattatcagaaaatattcaattggaattttccaggaaaaaaaaaaatcacctggaattcccagatccctttgtattttaaccaaaatgagagggttaaaagcagaaaaataaattaagataatagtcgtgacacagaggaagagagcactgatccattttgacacttatgactttcagatcagagacctatgaaacagtactgtcctgccaagctg

SEQ ID NO: 91666 - DNA, 600 bp, Chicken  19866894403554_1
tggggacatttggggccatttagggccatttagggacatttggggacagtcaggacctctggggacatttggggacatccaggatatggggacatttggggacatttagggacatttggggacatccaggatatggggacattcggggacatttagggacatttggggacatctaggatatgtggacatttggggacatttggggacatccaggatatggggacgtttggggacatcccggacctctggggacatttgggacatccaggatatggggacatccggggacatttagggacmttcagggacatttggggacatccaggatatggggacatttggggccatttaggaacatttggggacatccgggatatgtggacatttggggacatccaggatatggggacatttggggacatttagggacatttggggacatccaggatatggggacatttggggacatccaggatatggggacatttgggacatcccggacctctggggacgtttggggacatccaggatatgtggacatttggggacatttggggacattcaggatatgggaacatccggggacatttagggacatct

SEQ ID NO: 91667 - DNA, 600 bp, Chicken  19866894403555_1
aaaaagaaggaaaagtgtgtaagttggggacgatgggatgtaaagatagccatttccattttgattttgtgtgtaatgtttattgtttccggagtgaggggaggaggaagagacagactgcatttaactcaacacacagcagctgtcattcagataatctgaagtagaattaggtagaaaaagcctgtggttgtttgatgtatctatactcgtagaaaacattttataacatgtgacgtgcccaaagtaccaatcattgtaatgcatatatctttaaactttgatttgaaacttaccatkgaatatattaatagtgctagtgtttatatctctttgtatcttctgaaacttatacctaaatatgcgtgtacatagcattctgtgggattgcatttcgtgccttctttaaatgtgcgttgttgaatatgtgtgttaaaatcaggcagagttaattttttcactttctgattaacgtagtacataagctgagcaattatatttagtttattatttttacattgttgcctttagtgagcaaaaggaagtattttatttctgtaatggcaggagcaattggaaacgcttttatcctatgggctg

SEQ ID NO: 91668 - DNA, 600 bp, Chicken  19866894403557_1
caggttcatccgccgccctcacacttccccgagcaacgtttcctggtgggagaatttgctgttacttaaaagctaaaggtcagaaaggctgaaaatcggtctgtaattttattaacctcttctactgctgatcttttgttgatctcattatttgaccacaccaactttaccccactgctctgaagtcaccctgctgcaccttctgtgaagcctgctctcagcaaacatctgctgcctggcaccatgttttgtttgcagtgcttccccagagctcctggattgctgcaaaccaattaattrtattatcagagtccaatgtagcagcccttttctgtgcagagtgtttacaagggttcaaaagatttaaatacagtttttcacttgggctctttcctgcataggttaaacattgcttagtgcttttgctgcctttcatttgactaaattagctggggtgatgtgcatgcatttctggccttacatctcccagctaatgagagcaaggaaagcatgacctgttgttgactgtgtcacttgtccttctctggtactattacagggtagcttgtgctctrtgtgcaggtctgcattcgaggcttt

SEQ ID NO: 91669 - DNA, 600 bp, Chicken  19866894403557_2
tggattgctgcaaaccaattaattrtattatcagagtccaatgtagcagcccttttctgtgcagagtgtttacaagggttcaaaagatttaaatacagtttttcacttgggctctttcctgcataggttaaacattgcttagtgcttttgctgcctttcatttgactaaattagctggggtgatgtgcatgcatttctggccttacatctcccagctaatgagagcaaggaaagcatgacctgttgttgactgtgtcacttgtccttctctggtactattacagggtagcttgtgctctrtgtgcaggtctgcattcgaggctttagctctacctgttgtgtatttaaatcccagccctcctgcttgtaggttccagaagttgacaaacctgacggattattttgtttcagccaccttgggtttgtgtctttacacaaggagaaagcattagcttaactgactttaagaatttggtgctgctggaataagccattttggtttcttcctcctggttttactctccagttgtatctcttgaattgactgcggtgtccctgtgagcgacctgagctataagcaaatcctgggattttgggtac

SEQ ID NO: 91670 - DNA, 547 bp, Chicken  19866894403557_3
caaggagaaagcattagcttaactgactttaagaatttggtgctgctggaataagccattttggtttcttcctcctggttttactctccagttgtatctcttgaattgactgcggtgtccctgtgagcgacctgagctataagcaaatcctgggattttgggtactccactgggtgtgctgcagccctcagctctggctcaggttgcacttgggatgtattacagggaatgtaccaaatatgttagtttgttgctacaggtgctgcttccctccaggatggcctatttccttctgaaccrgagagcttgtcataaataatccgtgtattctgatgtacttaaatagttaattccctaatactggcttttggattggtagcaaatgcgggtatccttgtctgtctcatcacagtcgaaaacacgtgtgataacattatggctccagacagttttcagatagatgaaacaagcttactgttttctgctcttttaatttccaagcattttgtataatagcatcctgcagtaagactacgcaagaacaaag

SEQ ID NO: 91671 - DNA, 600 bp, Chicken  19866894403562_1
ctataccccacagcccactcacagcccgttacctctaagctccacagctgctgcaggcactgctgccctatgctcagccccctccttagtgccgagagctggaaactcattgcaggtgtggccgggctttacgtcagcccagatggccactctttgttccccttcttgtattccttctctatctgtgcctcagcttccttacctgtgaaatgtgactcgtgcctgggcttttctcctggctgctttcatttctcacaccctgagctcatgctgtgccaccaccacggtgccatggggacrcagctcctcccgtccccccccgctgcagagctggggaaggtagctggcattattcctgtggttttattcaataaaaattccttcctttgtaacaatgctgcccctatcccggggccctgtttgctctccaaatactggcgctgatctcctccagaagctccagtgcagcaccagcctttcatcccagaatctcctgtgctggggaccccatcccagaccccacactgtgtctttcccaggggtttcacaaccctgcaatggggacaagcagggcagagtccagctcaaacgagcagtgtc

SEQ ID NO: 91672 - DNA, 600 bp, Chicken  19866894403562_2
ccactcacagcccgttacctctaagctccacagctgctgcaggcactgctgccctatgctcagccccctccttagtgccgagagctggaaactcattgcaggtgtggccgggctttacgtcagcccagatggccactctttgttccccttcttgtattccttctctatctgtgcctcagcttccttacctgtgaaatgtgactcgtgcctgggcttttctcctggctgctttcatttctcacaccctgagctcatgctgtgccaccaccacggtgccatggggacrcagctcctcccgtrcccccccgctgcagagctggggaaggtagctggcattattcctgtggttttattcaataaaaattccttcctttgtaacaatgctgcccctatcccggggccctgtttgctctccaaatactggcgctgatctcctccagaagctccagtgcagcaccagcctttcatcccagaatctcctgtgctggggaccccatcccagaccccacactgtgtctttcccaggggtttcacaaccctgcaatggggacaagcagggcagagtccagctcaaacgagcagtgtcagcggctggaggac

SEQ ID NO: 91673 - DNA, 523 bp, Chicken  19866894403562_3
cctgtggttttattcaataaaaattccttcctttgtaacaatgctgcccctatcccggggccctgtttgctctccaaatactggcgctgatctcctccagaagctccagtgcagcaccagcctttcatcccagaatctcctgtgctggggaccccatcccagaccccacactgtgtctttcccaggggtttcacaaccctgcaatggggacaagcagggcagagtccagctcaaacgagcagtgtcagcggctggaggacagaagaactgtgagctcctcagatcctgaaaccactggcygaggtgtggggtgccccactgtccccaggacggtggctgtgtgtgctgagccagcagtgactcgtgggggcggtggcctggggcgaggctgggagccgagggcagggtgaggagccagggcgggtgccattgccccgagcttttctaggggagcrcagcccacaccccgggccatgtctccttgtgatggcccagggccacccgcgatcactgctctgtccca

SEQ ID NO: 91674 - DNA, 368 bp, Chicken  19866894403562_4
atcccagaccccacactgtgtctttcccaggggtttcacaaccctgcaatggggacaagcagggcagagtccagctcaaacgagcagtgtcagcggctggaggacagaagaactgtgagctcctcagatcctgaaaccactggcygaggtgtggggtgccccactgtccccaggacggtggctgtgtgtgctgagccagcagtgactcgtgggggcggtggcctggggcgaggctgggagccgagggcagggtgaggagccagggcgggtgccattgccccgagcttttctaggggagcrcagcccacaccccgggccatgtctccttgtgatggcccagggccacccgcgatcactgctctgtccca

SEQ ID NO: 91675 - DNA, 600 bp, Chicken  19866894403564_1
tttaagtgcaagaaacagacgcgcgcatccgctccaaaacgcatctcctggaaccttccgctggtagttctgtcgccctgtttgatctcgttaagaatcaaaggaagcaattacatccttaatcttgttctctaaaactgtagctacagataaaaccaccacgggcaatgtatactatagcatcaacacaaaacaaaagagcaaaactgatacgcgatctttgatgtcggatttgtgacacctctaaaaggagcttcgggacttctgagaacttcagatcctctgtgacagctgagcacraggtgcaacacttgcaagacgtcttctggcacttgtgtrcctggaacagcaaggcctggagatggggtttcctgcagctgtgggtacgttaagtgacacagccatggatgcayggaaggaagacgaaaggaatggaaaacccaacaaggaactgcagcctcagaagcatggggacaagatgggactcaaagagctgygtgtacagcacgtcttctgctggaaaaggactttttctgttygggtgaagctcagcaaagcattaacaccaatgagttcttagggttgcgctcagcagcacgc

SEQ ID NO: 91676 - DNA, 600 bp, Chicken  19866894403564_2
cgcatctcctggaaccttccgctggtagttctgtcgccctgtttgatctcgttaagaatcaaaggaagcaattacatccttaatcttgttctctaaaactgtagctacagataaaaccaccacgggcaatgtatactatagcatcaacacaaaacaaaagagcaaaactgatacgcgatctttgatgtcggatttgtgacacctctaaaaggagcttcgggacttctgagaacttcagatcctctgtgacagctgagcacraggtgcaacacttgcaagacgtcttctggcacttgtgtrcctggaacagcaaggcctggagatggggtttcctgcagctgtgggtacgttaagtgacacagccatggatgcayggaaggaagacgaaaggaatggaaaacccaacaaggaactgcagcctcagaagcatggggacaagatgggactcaaagagctgygtgtacagcacgtcttctgctggaaaaggactttttctgttygggtgaagctcagcaaagcattaacaccaatgagttcttagggttgcgctcagcagcacgcggtgatggcagagccctgcatggagcagccccacggggt

SEQ ID NO: 91677 - DNA, 600 bp, Chicken  19866894403564_3
catccttaatcttgttctctaaaactgtagctacagataaaaccaccacgggcaatgtatactatagcatcaacacaaaacaaaagagcaaaactgatacgcgatctttgatgtcggatttgtgacacctctaaaaggagcttcgggacttctgagaacttcagatcctctgtgacagctgagcacraggtgcaacacttgcaagacgtcttctggcacttgtgtrcctggaacagcaaggcctggagatggggtttcctgcagctgtgggtacgttaagtgacacagccatggatgcayggaaggaagacgaaaggaatggaaaacccaacaaggaactgcagcctcagaagcatggggacaagatgggactcaaagagctgygtgtacagcacgtcttctgctggaaaaggactttttctgttygggtgaagctcagcaaagcattaacaccaatgagttcttagggttgcgctcagcagcacgcggtgatggcagagccctgcatggagcagccccacggggtatgctgtgctgctgcgctcacagcagagctcctacgctatttgctttgcacaaagcacctgaatccttgaaaaa

SEQ ID NO: 91678 - DNA, 600 bp, Chicken  19866894403564_4
agagcaaaactgatacgcgatctttgatgtcggatttgtgacacctctaaaaggagcttcgggacttctgagaacttcagatcctctgtgacagctgagcacraggtgcaacacttgcaagacgtcttctggcacttgtgtrcctggaacagcaaggcctggagatggggtttcctgcagctgtgggtacgttaagtgacacagccatggatgcayggaaggaagacgaaaggaatggaaaacccaacaaggaactgcagcctcagaagcatggggacaagatgggactcaaagagctgygtgtacagcacgtcttctgctggaaaaggactttttctgttygggtgaagctcagcaaagcattaacaccaatgagttcttagggttgcgctcagcagcacgcggtgatggcagagccctgcatggagcagccccacggggtatgctgtgctgctgcgctcacagcagagctcctacgctatttgctttgcacaaagcacctgaatccttgaaaaatatctgctctaaacctggaattactgcagagagggtgcttactgttcctggagatagcagccacctggtgtccctgggcaggga

SEQ ID NO: 91679 - DNA, 600 bp, Chicken  19866894403564_5
acctctaaaaggagcttcgggacttctgagaacttcagatcctctgtgacagctgagcacraggtgcaacacttgcaagacgtcttctggcacttgtgtrcctggaacagcaaggcctggagatggggtttcctgcagctgtgggtacgttaagtgacacagccatggatgcayggaaggaagacgaaaggaatggaaaacccaacaaggaactgcagcctcagaagcatggggacaagatgggactcaaagagctgygtgtacagcacgtcttctgctggaaaaggactttttctgttygggtgaagctcagcaaagcattaacaccaatgagttcttagggttgcgctcagcagcacgcggtgatggcagagccctgcatggagcagccccacggggtatgctgtgctgctgcgctcacagcagagctcctacgctatttgctttgcacaaagcacctgaatccttgaaaaatatctgctctaaacctggaattactgcagagagggtgcttactgttcctggagatagcagccacctggtgtccctgggcagggaacctcatggctgcttcccagcagagagcccttgggcagaaac

SEQ ID NO: 91680 - DNA, 599 bp, Chicken  19866894403580_1
  misc_feature (1)..(110): n is any nucleotide
nnnnnnnnnnnnnnnnnnnnnnnnnnnnnnnnnnnnnnnnnnnnnnnnnnnnnnnnnnnnnnnnnnnnnnnnnnnnnnnnnnnnnnnnnnnnnnnnnnnnnnnnnnnnnnaaaaagctagtggtaaatatatttgcttaattctaggtttgtcaatgatgatcagaatagggatatagcatctgatggaatatgagggaaaaaaatgctagtaagagaaatgaaagtttgttttgtttttattgaagggaaattatattgtgtagacaacagaatgttggcattacagtactcaaagtayttaaatgtattaatagtcaatgtacgtcccttcatatagacatatactcaataatatttcatactctgtctctctaccagcacttatcacaatagctctgctcctggtgcaacacagaattctgtctcaatgagacactctctaaatgacataaaacagttaatgcaatggcctctgccataattatacatgtggttgttataaaatgatgttgataaatttctctaaagctgtacaactcacatttgaggggtttggtttgaggtaaygtgcataagaaccacaaaatgaagaggcac

SEQ ID NO: 91681 - DNA, 600 bp, Chicken  19866894403580_2
cagaatgttggcattacagtactcaaagtayttaaatgtattaatagtcaatgtacgtcccttcatatagacatatactcaataatatttcatactctgtctctctaccagcacttatcacaatagctctgctcctggtgcaacacagaattctgtctcaatgagacactctctaaatgacataaaacagttaatgcaatggcctctgccataattatacatgtggttgttataaaatgatgttgataaatttctctaaagctgtacaactcacatttgaggggtttggtttgaggtaaygtgcataagaaccacaaaatgaagaggcacgcttggaagttctgcgtgccttatttagaaatgtactcaactgaaagaagtctccttggaggccaacagagaaagggtctgcaaatttcctctgcaggagtgtatacatatggctggaaaggcagcactccagcataatcctcacagccctgtgagcactccatgttaatgtgatggtatactgagtgactccacccacatacaygaatcggattatttggatcaacattaacatttctgtatgaagaaatacagtatcccagtgaagta

SEQ ID NO: 91682 - DNA, 541 bp, Chicken  19866894403580_3
aatgatgttgataaatttctctaaagctgtacaactcacatttgaggggtttggtttgaggtaaygtgcataagaaccacaaaatgaagaggcacgcttggaagttctgcgtgccttatttagaaatgtactcaactgaaagaagtctccttggaggccaacagagaaagggtctgcaaatttcctctgcaggagtgtatacatatggctggaaaggcagcactccagcataatcctcacagccctgtgagcactccatgttaatgtgatggtatactgagtgactccacccacatacaygaatcggattatttggatcaacattaacatttctgtatgaagaaatacagtatcccagtgaagtacaacctgccttctccctcctttcctgaagaaagaactcaagcaygatgggaaaaatgttttttacaataagaagtggtgaagcactggcacaggttgcccaggggagatggttggatccctgtccctggagccattcagagtcaggctggacggggctctgagcacccaatgcagt

SEQ ID NO: 91683 - DNA, 432 bp, Chicken  19866894403580_4
cgtgccttatttagaaatgtactcaactgaaagaagtctccttggaggccaacagagaaagggtctgcaaatttcctctgcaggagtgtatacatatggctggaaaggcagcactccagcataatcctcacagccctgtgagcactccatgttaatgtgatggtatactgagtgactccacccacatacaygaatcggattatttggatcaacattaacatttctgtatgaagaaatacagtatcccagtgaagtacaacctgccttctccctcctttcctgaagaaagaactcaagcaygatgggaaaaatgttttttacaataagaagtggtgaagcactggcacaggttgcccaggggagatggttggatccctgtccctggagccattcagagtcaggctggacggggctctgagcacccaatgcagt

SEQ ID NO: 91684 - DNA, 600 bp, Chicken  19866894403586_1
cacaagcctgggggctccagcccttcccctgcctgccgcctcccatgccctgcttacctcatactcagctctgggctgtggccgcagacctcagagagcagttctgcaggaaagaagttactctgagtcaccctacccgatgctttagcgctgtgtatgggggaaaatgtgaacactggaagcagtgtttcaccgcctccagcgaaccaaaccctctgcatgggtcagatcagtacatgcacaaacgccccacaaagactgaacagaagtcactgccaaaatgcagtgaaaatagaatcrtagactggtttgagttggaagcgatctttataggtcatctagtccaactcccctgcaatgaacacctgcaagctagatcwgggtgctyggagtcctgtccatcctgaccttgaccatttccaaggatggggcttctaccacctctctgggcaacctgtcccagtgccttaccgtgcttattgtaaaaaacaacttcctaacctccagtctgaatttcccctcttttagtttgaaaccatttccctgtcttatcacaacagaccctgctaaacactctgtctccttatttctaaaatgtct

SEQ ID NO: 91685 - DNA, 600 bp, Chicken  19866894403586_2
gccgcagacctcagagagcagttctgcaggaaagaagttactctgagtcaccctacccgatgctttagcgctgtgtatgggggaaaatgtgaacactggaagcagtgtttcaccgcctccagcgaaccaaaccctctgcatgggtcagatcagtacatgcacaaacgccccacaaagactgaacagaagtcactgccaaaatgcagtgaaaatagaatcrtagactggtttgagttggaagcgatctttataggtcatctagtccaactcccctgcaatgaacacctgcaagctagatcwgggtgctyggagtcctgtccatcctgaccttgaccatttccaaggatggggcttctaccacctctctgggcaacctgtcccagtgccttaccgtgcttattgtaaaaaacaacttcctaacctccagtctgaatttcccctcttttagtttgaaaccatttccctgtcttatcacaacagaccctgctaaacactctgtctccttatttctaaaatgtctaaaccgattctgtatagcaagttcatccccaaacaccgattccaggtagttccaaaaggcccatctcagcaattcagcac

SEQ ID NO: 91686 - DNA, 600 bp, Chicken  19866894403586_3
cctcagagagcagttctgcaggaaagaagttactctgagtcaccctacccgatgctttagcgctgtgtatgggggaaaatgtgaacactggaagcagtgtttcaccgcctccagcgaaccaaaccctctgcatgggtcagatcagtacatgcacaaacgccccacaaagactgaacagaagtcactgccaaaatgcagtgaaaatagaatcrtagactggtttgagttggaagcgatctttataggtcatctagtccaactcccctgcaatgaacacctgcaagctagatcwgggtgctyggagtcctgtccatcctgaccttgaccatttccaaggatggggcttctaccacctctctgggcaacctgtcccagtgccttaccgtgcttattgtaaaaaacaacttcctaacctccagtctgaatttcccctcttttagtttgaaaccatttccctgtcttatcacaacagaccctgctaaacactctgtctccttatttctaaaatgtctaaaccgattctgtatagcaagttcatccccaaacaccgattccaggtagttccaaaaggcccatctcagcaattcagcactgacactt

SEQ ID NO: 91687 - DNA, 600 bp, Chicken  19866894403588_1
gagacttcccccagtatgcaaggcttgcctaggtctacctgctcagaccatgctctagttggactccagagtttcagcacagctgtctgcaaacacactaagcagctgttctctcctctgagagctgcagaatgttttgcatttttgctgtttgtagattatcagaacctgacaacaagacagaataggaaaagccctgcacctctaagttgtagcaaaaagtgccaggatctgggatgacccaacacctcccattccctcccctttacggggttaaagtctcacaaaacaaggcataaraaaacaattcacatatgaagcagttttaagtcaaatatttattgcattccttataaaacagtaaaaaaaatgtatcagattcagacaatcttcycaattcaagacatttaaatatataatcacaaaccagttctgtagaatatctgtgcatataaaagtgttacagtcagacagtatagagtttttttttctataaaaagaagagaactttttgatttcagcctctagtcctgacaaagttacacccagctggccagccagaggaagtacacatccttaccctaacctcaacgtgcctgc

SEQ ID NO: 91688 - DNA, 600 bp, Chicken  19866894403588_2
ctgtctgcaaacacactaagcagctgttctctcctctgagagctgcagaatgttttgcatttttgctgtttgtagattatcagaacctgacaacaagacagaataggaaaagccctgcacctctaagttgtagcaaaaagtgccaggatctgggatgacccaacacctcccattccctcccctttacggggttaaagtctcacaaaacaaggcataaraaaacaattcacatatgaagcagttttaagtcaaatatttattgcattccttataaaacagtaaaaaaaatgtatcagattragacaatcttcycaattcaagacatttaaatatataatcacaaaccagttctgtagaatatctgtgcatataaaagtgttacagtcagacagtatagagtttttttttctataaaaagaagagaactttttgatttcagcctctagtcctgacaaagttacacccagctggccagccagaggaagtacacatccttaccctaacctcaacgtgcctgcaatgtgcctatggtagcgttgggtaaataaagcagatactgcttagatacaggctgcacagacaccatcccaaagagataac

SEQ ID NO: 91689 - DNA, 600 bp, Chicken  19866894403588_3; identical to SEQ ID NO: 91688

SEQ ID NO: 91690 - DNA, 600 bp, Chicken  19866894403588_4
acactaagcagctgttctctcctctgagagctgcagaatgttttgcatttttgctgtttgtagattatcagaacctgacaacaagacagaataggaaaagccctgcacctctaagttgtagcaaaaagtgccaggatctgggatgacccaacacctcccattccctcccctttacggggttaaagtctcacaaaacaaggcataaraaaacaattcacatatgaagcagttttaagtcaaatatttattgcattccttataaaacagtaaaaaaaatgtatcagattcagacaatcttcycaattcaagacatttaaatatataatcacaaaccagttctgtagaatatctgtgcatataaaagtgttacagtcagacagtatagagtttttttttctataaaaagaagagaactttttgatttcagcctctagtcctgacaaagttacacccagctggccagccagaggaagtacacatccttaccctaacctcaacgtgcctgcaatgtgcctatggtagcgttgggtaaataaagcagatactgcttagatacaggctgcacagacaccatcccaaagagataactgcagaaggaga

SEQ ID NO: 91691 - DNA, 600 bp, Chicken  19866894403591_1
agtgaaggatataatatttgcagtgaagaaaacctttgaatatctaagttgtaaatatgttttaaagtcctgctttaaaaagtattaatggtgtaggacaacttgtatgcatcatttcgttgtataactacattaacttttgtacagtaaagtacagcaatctcccagaatatttatatggctgcaatggggtctagtggggtttccctctaagccacttcatttaagtaaccgtgtggtaaatgcttgtctgtaagttagcttgtacttcagcagtgcaggtgggttaggatctccccmtgtgttctaaattcagagggaagaagaagtcttccgtttctgcttgtcttgtaattatcagactagctgtgctaaactgaccatgatagtggttgagtgcagaatggcaatgagtaatgagggccaccctgagtgtagtcctaggctgctgcacagctctccaggagcctacrtttgcaaggcttactaaaggcaaatgataaaaccagagctgagtgaagccttgctttttaattcagcagcttaacaaatacctgtataaaatggctctggaagcctgtagtattacagggttaagag

SEQ ID NO: 91692 - DNA, 600 bp, Chicken  19866894403591_2
ttatatggctgcaatggggtctagtggggtttccctctaagccacttcatttaagtaaccgtgtggtaaatgcttgtctgtaagttagcttgtacttcagcagtgcaggtgggttaggatctccccmtgtgttctaaattcagagggaagaagaagtcttccgtttctgcttgtcttgtaattatcagactagctgtgctaaactgaccatgatagtggttgagtgcagaatggcaatgagtaatgagggccaccctgagtgtagtcctaggctgctgcacagctctccaggagcctacrtttgcaaggcttactaaaggcaaatgataaaaccagagctgagtgaagccttgctttttaattcagcagcttaacaaatacctgtataaaatggctctggaagcctgtagtattacagggttaagaggtggctcatatgctttctttgaagagtgctctggtcatacaggaaagctgcacaagagcttgattaaagatcctgatcctcttcagtgtgtgatgggaagtaatagctatttattctttattaactgtcacgtgcattttctatgccagctgtcatgtacagtggtaaaaaaa

SEQ ID NO: 91693 - DNA, 600 bp, Chicken  19866894403604_1
actagaatagaataatccaaagtatttttcccccagtaatgattgcttcagtaactgaaatggaaaatgtaacatataatcatcatatgcacgcataaaccacactgactggctatttaagctgatgcaaggcagtgacatttttgataatgctgtacagctcctctgggacttaccttgtgtgcatgcaaaagaaaggcaaccacagttcttaactatgcaccagaaatggtagtaatgtagctgatattagaattgctgtgaacttcttccagatactattttttacatggcaggctrtagtgtcactgccccgagtaatgctatgctgttaaaacaccacaaaagatcagagttgtctgaaggcacataaagaaacctatgctgagtgtttgtaacctcaaggttttgtttcctgacaaggaggcttgcagcagcttagggatgtgggatatttgctagaggagtaagaattgttgaaaaagtgtattcttaatgacagcatataaaggcttttttcatgaatttccgcaagaaaatacctgtaatctcactatagaaaaagtctaaattagtatgaaattcttcagtgcaaatggc

SEQ ID NO: 91694 - DNA, 599 bp, Chicken  19866894403607_1
  misc_feature (1)..(41): n is any nucleotide
nnnnnnnnnnnnnnnnnnnnnnnnnnnnnnnnnnnnnnnnnactgaggatgttgaacagctcctcctcagagcggggtctgtaacgcaggaggaaggcgagcacctcgctttgcccccactgatctagatcagccatcctgccaatgaaataaacaccgtttgcaggagtcaggaagtgcgtaaggatctgtgctgtgcagagtagaggccacagcccttatgttgttacagcctcctctcccgttaaatactgtgtgtttactttctgtgataccacagtttcatctaaaaaggaccawccaatgtacacattataggcttaactcagtatcaatcacatgcacttttgctgatgtagagcttagacagacagtgaaacactgacaagatccctgggcacagcagcgccttgcttttccagacaactttgatatatgcagggaaagtttgtgtcttcagatgagagatatatcccacatcttacaactgactgggagaaacatactggaacatccttgcaccacaaatacatcacgcgcagtgccataattttaacagataattgcattaactcacaattccaagcaaagcagcagcc

SEQ ID NO: 91695 - DNA, 600 bp, Chicken  19866894403613_1
aatatatcatggagatgagagatttcagctgatcagcatttcttgccctgtatgtcctttcctgctcttgcaggtagaaagactttcatccagtcacccatggcagctggatggctgctacatctacaggcaagaaccttctatttcccctgcactcttacatggcttaagggggcaatgagaaaacagattcaccaggccaagaagccaatattcccaaagtcacatcctcctgcaccattccatacacagtgtcatagaatcagagaactttttgggttggaagggacccttaaaggycatctggtccaactcttctgcaatgaacaggaacacctatagctctgtcaggttgctcagagcctggtccagtctgaccctgagtgtttccagggacaccagtgtctccaatgacagcatctcctagcttctaacaaagcaggtacagaggcaacaacccccaggagattcctaggagttgactcagtcatctttttttatgtaagacagagatgtacaagcaattcaagcttatttggctccacaacaggcagatgtgataaaatctgattagtgtcaaaaatgtttactgctgcagcc

SEQ ID NO: 91696 - DNA, 551 bp, Chicken  19866894403615_1
gggtccaattattttcttttttagcataaagctaaatggactattctgccctgtccctgactgagtcgaagcgtgatttcttttgattatgcttttatgttgcaaaacgtagggctctgcagacataatggatgtctctgggagagtggcagcaattttttttctttttctttttttgttttgttttgttattttgttttttaagtgtgccagtgcttgtgggagctcactttggtgcctgctgggccagaataaaaacaccaaaagaggcagagggagggagcgaagggaaagaaaacscaaacaaaatgactactgtccaccatgcctaagggaggctggcacagaggtgggcagaattcaatggagtctatgtggggtatacctcaagcactagatgaagcctgatttccgttttctcccagatattctgactatggggtttatttttccccccagctcagtctgcttttttctttttttctttttttttaagtggaacagtgacaattagtagcggtagggaggggaaatcttggcagttttcccat

SEQ ID NO: 91697 - DNA, 600 bp, Chicken  19866894403620_1
tctggcggatctggttcctgttttgaatgttgctatattgatggctgtagtgagattgaccttgttgtgtgctattctgccttattttgtttccttggcagcaccagaaattaattaaacagattccatgttggagaatgcgtccaagcaatgggtccttcccttggtccaaacaaatagattcagtcaaaaacagatagatcagtccccttacttacgcccctttaaaactctcttcctgtgttctctctaaacttaatgcactgaaaagccttagtgcaatgtagcacaatattttcsttttttttactggcttggtcttattatttcatatgagaagagccacagggatttgaaaagataaataatttgtaagtcagcatgccagcttttgggctgagatgatgtgatagctgctccagtaaagcataccagtgaatgcgttcatcaacaccttggagaacactgaattatctcccccatagtaaaagggagaattttccctgcgatgttctggctttgtggctgatctgaaacagtctgaatgttgctgggcgtactataaagagagctgtctgaaggggtcttgaagaatgcttg

SEQ ID NO: 91698 - DNA, 600 bp, Chicken  19866894403620_2
ctggcggatctggttcctgttttgaatgttgctatattgatggctgtagtgagattgaccttgttgtgtgctattctgccttattttgtttccttggcagcaccagaaattaattaaacagattccatgttggagaatgcgtccaagcaatgggtccttcccttggtccaaacaaatagattcagtcaaaaacagatagatcagtccccttacttacgcccctttaaaactctcttcctgtgttctctctaaacttaatgcactgaaaagccttagtgcaatgtagcacaatattttctstttttttactggcttggtcttattatttcatatgagaagagccacagggatttgaaaagataaataatttgtaagtcagcatgccagcttttgggctgagatgatgtgatagctgctccagtaaagcataccagtgaatgcgttcatcaacaccttggagaacactgaattatctcccccatagtaaaagggagaattttccctgcgatgttctggctttgtggctgatctgaaacagtctgaatgttgctgggcgtactataaagagagctgtctgaaggggtcttgaagaatgcttgc

SEQ ID NO: 91699 - DNA, 599 bp, Chicken  19866894403623_1
  misc_feature (1)..(21): n is any nucleotide
nnnnnnnnnnnnnnnnnnnnncccagagaagctgtggtgccccatccctggaggcattcaagaccaggttggttggaacactgggcaacctgagatggtagggggcagccctgcccatggcagggagttgtgctgggttagctttagggtcccttccagcccaaaccattctatgattctacactctggccctgggaagagacttgaaaagcattcaaaatatcagtgccagtttagagatgaagttgtgtaataagtgtgcatgtgtttgtttgcagtagtattccttgttttgggctrtaaaagttgtaagtacatcacagtctgaagtgagacatcttatgtgaaggaaaagacatcatcttggaacatttctgatttagaataaaagttttctgaggtagacaggagaagtgtctatttctactgcctgttctttaacatgtggaaaacagaaaacaagaagagatttaatcttggtctgttattcctatttaatagttctgatgcttgtaaaaatgtttaaaagttcatacatgaaaaaagatacacatgtaaaagccacagtgtgaaaacaaaacaaaacctccaaacacaca

SEQ ID NO: 91700 - DNA, 599 bp, Chicken  19866894403624_1
  misc_feature (1)..(122): n is any nucleotide
nnnnnnnnnnnnnnnnnnnnnnnnnnnnnnnnnnnnnnnnnnnnnnnnnnnnnnnnnnnnnnnnnnnnnnnnnnnnnnnnnnnnnnnnnnnnnnnnnnnnnnnnnnnnnnnnnnnnnnnnnnccgtaaatttaatctgtgttactgaacataaaatgtactgtctaatctaaattactgttttgtcccacgtggttagcttaatgttattaggcctgctatgacaaattagtcatagtcagtgcagtagtgagatatactgagagaactgcagctggcatttcagaccaacactgttaayagctttgttgcccgtgccttactgtcagaaaagacctcgtttcactttaaatcatattgacagtgtttgaaggaaaaattaactttgtagtcttggctcatttcatggtgacaggtaaatggtgcttacagaatgtcaaaaacctgttttctggtcttaaatctcattttgttgaggttgtttcttgtgagaccacctgggaatgtttcatggctttggtcttcttgttccagttgccctcttgctactttaaaaaggctttgttgctaggtcgtgtgcaacaaagtagatgattttag

SEQ ID NO: 91701 - DNA, 600 bp, Chicken  19866894403624_2
aaagacctcgtttcactttaaatcatattgacagtgtttgaaggaaaaattaactttgtagtcttggctcatttcatggtgacaggtaaatggtgcttacagaatgtcaaaaacctgttttctggtcttaaatctcattttgttgaggttgtttcttgtgagaccacctgggaatgtttcatggctttggtcttcttgttccagttgccctcttgctactttaaaaaggctttgttgctaggtcgtgtgcaacaaagtagatgattttagtgtcacacttaagtttctgcatctgtgccwgtgacctgttactgtgtagaacagggtgatgtgctctgtccttcaggcattgagatctgtcgctctgagacaagagccatatcaatgagttacagtcagtatgatcacttactgcccccttatctggacttaaaatgaagatttaatcttcaatattgaacttgtagcctgcattatgatactcttatttaggtgtttcagttctatcgctggagctgtcctttttacatcctcacagagtaccaaacaatgccttttgttaacatcagtttgagctgacagtgctccaacaccaataga

SEQ ID NO: 91702 - DNA, 599 bp, Chicken  19866894403628_1
  misc_feature (1)..(137): n is any nucleotide
nnnnnnnnnnnnnnnnnnnnnnnnnnnnnnnnnnnnnnnnnnnnnnnnnnnnnnnnnnnnnnnnnnnnnnnnnnnnnnnnnnnnnnnnnnnnnnnnnnnnnnnnnnnnnnnnnnnnnnnnnnnnnnnnnnnnnnnnnagctcccacaggcagtgccaactgacaccttgtgtctcccacagcgctgctgtacaaacccattgaccgtgtcacccggagcacccttgttctgcacgtgagtgtgatgccactactggggtgggatggggacactgtggtgtaatagggtgaggtgagctgygatggctgtgtctgctggctggatcagccatgtcctcctgctgttggggtcccacagcctggggagcaccgtggggggcaacccaatgtgggttgctcactccatgctcaccccatccaggacctcctcaagcacaccccgtctgaccaccccgactacccgctgctgcaggacgccctccgcatctcacagaacttcctctccagcatcaatgaggacatcgatcctcggaggacagcggtcaccactcccaagggggaggtgagacaggcagggtggcgcaggggggtggttgagcc

SEQ ID NO: 91703 - DNA, 600 bp, Chicken  19866894403636_1
ttggatgggtttgaaatacaacataaacaaagtcactgaggaaaagtgcatcaaaggctataaaaaggaaagctaggagtacagtttttggttatctctgaggcacagctggaaacagcatatacttttgtatgtgtgttctttcccaatagtcttcctttttcttggaaaataatgttttattttatattaaattgttctttctggtactgtgtttgttcaaggtgtgcttctgagtggcaggagtatcagacagcacgacaaaaggtcattgaagtgatgaatgaggctgaaaaaaarttatctgaattctcagtagctaaagctgcttcttctcatgargcagaagagaaattgcaaacacataaggtaaggcgctgaaaattatatgaaatcattttccttcagttaaaaattaatgtttttttctgaaggtcctgacccatggaaacctgaagttgagtttttagatcttttcctgtagcatttaagtgttagagtatataaagaattgttttgtgtgtttgtttgttttcaatcttagactctaatagtagagcttacaggctctgctatgaaaaggtttctgaatacatttcc

SEQ ID NO: 91704 - DNA, 600 bp, Chicken  19866894403636_2
aaagtgcatcaaaggctataaaaaggaaagctaggagtacagtttttggttatctctgaggcacagctggaaacagcatatacttttgtatgtgtgttctttcccaatagtcttcctttttcttggaaaataatgttttattttatattaaattgttctttctggtactgtgtttgttcaaggtgtgcttctgagtggcaggagtatcagacagcacgacaaaaggtcattgaagtgatgaatgaggctgaaaaaaarttatctgaattctcagtagctaaagctgcttcttctcatgargcagaagagaaattgcaaacacataaggtaaggcgctgaaaattatatgaaatcattttccttcagttaaaaattaatgtttttttctgaaggtcctgacccatggaaacctgaagttgagtttttagatcttttcctgtagcatttaagtgttagagtatataaagaattgttttgtgtgtttgtttgttttcaatcttagactctaatagtagagcttacaggctctgctatgaaaaggtttctgaatacatttcctatccttttgaggcattatcaaggaatagaaaatctgattac

SEQ ID NO: 91705 - DNA, 600 bp, Chicken  19866894403636_3
agagaaattgcaaacacataaggtaaggcgctgaaaattatatgaaatcattttccttcagttaaaaattaatgtttttttctgaaggtcctgacccatggaaacctgaagttgagtttttagatcttttcctgtagcatttaagtgttagagtatataaagaattgttttgtgtgtttgtttgttttcaatcttagactctaatagtagagcttacaggctctgctatgaaaaggtttctgaatacatttcctatccttttgaggcattatcaaggaatagaaaatctgattacaccaratttcagctgtctccagagatttgcattctggagcaagtcccttggattattgcagctaatacgttgtgtatgcaaaatgaagtggaacttaaccaagtcaatcaacacagggtacatcttttttatctacagcggatggaagtggctcatcctgaaaatgtgttgaagagttatgaattgtattgttagaaaaagaaaaacttaatgttcatttttgctttttcagactcttgtgtctgtagtaaattctttccatgaaaagataacaactcttgagagaaggcttccagctggaaaaa

SEQ ID NO: 91706 - DNA, 600 bp, Chicken  19866894403637_1
cgagcttttgttctattttcaattaaatgaaaggcaaagtattgattccttcttcctcaggaattactatttgccctgttcaaggaactgaatctattcagtgagtttaaactgctgaggaaagcagataaaccattaataacgggaatgtaagagtaatctaatggattcattataatctacgtacacacataaaaatacattataacccaccacttctcatcctgaagcatgtgttttggtttatagaacctcattcattttaattgtaaacttacaaagcaatctttttctccctgytgctgtacagaacgcaaaggtgagatcaacacacccgtcattttgtttcacatagtcaactttcctgaatgccaattagggtctccttcaaaatagaagagaaaggaatagtaaaggagcatcataaattattcatccctgtaccccagctaggatgctgtggccttaaggaacactaactgtaaaacagatcactctcacaataagacatggatagtaaagaattctcttgcattttttcctcaacctggatttgccacacacacagacattaagatcaagtagattatctgacttgat

SEQ ID NO: 91707 - DNA, 600 bp, Chicken  19866894403639_1
gtatatgcgaaagaaaggccctgctatgcagaggtaaatattttctaacttcaaagttgcctgaacaagtattttttataggctttacatttgatatgtcagacgtgtattcacctgaggcatatgtccagaaaatctgaagaaacagcaccatagtgttcaaaatccgcataccttgtcagatattgttaattctgtaaacagaaagaaaagaagtccgaggaccactgctgcctgcacagatagataacgtttttcaaatgcattgtacaggccaaagggcctgatttggttactggwgaaaggtatcagcaaagtagcaacaaggtaactccatcttcaacagtacttcctgaaatgtgatgctctactgttcagctacagaacaaagggttactracagcaactaaagaaaactgacaacactatgatccagaaaaatccttaratgctgttaactattccttttttgtgtgtaaatgcacatctcactcaaagaaaacaatgattcattcacataacactcacaataagcacttctgtaaacttcagagacttcgagaccatgaaatcaggttagaaaykaagttacaaatccgt

SEQ ID NO: 91708 - DNA, 600 bp, Chicken  19866894403639_2
cagacgtgtattcacctgaggcatatgtccagaaaatctgaagaaacagcaccatagtgttcaaaatccgcataccttgtcagatattgttaattctgtaaacagaaagaaaagaagtccgaggaccactgctgcctgcacagatagataacgtttttcaaatgcattgtacaggccaaagggcctgatttggttactggwgaaaggtatcagcaaagtagcaacaaggtaactccatcttcaacagtacttcctgaaatgtgatgctctactgttcagctacagaacaaagggttactracagcaactaaagaaaactgacaacactatgatccagaaaaatccttaratgctgttaactattccttttttgtgtgtaaatgcacatctcactcaaagaaaacaatgattcattcacataacactcacaataagcacttctgtaaacttcagagacttcgagaccatgaaatcaggttagaaaykaagttacaaatccgtagatgttaagtgcctgttaattcttatcaatggtttcctttgctattttgtatctaacatttgctgagagagtttattaagcagtaggcacaccatgcc

SEQ ID NO: 91709 - DNA, 600 bp, Chicken  19866894403639_3
caccatagtgttcaaaatccgcataccttgtcagatattgttaattctgtaaacagaaagaaaagaagtccgaggaccactgctgcctgcacagatagataacgtttttcaaatgcattgtacaggccaaagggcctgatttggttactggwgaaaggtatcagcaaagtagcaacaaggtaactccatcttcaacagtacttcctgaaatgtgatgctctactgttcagctacagaacaaagggttactracagcaactaaagaaaactgacaacactatgatccagaaaaatccttaratgctgttaactattccttttttgtgtgtaaatgcacatctcactcaaagaaaacaatgattcattcacataacactcacaataagcacttctgtaaacttcagagacttcgagaccatgaaatcaggttagaaaykaagttacaaatccgtagatgttaagtgcctgttaattcttatcaatggtttcctttgctattttgtatctaacatttgctgagagagtttattaagcagtaggcacaccatgccaaagagcaagcattttcagctcttaaatgcagcacatttgtagcaaaag

SEQ ID NO: 91710 - DNA, 600 bp, Chicken  19866894403639_4
tgatttggttactggwgaaaggtatcagcaaagtagcaacaaggtaactccatcttcaacagtacttcctgaaatgtgatgctctactgttcagctacagaacaaagggttactracagcaactaaagaaaactgacaacactatgatccagaaaaatccttaratgctgttaactattccttttttgtgtgtaaatgcacatctcactcaaagaaaacaatgattcattcacataacactcacaataagcacttctgtaaacttcagagacttcgagaccatgaaatcaggttagaaaykaagttacaaatccgtagatgttaagtgcctgttaattcttatcaatggtttcctttgctattttgtatctaacatttgctgagagagtttattaagcagtaggcacaccatgccaaagagcaagcattttcagctcttaaatgcagcacatttgtagcaaaagagcctctggaagaacaagctgagaggttgggctgtaacagccagcagaacgtgctgccctgcgagggaggtgcttcagcagctcagggaacttgataaatgctgctgggcttgtagctaaagcaactatcctccta

SEQ ID NO: 91711 - DNA, 600 bp, Chicken  19866894403639_5
gatttggttactggwgaaaggtatcagcaaagtagcaacaaggtaactccatcttcaacagtacttcctgaaatgtgatgctctactgttcagctacagaacaaagggttactracagcaactaaagaaaactgacaacactatgatccagaaaaatccttaratgctgttaactattccttttttgtgtgtaaatgcacatctcactcaaagaaaacaatgattcattcacataacactcacaataagcacttctgtaaacttcagagacttcgagaccatgaaatcaggttagaaaykaagttacaaatccgtagatgttaagtgcctgttaattcttatcaatggtttcctttgctattttgtatctaacatttgctgagagagtttattaagcagtaggcacaccatgccaaagagcaagcattttcagctcttaaatgcagcacatttgtagcaaaagagcctctggaagaacaagctgagaggttgggctgtaacagccagcagaacgtgctgccctgcgagggaggtgcttcagcagctcagggaacttgataaatgctgctgggcttgtagctaaagcaactatcctcctat

SEQ ID NO: 91712 - DNA, 600 bp, Chicken  19866894403644_1
tttgggctgaaaaggggggatttcagggttcatttttgggctgaaatggggggactttggggctcctttttgggctgaaatggggggattttggggctctccgtttcccacaggtgttgcatcgccgcccgcagtgccaataaatgcagtgtgtccgtccgaccgcctccgtctgtccgtcctctgcgccgtggggctgccccataagtgtccccccagccccataagtgacccctccagccccatagcgacccatagagacacatagagaccccacagggaccccatagagacacagakactcatagggttgcatagagacccatarggaccaacagtgccccataaagaacacatagagaccccatagggaccaacagtgccccacagaggtcccattgagccccatagcgacccatagagacccatagggaccccatagtgacccattgagacccatagaggcccacagagtcccatagggaccccatacggacccacagagacccatagagactcatagataccccacagagccccacagagcccatagagacccatagggactccatagagacccatagagacccacagggaccc

SEQ ID NO: 91713 - DNA, 600 bp, Chicken  19866894403644_2
ttcatttttgggctgaaatggggggactttggggctcctttttgggctgaaatggggggattttggggctctccgtttcccacaggtgttgcatcgccgcccgcagtgccaataaatgcagtgtgtccgtccgaccgcctccgtctgtccgtcctctgcgccgtggggctgccccataagtgtccccccagccccataagtgacccctccagccccatagcgacccatagagacacatagagaccccacagggaccccatagagacacagakactcatagggttgcatagagacccatarggaccaacagtgccccataaagaacacatagagaccccatagggaccaacagtgccccacagaggtcccattgagccccatagcgacccatagagacccatagggaccccatagtgacccattgagacccatagaggcccacagagtcccatagggaccccatacggacccacagagacccatagagactcatagataccccacagagccccacagagcccatagagacccatagggactccatagagacccatagagacccacagggacccatagtgacccatagagacccatagagac

SEQ ID NO: 91714 - DNA, 600 bp, Chicken  19866894403652_1
cttcttgaagtctgcaggtagctaaaggaagacaaactcattcaaccatttcaactgactcagggaaacagagattttttaatacttcactacatacaatcttaaatttatagagaatagtgaaattgaagatctgttgcggacttacagataatccttttggagacatatactttgcttattatacttctggtcttcatttaccatgcagtcaaagatcccccacatttggctggcttcaaaatgcagagcgtactaaaactactcagcaactgcatcatggttaaagtcttacagcartggtgctgcacagggcagtggttgatggagcaaggaaagaagacctctctaaaaccaaagtgcctcactgaatgaaggtttcatgggaagccagtccaaaggaagccagtctaaagagtctgagctgaacaccctaatctttcaaaattttttatcagggatgtcaacattgtgactcatgtccatattttatatacatgtatgtatgtatatctattttctgttactgctagctaccatgtcttttaataattaagtaagccttccactctgaagggcaactgattgtcacaaaaatta

SEQ ID NO: 91715 - DNA, 600 bp, Chicken  19866894403653_1
ggagcctgcgaccatcccagctagtgcttctttgacttgggggacccccagcatcccccagtcctgagcatccccactgtgtcccctggaaaccagaaggatcctccgaccgtttgaggattcaggcagccacctccctctggagtttctcaggaaactcatttggagcgttttgggttgggcttgtttttattgcagcttttctgaatgggagcaacgatctcttgcaagctctggggttcctctcgtcagccctcccatactgctccaagacctcagtcaccccgtgcagatgcccarcggggatgtgtgctgtgtttgccatacagcagtgtccttttatcaggaggatatctaaggaaagcaaacacatgctggctgaagtctgtgtatctcagagggtgttgcatgatctctgtcaacacccgtgcagcttgctccttcaagatttgctcagctcatgctttcctgctgtgtgtaggagggtttttccccccccccagactcctacatttcataattctgtttgtgctttgaagctctggttgtttttctagcctaaacacagctgcctcccagctggggctgtttgtcgtggca

SEQ ID NO: 91716 - DNA, 600 bp, Chicken  19866894403653_2
ctgtgtatctcagagggtgttgcatgatctctgtcaacacccgtgcagcttgctccttcaagatttgctcagctcatgctttcctgctgtgtgtaggagggtttttccccccccccagactcctacatttcataattctgtttgtgctttgaagctctggttgtttttctagcctaaacacagctgcctcccagctggggctgtttgtcgtggcattggtgtccagagagtatgcaggggggtgggatccacgagcaaagtcccacaggcacatgcctgggtgcaggaaggacataacaygctgtgaacactgacaggacctgcaggacccacagagacaccatgggaatcagcttccccatggaccactcatgcactgatatacaggaaaagcaggaggaaggaggtgtcttggaccagtggctgcttgagcaacttgcagatccttgtataagctgtgtgctgttgttcttccccaggacctgtttggaaagtcagaccccttcttggagttctataaacccggtgacgatgggaaatggatgctggtccacagaacagaggtgagctactgcaacaccgcgatccttagctcagctc

SEQ ID NO: 91717 - DNA, 600 bp, Chicken  19866894403658_1
tgtttaactgttcctgaaataagcatgatgaaaaatacattgtgttttgtccaaaagtttgtagccattttgttgtagggcaagtgtggagggaaattaaaatcaaggaaggctgatgtcagctagagtgtacaaagactgcagtcatgggtagtaatgttcccttaatgatgggcaactgtaataccgacggccctcaacgtcctccttgtgttatagccatgagtcatagatttcttctgacactactagtaggttaggtctgatgaaggtgatgagagacatggaactgttgagacytggacttaaaaagtgggcccagatgatcttaatgagattcaatgaggccaagtataaggttctgcacttgggtctgtgcaatctcacctgtgtacagactgggagaagaactcattgaaagcagccatggagagaaggactagggggtcctggtgaattaaaagctgaatgtgagacaacaggaaacccaactgtatcctgggctgcatcagaagagggttgaccagaagggtgagggaaataactgagggatggaacacctcttctgtgaggacagactgagaaagctgaagctgttag

SEQ ID NO: 91718 - DNA, 580 bp, Chicken  19866894403679_1
gtcatctgttattatctgcatggctataacaccacagtgtcagctgaactaaaaacaattgtatatgacaaaagcgacacacaaacagtgtcagtagcttagacaaatgaaaggaaaaatctcacactcagccctgaaactcctctttattcattccctattacactaacagaacacaactatcagcatttaaatgaatatcatacagcaaaaaggattcccagcaacatgaagagaaactgacatgatttgtggatcatctaaaatcacacaaaaatgcaaaaaaatcaaagcttatgytgttttgcaatttgctatcttctttcatgatctctaaatattaattatttggtttactttgaggtcagatttatttgcaaagccatgctaattttatttgtcaggaaaagagaaaagaaatagatggagataataattcatgtgagaggctaaaataatgcattcaaatatattcatgtgaaattcaataaatagcttaataaaaacaggaggacaagatagtggaaataaaaaacaaaggaaaaaaaaaagctactgaaagcatttaggctttaaatat

SEQ ID NO: 91719 - DNA, 600 bp, Chicken  19866894403683_1
taaatgtacgtctcactaaggcccttgaacataccaaattagttcagatacatatgtaaattttggtttagctttgcagcacatgtaacctagattttttaaaaaatgttatctaacttcaataactatatcatcttacttttgagattttctgaagcacgagtaactcaaaagtattctaaaatatatttcaagtcatccaaaaagaaacttatttgatagctatttaaatattagttcaactgacagtacttcgagataaagataatgggaagaacatacaactgtcaggacttgtgstgtattatgcctgactttcctgctgtaggacacacttgccatggaaagatgcatttctacagatttttgaagccaaagtggatctccctagcaatgtgagcatcatggcaattgttttttatrcgctttgcttcttactgatgtgaatactgaagcacagaggatctataaccaaattgaacagctattgagttgttattattattgaaggatggggtaaaacatcactgatttgtaaatattacgatgggtaactttaaatatcttgtatgttatagatattataggatggaaatacag

SEQ ID NO: 91720 - DNA, 511 bp, Chicken  19866894403683_2
aactatatcatcttacttttgagattttctgaagcacgagtaactcaaaagtattctaaaatatatttcaagtcatccaaaaagaaacttatttgatagctatttaaatattagttcaactgacagtacttcgagataaagataatgggaagaacatacaactgtcaggacttgtgstgtattatgcctgactttcctgctgtaggacacacttgccatggaaagatgcatttctacagatttttgaagccaaagtggatctccctagcaatgtgagcatcatggcaattgttttttatrcgctttgcttcttactgatgtgaatactgaagcacagaggatctataaccaaattgaacagctattgagttgttattattattgaaggatggggtaaaacatcactgatttgtaaatattacgatgggtaactttaaatatcttgtatgttatagatattataggatggaaatacagactggattgcagtgtgctttaattacttctattt

SEQ ID NO: 91721 - DNA, 600 bp, Chicken  19866894403712_1
aatttttctcagtaagtagttcccagtggttcattgaaagaaagtacatggtcaagtgtgattttgcagggctcagctttgaacctggtactattcagtgtatcctttaatcctacagatgaatgaaatgggtatgataacacttgttacatttgcctggcttcccaggagtgcacatacattgcagaacagaatcaaaattcaaccaaatcttgacagactggtgaagtggtctggaaaggattaaatgcaattcaagagagagagctgtgaagtactatgctcaagtaagtataattrtcctcatagatgtgggcttaagtatcacgttttcagaaagagaggctggaggaaaccaaatgagtcagcaacaacacatgaaaacagcagaaaatacacgagctggtgtgatcgaaaacagaggaatgaagtaattctctcgctgtggtcagggtcagcaaggcctctgacaacggagacgccatttgaaagagactatttggtgaaagtcttgtgaagagcaacaagtctgatcagaaggctagaaaactggaaagtaaggaaaaggtaggaggaactgaaatccctttgcttggagga

SEQ ID NO: 91722 - DNA, 600 bp, Chicken  19866894403714_1
tttctatcccaatctggtagatacgttagtgattaattcatggcaactccatgatgctgatacccaaccttgttcaactacatccttacagaatgcagctctgtaatgcagccacctggatttgagatgttaatgggagatgtaatattaaacatgatcttcgcctaatatttcaactatttcgtcagtttggtgttttctcagttaaaacagtgactccacaaacgttctcctaggctgtgtgtggctgtatcatctggtatctatatactagatagatcataagccaaactagagagrgctgtgtggcaggkatggtttgggaatgctgtcatacaatagggaagatactcttgtagaactatgtaccatcaagaaggtgccactgtaatgtcagatagatgcgtgcactataaaagagggtatttattgtgctgccaatcttgccctgctgttcaatggattgacatggcaagggagaagcgtaatgtttatatcaacataatgtcttctcccttttgttccagggaaacagctttcagagctttgatctgaagcttgtgtgggtagatgaaacctgcagggagaaatcagctccgg

SEQ ID NO: 91723 - DNA, 600 bp, Chicken  19866894403714_2
tggtagatacgttagtgattaattcatggcaactccatgatgctgatacccaaccttgttcaactacatccttacagaatgcagctctgtaatgcagccacctggatttgagatgttaatgggagatgtaatattaaacatgatcttcgcctaatatttcaactatttcgtcagtttggtgttttctcagttaaaacagtgactccacaaacgttctcctaggctgtgtgtggctgtatcatctggtatctatatactagatagatcataagccaaactagagagrgctgtgtggcaggkatggtttgggaatgctgtcatacaatagggaagatactcttgtagaactatgtaccatcaagaaggtgccactgtaatgtcagatagatgcgtgcactataaaagagggtatttattgtgctgccaatcttgccctgctgttcaatggattgacatggcaagggagaagcgtaatgtttatatcaacataatgtcttctcccttttgttccagggaaacagctttcagagctttgatctgaagcttgtgtgggtagatgaaacctgcagggagaaatcagctccgggaccgtaagtgggg

SEQ ID NO: 91724 - DNA, 600 bp, Chicken  19866894403715_1
gtctgtatacctgtcctagtgctcttttatcatctagagtttcagctttgggttctctcctaaatttcatgttatacattaatttttactagactagactgatcactgttcagtacccctgaaagtggtattttcagtgattctgtgttgattattgcattgctgacacagagaagtagaatcccactctagtcatggagtcttaaaactttacagtaaattctgtctttcttaccttcactctgtccgcttcatagatttgttacattgctagcaaaatatgaatgcctaaagaaataytatggctgcctattcattatattacacataataggcataaattgctctcartgtagtaagaatggatgtaaaattagtgtaggaagtcatttttcacgagttttaattttgatataaaacgagaaatagaaatstgttttctttgagttaggaagtttatcataaaaatctgtacatgctattgagaacagctatatctatcttttaaaatactttttttttctatgaatttatagtaccttctcaaaaagcattgtgaaaggagcaaaacgtgctgggaagatgacaattggtcgccag

SEQ ID NO: 91725 - DNA, 600 bp, Chicken  19866894403715_2
gttctctcctaaatttcatgttatacattaatttttactagactagactgatcactgttcagtacccctgaaagtggtattttcagtgattctgtgttgattattgcattgctgacacagagaagtagaatcccactctagtcatggagtcttaaaactttacagtaaattctgtctttcttaccttcactctgtccgcttcatagatttgttacattgctagcaaaatatgaatgcctaaagaaataytatggctgcctattcattatattacacataataggcataaattgctctcartgtagtaagaatggatgtaaaattagtgtaggaagtcatttttcacgagttttaattttgatataaaacgagaaatagaaatstgttttctttgagttaggaagtttatcataaaaatctgtacatgctattgagaacagctatatctatcttttaaaatactttttttttctatgaatttatagtaccttctcaaaaagcattgtgaaaggagcaaaacgtgctgggaagatgacaattggtcgccagtatttgttaaagaagaagacgggcacaataatggaagaaagagggaatcgt

SEQ ID NO: 91726 - DNA, 517 bp, Chicken  19866894403715_3
cagtgattctgtgttgattattgcattgctgacacagagaagtagaatcccactctagtcatggagtcttaaaactttacagtaaattctgtctttcttaccttcactctgtccgcttcatagatttgttacattgctagcaaaatatgaatgcctaaagaaataytatggctgcctattcattatattacacataataggcataaattgctctcartgtagtaagaatggatgtaaaattagtgtaggaagtcatttttcacgagttttaattttgatataaaacgagaaatagaaatstgttttctttgagttaggaagtttatcataaaaatctgtacatgctattgagaacagctatatctatcttttaaaatactttttttttctatgaatttatagtaccttctcaaaaagcattgtgaaaggagcaaaacgtgctgggaagatgacaattggtcgccagtatttgttaaagaagaagacgggcacaataatggaagaaagagggaatcgt

SEQ ID NO: 91727 - DNA, 599 bp, Chicken  19866894403716_1
  misc_feature (1)..(34): n is any nucleotide
nnnnnnnnnnnnnnnnnnnnnnnnnnnnnnnnnnttatggatactgctttacattaacttcaaaattaatagtgatgtacaccaaaatttacatttttgagagacaaaaaatgaataaaaaaacttaacagatcaagtggaacttaaacagcagaaagatcattgctgaatatcagtggaggacaaaaaccttacaacaacatacaactacttaaaaagatgcattacttaatatttgtattgttcgatgaaatgtaccgaaatcaagcgtaagtctgtttgtaataaaaaatgttctayagttttaagaagtgcttaatataaagcaactacagtaaaaacagtttacctttttctttttctgaagcacgtgattaggtagcagttgatgaagttgcttacgtttcacatgccttgcagcaatcttcatatccatctcaaacatcttgctgtttattgcttgcctataaactacacaattagaacataaatatgtattgaagtatattgcaaagtccacttatttgcccagaaagaaattatttgtattacagaatgtctgtcaccctcaagaacaccctctgaagaaaaaagtgaac

SEQ ID NO: 91728 - DNA, 600 bp, Chicken  19866894403732_1
agaaaggctcctgctctgctccagcagctggccatagggacacagaatcagccaagctactcaaagtgggccatgctgctacccaaaccgacccatcatgtgaaacacaccgctggggctgacatctctcaggggatccctctttgcaggctccggtgggtgagctgaagtttgtgtcacagtgccgagccaggggactgggtgcctgcatgggcagagacacacatgagacaaagcatgctgagacacagcagtgtcacagctcatggtgagatgcaaggacattaccctgcctggcaygtcttaagtttagaggtgctcctacagagctgccttcmctctctgttatagagtcccagaccaaactgaccagcsttggctactggctctccccattccccartcccacccacacagctgctttctgcaggacacctctcccacagaggacgtctgaaatgagaaggaagccttacccagagctgtctgcacttgctgccttgtcctgcagggcagctgcctgtgctgctgctcccgtggaggtggctggctggctgcaagcaaagagcatcacatgtggtaaagccaaggagacaatga

SEQ ID NO: 91729 - DNA, 600 bp, Chicken  19866894403732_2
gacacagaatcagccaagctactcaaagtgggccatgctgctacccaaaccgacccatcatgtgaaacacaccgctggggctgacatctctcaggggatccctctttgcaggctccggtgggtgagctgaagtttgtgtcacagtgccgagccaggggactgggtgcctgcatgggcagagacacacatgagacaaagcatgctgagacacagcagtgtcacagctcatggtgagatgcaaggacattaccctgcctggcaygtcttaagtttagaggtgctcctacagagctgccttcmctctctgttatagagtcccagaccaaactgaccagcsttggctactggctctccccattccccartcccacccacacagctgctttctgcaggacacctctcccacagaggacgtctgaaatgagaaggaagccttacccagagctgtctgcacttgctgccttgtcctgcagggcagctgcctgtgctgctgctcccgtggaggtggctggctggctgcaagcaaagagcatcacatgtggtaaagccaaggagacaatgaaagacgagatcctttccctcaataccacatgaatgaaa

SEQ ID NO: 91730 - DNA, 600 bp, Chicken  19866894403732_3
ctgctacccaaaccgacccatcatgtgaaacacaccgctggggctgacatctctcaggggatccctctttgcaggctccggtgggtgagctgaagtttgtgtcacagtgccgagccaggggactgggtgcctgcatgggcagagacacacatgagacaaagcatgctgagacacagcagtgtcacagctcatggtgagatgcaaggacattaccctgcctggcaygtcttaagtttagaggtgctcctacagagctgccttcmctctctgttatagagtcccagaccaaactgaccagcsttggctactggctctccccattccccartcccacccacacagctgctttctgcaggacacctctcccacagaggacgtctgaaatgagaaggaagccttacccagagctgtctgcacttgctgccttgtcctgcagggcagctgcctgtgctgctgctcccgtggaggtggctggctggctgcaagcaaagagcatcacatgtggtaaagccaaggagacaatgaaagacgagatcctttccctcaataccacatgaatgaaagcctctgaacctctgagcctctgagctgtggcaggat

SEQ ID NO: 91731 - DNA, 600 bp, Chicken  19866894403732_4
aacacaccgctggggctgacatctctcaggggatccctctttgcaggctccggtgggtgagctgaagtttgtgtcacagtgccgagccaggggactgggtgcctgcatgggcagagacacacatgagacaaagcatgctgagacacagcagtgtcacagctcatggtgagatgcaaggacattaccctgcctggcaygtcttaagtttagaggtgctcctacagagctgccttcmctctctgttatagagtcccagaccaaactgaccagcsttggctactggctctccccattccccartcccacccacacagctgctttctgcaggacacctctcccacagaggacgtctgaaatgagaaggaagccttacccagagctgtctgcacttgctgccttgtcctgcagggcagctgcctgtgctgctgctcccgtggaggtggctggctggctgcaagcaaagagcatcacatgtggtaaagccaaggagacaatgaaagacgagatcctttccctcaataccacatgaatgaaagcctctgaacctctgagcctctgagctgtggcaggattcagccttctggctgcaaaggaatccca

SEQ ID NO: 91732 - DNA, 600 bp, Chicken  19866894403739_1
aagaaaataataaatccagacgcactatgtcttagagaaatgacttagtacttttaccagaggttgatagttctgcctctcatctccactgcataatcaaaaagtaatttccatccctcccttttcagcatttctacaagcatcaacacataggaaaggatcccaggagcacgtccctcctggctgttttagcacatataagtacaagcaagaggaggactaatatcggttgactaacttcatgcatctgcctgctcagttcattgtaaattaatttattgagattgcactagagagcakggatcctgtgcactagagatcacttcaattctgtccaaaataattccactggtattactatttcttattttcaatttttcttgaggtctgaaagttctgtttcaaaatgttcagataattgctttaggtctagaatgactagatagattactagcattttaaattcaaaactcaaccagaaacaataaatatattttcttataagcagggttttgtgattccatgatttgtcaagtttatcttagcttaccatgcttctctacattcaacacacttactaaacaggcattttttgtactc

SEQ ID NO: 91733 - DNA, 599 bp, Chicken  19866894403747_1
  misc_feature (1)..(53): n is any nucleotide
nnnnnnnnnnnnnnnnnnnnnnnnnnnnnnnnnnnnnnnnnnnnnnnnnnnnnagaaaagtagaaagagagaatcatatttctttcacaaaggtgtacggaaactattgagtcatggcttgaaccactggttgatcacctggggaaaggaccaacacagccctgggagcacaggtgaaggcaatttacctgtgtgactggaaggggtggagcctggcaagatccctcctctgtggagttttttcccatgagcttaggtccttggagatgggtgagcatttctttcctgtttgtccttttkccattctattcctgtattgcctttccactgcactaatctttctgattgtaacaaaaggaaatgtgctcattaatgagaatattttacaatcttaaatattcatgaagaatttgagactaagctgtacccttactcctttccagagtaaaagcattagatatctgggtaatcttccaaattgatttttagcatttttagtgatgccagactgatttcttcctttggttctcagagagcatttccaatgtgcttaacagacgtaaaccagatgcttttggacaaacaatttcagaaatact

SEQ ID NO: 91734 - DNA, 377 bp, Chicken  19866894403747_2
attcctgtattgcctttccactgcactaatctttctgattgtaacaaaaggaaatgtgctcattaatgagaatattttacaatcttaaatattcatgaagaatttgagactaagctgtacccttactcctttccagagtaaaagcattagatatctgggtaatcttccaaattgatttttagcatttttagtgatgccagactgatttcttcctttggttctcagagagcatttccaatgtgcttaacagacgtaaaccagatgcttttggacaaacaatttcagaaatactacactcaytccctcagttgaagcaattaaattcctctctgctctttggagaatagtattacagaaccatttccttcttcctttta

SEQ ID NO: 91735 - DNA, 600 bp, Chicken  19866894403748_1
ggttacttgccagacatcccatctgggctgggaaataaaacaactggtaagcggtggcacagagagcagcctccacataaaatttagatctcagaatgatacagctggagaaatactctgaggggggaaaaaaaggaagaaaaaagatggtagcaaaaatcgccatcagcttgttagtaacataagatagagtggtttggattataattcattcaagtcatgtctgtcatgttcatcacatccgaattcagtacaatctgacccaaacatctaaagtcacaaatgaataaatatttattrcacagaartggagatctcacctgagaggtctcgtaattgaataatctacagggtaagaggttgacaagagaaatggaaatcaaaatcatatggcaagtggaagtcccaagggagagacatgccttacaagatgaaaaaggagaggaaaccaggagtagagacctggtgaaggcaacaggaatgcaagggtgtccaaaagagaagccatacttgcagaagcatgacaagactagggagaaagataccgtgcaattaaaactatccacgaaagatctgaaaaggagtcctttggataaagct

SEQ ID NO: 91736 - DNA, 600 bp, Chicken  19866894403748_2
gccagacatcccatctgggctgggaaataaaacaactggtaagcggtggcacagagagcagcctccacataaaatttagatctcagaatgatacagctggagaaatactctgaggggggaaaaaaaggaagaaaaaagatggtagcaaaaatcgccatcagcttgttagtaacataagatagagtggtttggattataattcattcaagtcatgtctgtcatgttcatcacatccgaattcagtacaatctgacccaaacatctaaagtcacaaatgaataaatatttattrcacagaartggagatctcacctgagaggtctcgtaattgaataatctacagggtaagaggttgacaagagaaatggaaatcaaaatcatatggcaagtggaagtcccaagggagagacatgccttacaagatgaaaaaggagaggaaaccaggagtagagacctggtgaaggcaacaggaatgcaagggtgtccaaaagagaagccatacttgcagaagcatgacaagactagggagaaagataccgtgcaattaaaactatccacgaaagatctgaaaaggagtcctttggataaagctagacatag

SEQ ID NO: 91737 - DNA, 533 bp, Chicken  19866894403764_1
ttcaggagaagctgtccatgaataaaactacaatccccatactctttcccatataatgaattgagcgaccatctccctagacatagacatgcctatcagggtgtagcattatatttcataaaaacgctgtaacagaaaattattaggaccaatcatttctgatttttgacaacataataacaaagtcataaagaccttcccagtaacaagaaaacactgccaagtaccctcttttctgcattcaacatcttagatttggacttctctatgatcaaaagagcacccatgttttcaaaatcycagctgcaggagccagtctgcaaaggatgctgacagcaggagcaggcatggtcgggcacagaaatatcaagaagaggtggcactagaatggggggtaaatgttaataaatatgggacaagattaagggctgggtgaaaggaaatttggaataaggaaatgtgaggcagcaggtaacctggcaaacgagagtgataatgagagatataagaatactgcaaggcagccctctgga

SEQ ID NO: 91738 - DNA, 487 bp, Chicken  19866894403769_1
ctcagaactctgctttggctgttttgctttgttttattgtttgggttttttttttaatttgttttttttctcactgatgcttaatcagatgttccactttaacttgatacgtgaaaaaataacaaagtgcagatgttttaaagattttgtttccaataaatagtttttcagtcaagtgcattagctggttttaagcctttgttactgagataatttttcactgatgcagaacatcttctgtacttctcctcttaaaaaatggttactcttacagcatttatttcctgcatctgggtaacrttttttttctccattctagttatattcagttttctgatattttttttccttttttttttcccttagagcagcacattataatcagtttccatgaggagacatwtacattttctaagagcttaaggctaccttgcagtacacacagcatcttagttctctactacaacaacaaaaaagaaactttaaa

SEQ ID NO: 91739 - DNA, 384 bp, Chicken  19866894403769_2
ttgatacgtgaaaaaataacaaagtgcagatgttttaaagattttgtttccaataaatagtttttcagtcaagtgcattagctggttttaagcctttgttactgagataatttttcactgatgcagaacatcttctgtacttctcctcttaaaaaatggttactcttacagcatttatttcctgcatctgggtaacrttttttttctccattctagttatattcagttttctgatattttttttccttttttttttcccttagagcagcacattataatcagtttccatgaggagacatwtacattttctaagagcttaaggctaccttgcagtacacacagcatcttagttctctactacaacaacaaaaaagaaactttaaa

SEQ ID NO: 91740 - DNA, 599 bp, Chicken  19866894403774_1
  misc_feature (1)..(126): n is any nucleotide
nnnnnnnnnnnnnnnnnnnnnnnnnnnnnnnnnnnnnnnnnnnnnnnnnnnnnnnnnnnnnnnnnnnnnnnnnnnnnnnnnnnnnnnnnnnnnnnnnnnnnnnnnnnnnnnnnnnnnnnnnnnnnngactcccacccccagccggtcccatgctgagctggcacagccccgtgttatttgcagcgacccacagagcacagctctgcatgtggtgcagtgacaggcagcactcagctgacggtgctaccgatgctcctttgactgcagagatggcacagctggagcactgtgcacacacaygagcaccatgcacacacaccggcaccatgccaatacacacaagcaccaagcaaacacacacacacaaacactatgcacacacacacaagctcaggccaaaggctcacaggcagctcagcccctyctgggggagcactgcagacatgggatgaggagcaactgtgccttttgcatgggacccgagggaagtgcctgggtgccccttgctgcactttgcccagcagcagctgcagagcagagcactgccctggacccaggagagcgcagaccattaccccacatccatcatccctgcgtcc

SEQ ID NO: 91741 - DNA, 599 bp, Chicken  19866894403774_2
  misc_feature (1)..(2): n is any nucleotide
nngactcccacccccagccggtcccatgctgagctggcacagccccgtgttatttgcagcgacccacagagcacagctctgcatgtggtgcagtgacaggcagcactcagctgacggtgctaccgatgctcctttgactgcagagatggcacagctggagcactgtgcacacacaygagcaccatgcacacacaccggcaccatgccaatacacacaagcaccaagcaaacacacacacacaaacactatgcacacacacacaagctcaggccaaaggctcacaggcagctcagcccctyctgggggagcactgcagacatgggatgaggagcaactgtgccttttgcatgggacccgagggaagtgcctgggtgccccttgctgcactttgcccagcagcagctgcagagcagagcactgccctggacccaggagagcgcagaccattaccccacatccatcatccctgcgtccattacatgtcgtgcccatcaccccaccatttagctaatcaatgcagcagcccatggcagggacagctgaggccgcgtgctggctgcagtcaggagcccaacctgggacccactgagcaggttga

SEQ ID NO: 91742 - DNA, 599 bp, Chicken  19866894403782_1
  misc_feature (1)..(152): n is any nucleotide
nnnnnnnnnnnnnnnnnnnnnnnnnnnnnnnnnnnnnnnnnnnnnnnnnnnnnnnnnnnnnnnnnnnnnnnnnnnnnnnnnnnnnnnnnnnnnnnnnnnnnnnnnnnnnnnnnnnnnnnnnnnnnnnnnnnnnnnnnnnnnnnnnnnnnnnnacaaatgacagagctttcttttaaagtacttcataaatgaagactgtgcagttacttttggtggaacattgttttttccactaagtttgccattcctcagttatatctgaagcaactgaaacacgttaatatgataaaatattatttkwtttgacattctctgtgataaccttgaatkcagggaggataactcaagcagatactggagtctgtctgttatttacttactgtgttgtatattctaaaacttgtttccttctccccctagggtgacattccttgggacgtcagggagttccgtatgtacgtagtgggaagttcatttttctggacgatggttgtgtattacttcttcttcagggtccctgggagagaaatcacctggaaagactttgttaataactacctttctaaaggagtggtgagtagtagggaatcaaaatgaca

SEQ ID NO: 91743 - DNA, 599 bp, Chicken  19866894403782_2
  misc_feature (1)..(151): n is any nucleotide
nnnnnnnnnnnnnnnnnnnnnnnnnnnnnnnnnnnnnnnnnnnnnnnnnnnnnnnnnnnnnnnnnnnnnnnnnnnnnnnnnnnnnnnnnnnnnnnnnnnnnnnnnnnnnnnnnnnnnnnnnnnnnnnnnnnnnnnnnnnnnnnnnnnnnnnacaaatgacagagctttcttttaaagtacttcataaatgaagactgtgcagttacttttggtggaacattgttttttccactaagtttgccattcctcagttatatctgaagcaactgaaacacgttaatatgataaaatattatttkwtttgacattctctgtgataaccttgaatkcagggaggataactcaagcagatactggagtctgtctgttatttacttactgtgttgtatattctaaaacttgtttccttctccccctagggtgacattccttgggacgtcagggagttccgtatgtacgtagtgggaagttcatttttctggacgatggttgtgtattacttcttcttcagggtccctgggagagaaatcacctggaaagactttgttaataactacctttctaaaggagtggtgagtagtagggaatcaaaatgacaa

SEQ ID NO: 91744 - DNA, 599 bp, Chicken  19866894403782_3
  misc_feature (1)..(122): n is any nucleotide
nnnnnnnnnnnnnnnnnnnnnnnnnnnnnnnnnnnnnnnnnnnnnnnnnnnnnnnnnnnnnnnnnnnnnnnnnnnnnnnnnnnnnnnnnnnnnnnnnnnnnnnnnnnnnnnnnnnnnnnnnnacaaatgacagagctttcttttaaagtacttcataaatgaagactgtgcagttacttttggtggaacattgttttttccactaagtttgccattcctcagttatatctgaagcaactgaaacacgttaatatgataaaatattatttkwtttgacattctctgtgataaccttgaatkcagggaggataactcaagcagatactggagtctgtctgttatttacttactgtgttgtatattctaaaacttgtttccttctccccctagggtgacattccttgggacgtcagggagttccgtatgtacgtagtgggaagttcatttttctggacgatggttgtgtattacttcttcttcagggtccctgggagagaaatcacctggaaagactttgttaataactacctttctaaaggagtggtgagtagtagggaatcaaaatgacaaatcagtgtgctgaaggcgctcctttctgc

SEQ ID NO: 91745 - DNA, 600 bp, Chicken  19866894403782_4
tattacttcttcttcagggtccctgggagagaaatcacctggaaagactttgttaataactacctttctaaaggagtggtgagtagtagggaatcaaaatgacaaatcagtgtgctgaaggcgctcctttctgcctccctgcttatgtttgtacttttgtagctgtgcagtgagaactagctcaagagaaagcaattagttttcatcttcatcagttccttgtctgatgttccgagtggttgtatgaaggcttgtgtcagttcaagaaaacagaggaaatggacaactcagagtagagawtctcagttgaacagctaacgtttctcctagttcagaggcagtgtagcttcagtgtcttggggtggatttacagttgatttaatgatttaagcacatrtgccaggtgccctcaggagaaacttattcctaaccctgaatgcttccagtagccycactggggttgggaggacttctgcttttcatttcttctataagtagatcaccagggatctgagtagcagtggtgctaacagaagggtgagggtgggaaatgaaagaatcccttttaggagcagtgaattgrcttaaccatattataaa

SEQ ID NO: 91746 - DNA, 600 bp, Chicken  19866894403782_5
aatgacaaatcagtgtgctgaaggcgctcctttctgcctccctgcttatgtttgtacttttgtagctgtgcagtgagaactagctcaagagaaagcaattagttttcatcttcatcagttccttgtctgatgttccgagtggttgtatgaaggcttgtgtcagttcaagaaaacagaggaaatggacaactcagagtagagawtctcagttgaacagctaacgtttctcctagttcagaggcagtgtagcttcagtgtcttggggtggatttacagttgatttaatgatttaagcacatrtgccaggtgccctcaggagaaacttattcctaaccctgaatgcttccagtagccycactggggttgggaggacttctgcttttcatttcttctataagtagatcaccagggatctgagtagcagtggtgctaacagaagggtgagggtgggaaatgaaagaatcccttttaggagcagtgaattgrcttaaccatattataaaatagtctcctttacttgttttctccttttatttcttctttccttcttatgtagagctacttctggagcagtcaattctgtcatcagtgtcctatctc

SEQ ID NO: 91747 - DNA, 571 bp, Chicken  19866894403782_6
acttttgtagctgtgcagtgagaactagctcaagagaaagcaattagttttcatcttcatcagttccttgtctgatgttccgagtggttgtatgaaggcttgtgtcagttcaagaaaacagaggaaatggacaactcagagtagagawtctcagttgaacagctaacgtttctcctagttcagaggcagtgtagcttcagtgtcttggggtggatttacagttgatttaatgatttaagcacatrtgccaggtgccctcaggagaaacttattcctaaccctgaatgcttccagtagccycactggggttgggaggacttctgcttttcatttcttctataagtagatcaccagggatctgagtagcagtggtgctaacagaagggtgagggtgggaaatgaaagaatcccttttaggagcagtgaattgrcttaaccatattataaaatagtctcctttacttgttttctccttttatttcttctttccttcttatgtagagctacttctggagcagtcaattctgtcatcagtgtcctatctctctgtttaacttgacatctttctaca

SEQ ID NO: 91748 - DNA, 440 bp, Chicken  19866894403782_7
caactcagagtagagawtctcagttgaacagctaacgtttctcctagttcagaggcagtgtagcttcagtgtcttggggtggatttacagttgatttaatgatttaagcacatrtgccaggtgccctcaggagaaacttattcctaaccctgaatgcttccagtagccycactggggttgggaggacttctgcttttcatttcttctataagtagatcaccagggatctgagtagcagtggtgctaacagaagggtgagggtgggaaatgaaagaatcccttttaggagcagtgaattgrcttaaccatattataaaatagtctcctttacttgttttctccttttatttcttctttccttcttatgtagagctacttctggagcagtcaattctgtcatcagtgtcctatctctctgtttaacttgacatctttctaca

SEQ ID NO: 91749 - DNA, 600 bp, Chicken  19866894403783_1
aactactattaaatattgtatttgaaaagcaccgtacccctcgaaagaactggttgctggcagaccaaaatagaaatgggagagctcaaaacccctttgctcttcacagaacagcctgggtagaaaaggaccacaacgatcattgagtttcaaccccctgctatgtgcaggatcgccaaccaccagaccaggctgcccagagccacatccagcctggccttgaatgcctccagggatggggcatccacagcctccttgggcaacctgttccactgcatcaccaccctctgtgctcttgcrgaattatatcacactagaaaaaaagcacagtatacaaatgaactcacacagcatcccaacattaatcagtagacaaaaaaattcaatcacaactgtgatttatataaattcatctttaatcagtactttgagcagttttattctcactccagcgatgattacaagaaaattaagatgtgtttttattactgagatgtataaacgatcttggacaatgcaatgaacagccagctagttggacaaagtactaagaaggcaataactcacattggcttgcacaacaatgtagcacatattcct

SEQ ID NO: 91750 - DNA, 600 bp, Chicken  19866894403784_1
gcccgttcccagttcaggtttgtatggtttcacatgtttgttctgatgtggaataagtccatctcacctgtttcccaaaaggcagatgcagtaagcgtaggcagctcagacgtttcgtatcagcaatactatctgagatgccctatgggagatgtttgtgcccttcccaggcagtgttaaggagcgtggtgggactgcctgaggaaagctttccttgtgctgcctgcacagcactgctcccaggaattcactgggatctgtgcggtgaaaacctgtattgctttaaatatccagcactgsagaacgtgttggggtgcaaggctgatgatttcatcctgtggtgtttgtggagctgttccctggatttaccggtgccgctgctgtgaggtttggacaggggctgcctggggctggtggacaactttcctttttgagcatcagccacgtgacccagctggtccacgcagtggggctggtaagatctgcagggtgcttggaggtggtttataaattttgcacgttttcaaaagtactttccagccatccaagcagtgtaccgaaataaccaactgcaaaactataaaaagcagcaagtgcttg

SEQ ID NO: 91751 - DNA, 600 bp, Chicken  19866894403787_1
agagcagtctagcagtactaataccccacagaaactcagtgttggggaaatacagagaaagatattgacatgcggaatcaaactctataacccagttaggttataaagcatctatgtttattcagcctaccgggtgcaagggggaccactccaccaaacttgcaaaccagcaagttcaaaaatgctacaggtttgtaagccaagtccatacttattcagcagaattcttgtagcccatctacatattcattgcataattccagaaattcatttatatacttcccctcccctggcacatgygttgtccgtagtaggggtctccctctggtggtcgtggggatgaagtcagaagtcttcctcgtgaaggctcaacatcttcctcagtctgacctttttacggtgcattcaaaccagtcaaagccattcattttgtattgttcctttctttgtgtttgcacagctgaccatgaaatgttgagatgttgttctccttccctagtttctaaagctagcttatttaacccctatatgttcaaaccctagacccacctgagctcctgacctcaatattatcactcacacaacggcagacagccacac

SEQ ID NO: 91752 - DNA, 599 bp, Chicken  19866894403794_1
  misc_feature (1)..(77): n is any nucleotide
nnnnnnnnnnnnnnnnnnnnnnnnnnnnnnnnnnnnnnnnnnnnnnnnnnnnnnnnnnnnnnnnnnnnnnnnnnnnnttaaattgagcagagcaagagaaacaaggcaggtgggagcatcttctgttttgcccatctactgtggaaaatattcagtgccgcctgtgggtgagaagaggagccactactctgggccaaatcaaagggcagtccaggaaatatcccctggctcttaacaagaataagcattaaagaaaaaaataaaaagaaagaaaatatgtaaagacccttcacctgattmactctcctggtttcccacagtcagccaagcaacctgctatgtctctgcagagataagcaattcaagggagtgggcctcttctcccaggtaactagtgatagaacaagaggtaatggcctcaagctgtaccaggggaggtttaggaaggatatgaggaaacatttcttctcagaaagagcattggaaggcactggctcaggctgcccagggaggtggtggagtcaccatcccttgaggtgttcaaggaaagggcagatgtagcactgagaaaaacatgcttagtgggcatggtggggatg

SEQ ID NO: 91753 - DNA, 600 bp, Chicken  19866894403794_2
tatgtctctgcagagataagcaattcaagggagtgggcctcttctcccaggtaactagtgatagaacaagaggtaatggcctcaagctgtaccaggggaggtttaggaaggatatgaggaaacatttcttctcagaaagagcattggaaggcactggctcaggctgcccagggaggtggtggagtcaccatcccttgaggtgttcaaggaaagggcagatgtagcactgagaaaaacatgcttagtgggcatggtggggatggatcaatggttggactttgccaatcttaatgattctaygattctaagagcaggcttcagctggtgtcagctgcagcctgttgacgttatggacttgttccattttccatcagcaaattgtctccttcttctccccctctgctctctcacaagttttctgatccccagtatataagatatccattgagaaagtgggtttagttcagctagggctgtgtcatgctatgacagtggcttgtgtctacatcaccagggctacgacagagaacatcagacctgggaaagctttttcctggcatgttacgtagatactggcttgttccttcaagatgaaccatt

SEQ ID NO: 91754 - DNA, 600 bp, Chicken  19866894403802_1
atggaaattagtttaataaatgggaattttttttcagttgcaaccacagtagacagaaatggagaagtaataaatcttgtctatccctgaagaaaactttctagtattctgggaaccctttgcacatttagccaccatgcttgtgtttgcagtggagacataaaccctaaacattacctagctgtttgctggacttaaatatacatttttgaaggaaaactcaggtaaggattagccccagttattacttcctcagcctgactgaaacatggtcaagcctttttcagagtcaaatcttcyccagggaaagtccacattattcattctttcctcttcatgggtactctgacagccttatcaacaaggatttcttccaggttactgcacagtgagcacacaagtaacacaccatgctaaaaatagttttgtattctaattgcaatgtatttatccattggccagcatttgctccatctgatctgcaccatgttgacctttgaattttctgcattctcaatcaaatgcttcaaggaaaagaattatagcattaggtataagatatcaaaaaatcctgcgggatgataacaatggtccacttat

SEQ ID NO: 91755 - DNA, 600 bp, Chicken  19866894403817_1
gataaaatttatttggcaaaaaatggtcaaaaatacaatcctgatattggactctgtcaagaaaggcataataatttgtttgcttgttagtttgctttaatattaccctcatccttagcaaaaccagcactgaaaactgaatgcaaaaagtattatataagatctatgtaaaagaattgttttaactatatgtttggaatcaagtttcgtgtttcattagaatgaattgcttcataatcttccccaaactgagtacctcttagtagtagttggttatcactttctttctcttttcatccrctctgcaactgtttaaagcacagctaaaacaccagctgtgttttacagaccatcttgtactgaagtaataaaatgaagagatacgtcattaatattatttaataatttcttatggtattattacaaatgtgatttgtaaaacaaatacgtttgaagagaggtgagaaataggaatgatagttattggaagcgaagacttgaactcatttatttgctctcacagctgctgaaaataaattaatacaaaaaatggaaaaggttgttcagaactgcctaaatggaaaacatactgattcaaat

SEQ ID NO: 91756 - DNA, 600 bp, Chicken  19866894403830_1
tgggagaagtacagcgtgtccagcacagttacagcaatagaaaaatgcaggaatatacatttgttgaagatgttaaaattatcggtgttatttttgcaaaagcaatgccctgacctgaagcaacaagggtcacagactcagagaaaagattatctcctgctgcgctgtcagtaccccgtccttcggcttttgtggctttcattccttccatgaaggcctgaagcctgggacaagtctgagactgggcaagttctgtttcatcctgttgtttgtctggaaaaacatctctcttgttccacrcascaaacacatgcacagcagcctttaattcagcaagctctctgagctgcctatttcagtcagatgatcctgctagtaatgccaaatcttatttgtttggggatttttacttataatgctcctatttaattaatatgttgacaaacaatcttccacatttaattgcttccaaaggcggaaatttaatcatgtgtactcgttctgtttcttaaactgcagtgctctggcagagcacacttctgacatatgtgcatggaacaaactccttttgattaaagttattctggatatctaccattt

SEQ ID NO: 91757 - DNA, 600 bp, Chicken  19866894403830_2
gagaagtacagcgtgtccagcacagttacagcaatagaaaaatgcaggaatatacatttgttgaagatgttaaaattatcggtgttatttttgcaaaagcaatgccctgacctgaagcaacaagggtcacagactcagagaaaagattatctcctgctgcgctgtcagtaccccgtccttcggcttttgtggctttcattccttccatgaaggcctgaagcctgggacaagtctgagactgggcaagttctgtttcatcctgttgtttgtctggaaaaacatctctcttgttccacrcascaaacacatgcacagcagcctttaattcagcaagctctctgagctgcctatttcagtcagatgatcctgctagtaatgccaaatcttatttgtttggggatttttacttataatgctcctatttaattaatatgttgacaaacaatcttccacatttaattgcttccaaaggcggaaatttaatcatgtgtactcgttctgtttcttaaactgcagtgctctggcagagcacacttctgacatatgtgcatggaacaaactccttttgattaaagttattctggatatctaccatttaaa

SEQ ID NO: 91758 - DNA, 600 bp, Chicken  19866894403831_1
ctaagaaatccttaaaatcgtgatgacacactttgttctctgcattgtgtgagaaaacaacagggatttgcatataaataaaggcactgaaagtgactggctgtaaagttattagcatgcccaatacacaagataattgcagagatggacagagagattaagcaacttgttcagctctgtatcatggaaaaaccctagaagaaagctcacttttgaccctcaatcttaccggtagactaactattctgatgaatttatttccacaaaaactatatttcttgtttttaaaatgaattgtgrgaggctgaataagcttggtcaaactgggaagttaataaatacataggaattttttaatagacagcgactagatttctgtcttaataagattaaaataagcaataaaactgtcaaatactgtcaccggtagcacatgagatttcaggtaatggcagcaaaatgtagcaataataaaatgcagtcaaagctccaacaatgaacaaatgctcatgtgtaacaattttaaagaaaatttgcatttttaagaccagatcctttattacttaggcctgtttgcaatagcaaagcaggaggagctga

SEQ ID NO: 91759 - DNA, 599 bp, Chicken  19866894403836_1
  misc_feature (1)..(16): n is any nucleotide
nnnnnnnnnnnnnnnnattgcctggaataaggatttcatccagtgctgctggctcagactcttttcagacttctctctctctttaaaaataaatgtgtgtgtatgaaaagcacttgtaattatcatatagtgcagcacattagtacagatatagctacagtcctgtcactttgtagtgataatagtatattgttgggtgttgcatttctcctataatgacagccctaaaggagcgttaatgcctggcagcctgcatgcacagatacactgttattttactacaaatctgagggtaaatayaacaaattcatggcatgtaccatgtacacagttggattagaggacagtacacagggatgccaagcaaaccctgccagctgagctgagggcaaggggaaaccccacttttcctgggtgatccttctccagacctcaggggctgtgggagccgagggtaatatgtgcagtcaggggtcaatgatgtggcatccagaaatatgggaaaccacaaatatcttctgcattcctcaaacacatgcattcctsctcatacaaaggccctgggtctgtgttaaggatggggacgcagcatggaaata

SEQ ID NO: 91760 - DNA, 600 bp, Chicken  19866894403836_2
cagcctgcatgcacagatacactgttattttactacaaatctgagggtaaatayaacaaattcatggcatgtaccatgtacacagttggattagaggacagtacacagggatgccaagcaaaccctgccagctgagctgagggcaaggggaaaccccacttttcctgggtgatccttctccagacctcaggggctgtgggagccgagggtaatatgtgcagtcaggggtcaatgatgtggcatccagaaatatgggaaaccacaaatatcttctgcattcctcaaacacatgcattcctsctcatacaaaggccctgggtctgtgttaaggatggggacgcagcatggaaatagaaattgaattgatgctggaagcgaacaggagggaaagagcagcctatgcatgggcacagcacagctgctgggcttcgctgagcccctcactccactcactctgcatctgtccctctgcaatggggcattggggcagacagagaggacactgcccgacctgggtgcctccttccagcctggctcaaaaaggagcctcttggacatcccacctcagtgctagaaattttacatttagacagactgtga

SEQ ID NO: 91761 - DNA, 600 bp, Chicken  19866894403838_1
agtctgaagcatgaataatatgttgaagggttcagaacatgtcaaatacagacatttaaagccaccacagtggtttgaggcaggctgataatgatactctaaatcctctggctttggaaagtatcataaagctctttgccttaagcttgtcattataagggggttctgtcaatatactgatgtttgaacagtggtctcaacttcttggtaacttttttttttcctccctcaaatgaactcatttaacagatgggtttctattttaaatcttgcaaacaaatatatcatttcaaaaatctmggcttgaaggtccmattgtctgtcactaacacaaaatcacattcttattacagttaaaaaagaaaacaccaccaaaacctattacttttaagttatttgacagtgtccttgttatcatggtacctaacttaaaaaaacataaaattggttgaagcacattctggcaaataatttatgaaaataattttgaagcagcgaaatccttcaaaagcaaattaatctgcttgacaaagaacatccttctagaactgccaccttattccaaccactgtatctctcttacatagtaagaagtagacc

SEQ ID NO: 91762 - DNA, 600 bp, Chicken  19866894403838_2
ataatatgttgaagggttcagaacatgtcaaatacagacatttaaagccaccacagtggtttgaggcaggctgataatgatactctaaatcctctggctttggaaagtatcataaagctctttgccttaagcttgtcattataagggggttctgtcaatatactgatgtttgaacagtggtctcaacttcttggtaacttttttttttcctccctcaaatgaactcatttaacagatgggtttctattttaaatcttgcaaacaaatatatcatttcaaaaatctmggcttgaaggtccmattgtctgtcactaacacaaaatcacattcttattacagttaaaaaagaaaacaccaccaaaacctattacttttaagttatttgacagtgtccttgttatcatggtacctaacttaaaaaaacataaaattggttgaagcacattctggcaaataatttatgaaaataattttgaagcagcgaaatccttcaaaagcaaattaatctgcttgacaaagaacatccttctagaactgccaccttattccaaccactgtatctctcttacatagtaagaagtagaccgccactacaatttc

SEQ ID NO: 91763 - DNA, 600 bp, Chicken  19866894403845_1
ttaaaatttattcttcttagctgaggagtcaaaaatttgtcttttcgttcactgtgtttattgtcacattaaagaattggtgcttacaggcagaagactgagttacaggtaaaatacaacatttttttttcaaaatgtttatgttccccatctactccgacaatcacatttgcgagccttcaaacattccaggtttatatagcatggctcttactttttctcaaagtagatgatgtttactcaggtattgtggctgtgagcttttgctcttgtaatataagtgtcccattcaaaaaggcwtacatatccacgagttgtttaatgaggtactatggactctaattggttagaataattccctattcattaaatrcatacccaaactaaatgaaataacttagtgaggccagtagattttatagtagtgctaagccagaaataaatgtagtgtatgttatgttagtcagtttacatgatttagtcaagttaggaagcacatctgtaagtgaatattttcctcactttaccaatctaaactaaatcccaggaaaacatgtataayataaatgtcaggtgcttaacamttctgtgtcaatttct

SEQ ID NO: 91764 - DNA, 600 bp, Chicken  19866894403845_2
gaattggtgcttacaggcagaagactgagttacaggtaaaatacaacatttttttttcaaaatgtttatgttccccatctactccgacaatcacatttgcgagccttcaaacattccaggtttatatagcatggctcttactttttctcaaagtagatgatgtttactcaggtattgtggctgtgagcttttgctcttgtaatataagtgtcccattcaaaaaggcwtacatatccacgagttgtttaatgaggtactatggactctaattggttagaataattccctattcattaaatrcatacccaaactaaatgaaataacttagtgaggccagtagattttatagtagtgctaagccagaaataaatgtagtgtatgttatgttagtcagtttacatgatttagtcaagttaggaagcacatctgtaagtgaatattttcctcactttaccaatctaaactaaatcccaggaaaacatgtataayataaatgtcaggtgcttaacamttctgtgtcaatttctgttacacattatatgtatttgttgtggtgttgagaagccaaagctcagtggtttcaagggtgttttgtctaat

SEQ ID NO: 91765 - DNA, 600 bp, Chicken  19866894403845_3
tttgctcttgtaatataagtgtcccattcaaaaaggcwtacatatccacgagttgtttaatgaggtactatggactctaattggttagaataattccctattcattaaatrcatacccaaactaaatgaaataacttagtgaggccagtagattttatagtagtgctaagccagaaataaatgtagtgtatgttatgttagtcagtttacatgatttagtcaagttaggaagcacatctgtaagtgaatattttcctcactttaccaatctaaactaaatcccaggaaaacatgtataayataaatgtcaggtgcttaacamttctgtgtcaatttctgttacacattatatgtatttgttgtggtgttgagaagccaaagctcagtggtttcaagggtgttttgtctaatctggttattatttttatttaaggaatgaaactagcaatttgctaagagcagtatcttttgcacatttgcaattaaatcttttcctgccctcasaaacactaaaggaataaattgtgttaggtagacactattcaggaaagtctctgatgtgttattaacagcctacaaggtgtttggaacttacagatt

SEQ ID NO: 91766 - DNA, 600 bp, Chicken  19866894403845_4
cccattcaaaaaggcwtacatatccacgagttgtttaatgaggtactatggactctaattggttagaataattccctattcattaaatrcatacccaaactaaatgaaataacttagtgaggccagtagattttatagtagtgctaagccagaaataaatgtagtgtatgttatgttagtcagtttacatgatttagtcaagttaggaagcacatctgtaagtgaatattttcctcactttaccaatctaaactaaatcccaggaaaacatgtataayataaatgtcaggtgcttaacamttctgtgtcaatttctgttacacattatatgtatttgttgtggtgttgagaagccaaagctcagtggtttcaagggtgttttgtctaatctggttattatttttatttaaggaatgaaactagcaatttgctaagagcagtatcttttgcacatttgcaattaaatcttttcctgccctcasaaacactaaaggaataaattgtgttaggtagacactattcaggaaagtctctgatgtgttattaacagcctacaaggtgtttggaacttacagattcttaaattatttttatttaata

SEQ ID NO: 91767 - DNA, 592 bp, Chicken  19866894403845_5
gtttacatgatttagtcaagttaggaagcacatctgtaagtgaatattttcctcactttaccaatctaaactaaatcccaggaaaacatgtataayataaatgtcaggtgcttaacamttctgtgtcaatttctgttacacattatatgtatttgttgtggtgttgagaagccaaagctcagtggtttcaagggtgttttgtctaatctggttattatttttatttaaggaatgaaactagcaatttgctaagagcagtatcttttgcacatttgcaattaaatcttttcctgccctcasaaacactaaaggaataaattgtgttaggtagacactattcaggaaagtctctgatgtgttattaacagcctacaaggtgtttggaacttacagattcttaaattatttttatttaatagccaaagtgatgaagcaaacctcccataatataaatatagtctttgaagaacagatttcacatgaaagctgactagatatgttgaaataactgtttcactggaaaaaaaaatttcagatgcactacgtaaatagagttgtgccttccagtttagaatgctgcagaactaaagct

SEQ ID NO: 91768 - DNA, 600 bp, Chicken  19866894403853_1
tgccaacggggcttgtgttaaggatggtgggaagaaggttcgtctggagaaaactgtgcctggggaatttgtatgtaaggttacatacaacaatgactttgtgtggactaggcccattgtgctctcctgcagctatggtgagtaatgccagtgccagaaaacgtctcttttggtcctttgcaatgggaattgaaggtgttgttgctattggtatgaaaacaaagtctcctgtccttgggcagctgacttccagccttaccacaccctcccttagaaagcatccccttgacttccttctcytacactgtctcagactgaacctacagttacagacaggatgaaagctacttcagcagttcctttgacccaaacatgctgcaaggaagggtctctgtatctctgtttttctgcttacaattacagggctcttacattctcggccatgccaattttgaaacaattttcttgctctgacattcacccataaccctgactaccttccagattatccagcatcccttgaaaaaaccttctgctaatttggccctgttgctgctggactcagctgagttgttttgcttcatcttttctctgcttgtc

SEQ ID NO: 91769 - DNA, 600 bp, Chicken  19866894403853_2
atcttttctctgcttgtctagaacaactacacaaagatttatcacactctacaaatacttccatcaacctcatgttatcagaggtgcagtgatggtgtaagtcatttacttttttaaaagaaaaaaaagtaaatatatatgttttttcctctccgtgtcccctgcttgggtatgcttctctgtgaggatactgtgacttcacccgtctgcaagctcttcataaatgcccagtgatctgactgaatgagactatagttaaattaggtagtaagtatggatcctaggactactagaacctcrtgatgcaaaacactggtcagtgttgtaaactgacttttaataacaaccaacctgattaggtatcactgatggagatgcaagtgaatggcttttgcartgaaggtggtcataatgtttttgactaatttagccataagtaatttaaccaagcttaatgaaattgtaccatgcagcagtacctagtcttttggaaaaccatctgaaaagctgtaactgcaggcagatcaagtactgccttttcttrtatggctggtgtagagttggtatgaaagcaaaaatactgacctgagccctgcatca

SEQ ID NO: 91770 - DNA, 600 bp, Chicken  19866894403853_3
taagtcatttacttttttaaaagaaaaaaaagtaaatatatatgttttttcctctccgtgtcccctgcttgggtatgcttctctgtgaggatactgtgacttcacccgtctgcaagctcttcataaatgcccagtgatctgactgaatgagactatagttaaattaggtagtaagtatggatcctaggactactagaacctcrtgatgcaaaacactggtcagtgttgtaaactgacttttaataacaaccaacctgattaggtatcactgatggagatgcaagtgaatggcttttgcartgaaggtggtcataatgtttttgactaatttagccataagtaatttaaccaagcttaatgaaattgtaccatgcagcagtacctagtcttttggaaaaccatctgaaaagctgtaactgcaggcagatcaagtactgccttttcttrtatggctggtgtagagttggtatgaaagcaaaaatactgacctgagccctgcatcatgcgttctggcattccacagaacttctgtggtctttttgtgccttatcatgttggaggtatgrgcctgcctgtacaaatatggcattagcgattgtg

SEQ ID NO: 91771 - DNA, 600 bp, Chicken  19866894403853_4
tgagactatagttaaattaggtagtaagtatggatcctaggactactagaacctcrtgatgcaaaacactggtcagtgttgtaaactgacttttaataacaaccaacctgattaggtatcactgatggagatgcaagtgaatggcttttgcartgaaggtggtcataatgtttttgactaatttagccataagtaatttaaccaagcttaatgaaattgtaccatgcagcagtacctagtcttttggaaaaccatctgaaaagctgtaactgcaggcagatcaagtactgccttttcttrtatggctggtgtagagttggtatgaaagcaaaaatactgacctgagccctgcatcatgcgttctggcattccacagaacttctgtggtctttttgtgccttatcatgttggaggtatgrgcctgcctgtacaaatatggcattagcgattgtgcagcagccatcctaactttgtccagctgaactgacctaaggttgttcagcacagacaaacacaagttaatagagacactgaggaacaagaaggcaaacagccagagccacaagccttgtgataagtcacacgagtgctgacacctac

SEQ ID NO: 91772 - DNA, 600 bp, Chicken  19866894403853_5
cactgatggagatgcaagtgaatggcttttgcartgaaggtggtcataatgtttttgactaatttagccataagtaatttaaccaagcttaatgaaattgtaccatgcagcagtacctagtcttttggaaaaccatctgaaaagctgtaactgcaggcagatcaagtactgccttttcttrtatggctggtgtagagttggtatgaaagcaaaaatactgacctgagccctgcatcatgcgttctggcattccacagaacttctgtggtctttttgtgccttatcatgttggaggtatgrgcctgcctgtacaaatatggcattagcgattgtgcagcagccatcctaactttgtccagctgaactgacctaaggttgttcagcacagacaaacacaagttaatagagacactgaggaacaagaaggcaaacagccagagccacaagccttgtgataagtcacacgagtgctgacacctactgttgtttgttctgggtagctgcccagtcccctgggtcggatatcagttcctcttttcctctgcagcagcccatgggggaatttgctcatactgggatgaacatgtattgggaagggca

SEQ ID NO: 91773 - DNA, 600 bp, Chicken  19866894403853_6
gaaggcaaacagccagagccacaagccttgtgataagtcacacgagtgctgacacctactgttgtttgttctgggtagctgcccagtcccctgggtcggatatcagttcctcttttcctctgcagcagcccatgggggaatttgctcatactgggatgaacatgtattgggaagggcatgagaacaaggaaatagcagcaattctaccttttcttttccccccaccaaatgcagccacattgataagaagtggtctagagccataatgtttactagaaaaatgaaaataaatgatctcawgtttgagagctgctccggaagtaatgcctcctattttactatgttggctgccaacatcagaagcaaatggtggtatggcagtagaggttgaaccttcccaccaatatcccattacacgttgttaccctgtgacagatggcgaagttgtgtcactgaattcctccatgtggaaaaaatggcacttattgatcttcaccacttgctgartggttctagggaccaaacagtggatgtgagcacactgagacagtgggtggtgcgtttcagcagtggcaacagcaacagtggatcactactgct

SEQ ID NO: 91774 - DNA, 600 bp, Chicken  19866894403853_7
cttttcttttccccccaccaaatgcagccacattgataagaagtggtctagagccataatgtttactagaaaaatgaaaataaatgatctcawgtttgagagctgctccggaagtaatgcctcctattttactatgttggctgccaacatcagaagcaaatggtggtatggcagtagaggttgaaccttcccaccaatatcccattacacgttgttaccctgtgacagatggcgaagttgtgtcactgaattcctccatgtggaaaaaatggcacttattgatcttcaccacttgctgartggttctagggaccaaacagtggatgtgagcacactgagacagtgggtggtgcgtttcagcagtggcaacagcaacagtggatcactactgctggtgcagatatttatgagtgcggcatgcaggctctcattcactgtcggtgaaaatgcacagctaatggtggtgactatattgaaaagcagtgttttgtagctctctgaaataatgttattgtgctctttgtatttattatagtttccatggaaatacacaggaggcattactttcggagcaacctacataaatgaattaaggactaa

SEQ ID NO: 91775 - DNA, 559 bp, Chicken  19866894403858_1
tatggtcatcagtgcacacttagtctttgccctgtccctgtgtccagatagagtttgatagtttatggttgcatgaatctgtatctcagcttttttacagttcttttgtttcgtgcttacagggaatgagcttcaagttcttgaaaccataatatttttctctctctccttcctcagaatattaaatgtttttcgtcattgggtggagcaccatttttatgactttgaaagagacctggagttactagagagattggagacatttatttcaagtgtaagaggtatgctaattgcttgtcytctcttccacgttttgatacaacctgttggcctaatcctgtcagattttaggcgtgagaatatctttacacaccagtaattttaatgtgtttaactgaactgttaatgtgacactcttttacatgagcagtctttggtttggattctaaacggctactgaacattattacaagccctgctgcgttgtgtaagctcggtgcatttacttactgggcagtaatgtccgtccttgcctgacgtcaccttcctcctctccatt

SEQ ID NO: 91776 - DNA, 600 bp, Chicken  19866894403859_1
ttttctaacaacacatgaaaatgcattcttaaagaccatgattatatgggaacctcactttctcatttgttgcagagcctcagaagatgtatttgttgaaagttgtatatcctacttctgcagttcccatgttcttttcctttatctcactctgacccaaaattagagggaaagagatgttctgcagctaactgctacctggagtgaagctgtttttcagcacctgttgcaactgtggaaacaaagatttctgggcaaggtgaagagcacagggaaatcaaaaggactacaactccctcwctggttcactggcagtgcacaaagaaaaccatatgctgcggttgcctttgcacagatttctttttcatgttatggttttatatgcccacaaatgatgtctgtgttataaattagttaatagagttttaagtaacaaggttcctaaggagcctggtgaccatccagtagctattgtgtagctctggttgctaggacatggcttacacttcggagaaactctgtaaatgaatgctccacaaactattgaaaggctgcttttctgcgattgtacttttactagccaatggggatgaagaagta

SEQ ID NO: 91777 - DNA, 599 bp, Chicken  19866894403864_1
  misc_feature (1)..(67): n is any nucleotide
nnnnnnnnnnnnnnnnnnnnnnnnnnnnnnnnnnnnnnnnnnnnnnnnnnnnnnnnnnnnnnnnnnncaaatcttccaacacccactgtctccatgtcctgccgtggtcccagcctcccatctgctgcacctatccgtttccaaggctttcaataggcaactgtttggctatgagaaatctcactcagccaagtactacaagcgttatcccctatcactgcatcttcagtgcaaaatttgctcttacagcagcatccacgggtgcgtttccagatgcaactcatcaccagagatgcccayggagcagggagatgggccacaggacmcacgggccaacccaggtccttctkgtggggcagctggaggccactaggagatggcacaggggctctaagggcagagagatcgccttcgccccgctcacctctagccagttccgttgggcaagtgtcacaacgaggactttgtcttcatacctgtttgtacagcacataacccctgatcccagctgcggcctccacaagtcccctgttatgcaggaatcccagcaaaggatccaaaacaagactgaaaatcagaagcagttagccagtttaagc

SEQ ID NO: 91778 - DNA, 599 bp, Chicken  19866894403864_2
  misc_feature (1)..(41): n is any nucleotide
nnnnnnnnnnnnnnnnnnnnnnnnnnnnnnnnnnnnnnnnncaaatcttccaacacccactgtctccatgtcctgccgtggtcccagcctcccatctgctgcacctatccgtttccaaggctttcaataggcaactgtttggctatgagaaatctcactcagccaagtactacaagcgttatcccctatcactgcatcttcagtgcaaaatttgctcttacagcagcatccacgggtgcgtttccagatgcaactcatcaccagagatgcccayggagcagggagatgggccacaggacmcacgggccaacccaggtccttctkgtggggcagctggaggccactaggagatggcacaggggctctaagggcagagagatcgccttcgccccgctcacctctagccagttccgttgggcaagtgtcacaacgaggactttgtcttcatacctgtttgtacagcacataacccctgatcccagctgcggcctccacaagtcccctgttatgcaggaatcccagcaaaggatccaaaacaagactgaaaatcagaagcagttagccagtttaagctggaataattcagctatgtcaagagg

SEQ ID NO: 91779 - DNA, 599 bp, Chicken  19866894403864_3
  misc_feature (1)..(17): n is any nucleotide
nnnnnnnnnnnnnnnnncaaatcttccaacacccactgtctccatgtcctgccgtggtcccagcctcccatctgctgcacctatccgtttccaaggctttcaataggcaactgtttggctatgagaaatctcactcagccaagtactacaagcgttatcccctatcactgcatcttcagtgcaaaatttgctcttacagcagcatccacgggtgcgtttccagatgcaactcatcaccagagatgcccayggagcagggagatgggccacaggacmcacgggccaacccaggtccttctkgtggggcagctggaggccactaggagatggcacaggggctctaagggcagagagatcgccttcgccccgctcacctctagccagttccgttgggcaagtgtcacaacgaggactttgtcttcatacctgtttgtacagcacataacccctgatcccagctgcggcctccacaagtcccctgttatgcaggaatcccagcaaaggatccaaaacaagactgaaaatcagaagcagttagccagtttaagctggaataattcagctatgtcaagaggtagcatctttcccaggcttttagt

SEQ ID NO: 91780 - DNA, 531 bp, Chicken  19866894403869_1
  misc_feature (1)..(193): n is any nucleotide
nnnnnnnnnnnnnnnnnnnnnnnnnnnnnnnnnnnnnnnnnnnnnnnnnnnnnnnnnnnnnnnnnnnnnnnnnnnnnnnnnnnnnnnnnnnnnnnnnnnnnnnnnnnnnnnnnnnnnnnnnnnnnnnnnnnnnnnnnnnnnnnnnnnnnnnnnnnnnnnnnnnnnnnnnnnnnnnnnnnnnnnnnnnnnnnnnggaagggaagggaagggaagggaagggaagggaagggaagggaagggaagggaagggaagggaagggaagggaagggaagggaaaagatcagtctttattattaatrgtgcactacaggtaatgtctgctcaatttctgtgaagagttgtgcttgctgtccttctcacttgaaaaacaatgccactgtgactgagagccaagcttgtgaagcttctcacaggtatgtccaatctgtgatgtctatcagtgcatgaaatgcctatcactgtgttccacaaggtgctgcatgttgactctctttggtgtctctaagattgtcacagcagattttgttgtc

SEQ ID NO: 91781 - DNA, 600 bp, Chicken  19866894403870_1
ggttatctgtgaagaaacctgaattcattttcatccctggtttcatgatttctgatccggaagccatagagtacagaagagagcggtagactcaggcacaggtgaatgaaggaattcagtagtcaaactgaaagtgggagctgctccagatgtgatgctgacatagtctcagttgtagtccatttacttaaaaaatgctcagccttgttgctgatactttgtggctgcaaacccgctatgtacatttccaagttgaaatgataaaaaaactgtgtggcaactttcatcagcgtactccartgctcactttctctcctagtaaagtcaagtcccactaattatttggagctatttcttgaaggagctgagagctcctcaatcccttgagcagcaggtaaaacatactgacaggaacaggaaaacccacctgatcaacacatggctaagagactggtgccatcagtggaactaatcttttttaagtcatggagcagtttgtagagcgccagacttgctggcaacagatagggttcacctatcccaaaggaggaaaaggattctagcccagtaattggcagggttcattgagagggctttaaa

SEQ ID NO: 91782 - DNA, 600 bp, Chicken  19866894403877_1
gattccagtgatttgtctgttaaagccaatgcaaataattgtaacatctgtcaagaaccaaccactagcatgaaaaccttttaacattttgcacttaataaactattttatacataaactaccttattgtttatattaaaaactaaaaaatattcagtctgttccagccattctaacaaaaactttaataagtagtcattgcataaaaatgacacaatccagcagttatttggtaaggccagcataatcataaatttaccatccatgcttttccaaaaatactaacccatattgttctcyctggacctgttgcagggatgactaatccagctgctgaggtctccctttatgtgtttgatggaacacttggcttgctaggctacagctgtgtgtttatgtgcgctgcacacctgcagaggcctgacaaatagctgtagtatgcagagtatacaaaattaccctggcagtgctgcaaataaggaagtttctgttttgaagtccatatgtgtgtgagcttgagatgccagctggggtatttatgttgcattgcacagatgtaaaactgccaactgattttataccaaataaaggctaatcttt

SEQ ID NO: 91783 - DNA, 600 bp, Chicken  19866894403881_1
cagatcaacaacaaggtaggatctataagacctcccccagcccaacgacaaccatgtaaatttgttcccactggaacacggatctccttcgggaagggaagtctaaggtgctttgtgttgtgtttgcataacctcactgggctcttagaaaggcagtgcttgttccagccctgagtttcctgctctcattttcccaagggttttccccaaggcagaagcagcgactcacaagagcttataataataataaaagagaataaacgcatttcacaaagcctaacatccaggattagaaccacrtttcctactttatctcgctttggttcaaataaatgcgttaccaaaaaacattaccaccgaatgacattagggcttaaaaggtattgaggtgtgataatgaacgtctagggagtgaacaaatacaaagggaaaacactcatccatctccagtgtgtattaataagttttttaataagttaaataaactaaaaggggagttggatttgagcagcagttaacctttcccctgacacagtgcagggtctcctyttagggatgctaagcagaagatttgctaaacgccatattgtggctaatttg

SEQ ID NO: 91784 - DNA, 600 bp, Chicken  19866894403881_2
aaagagaataaacgcatttcacaaagcctaacatccaggattagaaccacrtttcctactttatctcgctttggttcaaataaatgcgttaccaaaaaacattaccaccgaatgacattagggcttaaaaggtattgaggtgtgataatgaacgtctagggagtgaacaaatacaaagggaaaacactcatccatctccagtgtgtattaataagttttttaataagttaaataaactaaaaggggagttggatttgagcagcagttaacctttcccctgacacagtgcagggtctcctyttagggatgctaagcagaagatttgctaaacgccatattgtggctaatttgggagcctgccagttcattgcgtgcttatattaagtttcccagggatgagggtgatacttcaggcttctctgaaaacctcactgatccatagggctaatttcatttcctggagcataaaacatgctatattttaaggggtttggccaacagatgtgtaagacaatcacctgcagctctctgggtctagtcttagccaaacagtgcagcttactggtaggagatgttgtgcctgatgtcaccttctccact

SEQ ID NO: 91785 - DNA, 600 bp, Chicken  19866894403882_1
ctaaatagctgtgcgaaataaacctgctttgctttcaagcctcagtgctggagataaaagtatcatattcactctggcttgttttgttcaatagtatagaaaactttagtcccagtttcaaacaatagctcctgccttttataacctgttctgcaggtttttaattgaatattttttattcatgaaactaattacacatatgtatgcttctataattgcagtgtggtccttaaactgtataaatcaaatttgtctttatgggatgcagctttattagattactattactttggaatgaawttattattattataattatttagaaaaataatactgcgtttgtgtaatcaataaccrtaattttatagattttaagcctttaaaagaaatagcaaatcattaactgtaaataggacaaactttttcaatgagtgyctttcttctaggcatctaaagctgcttagaacagtctaatggctttttttttttttccctgcaatgtgactaaatagataaagtcagtgggagataagtacctaacttgttaaagatctttcaaaawctcaattggtgttcatcaaaatcattagatgttgaaat

SEQ ID NO: 91786 - DNA, 600 bp, Chicken  19866894403882_2
aagtatcatattcactctggcttgttttgttcaatagtatagaaaactttagtcccagtttcaaacaatagctcctgccttttataacctgttctgcaggtttttaattgaatattttttattcatgaaactaattacacatatgtatgcttctataattgcagtgtggtccttaaactgtataaatcaaatttgtctttatgggatgcagctttattagattactattactttggaatgaawttattattattataattatttagaaaaataatactgcgtttgtgtaatcaataaccrtaattttatagattttaagcctttaaaagaaatagcaaatcattaactgtaaataggacaaactttttcaatgagtgyctttcttctaggcatctaaagctgcttagaacagtctaatggctttttttttttttccctgcaatgtgactaaatagataaagtcagtgggagataagtacctaacttgttaaagatctttcaaaawctcaattggtgttcatcaaaatcattagatgttgaaatcccttaggggaatctggatctaattctctctacagccatttatatgtggctgatgtg

SEQ ID NO: 91787 - DNA, 600 bp, Chicken  19866894403882_3
cttttataacctgttctgcaggtttttaattgaatattttttattcatgaaactaattacacatatgtatgcttctataattgcagtgtggtccttaaactgtataaatcaaatttgtctttatgggatgcagctttattagattactattactttggaatgaawttattattattataattatttagaaaaataatactgcgtttgtgtaatcaataaccrtaattttatagattttaagcctttaaaagaaatagcaaatcattaactgtaaataggacaaactttttcaatgagtgyctttcttctaggcatctaaagctgcttagaacagtctaatggctttttttttttttccctgcaatgtgactaaatagataaagtcagtgggagataagtacctaacttgttaaagatctttcaaaawctcaattggtgttcatcaaaatcattagatgttgaaatcccttaggggaatctggatctaattctctctacagccatttatatgtggctgatgtgatgtatacagaaagtgtcagtgcagtttctgcataaagttgttattttcataaccatgcacagcaaatgctatgcctt

SEQ ID NO: 91788 - DNA, 600 bp, Chicken  19866894403882_4
atgcagctttattagattactattactttggaatgaawttattattattataattatttagaaaaataatactgcgtttgtgtaatcaataaccrtaattttatagattttaagcctttaaaagaaatagcaaatcattaactgtaaataggacaaactttttcaatgagtgyctttcttctaggcatctaaagctgcttagaacagtctaatggctttttttttttttccctgcaatgtgactaaatagataaagtcagtgggagataagtacctaacttgttaaagatctttcaaaawctcaattggtgttcatcaaaatcattagatgttgaaatcccttaggggaatctggatctaattctctctacagccatttatatgtggctgatgtgatgtatacagaaagtgtcagtgcagtttctgcataaagttgttattttcataaccatgcacagcaaatgctatgcctttcaaatctcctgcaatattagcatggtccctcaactgtcttactgctattaaatgggtaaagatgctcataytatcaaagttcatttccacactgacaaggaaatgactgtactgatattgggcata

SEQ ID NO: 91789 - DNA, 600 bp, Chicken  19866894403882_5
aatagataaagtcagtgggagataagtacctaacttgttaaagatctttcaaaawctcaattggtgttcatcaaaatcattagatgttgaaatcccttaggggaatctggatctaattctctctacagccatttatatgtggctgatgtgatgtatacagaaagtgtcagtgcagtttctgcataaagttgttattttcataaccatgcacagcaaatgctatgcctttcaaatctcctgcaatattagcatggtccctcaactgtcttactgctattaaatgggtaaagatgctcataytatcaaagttcatttccacactgacaaggaaatgactgtactgatattgggcatatgcataatggtgcaacttcactcaaaaatgggatayccmtaacccaacaatttaaaaactacataacaatcttatacaccaatcctatcagttcttacatttaaaaactatctgtacttcactataaagtaccattaaatccacctgtgattttaggctcaatgtcaggtatgtaagtcagccagaacttcacccctcacacataaggctgaaaacttgtcttaaactgacatgcctttatttat

SEQ ID NO: 91790 - DNA, 600 bp, Chicken  19866894403882_6
atcccttaggggaatctggatctaattctctctacagccatttatatgtggctgatgtgatgtatacagaaagtgtcagtgcagtttctgcataaagttgttattttcataaccatgcacagcaaatgctatgcctttcaaatctcctgcaatattagcatggtccctcaactgtcttactgctattaaatgggtaaagatgctcataytatcaaagttcatttccacactgacaaggaaatgactgtactgatattgggcatatgcataatggtgcaacttcactcaaaaatgggatayccmtaacccaacaatttaaaaactacataacaatcttatacaccaatcctatcagttcttacatttaaaaactatctgtacttcactataaagtaccattaaatccacctgtgattttaggctcaatgtcaggtatgtaagtcagccagaacttcacccctcacacataaggctgaaaacttgtcttaaactgacatgcctttatttatgtactttgggattcacttgttcaaagaaagaggttacagtagtcaaagcttcacacagaaaccttcagattttttatagcgctgctacgct

SEQ ID NO: 91791 - DNA, 600 bp, Chicken  19866894403882_7
ccttaggggaatctggatctaattctctctacagccatttatatgtggctgatgtgatgtatacagaaagtgtcagtgcagtttctgcataaagttgttattttcataaccatgcacagcaaatgctatgcctttcaaatctcctgcaatattagcatggtccctcaactgtcttactgctattaaatgggtaaagatgctcataytatcaaagttcatttccacactgacaaggaaatgactgtactgatattgggcatatgcataatggtgcaacttcactcaaaaatgggatayccmtaacccaacaatttaaaaactacataacaatcttatacaccaatcctatcagttcttacatttaaaaactatctgtacttcactataaagtaccattaaatccacctgtgattttaggctcaatgtcaggtatgtaagtcagccagaacttcacccctcacacataaggctgaaaacttgtcttaaactgacatgcctttatttatgtactttgggattcacttgttcaaagaaagaggttacagtagtcaaagcttcacacagaaaccttcagattttttatagcgctgctacgctgat

SEQ ID NO: 91792 - DNA, 600 bp, Chicken  19866894403882_8
tgttcaaagaaagaggttacagtagtcaaagcttcacacagaaaccttcagattttttatagcgctgctacgctgatgtgacagaatactgcatgatgatagaagataaaagctaaatggtgttctgattaatacaaatacattattttcacatacctttccaaaacattcagaaaatcattaaatacattttacttttccagagagattaaaaaattagctctcaggtgattttttctgattatttttactatataaatgaaattacaaaaaggacaattgtccatttaagaatatttyttaccgtgcattccaccgaacaagttagctatttatcaaagaaaagccataggtctttgttaatagaactttagaaaatatgaatgcaaaacattcttttttccttgcatattacataaaataaaccttaaacagaaaacatattcctttcctattcattccagatttgtgaatcaaattctgtttggtagttttattacatctcaatatcatgaagaattccacaaaaagagaggaaaaaaaaagtggtccttttttactttatgtatatatttgtgacttgctgaatcaagcttgcca

SEQ ID NO: 91793 - DNA, 599 bp, Chicken  19866894403884_1
  misc_feature (1)..(94): n is any nucleotide
nnnnnnnnnnnnnnnnnnnnnnnnnnnnnnnnnnnnnnnnnnnnnnnnnnnnnnnnnnnnnnnnnnnnnnnnnnnnnnnnnnnnnnnnnnnnnncaagtgcaaaatacttgaatggtttcaaagatcagtattgttgctttaaagggaggattcagagctgtaccattcctagcaaaataccgctttggtcccctgatagtgtatattccaaaagtgtatggtctaatttcaaagtggcatttctccagcttgtttttggcaagcagtgcttctccctgccctggcagaattgattccawattcttaaaagttacagcttcgcagtgactgtatttcctctgtaatcgctcgcattctttatatataaggaagataaattacactcagttgtactaggacataaacaggctggaaatctactggagcatagtgatggcaaagtcccagccatagaactgtgtgtgaagatatgtgggaaaccccaacggtgctctctgtatttccagttctgggaagaatgaaggatcagacaggcttcgtcccttccataacacagtgtataacaagaagttgaatttgtgtttcaaaaaagtgctgc

SEQ ID NO: 91794 - DNA, 599 bp, Chicken  19866894403885_1
  misc_feature (1)..(74): n is any nucleotide
nnnnnnnnnnnnnnnnnnnnnnnnnnnnnnnnnnnnnnnnnnnnnnnnnnnnnnnnnnnnnnnnnnnnnnnnnntatacttggcatctacattaaacagtacctttttatcttaagtattgtaatgaaaagccttaagcatccttaagcataggtattcctgaacactgttgcagcaaaccactgttctggaagctgctgtaaccttacagatggtgatgagcagcagtaggaacagctttgtgccagtactgagagaagtgacggttttacaatgccatattgcagggtagaattttgyttctttatttgcactgatttgtttcatggtcctcttcattatatattttctgccttttcactatgatttggaaaattactttagccaccctttactccatgtatagtaatacacactcacaggggatctttcctgcctatctcacattatgtaccttattcccataacaataaatggtccctcttgcatttctcactccatgaatacagatacccttgagaatggtgcaatataaatgactaaatggataaatcaacaagatacttcttttctctgtacccttataggaaggaatatgg

SEQ ID NO: 91795 - DNA, 599 bp, Chicken  19866894403889_1
  misc_feature (1)..(50): n is any nucleotide
nnnnnnnnnnnnnnnnnnnnnnnnnnnnnnnnnnnnnnnnnnnnnnnnnntctcttacagtctggggaagaaagtacagagcagaatatattatgtagtaggctctcagattttccaattttctttggttttaagtagctctgccacctgcctgccccactaaggtagtcagtctgatagagcaggacagaagaagactgcctcagcctgctcctcatgagaatcatagaatcactaaggttggaaaagacccacaggatcacccagtccaaccatccacccatcaccaatagttctcastaaaccatgtccctcaacacaatgtccaaatgttccttgaacacctccagggtcagtgactccaccacctccccgggcagcccattccagtgcctgaccaccctttcagagaagcctcactgcagatcataagctctgagttttagcagcccaaactttcctatgaagtcagtgttccagcactcctttaaatgcagagtttagtctccctgcactgaatttggcactaccagcatagcacagaaaaggcttcacaggaggcagaatcagggcaggagcattttccatgcattttgaga

SEQ ID NO: 91796 - DNA, 600 bp, Chicken  19866894403892_1
aggatagacatgaaagaaaaagagtatctcaacaactttatgtaaagacatgagagtatttagttctgagcaatttcataccaaaatgatatcaacggattggacaacattcagaagtgaccaacaatgattttgagctggagagactgattcatcaaagtaaaataacactgcccatttgtacatcttgttttaccaagcataacatcagcattggaaagggatggtttagtggggtatatgaaacagctataattaaagggatgaggtcaaggaaacaaacgccctagatagcagggraaactttctgacactgctatctcttaagctgcaacagcctgmaaggagaagtgattgaggccacatctcctggaatatttgaaattagattaaccaaagcacyaaaaattgcagcacaaaaagcaatcctggcttggcaggggagaggacrggattagcagaggtctttcstacggttacagaggggctgctgtaggggttctgagttatttttgtcttttatgacaactgtttgatgaacgactccattatttcccagctgtcaatgaataagaggaaagtgtttcccgtggagtaaaa

SEQ ID NO: 91797 - DNA, 600 bp, Chicken  19866894403892_2
taaagacatgagagtatttagttctgagcaatttcataccaaaatgatatcaacggattggacaacattcagaagtgaccaacaatgattttgagctggagagactgattcatcaaagtaaaataacactgcccatttgtacatcttgttttaccaagcataacatcagcattggaaagggatggtttagtggggtatatgaaacagctataattaaagggatgaggtcaaggaaacaaacgccctagatagcagggraaactttctgacactgctatctcttaagctgcaacagcctgmaaggagaagtgattgaggccacatctcctggaatatttgaaattagattaaccaaagcacyaaaaattgcagcacaaaaagcaatcctggcttggcaggggagaggacrggattagcagaggtctttcstacggttacagaggggctgctgtaggggttctgagttatttttgtcttttatgacaactgtttgatgaacgactccattatttcccagctgtcaatgaataagaggaaagtgtttcccgtggagtaaaatctttcctgcaaggtgaagaatcaattggagaaaaataccaa

SEQ ID NO: 91798 - DNA, 600 bp, Chicken  19866894403892_3
acaacattcagaagtgaccaacaatgattttgagctggagagactgattcatcaaagtaaaataacactgcccatttgtacatcttgttttaccaagcataacatcagcattggaaagggatggtttagtggggtatatgaaacagctataattaaagggatgaggtcaaggaaacaaacgccctagatagcagggraaactttctgacactgctatctcttaagctgcaacagcctgmaaggagaagtgattgaggccacatctcctggaatatttgaaattagattaaccaaagcacyaaaaattgcagcacaaaaagcaatcctggcttggcaggggagaggacrggattagcagaggtctttcstacggttacagaggggctgctgtaggggttctgagttatttttgtcttttatgacaactgtttgatgaacgactccattatttcccagctgtcaatgaataagaggaaagtgtttcccgtggagtaaaatctttcctgcaaggtgaagaatcaattggagaaaaataccaatgtcacattccagtgcttcactccttattgtgcttggcatgttgcttcctctgtcctacac

SEQ ID NO: 91799 - DNA, 600 bp, Chicken  19866894403892_4
tcatcaaagtaaaataacactgcccatttgtacatcttgttttaccaagcataacatcagcattggaaagggatggtttagtggggtatatgaaacagctataattaaagggatgaggtcaaggaaacaaacgccctagatagcagggraaactttctgacactgctatctcttaagctgcaacagcctgmaaggagaagtgattgaggccacatctcctggaatatttgaaattagattaaccaaagcacyaaaaattgcagcacaaaaagcaatcctggcttggcaggggagaggacrggattagcagaggtctttcstacggttacagaggggctgctgtaggggttctgagttatttttgtcttttatgacaactgtttgatgaacgactccattatttcccagctgtcaatgaataagaggaaagtgtttcccgtggagtaaaatctttcctgcaaggtgaagaatcaattggagaaaaataccaatgtcacattccagtgcttcactccttattgtgcttggcatgttgcttcctctgtcctacacagcaattggtccataccaggacagaaccagcctgttctgtctaataaa

SEQ ID NO: 91800 - DNA, 600 bp, Chicken  19866894403892_5
tgcccatttgtacatcttgttttaccaagcataacatcagcattggaaagggatggtttagtggggtatatgaaacagctataattaaagggatgaggtcaaggaaacaaacgccctagatagcagggraaactttctgacactgctatctcttaagctgcaacagcctgmaaggagaagtgattgaggccacatctcctggaatatttgaaattagattaaccaaagcacyaaaaattgcagcacaaaaagcaatcctggcttggcaggggagaggacrggattagcagaggtctttcstacggttacagaggggctgctgtaggggttctgagttatttttgtcttttatgacaactgtttgatgaacgactccattatttcccagctgtcaatgaataagaggaaagtgtttcccgtggagtaaaatctttcctgcaaggtgaagaatcaattggagaaaaataccaatgtcacattccagtgcttcactccttattgtgcttggcatgttgcttcctctgtcctacacagcaattggtccataccaggacagaaccagcctgttctgtctaataaaattttattgcattgcttttc

SEQ ID NO: 91801 - DNA, 511 bp, Chicken  19866894403894_1
gctttgagcacaacgtagaaccctcctctctcctgctggaagcagccatgggaagagaaagcaagctgctggaatcaatgttagctctgggaaagtcttcttgttattattcacccatctgtaatgcggatactgtttgcagatgggctctcaatcttcctgtttgcaaactgccttgggaacacctgataaccatgttttgcctgataagtttttctgagctcaggctgcagattctttttggttggggcgctgcttaagcagaaatccccatctggagacacaactgttgtgaactgrgcaggaaacaaactgttggttctttgggatgggctgtgaggaccaggtttgggctgctgaaagaataaggcattttatttcactttggcactagatggggctaagggactaaataaaattgaaaaagcaatggaccactaaggaaacaataatgttacagcttgcagatttaagagaaaattgactttaaatatacagaaccttctcccaa

SEQ ID NO: 91802 - DNA, 600 bp, Chicken  19866894403895_1
ctaaagtgctcttgttttctccacacccattcttgctttctccagactgagggacagataaccaaaaccagacctgccactccctaatggtgagaataggtggaaactgatacttttcgttgttaacagcagatcagctttgagaatttaaggataaagcaatgaactggccagctgcttgactgaaaggaagacccagtctgtgtctcattttaaaaaaagtggcttgtttatttattgcaattatttagagactcctgattcactgccacatttcaatttttgttctctgtgctctcwcwcacacacaccactgcaaatgcattacagaaaagctgcaaattacaggatgtctaattaggaggctttgaagagaagatgacaaagaatcgttcaccatggagacagaagttgcttgctggtttatagccagctaaacaatgcccaagactctgataagctgcggcagggagagtggctgttcgcctgtgtaatgcgagggactggtgcttagtgtgtcacggaggagtggagctccctgctcttggatgggtaccatggacaggggcacatgagtacgaagcggtgaagacatctcta

SEQ ID NO: 91803 - DNA, 600 bp, Chicken  19866894403895_2
aaagtgctcttgttttctccacacccattcttgctttctccagactgagggacagataaccaaaaccagacctgccactccctaatggtgagaataggtggaaactgatacttttcgttgttaacagcagatcagctttgagaatttaaggataaagcaatgaactggccagctgcttgactgaaaggaagacccagtctgtgtctcattttaaaaaaagtggcttgtttatttattgcaattatttagagactcctgattcactgccacatttcaatttttgttctctgtgctctcwcwcacacacaccactgcaaatgcattacagaaaagctgcaaattacaggatgtctaattaggaggctttgaagagaagatgacaaagaatcgttcaccatggagacagaagttgcttgctggtttatagccagctaaacaatgcccaagactctgataagctgcggcagggagagtggctgttcgcctgtgtaatgcgagggactggtgcttagtgtgtcacggaggagtggagctccctgctcttggatgggtaccatggacaggggcacatgagtacgaagcggtgaagacatctctaca

SEQ ID NO: 91804 - DNA, 600 bp, Chicken  19866894403903_1
cagggctcaatgcatgggagacacacaccgcacagtaaaggaggatttaagattcagaagtggcacagctttttaacaacaacctgacccacctgcaacagcacgcccaattttctctttatgaggaatgcagtgagagtgaagacaactacatccttactccagcgctgtggattacatccatttgagccatctgcagctggcccatcagagatcccattccaacctttctttacttagtctcctttcccagctctcagttattcttcatcttctcactgatttccctatgctgtcctmtcacccacttttctcttccccatgtcgtttgacttacaccactgtttgatcaaggcctgtcagtatcagctctgctgtgccaggaatttcctccttttaccacaatacccctttctaaattctcktttcyctttgaacctttctactcacatgcttcaagtcctcctcttctgtttctagcaatgtttgacagcaaactcaagagaagtaatcccctgcagggcacatgggatggcagatacatgggctttgctcatgatgagcacaccagcccgtgtcaccaagaacggagaggcattg

SEQ ID NO: 91805 - DNA, 498 bp, Chicken  19866894403903_2
gaatgcagtgagagtgaagacaactacatccttactccagcgctgtggattacatccatttgagccatctgcagctggcccatcagagatcccattccaacctttctttacttagtctcctttcccagctctcagttattcttcatcttctcactgatttccctatgctgtcctmtcacccacttttctcttccccatgtcgtttgacttacaccactgtttgatcaaggcctgtcagtatcagctctgctgtgccaggaatttcctccttttaccacaatacccctttctaaattctcktttcyctttgaacctttctactcacatgcttcaagtcctcctcttctgtttctagcaatgtttgacagcaaactcaagagaagtaatcccctgcagggcacatgggatggcagatacatgggctttgctcatgatgagcacaccagcccgtgtcaccaagaacggagaggcattgcagggcttgtaccacacacgagt

SEQ ID NO: 91806 - DNA, 493 bp, Chicken  19866894403903_3
cagtgagagtgaagacaactacatccttactccagcgctgtggattacatccatttgagccatctgcagctggcccatcagagatcccattccaacctttctttacttagtctcctttcccagctctcagttattcttcatcttctcactgatttccctatgctgtcctmtcacccacttttctcttccccatgtcgtttgacttacaccactgtttgatcaaggcctgtcagtatcagctctgctgtgccaggaatttcctccttttaccacaatacccctttctaaattctcktttcyctttgaacctttctactcacatgcttcaagtcctcctcttctgtttctagcaatgtttgacagcaaactcaagagaagtaatcccctgcagggcacatgggatggcagatacatgggctttgctcatgatgagcacaccagcccgtgtcaccaagaacggagaggcattgcagggcttgtaccacacacgagt

SEQ ID NO: 91807 - DNA, 600 bp, Chicken  19866894403908_1
ggtctccactttctcatgagacaaattttcacaaaactcacacagtagctttgaactcgtgactgtcaaattggatagaaatcactcaataagacagaggagtgtttgatacccagtgcagtcgtgtcaggtatttccttgacaaataagactataaaattaaggggagggaaaggggaaagaaaagggagagaattattcaaataataatgaatggaatatttcttgctgaaatgaaagagtgaaacatttcacttggtttgacacaaaaggttccattcaccgtgaaataaaatattytgttctgaggcacttgtgagaaagcaaagaaaatggaagacgagtcaaaagctgagagaggaaaaaccttcttgcaaaacaagtgctaaggcctacctctacagtagagatggcagtggagatctgaattgtactaattttgtatttggaagggggcttaactcctggtttttgtcttgtgctgtgccatccctcaaatctttagagcatctgaaattccttaccttttagttctgcttctgtaaaatgctttaacggtcataatgggtgcacataaatatgcaaatcggagaaataaag

SEQ ID NO: 91808 - DNA, 465 bp, Chicken  19866894403910_1
ttttctcctcacattcatctcgttctgaaaacatttttccattagaatgtaaacaattctggcaactgtgacttgcagatataaagcagtaaatctacagtcatatgcacacatgtgtccatatgtacatacacagattcatgaaaaacaaggaaccagaagaccaagaatgaaagagaagcattacagtgactcagaagaccaggaatgaaagaggagcataacagtggcttcctgggaaagctgcttacatacttttaaattgtgcagtacataaaacccatcactcacatactacartctatactggtctgttttcttggagccatcatcatgtgtaccattaattttagggaggtcatttggcaatgagataatttatgtcctccaaagttcagtgcagatcatagaaactgggggaccttcaggccagaaggaacaatagattctaaatgatgagcaaaa

SEQ ID NO: 91809 - DNA, 600 bp, Chicken  19866894403914_1
gtcttacttatcaataaagtctacaggcatatcctcctataaattggagtgtgacagcataccctgaagggatcaacttagatggacagccacaaacagaatgagtgatttgtaaggaacagtgggaagcagacccagtatttaaatacacgaatagctcttgaaggagatcctctattgctttagatatcctttaaaatctgaagtatatgagcaaggaagagtctgcagtcatggtctgcatttcttaggttagccattgcatttaagcaacattgagatgaataagaaataggagarctggtgaaagrcacttagctctgttttgctcttcttttagaggaaacacaaagctgaaaggatgttgctgaaatagttaaaatgtgtgaaatgaagaattaaagaaaaktaacttgaagtcagctagctgttcttsgtccttctgccattagcagtaaggaagcagtgtttatgaaacacaaacaggctccaggaataaattagggactgggagaactggtgggtgtagggaatgagtacttagaaagtggggaaggtaaaggggaagaacaaacatgggttatttgcagtgaagcagag

SEQ ID NO: 91810 - DNA, 600 bp, Chicken  19866894403914_2
caataaagtctacaggcatatcctcctataaattggagtgtgacagcataccctgaagggatcaacttagatggacagccacaaacagaatgagtgatttgtaaggaacagtgggaagcagacccagtatttaaatacacgaatagctcttgaaggagatcctctattgctttagatatcctttaaaatctgaagtatatgagcaaggaagagtctgcagtcatggtctgcatttcttaggttagccattgcatttaagcaacattgagatgaataagaaataggagarctggtgaaagrcacttagctctgttttgctcttcttttagaggaaacacaaagctgaaaggatgttgctgaaatagttaaaatgtgtgaaatgaagaattaaagaaaaktaacttgaagtcagctagctgttcttsgtccttctgccattagcagtaaggaagcagtgtttatgaaacacaaacaggctccaggaataaattagggactgggagaactggtgggtgtagggaatgagtacttagaaagtggggaaggtaaaggggaagaacaaacatgggttatttgcagtgaagcagagagaaggtgagt

SEQ ID NO: 91811 - DNA, 600 bp, Chicken  19866894403914_3
ttgtaaggaacagtgggaagcagacccagtatttaaatacacgaatagctcttgaaggagatcctctattgctttagatatcctttaaaatctgaagtatatgagcaaggaagagtctgcagtcatggtctgcatttcttaggttagccattgcatttaagcaacattgagatgaataagaaataggagarctggtgaaagrcacttagctctgttttgctcttcttttagaggaaacacaaagctgaaaggatgttgctgaaatagttaaaatgtgtgaaatgaagaattaaagaaaaktaacttgaagtcagctagctgttcttsgtccttctgccattagcagtaaggaagcagtgtttatgaaacacaaacaggctccaggaataaattagggactgggagaactggtgggtgtagggaatgagtacttagaaagtggggaaggtaaaggggaagaacaaacatgggttatttgcagtgaagcagagagaaggtgagttgrgtgaatgaacttcaatacaacttgatcaaatttggccatatttaaagttttagggacacttacagtgctattatatctcatgactgcaagaagag

SEQ ID NO: 91812 - DNA, 600 bp, Chicken  19866894403914_4
agtatttaaatacacgaatagctcttgaaggagatcctctattgctttagatatcctttaaaatctgaagtatatgagcaaggaagagtctgcagtcatggtctgcatttcttaggttagccattgcatttaagcaacattgagatgaataagaaataggagarctggtgaaagrcacttagctctgttttgctcttcttttagaggaaacacaaagctgaaaggatgttgctgaaatagttaaaatgtgtgaaatgaagaattaaagaaaaktaacttgaagtcagctagctgttcttsgtccttctgccattagcagtaaggaagcagtgtttatgaaacacaaacaggctccaggaataaattagggactgggagaactggtgggtgtagggaatgagtacttagaaagtggggaaggtaaaggggaagaacaaacatgggttatttgcagtgaagcagagagaaggtgagttgrgtgaatgaacttcaatacaacttgatcaaatttggccatatttaaagttttagggacacttacagtgctattatatctcatgactgcaagaagagatgaatttttgcgtgtgcttgttgtct

SEQ ID NO: 91813 - DNA, 600 bp, Chicken  19866894403914_5
ttagctctgttttgctcttcttttagaggaaacacaaagctgaaaggatgttgctgaaatagttaaaatgtgtgaaatgaagaattaaagaaaaktaacttgaagtcagctagctgttcttsgtccttctgccattagcagtaaggaagcagtgtttatgaaacacaaacaggctccaggaataaattagggactgggagaactggtgggtgtagggaatgagtacttagaaagtggggaaggtaaaggggaagaacaaacatgggttatttgcagtgaagcagagagaaggtgagttgrgtgaatgaacttcaatacaacttgatcaaatttggccatatttaaagttttagggacacttacagtgctattatatctcatgactgcaagaagagatgaatttttgcgtgtgcttgttgtcttacaacttcccttattttcggatatatatatgtctaaccctgtggaactaccttaatacttatgttaacagaagacatacttccaaggcttacaaagaattgccagaatccctcccaagaaaattaacacctccatgatcaatttcttgcctcgttcactgtatcagatatgcttttc

SEQ ID NO: 91814 - DNA, 599 bp, Chicken  19866894403915_1
  misc_feature (1)..(77): n is any nucleotide
nnnnnnnnnnnnnnnnnnnnnnnnnnnnnnnnnnnnnnnnnnnnnnnnnnnnnnnnnnnnnnnnnnnnnnnnnnnnntgtttggtgtgctgcactgcagagaacaggagggggtgtgtgcctatgctcaagtatctgctggaggccacctcgtgtctgtccacacaccttaccaaaagtagctgtctcattgcttgcatggcatctgaagtgccctgtacctactttgtgctgaaataatgtttggtaacttcagttaggtaatgcaataataactaatgctcagtcaatcagctgtttkcaggggaaaggggagagtcataatgggaagttaaggtgtaggatactgctatggataattgctatggcattcctgtcttttctctaataacagcagtctgtgtgtgagaaagcagagccagtgaatttcagatgatggrtaagtctgtatttttccacccagggttggaacaaggattaggagattaaatagccaccaatttcctgttttacactaaaaactgaatagacctgtaagactttcatgttattcaagtatattttttggacgttaatttcaatataagccaacgcatacgt

SEQ ID NO: 91815 - DNA, 600 bp, Chicken  19866894403915_2
ggaggccacctcgtgtctgtccacacaccttaccaaaagtagctgtctcattgcttgcatggcatctgaagtgccctgtacctactttgtgctgaaataatgtttggtaacttcagttaggtaatgcaataataactaatgctcagtcaatcagctgtttkcaggggaaaggggagagtcataatgggaagttaaggtgtaggatactgctatggataattgctatggcattcctgtcttttctctaataacagcagtctgtgtgtgagaaagcagagccagtgaatttcagatgatggrtaagtctgtatttttccacccagggttggaacaaggattaggagattaaatagccaccaatttcctgttttacactaaaaactgaatagacctgtaagactttcatgttattcaagtatattttttggacgttaatttcaatataagccaacgcatacgttttagtgaaacacgggcaaatttggatactgattcttttcttctaaccagttactgaactgcacaaacaaaaataattagcaaagtttggcacagccagtgccaggcgtggccatgcagtggtaagcaatccaaaaacat

SEQ ID NO: 91816 - DNA, 600 bp, Chicken  19866894403922_1
ctctctgtagaagattgcattgaccttttatggttgcttattttaacacaagcttgcagagatttatactgccagttaacactggtcatggatctcatcacgacagaaatggagaaatctggaaagcttcacatgtttttaacagggaagatgatgggaacactatttgacttgattaaatattaaaagcctgttttagatttcttaatatgggaaagctatactaaatcaccattattccttttagtaccatgcttttgccttttactactcttaatacaaccatacatattgctcggrgtatgttcctattccatactgttttatgagaattatttgtactatatttatttctagaacaaaagaaaatatcatacaaatgccaaatgcccctttctcctacagtattgaagagcaagtttacttcttattgaaaaggataaataatcaacagtccttaaaacaaagaaatgtgtcttggtgagtcaattatgcacacagagtatttcacatttagaacagctagaattccaaaatgaggcattctccaaacaggccagtgcttacttatttcaaaagcacatctgaagtttagaacct

SEQ ID NO: 91817 - DNA, 600 bp, Chicken  19866894403928_1
aggtttggtatacataaaccatttaagataaaccagtaaacacagatcagatccaaaataatcttaattgttccaaatgttttggctggatgtattttggaaagcctgatctgatggcagtacacaacaccccagaatggaagctgtgacaaaaaggtgaatccatcacagggcaaaaattggagtgatatttagaatcaccagtactgagcaacaccctttggctaaggaccattgactcatcagtgctttattagtagactcaaggatatagcatccacctcggaaataggttggatrtcatgggaacaaatgaaaaaaagcatcacagcagcctgtgtctccttctgatgtagttagctgttttttatggaaatctgtgctgcgagacagagccaaaaaaactgtagtaaaagaacctgtaagctgctgtggaacccagacctgctttcctgcattctctacagaataatgaatgggtagcttttgtttccagagcactcagatttccctaagaataactctccaccttaacaaggaacagtctggaaaaaactttgagatcctttctcctctggaattcaacttatgttttttctt

SEQ ID NO: 91818 - DNA, 600 bp, Chicken  19866894403930_1
gaggacaaacaccatcaatcagacatgcccccaaaagctaagacttaaaatcaagcccttaccagcatcattggtgagcccagcagcttggtattctcatttaacagcttcagcaaagtgagaaatgctggatcatcatattcaaacctctctccgaacagtatagagcagatgacgttggatacagcattgttgaggatcatcttcgtgtcaaatggtttccctgcagttcaggcaaaatgatgatgggatgatgcccattttgccctgtgatgcaggggtgtgctgctggggcagggracagctggctggccttagatattatcagggaatgctgtgcaaaatgccacattcaaggcatgggaaaaggacagagatttggtcagtttactgtgggaaatgtggagaaaaagcctcatttaccacccagaatgcacagcagggactctggtttcaatgtcttaaggcctccatttaataacctacctaagcacatgctgaactttaaccatcaaataccatttgctcagtgttaaactttcgttaatctttattgttctgctagacacgttttctgtctccggatgaaattgttgacac

SEQ ID NO: 91819 - DNA, 600 bp, Chicken  19866894403935_1
tcaaaaatacatccatgaatgttttcatccttagttaaatttgtctcttttttttctccattttctttcttatgccagcgtatttccatagcttctgtgggaaggaaggcaacatgatctttctgattaagtgtatatacttttcctgctgttcattaaactattttgaactgttaatccaaaactgactgttagatttctactgttatcatcttgctaaatcgatatgatcaaaatgttgggaaggaaaagtatactgcaatcacgccatgtctcttccatcggaagtgaagtcatagmaaccttattctgtgaycttttattttgagaaacaagaacgaatttctcctgattatgaaacttctcatgcatgatcctttctaaactctcagatgttttctgaacaattactatcttttctggctttctttgtgtcctctgagtcttcaaagttacttgcttacttttttgagctttttgcctgaaatatttattatgtttgcgaaaggaatttgttattttccgtaaacctttttgcagaatttgttttgttctcaataaaaacttatagggtagcaattatatcgtttgcttgaaaca

SEQ ID NO: 91820 - DNA, 600 bp, Chicken  19866894403935_2
gaatgttttcatccttagttaaatttgtctcttttttttctccattttctttcttatgccagcgtatttccatagcttctgtgggaaggaaggcaacatgatctttctgattaagtgtatatacttttcctgctgttcattaaactattttgaactgttaatccaaaactgactgttagatttctactgttatcatcttgctaaatcgatatgatcaaaatgttgggaaggaaaagtatactgcaatcacgccatgtctcttccatcggaagtgaagtcatagmaaccttattctgtgaycttttattttgagaaacaagaacgaatttctcctgattatgaaacttctcatgcatgatcctttctaaactctcagatgttttctgaacaattactatcttttctggctttctttgtgtcctctgagtcttcaaagttacttgcttacttttttgagctttttgcctgaaatatttattatgtttgcgaaaggaatttgttattttccgtaaacctttttgcagaatttgttttgttctcaataaaaacttatagggtagcaattatatcgtttgcttgaaacaagagataaaaatccgt

SEQ ID NO: 91821 - DNA, 599 bp, Chicken  19866894403959_1
  misc_feature (1)..(131): n is any nucleotide
nnnnnnnnnnnnnnnnnnnnnnnnnnnnnnnnnnnnnnnnnnnnnnnnnnnnnnnnnnnnnnnnnnnnnnnnnnnnnnnnnnnnnnnnnnnnnnnnnnnnnnnnnnnnnnnnnnnnnnnnnnnnnnnnnnncagcttttaagatactactgcattttaaataatgtatgttctagcagtgcccctcaaaaatagtaaagctatgtgaaagaaaagacttcaaataattaacgcttaaccaacagtgaccaaaaatcttaaacatcctcctgaagtaaagcacccctatattgctttatcytggtgcattacttcactgccttcatcacgctgaggtatgcactgtcaaaagtgtggttgttacaagattattaaggaagcgtttatttcggtttccacctatttcaatcctcctccatcacaatcagcaacctactgcattctgcacagagatgcagcctttggaaacatcagcgtcttactcttctccagggttcaccacagtaatcccatacaagtttaacaaagctgagaatggccatgactagctttgaatatgctcagaaaaaaaagatggaaaaatatacrrctgtttctacc

SEQ ID NO: 91822 - DNA, 600 bp, Chicken  19866894403959_2
tattgctttatcytggtgcattacttcactgccttcatcacgctgaggtatgcactgtcaaaagtgtggttgttacaagattattaaggaagcgtttatttcggtttccacctatttcaatcctcctccatcacaatcagcaacctactgcattctgcacagagatgcagcctttggaaacatcagcgtcttactcttctccagggttcaccacagtaatcccatacaagtttaacaaagctgagaatggccatgactagctttgaatatgctcagaaaaaaaagatggaaaaatatacrrctgtttctacctcagtgtaacagagcaatgtgaagtacagatacactaaagctgtgaatgtcaggaataaatagcagcttataaatgactttgaaaatatactgcatagaggaacaaagattcttttttttattgtactgctaggtttgattcgatggaaaaaaaaaatctgacttgttttgatgaggatgtaaytgagtaatggaatttaaaattgcaatagctcttcaaatgtttgcattttaggctgaatgtattagggcttttctgtttgtctggttttgcctcacctcgtacaa

SEQ ID NO: 91823 - DNA, 600 bp, Chicken  19866894403959_3
attgctttatcytggtgcattacttcactgccttcatcacgctgaggtatgcactgtcaaaagtgtggttgttacaagattattaaggaagcgtttatttcggtttccacctatttcaatcctcctccatcacaatcagcaacctactgcattctgcacagagatgcagcctttggaaacatcagcgtcttactcttctccagggttcaccacagtaatcccatacaagtttaacaaagctgagaatggccatgactagctttgaatatgctcagaaaaaaaagatggaaaaatatacrrctgtttctacctcagtgtaacagagcaatgtgaagtacagatacactaaagctgtgaatgtcaggaataaatagcagcttataaatgactttgaaaatatactgcatagaggaacaaagattcttttttttattgtactgctaggtttgattcgatggaaaaaaaaaatctgacttgttttgatgaggatgtaaytgagtaatggaatttaaaattgcaatagctcttcaaatgtttgcattttaggctgaatgtattagggcttttctgtttgtctggttttgcctcacctcgtacaat

SEQ ID NO: 91824 - DNA, 600 bp, Chicken  19866894403959_4
ttctccagggttcaccacagtaatcccatacaagtttaacaaagctgagaatggccatgactagctttgaatatgctcagaaaaaaaagatggaaaaatatacrrctgtttctacctcagtgtaacagagcaatgtgaagtacagatacactaaagctgtgaatgtcaggaataaatagcagcttataaatgactttgaaaatatactgcatagaggaacaaagattcttttttttattgtactgctaggtttgattcgatggaaaaaaaaaatctgacttgttttgatgaggatgtaaytgagtaatggaatttaaaattgcaatagctcttcaaatgtttgcattttaggctgaatgtattagggcttttctgtttgtctggttttgcctcacctcgtacaatgacaaccagaagtagctctagtttagcacagcactggaatgtggcactaatatggtaacatctgttcactgcagcagaggtacaatgaccctcggtgtatcaccattaatttcttgaaaacaaaccatccagaactattgcttagtagaaacaatttgaagaacatcagcatctagtcaaacttatttaggcttt

SEQ ID NO: 91825 - DNA, 600 bp, Chicken  19866894403960_1
tggagtagcctggtgctgctggatgcctccttccttcctggcagaacactcagggcagcagctgaacaccgtgatgtgaggctccataatgctgtgtgccaggagcaggctcagccaggttcagtgggagcacggtgccatcagaacgctgcagcagaggggctgcggtgcagccagcttgatggagaggcttctccagaccttgctgcagggagcctgcaggaggcacagcggcgtttttcctgtgctgccaagcagagctgaaacctgggctgccttgagctgctgtttggaacatcrcttgctgtttctggtgactttgggtcagtttgaagaaccactttccacccatggtggacttccatagggtgacaacctgtggtgcctgggggaggggaggtgcggggggagtcgaggtctggcttggagccgaagctgagggcaaaatgagattaagcactggaacaaatgcttgagtaagtgtttgttgaacacttctgggagccttcaagcctggaagcttttttggatgggagcctaaaggaaatgactggttttgatatggatttactagggtgagagctrctcagttgctcatgt

SEQ ID NO: 91826 - DNA, 488 bp, Chicken  19866894403960_2
ctgtttggaacatcrcttgctgtttctggtgactttgggtcagtttgaagaaccactttccacccatggtggacttccatagggtgacaacctgtggtgcctgggggaggggaggtgcggggggagtcgaggtctggcttggagccgaagctgagggcaaaatgagattaagcactggaacaaatgcttgagtaagtgtttgttgaacacttctgggagccttcaagcctggaagcttttttggatgggagcctaaaggaaatgactggttttgatatggatttactagggtgagagctrctcagttgctcatgtgtggcataagatgtgaatgtaaatttccatggcagtctgtgccaggggcctggagaatcccgtgcaaaagggctgtgaagtgaggggccaatacaggtggttgttggagctgtgtgtaagaaggtgtggtggaagaggtcctgtaccgacccaaagcccctgtagaaatctca

SEQ ID NO: 91827 - DNA, 599 bp, Chicken  19866894403963_1
  misc_feature (1)..(104): n is any nucleotide
nnnnnnnnnnnnnnnnnnnnnnnnnnnnnnnnnnnnnnnnnnnnnnnnnnnnnnnnnnnnnnnnnnnnnnnnnnnnnnnnnnnnnnnnnnnnnnnnnnnnnnnntatcctacgcagagaggtctgcgtttctctgtatttgcaaagaaatacatctctcagctcaaaatcattttccttggggacattagggaatgattctttccagctgaccagatactggcttttccagggctgcaattcaggagactgctgctgcagtccaattgcatgattttcaatgccagactagctccctatrgggcttccccaaatgtttcaggtattgctgacttaattgctgtgatacctactcacattgctacattaaaaaaaaaaaaagagggaagaatggcccatctttctgcttttaacggagtaagctgtgcaaacagaaggagaaaggcatgctaatcactcacagcgattgctgaagcgtgtaaatattaattatgtcattgtcaggttagcatcgtgcagagcaatatcctcactgactggctgcagactgacatctcagatgctggccagcacttggggatgctcccatcctcttggtat

SEQ ID NO: 91828 - DNA, 600 bp, Chicken  19866894403964_1
atggcactgaacagatgcaagagaaattttaaagcttcactgtactggtttgaacttcaggctccaaatgtagtggggaagtgcagctctgagatgggaattcaaactgtaagagagacaacagtgaatttctggatctcatttacaccagtattgagataattatcttcagtgatgagcaatacatctttcccccgagcacaaatgaaagaaaacacttgcatgactcaaccttacccagctcttctatcaatagataaaagcatgttttaagctatacacagcagcaagcggcacctstgctgactttccacatgcatagaaatatcacaggaaaggctagcaggaatgtgcagcccacattaatattttttctgtccactaacaaatctaataacattttaaaaagcaaatcaatgagtcactcctggacaattcctctgtggagatgattatgctgcctgctttattgtactgtcattctctaatagtacaagcrctaaatggattgtacgaaaaccactgcggtacaaacaactaaacatttctgcttaggtaaggaggctctcctatcatgaaaggagaaacacatgcaggtca

SEQ ID NO: 91829 - DNA, 559 bp, Chicken  19866894403964_2
cacaaatgaaagaaaacacttgcatgactcaaccttacccagctcttctatcaatagataaaagcatgttttaagctatacacagcagcaagcggcacctstgctgactttccacatgcatagaaatatcacaggaaaggctagcaggaatgtgcagcccacattaatattttttctgtccactaacaaatctaataacattttaaaaagcaaatcaatgagtcactcctggacaattcctctgtggagatgattatgctgcctgctttattgtactgtcattctctaatagtacaagcrctaaatggattgtacgaaaaccactgcggtacaaacaactaaacatttctgcttaggtaaggaggctctcctatcatgaaaggagaaacacatgcaggtcagcatacacaagagaattttgttggcctacctatactcatcagataagtaaaatgacaactatggcagcaaaacacaagttcgaagcaacataagacaagcatgcttttgctactacagcctctttgtattttttaatttggttacttttctttttttt

SEQ ID NO: 91830 - DNA, 600 bp, Chicken  19866894403972_1
aaatcatgatagaagggacttgcataggaattcagagttgaggaaatcccattttttagatggaaagaagctctttaaaagagttggatccaataggagagacatagattcctgggggagaggatggaaactactttttttttttatgttggaggatcacattactggtggaaaaaatgacctgcagggactgatttccttctttttgtcactgaccatctgccaagccctgattctttctggatattaagagaagggctcaaaatacacatacttaaagcccacctcttcaaaccaagmcttctgccctgtcccatctcctacaagccccacatttgtccatcctaaaatgttaaccccttctgtgccagaacaggctccctttatgaggacaatgttaccacatcttccagacaatcctctctccaagcaatgcaccttttaccccttctctctcatcctgtaaggcatcaaggcccaaaccactcttgcctctttgctactacaatagcttctgcactccaggccartctcagcagggtttcttctgtcttgccatatggtacttacaacatcatttcacagtgtctcaagccatgc

SEQ ID NO: 91831 - DNA, 600 bp, Chicken  19866894403972_2
tgattctttctggatattaagagaagggctcaaaatacacatacttaaagcccacctcttcaaaccaagmcttctgccctgtcccatctcctacaagccccacatttgtccatcctaaaatgttaaccccttctgtgccagaacaggctccctttatgaggacaatgttaccacatcttccagacaatcctctctccaagcaatgcaccttttaccccttctctctcatcctgtaaggcatcaaggcccaaaccactcttgcctctttgctactacaatagcttctgcactccaggccartctcagcagggtttcttctgtcttgccatatggtacttacaacatcatttcacagtgtctcaagccatgctaaaggtcgtgagaggcctggagttattgctttgcatttaaatagctccagcgggaagcatgttggcagggcagaatccaagtcaggtcttgtttgcccttctctgctcttctttttgcccttctcaggaccagattcactccttctcaggagaggtggaagtcagctgaggtttcttcttgtcacagtctgattaaaacaaacttggaggagaattcttctcagcaacc

SEQ ID NO: 91832 - DNA, 599 bp, Chicken  19866894403976_1
  misc_feature (1)..(19): n is any nucleotide
nnnnnnnnnnnnnnnnnnnaagcctttctgagtagaatggtgcagtgtctgtcaccaggtaattttcaatgagaattaggtgttttttcaattcttatttaaagaggagttaattcagtcctcagcccctattgtgtctgagtgcttctaatgctgtatcactcaggggttttcagttattactgcgaaaacaggagtggcgtgaaaccatctcaggaggggttcagactggatattaggaaaaggttcttcaccaagagggcggaacaggctccccagggcagtggtcatggcaccaakcctgctggagttccagaagtgtttggacaacactttcagacatatggtttgatttttaggtagtcctgtgtggagccaggagttgatccttgtgggttccttccaacttgggatactatatggttctatgattctaactcatcgaagcaaacagtaggatgctgtcttcaaatcctttcatattccattgtaactatggatttttcttgactctgggcactttgtagggattcctgggcattgctctggttgaaatgtcaggcttagtataacatgatgttcttcatcttatttaggtt

SEQ ID NO: 91833 - DNA, 600 bp, Chicken  19866894403977_1
tggctctaacgcacacaattagttacaattaattccttgcttgctaaatgaaagcctatgtgattgggtctgctcatcatcaagaaggagccttcctagattgcagccttctacagagaaccacaggttccctctgtttgagatagccagcctcttgcacctctctaaggcaagatgacatgctgtttgctaccacatccacaccatgtgagctggtgactgcaggctcaaatgcgacgtgaagttcaagcatttgtgcagttaccaatgcgatcactagcaagtggtcaagaagaaagsttttcccaacaaggagaaggctactgttagcaagtctctacagggcagtaggagcatctgtcagtttgtaacagctttgaaatcagtaatcacaagaattgcagctgcccagtgtaccccactagtgactcatctcatcctttcatagttcaggattgatgagcagagtagctctgtcaccatcttccttaaaacacagcttttcctttccagaactgaatcatccagccagccacattcctgcatcttacaaagattcagtttagtcctctttccaagaaggacaaacagacttctaac

SEQ ID NO: 91834 - DNA, 600 bp, Chicken  19866894403979_1
tgagaatgtcacagagccttgtggctgccaagaagaagattcagaggttgcaggcacactgcgggggggaagagaggggttgtgaacgcaggaagggatcaggaattctttggctgagttgcacagagatctacaacaccaataaaaatgtggtggtggctgagagcagccagcgttgtggccgtggtggtgtgtggctctgcagctatcgtggcacagctgccccttggctgtgagtttcagctctttcacaattatctggtaaagcccatggaaatatgcatggaaatgttaatgaakggtgcacagccagttgcaaggtgctggtttaaaggcttgagtgtctccttgtctgtaacaaatacagactattgccactgcacctcatttaactttgtggaggactaagtgatgtagttatgctgttacggtgagcaatggatttctaactacattcttctgatgagaagaaaagagttttgcttttcctattgcactcaaagatctctttttggcaataggtcccatgctgctggcagtatgtaagcacagtactgtaagatcacatccaagagcttatcagtattcatttttctgtaa

SEQ ID NO: 91835 - DNA, 600 bp, Chicken  19866894403993_1
agtggtgtaagtgaatgtgaaaaaaaataaaaattgtggtttgaattaaggaagaaattctccagcctctgtatagtctgataaggattaactaaactctccagtttagtctgggctttatggaagctgtacatatcaaagtagtagatagtgtttggtgtctaaatatgcacatttgcaaatcttaatgactgctttaactccattataatttacagttttgaggtccagtgaagttccgctgttgtcatttctggatacaaacgaacccttaactgtctgcagtgtaagtacaaacayggttttaatcttaacatgtaattttctgattagcaaagaggttcagtgattatgataggaaatagaataaattatttttattgccatgcaaaaaaatgtttgcaaaccacacaactgacaaagaagtaagacaaactctgcactgtattcagtttactgggtttatatcagcttcaggggataacaggtctgaagtccttgtgttttatgcctgtgcttacatgccatccagcatatttaatcttaaataccatttagatcattacaactacagtctctatttgctgaaggattggcagg

SEQ ID NO: 91836 - DNA, 532 bp, Chicken  19866894403997_1
agtaccagtgggttgtttcaccatcactgcctctaatgaagcagttctgtactcttcagtttgtggcgtgcttatcaccatggtatctgactgcatgtactgatcataaaaatacgtcgaatatttgtgattaaaagctcccaggaaagaaaaaacgttccttcattctttcccttcatgacaagccattaaacacagtctagaatagtcttaaataacatcttgtttctaactgaatcttctttgaagcagaaagtcacactaatcaacccaggcaattactaacagcacatctgcacracgaatatctgaagtggaaaacatttgctccacagcagcatcattataacggcaggagcaaggaagactatcacactgatgggaactgggggatcttgttaaattcctaatggtgaggaaagaaagccttgtaaacattttaatcacccattcagagcaaccaagagaaactctgccagtcattacagtgggtgccaatttaactgtgactagcggcaggacacacagagaa

SEQ ID NO: 91837 - DNA, 600 bp, Chicken  19866894404009_1
gggctgagtcaagctctctctccttcttctgagatttgcaacctataaatcatcaataggccaagcagctcattgtcctgggcaactgtgttgccctgagtgagcaggaggcatgctgcaaatgaatgtgacacgaagttcagactcagggataagccagagctcaaatcccattggtgcagtgacaaaagttatgggcaaagtgctgctgtgtttttgcacctccctggtgctagtttgctcattaagtagagacagaaataaaagtctttcttgactctggaggcaaatggtgcgggraggagggggatggatgcttccaagtcctccatgaagctgactgcatcaccatgctaactttatcttgcattttgacaggaaaacaaaaaagtgcatgacacaagaatttactttcctttaagaagcatcttaaatatgctggttttagcttcatcttttaaagttattttttctccttatctgtggcatggatggcttcccactagatacaaaaaggacccaagtgcttctcttctgctgctaacacacaaagctcctattttaggatgagcttacataagagctcctccatttgcaagc

SEQ ID NO: 91838 - DNA, 600 bp, Chicken  19866894404011_1
ctacttcatttgcaaaacagaaaagtgcaaaaacactcccctgcccccacccccctcacttttatatctagttggttcaaaactgtcagtaactcaatttggataatacatctggaaaaaaataaattaaccaacctacactttgtgaatctttctgaacagatgcacaaaatacttggagaaggcagtagacagatgtccctctactttctagctgctcaatggagagggtacagagctatgcaggagaccacagacatagttctgtcctctgtctgtatgtacttgaatcttgccttrgtattccagaccatatagaccaacaggaacttaaacaagaggctgttttctacagcactgcaggcgattcttcaatttttcccctccaggtacatggacagctcctcagaagactctcactgaagatttctactctaagcctcacccctctcacctgtaacatattttctttattaatacagaaaaatggtaccaaaaaacggtaaaagaaggaaagarggaaagaaagaatttagaagcaatacacaggaacagcaaaaggccagagaaaactaattcaatckcccaaatgtaggtgcc

SEQ ID NO: 91839 - DNA, 600 bp, Chicken  19866894404011_2
caatggagagggtacagagctatgcaggagaccacagacatagttctgtcctctgtctgtatgtacttgaatcttgccttrgtattccagaccatatagaccaacaggaacttaaacaagaggctgttttctacagcactgcaggcgattcttcaatttttcccctccaggtacatggacagctcctcagaagactctcactgaagatttctactctaagcctcacccctctcacctgtaacatattttctttattaatacagaaaaatggtaccaaaaaacggtaaaagaaggaaagarggaaagaaagaatttagaagcaatacacaggaacagcaaaaggccagagaaaactaattcaatckcccaaatgtaggtgccctcatgtgaaaaaccaagtaaacagttgaaactggaaagtccaggcagtgtcagtgaagacctttggatagggaactaaccactgcaattagcaagagaagaaraaaataagaaaaaaaaatactgctgagcagaatgccaacaactagagaaggaatgacaactggccaagtaaagggaactcagggcagtaattgcaaaacttcctgccactgaaca

SEQ ID NO: 91840 - DNA, 600 bp, Chicken  19866894404011_3
cttgaatcttgccttrgtattccagaccatatagaccaacaggaacttaaacaagaggctgttttctacagcactgcaggcgattcttcaatttttcccctccaggtacatggacagctcctcagaagactctcactgaagatttctactctaagcctcacccctctcacctgtaacatattttctttattaatacagaaaaatggtaccaaaaaacggtaaaagaaggaaagarggaaagaaagaatttagaagcaatacacaggaacagcaaaaggccagagaaaactaattcaatckcccaaatgtaggtgccctcatgtgaaaaaccaagtaaacagttgaaactggaaagtccaggcagtgtcagtgaagacctttggatagggaactaaccactgcaattagcaagagaagaaraaaataagaaaaaaaaatactgctgagcagaatgccaacaactagagaaggaatgacaactggccaagtaaagggaactcagggcagtaattgcaaaacttcctgccactgaacagtcagaagctacttacagctgaagtcagtcctaaagacagctccagcttctcaggaaatgcctta

SEQ ID NO: 91841 - DNA, 548 bp, Chicken  19866894404011_4
ctcagaagactctcactgaagatttctactctaagcctcacccctctcacctgtaacatattttctttattaatacagaaaaatggtaccaaaaaacggtaaaagaaggaaagarggaaagaaagaatttagaagcaatacacaggaacagcaaaaggccagagaaaactaattcaatckcccaaatgtaggtgccctcatgtgaaaaaccaagtaaacagttgaaactggaaagtccaggcagtgtcagtgaagacctttggatagggaactaaccactgcaattagcaagagaagaaraaaataagaaaaaaaaatactgctgagcagaatgccaacaactagagaaggaatgacaactggccaagtaaagggaactcagggcagtaattgcaaaacttcctgccactgaacagtcagaagctacttacagctgaagtcagtcctaaagacagctccagcttctcaggaaatgccttaactaagctgcagtgtatttagagctgcatttccctcactgctcctcaatgaagccactccaattgcat

SEQ ID NO: 91842 - DNA, 600 bp, Chicken  19866894404015_1
tgcaaagcctgaaggactcgagtatgtgaggagaaagctagtcagggcccctctggcttcatcatagctagtatttcaccccatgtgccctgaaagtggaggtcatggccaccatctgcaatatgagactaggatgaggtcactaatctaatcatgacctaagcctatgctggaattcctgtctttggagagacagatgcaaaagaaaccaggttggggggccctaataagccaattaaatgcattgcatttggtgtcctcattcactacatttttataatcatttaaattgtcgtttcrggaacattcagtagagatgctggtttctctctgattcaaaatagtcaagaagagagtgcgacttygtttgattgaacctcgctggaaagattttttaggacaaaggttatctcctgcaatataattgcataccttttgaccacatggaaatatactttaggaaataaatttaggaccaggaaaaaatatatacattaaaaaaatgtttgggtgatcttgattccactacttcccctgtggaggagaatgaggtattgacgaaatctttgatgctgtttcaattactgctggaatgttccc

SEQ ID NO: 91843 - DNA, 600 bp, Chicken  19866894404015_2
agctagtatttcaccccatgtgccctgaaagtggaggtcatggccaccatctgcaatatgagactaggatgaggtcactaatctaatcatgacctaagcctatgctggaattcctgtctttggagagacagatgcaaaagaaaccaggttggggggccctaataagccaattaaatgcattgcatttggtgtcctcattcactacatttttataatcatttaaattgtcgtttcrggaacattcagtagagatgctggtttctctctgattcaaaatagtcaagaagagagtgcgacttygtttgattgaacctcgctggaaagattttttaggacaaaggttatctcctgcaatataattgcataccttttgaccacatggaaatatactttaggaaataaatttaggaccaggaaaaaatatatacattaaaaaaatgtttgggtgatcttgattccactacttcccctgtggaggagaatgaggtattgacgaaatctttgatgctgtttcaattactgctggaatgttcccaaggatgctgtgtatgggcagagcgtatgaaaacaaagggaacgggtagatcctctactgtcctt

SEQ ID NO: 91844 - DNA, 600 bp, Chicken  19866894404017_1
tggtttttagtttgaaatatgtggatggctcaggtagctctccaactttcatgcttctagctttacctgcattttgatagttgccagctgtcagcctgtcaaactgccagacaagattatacccagtaaacacttggcagtgatgactgcagccaaaatctcattctcattcctggattcccgtggcaaatgcattaaaaaaaaagttattcacgtgtgcctttgtgcacacaaagcctctgggttcaaagacacattaaaaggaatataggatatataatgctcaggacttccacaaaygaaaatgctgattcagagaaggaaaagacaataataaataaaccagtgcattaacaaacagaattttaggtagttaatggtttttctgcctatctagcagaactctgttcaggcaggtatttttaagcgcctactaaaaaaaaaaaaaaaaaagataaggaggaggaaaggagcaaagatgcttttctcctgtctagtcttacagctgtcatggcatgaaggtagaaaacatcaaaatcctggtgtagctgttaaaatctggattaactgataatttcatttttaaaaagttattatttc

SEQ ID NO: 91845 - DNA, 600 bp, Chicken  19866894404021_1
agggcttgagctgcccctactttaactccagggtctacaggacatccctgagctgagggtctgcccttgttgcaggtgggaatgggatacagtggggctttgctcagtgttcccgaaggagaatctgagtgtttgctcagggatgggtatggacagccctggtagaagcgatggagaaaagccttccttgcttgttttaaaccaaagtaagctttgtttgcatggctgccttacacaagagtggccatctcgggtcaggctgccagacagggttctctacgaaaggattcttgcaggagrgactgttccttttatctgttttgtacctgatcacttcatctgctcatttccaatttaagcactggcagaggcaatgaccagtcatttccctcttgcttttccacgctgctgttttatagacatctctcaccatcctaccttcttccaggctgagtaaagctgctcctcatggtgctccagcgtggaagctgctctgtacttctgactgcctttgtgctttttcttttttagccaggtttagaagctccttgaggaaaaaaaagacccagcctgcattgtgcactgtgggtacaggcaggg

SEQ ID NO: 91846 - DNA, 599 bp, Chicken  19866894404026_1
  misc_feature (1)..(37): n is any nucleotide
nnnnnnnnnnnnnnnnnnnnnnnnnnnnnnnnnnnnntcagggattaaaatttttgaatatatatgcctgtctccttcatctccttcatggcaatgaatttcatcctgcctacgtaggcacgaattaccttctgagatctcttccaacctatgattctggtaagttttgttaaggatacagaaagaagaagccttatagaaatagaatttagataaggccatcaatacagctgcctgctttatgcaatatgtgtgactagcccagtgtttccatctccagagtggccttatttgtgaatmtttgcataccctctttcatgtaaaaaggcttgcacawctggcattcagtattgcatggttgatgaactgtataaagaggcagtgcttcaggaggttgtgtgtaatattttttcttgttacagggagaaggtagaagaaaatggaactattgatggtcaatttagagaagtgtaatcaacacctactcttttgagggctgagtgtgtagaaggcaggaaaacattatgaatggattctgcaagtcagagctttaaagatttttccaaatataaacatattctcagaytgtaagatactct

SEQ ID NO: 91847 - DNA, 600 bp, Chicken  19866894404026_2
tcagggattaaaatttttgaatatatatgcctgtctccttcatctccttcatggcaatgaatttcatcctgcctacgtaggcacgaattaccttctgagatctcttccaacctatgattctggtaagttttgttaaggatacagaaagaagaagccttatagaaatagaatttagataaggccatcaatacagctgcctgctttatgcaatatgtgtgactagcccagtgtttccatctccagagtggccttatttgtgaatmtttgcataccctctttcatgtaaaaaggcttgcacawctggcattcagtattgcatggttgatgaactgtataaagaggcagtgcttcaggaggttgtgtgtaatattttttcttgttacagggagaaggtagaagaaaatggaactattgatggtcaatttagagaagtgtaatcaacacctactcttttgagggctgagtgtgtagaaggcaggaaaacattatgaatggattctgcaagtcagagctttaaagatttttccaaatataaacatattctcagaytgtaagatactcttggcctttcgtaagcttgctgaacatcaggaagctgct

SEQ ID NO: 91848 - DNA, 600 bp, Chicken  19866894404026_3
cttatttgtgaatmtttgcataccctctttcatgtaaaaaggcttgcacawctggcattcagtattgcatggttgatgaactgtataaagaggcagtgcttcaggaggttgtgtgtaatattttttcttgttacagggagaaggtagaagaaaatggaactattgatggtcaatttagagaagtgtaatcaacacctactcttttgagggctgagtgtgtagaaggcaggaaaacattatgaatggattctgcaagtcagagctttaaagatttttccaaatataaacatattctcagaytgtaagatactcttggcctttcgtaagcttgctgaacatcaggaagctgctaaagactgaaaaaatgctagtaaaggtttctgctttgctaaggttgccttgccaacaaaaaagttggctttccatctgtgtttttaactgagcgatgttggttggggggaggatggtcagagcattcatcttgcagacagagtgccctgcgccagcaaacatgcccagaaaaagatgttggttggtttgttccttggatcaatacacataagtttccactcacttcttgagagcccactgcttaccaaa

SEQ ID NO: 91849 - DNA, 600 bp, Chicken  19866894404026_4
tgttggttggggggaggatggtcagagcattcatcttgcagacagagtgccctgcgccagcaaacatgcccagaaaaagatgttggttggtttgttccttggatcaatacacataagtttccactcacttcttgagagcccactgcttaccaaagcacaggctccagcagatctgtgattgttctgagattctactgtgcttctcatttcattttctttttacattctcttttgtttacattccccagggcaggaattgtttctcattctgcctgtgtggagcaccttgcttgatttctrcatggggacattgctcattatcttaacacrtgaattaagcaacactaagtaggtgcttggaggctaccaggagctttaactgtttgttcctggaatgtcagaatgatttttttcaggtccactgaagttggatgggtcattctaaattaactgtagcctttcatgaggatatccaaatagggaagttcacgaggtggatgcttgtggatattctagtcagtaatgattttgcttgaccttttttttgtagtgtagacygtatcttycaaaacatcctggccatccaaactttggctttta

SEQ ID NO: 91850 - DNA, 582 bp, Chicken  19866894404026_5
tcatcttgcagacagagtgccctgcgccagcaaacatgcccagaaaaagatgttggttggtttgttccttggatcaatacacataagtttccactcacttcttgagagcccactgcttaccaaagcacaggctccagcagatctgtgattgttctgagattctactgtgcttctcatttcattttctttttacattctcttttgtttacattccccagggcaggaattgtttctcattctgcctgtgtggagcaccttgcttgatttctrcatggggacattgctcattatcttaacacrtgaattaagcaacactaagtaggtgcttggaggctaccaggagctttaactgtttgttcctggaatgtcagaatgatttttttcaggtccactgaagttggatgggtcattctaaattaactgtagcctttcatgaggatatccaaatagggaagttcacgaggtggatgcttgtggatattctagtcagtaatgattttgcttgaccttttttttgtagtgtagacygtatcttycaaaacatcctggccatccaaactttggcttttatctgttagaaca

SEQ ID NO: 91851 - DNA, 354 bp, Chicken  19866894404026_6
gtttctcattctgcctgtgtggagcaccttgcttgatttctrcatggggacattgctcattatcttaacacrtgaattaagcaacactaagtaggtgcttggaggctaccaggagctttaactgtttgttcctggaatgtcagaatgatttttttcaggtccactgaagttggatgggtcattctaaattaactgtagcctttcatgaggatatccaaatagggaagttcacgaggtggatgcttgtggatattctagtcagtaatgattttgcttgaccttttttttgtagtgtagacygtatcttycaaaacatcctggccatccaaactttggcttttatctgttagaaca

SEQ ID NO: 91852 - DNA, 346 bp, Chicken  19866894404026_7
ttctgcctgtgtggagcaccttgcttgatttctrcatggggacattgctcattatcttaacacrtgaattaagcaacactaagtaggtgcttggaggctaccaggagctttaactgtttgttcctggaatgtcagaatgatttttttcaggtccactgaagttggatgggtcattctaaattaactgtagcctttcatgaggatatccaaatagggaagttcacgaggtggatgcttgtggatattctagtcagtaatgattttgcttgaccttttttttgtagtgtagacygtatcttycaaaacatcctggccatccaaactttggcttttatctgttagaaca

SEQ ID NO: 91853 - DNA, 556 bp, Chicken  19866894404036_1
agatcatgtagttccaacctccctgccatgcgcaggattgccaaccgctagatcaagtactagaccaggttgcccagggcctcatctagcctggcacagaacatctccaaccttagataagtgaaaattagcagcagctttactgaccttatttggattttgcatatcactgatatttctatgagctctttactaaagggatgagaatacatatgtccgtgcatttcaatcacatttcttatatatgaaagctgatgcaaacctctgtaaaacatattgttctatgttaatttaagtgtygcattttcatcaacaagaggtttcttatcctaccttgcagatgtcatgaagtggtggtgcaggttttcatagaaagatccttccccaccctccatccatgcaatgctctgcagctgagtggggggcactcctaatacctgagtttagccagcactaatgctgagtttatggccttcaaaaacagctgagctgttcacatggctggcacacaacaggctacctgtatatgaatctgagggctcttgcagtgtatgtg

SEQ ID NO: 91854 - DNA, 600 bp, Chicken  19866894404037_1
gggatacgtcccagtgagagcacatgttgcccagaacatagagcagagacagttttgagcatgtgttacagatagggagagaggggggcatttttcaactggcctgctcagttggcgcacatcacagccagggaaggcagcagaaggaagacaagctctgaatgcatggcgaagggaaatccagagaggagatacggctttgcaatgcaaggcagcaagccaaggagaaatctttgagatgagggcagagctctgtgctgtgcatgtcaggcccagcatgatgaggcctgattttgcacrttggaaggaagcaaatgctgagcacgtccctgctcctgaccaaaccctgcatgctgggtatatttttcaggagaatgtttcctggcttgctcctcatgattcttctgctrtgggatggaaatgggcattcagataacatgtgcagaagtgctgagcagcatgtgggagttgtgacaaggaactacaaataaaggaaaactcatagaggtggaactggggaccaagttaaaggagagtgtaaacagaatcatccaccagatgcaaggcttttctgaatgagtgttagtatcaacagcagtt

SEQ ID NO: 91855 - DNA, 600 bp, Chicken  19866894404037_2
gttggcgcacatcacagccagggaaggcagcagaaggaagacaagctctgaatgcatggcgaagggaaatccagagaggagatacggctttgcaatgcaaggcagcaagccaaggagaaatctttgagatgagggcagagctctgtgctgtgcatgtcaggcccagcatgatgaggcctgattttgcacrttggaaggaagcaaatgctgagcacgtccctgctcctgaccaaaccctgcatgctgggtatatttttcaggagaatgtttcctggcttgctcctcatgattcttctgctrtgggatggaaatgggcattcagataacatgtgcagaagtgctgagcagcatgtgggagttgtgacaaggaactacaaataaaggaaaactcatagaggtggaactggggaccaagttaaaggagagtgtaaacagaatcatccaccagatgcaaggcttttctgaatgagtgttagtatcaacagcagttgtgacaggcacagctgactgtggttgtttccaaatgctcacaagccatcagccatataacatagtttgtgtgttgctggcagtacttgtatctgttcagaaacacccgct

SEQ ID NO: 91856 - DNA, 600 bp, Chicken  19866894404037_3
gagttgtgacaaggaactacaaataaaggaaaactcatagaggtggaactggggaccaagttaaaggagagtgtaaacagaatcatccaccagatgcaaggcttttctgaatgagtgttagtatcaacagcagttgtgacaggcacagctgactgtggttgtttccaaatgctcacaagccatcagccatataacatagtttgtgtgttgctggcagtacttgtatctgttcagaaacacccgctctgactttcctcttcctctcatagttcagtactgtggaagcatgtaacaccctgyggtgaagaggaggggtggcctgaggtgtaccaggagtttatatgttgggttacttagtgtgggaagggggaaggggatgctgggtctttgctcctggcctccactgagtaagatggagcagcgcagaaaggctgctggagggaggccactggtgatgctgggctccagggaaagctttcatatatgtgagtaasggagagcgacgggatgtccagagatctgctgtgcaacagcttgtttaggctaatcccacgttgctaagaagccctgcacatatttggtattggctcctgttactct

SEQ ID NO: 91857 - DNA, 600 bp, Chicken  19866894404037_4
catagtttgtgtgttgctggcagtacttgtatctgttcagaaacacccgctctgactttcctcttcctctcatagttcagtactgtggaagcatgtaacaccctgyggtgaagaggaggggtggcctgaggtgtaccaggagtttatatgttgggttacttagtgtgggaagggggaaggggatgctgggtctttgctcctggcctccactgagtaagatggagcagcgcagaaaggctgctggagggaggccactggtgatgctgggctccagggaaagctttcatatatgtgagtaasggagagcgacgggatgtccagagatctgctgtgcaacagcttgtttaggctaatcccacgttgctaagaagccctgcacatatttggtattggctcctgttactctgcagtccttcctcaggtggccaccccctcctcccagtgaagtccatctgtttggccatgaacctcatgacttttggctctgtaggatgcagcatgtcacgaaacccctgagcgtgcctttctcagcctcgatgagactccaagcccagcactccagcactgctgaacatctccagctgtttcttgacaagcaac

SEQ ID NO: 91858 - DNA, 404 bp, Chicken  19866894404037_5
ctgtttctttgccagctccagttccttaccattcctgctgctctggtactgagcctccctgcagctgttagctcccaagaacagaggctgcaggccctgcacctcctattcagccctgaaacagaggtgctcatcaaggatgggccccagctctcacactgtctttgggtggggcacctcagcctctcagctccatttccttgcattacacaagagttaacctagttagttgcctaaagttcaggtaaaaccaactgtcctgagagcatgtagatctcaattgagggctttaaagatcgstaagcttctgagtagctgwaagcaggtctttcaatgaaggttgtcaaggaaatatgatatgtgtaggaactgttacggcctagttgcaataactcaatgtagag

SEQ ID NO: 91859 - DNA, 385 bp, Chicken  19866894404037_6
agttccttaccattcctgctgctctggtactgagcctccctgcagctgttagctcccaagaacagaggctgcaggccctgcacctcctattcagccctgaaacagaggtgctcatcaaggatgggccccagctctcacactgtctttgggtggggcacctcagcctctcagctccatttccttgcattacacaagagttaacctagttagttgcctaaagttcaggtaaaaccaactgtcctgagagcatgtagatctcaattgagggctttaaagatcgstaagcttctgagtagctgwaagcaggtctttcaatgaaggttgtcaaggaaatatgatatgtgtaggaactgttacggcctagttgcaataactcaatgtagag

SEQ ID NO: 91860 - DNA, 599 bp, Chicken  19866894404042_1
  misc_feature (1)..(152): n is any nucleotide
nnnnnnnnnnnnnnnnnnnnnnnnnnnnnnnnnnnnnnnnnnnnnnnnnnnnnnnnnnnnnnnnnnnnnnnnnnnnnnnnnnnnnnnnnnnnnnnnnnnnnnnnnnnnnnnnnnnnnnnnnnnnnnnnnnnnnnnnnnnnnnnnnnnnnnnnataaaggtacatttctttctgctagtagaaagtgagttataccatggtagaaacaagccagtttttagctgtgaagctacactgccacctgtgccaacagaggcattacgcttaagtggttccaagccctcctgcactatgagctttyaaggaccagtaaggyaattaaaatcaaggtaggacttaaacttaactgatgctcctcaacaaatcgcagtgtgaacactctgtagattaacagcttaacttctttagtcttcagtggcaaagtaggaaattcaaggttgtcttactctggaataggctgtgtctgtacctgctgtgactccagaattgatcttcatgaaaacaagctctggaggataaaatgagaggaagaccggggtcctcccctcttgactaacttctgcactaagcccagcacgataaagagcacacagggcactt

SEQ ID NO: 91861 - DNA, 599 bp, Chicken  19866894404042_2
  misc_feature (1)..(137): n is any nucleotide
nnnnnnnnnnnnnnnnnnnnnnnnnnnnnnnnnnnnnnnnnnnnnnnnnnnnnnnnnnnnnnnnnnnnnnnnnnnnnnnnnnnnnnnnnnnnnnnnnnnnnnnnnnnnnnnnnnnnnnnnnnnnnnnnnnnnnnnnnataaaggtacatttctttctgctagtagaaagtgagttataccatggtagaaacaagccagtttttagctgtgaagctacactgccacctgtgccaacagaggcattacgcttaagtggttccaagccctcctgcactatgagctttyaaggaccagtaaggyaattaaaatcaaggtaggacttaaacttaactgatgctcctcaacaaatcgcagtgtgaacactctgtagattaacagcttaacttctttagtcttcagtggcaaagtaggaaattcaaggttgtcttactctggaataggctgtgtctgtacctgctgtgactccagaattgatcttcatgaaaacaagctctggaggataaaatgagaggaagaccggggtcctcccctcttgactaacttctgcactaagcccagcacgataaagagcacacagggcactttccctataatctaca

SEQ ID NO: 91862 - DNA, 599 bp, Chicken  19866894404046_1
  misc_feature (1)..(38): n is any nucleotide
nnnnnnnnnnnnnnnnnnnnnnnnnnnnnnnnnnnnnntgatgctttgcttttacagtgcagttgtgttattcttaccttaaatacaacgttcttacgccagcgggtatggcctgccctgctgctgggtggagtgctgggtgggtggctaccacttctcctccttctgctggtcatgatcaggggaaaccagggccagtgggtggggagagtgttggtactccaggcacagtgatatgtccttgccacagccttgttgagctgcagtatcagccttcagtttggtctggggcgagaggasggagagctgagatattctctctctgttttatgtgtgggctattcactcctcaaatggatgatcatcaggaacacccgcatggaggggctgaggttggaagggacctttggaggccacctggcccaactcctgctccagcagggacagccagagcagagtgcccagggccacgtccaggtggctttggaagatctctaaggagaagactccacggcctctgggcaacctatgctagtgctcagttacctacaaaggaaaaaacgtgtcttctaatgttcacatgtactagtttgtgtcca

SEQ ID NO: 91863 - DNA, 600 bp, Chicken  19866894404049_1
cgctaaggccggttggatggggccctgggcagcttagctgggggggggggcagccctgcccacagcagggggtggggctgggtgggctttgagggctcttcctacctaatccactctataacttagtctgcaatcagttggaagggcactgtcttagtttcagctgggatggagttgttttcttcagagtgtctgctatgatgctatattttggttatatgagaaaaacagtattgataatgcacccatgttcatagttgctgctcaacagtgctatactgagccaaggccattcacagkgaagggcccaaggaactggggggggaacagaattaggacagatgagttaaactgccaagggacattccatgcaagatgacatcatgcagaaggagttgtatagwgggtggaagttcatctcatctatctctcttcagctgcttgggggcctagctgggcattggtcagtgggtggtgagcaattgcttgttcatcacttgttatatacatttatagatatttatcataattattatccttttccttttctctgttgtagtaaatagttttatctcaactcatgagttctttgttttggtt

SEQ ID NO: 91864 - DNA, 600 bp, Chicken  19866894404049_2
cctaatccactctataacttagtctgcaatcagttggaagggcactgtcttagtttcagctgggatggagttgttttcttcagagtgtctgctatgatgctatattttggttatatgagaaaaacagtattgataatgcacccatgttcatagttgctgctcaacagtgctatactgagccaaggccattcacagkgaagggcccaaggaactggggggggaacagaattaggacagatgagttaaactgccaagggacattccatgcaagatgacatcatgcagaaggagttgtatagwgggtggaagttcatctcatctatctctcttcagctgcttgggggcctagctgggcattggtcagtgggtggtgagcaattgcttgttcatcacttgttatatacatttatagatatttatcataattattatccttttccttttctctgttgtagtaaatagttttatctcaactcatgagttctttgttttggtttcttttttttttgattccctcycatctcactgggaagagggggagtgagcaaatgactgtgtggtgctgagccacctgcagggttaaaccacaagaggagctgg

SEQ ID NO: 91865 - DNA, 525 bp, Chicken  19866894404049_3
gggaacagaattaggacagatgagttaaactgccaagggacattccatgcaagatgacatcatgcagaaggagttgtatagwgggtggaagttcatctcatctatctctcttcagctgcttgggggcctagctgggcattggtcagtgggtggtgagcaattgcttgttcatcacttgttatatacatttatagatatttatcataattattatccttttccttttctctgttgtagtaaatagttttatctcaactcatgagttctttgttttggtttcttttttttttgattccctcycatctcactgggaagagggggagtgagcaaatgactgtgtggtgctgagccacctgcagggttaaaccacaagaggagctggaaaaggaattattagttctgattcttgtttagtgtttaacttcttcctgggacaaacacttgaaccgtttgagtaattaacaatttaataatattgcaatttatttttaagaagcggtagataaaactttgcagttttagaga

SEQ ID NO: 91866 - DNA, 599 bp, Chicken  19866894404051_1
  misc_feature (1)..(180): n is any nucleotide
nnnnnnnnnnnnnnnnnnnnnnnnnnnnnnnnnnnnnnnnnnnnnnnnnnnnnnnnnnnnnnnnnnnnnnnnnnnnnnnnnnnnnnnnnnnnnnnnnnnnnnnnnnnnnnnnnnnnnnnnnnnnnnnnnnnnnnnnnnnnnnnnnnnnnnnnnnnnnnnnnnnnnnnnnnnnnnnnnnnnttgtgcaataaccttctgggtgatcttgctgctgggatatgaatcccatgccccagctttaggaaagcttggagttacctggagaatgacaggcatgatcaaacctactggcttgggaaytggggagaggaagattttcagctgttccattctacatgccagtgagtgccatgcctagctgagttttgtgttgcatttttattttcccctttctttgacctgtttctgaaggtgttaactcatgcattctagttgccatatgtgttgttttatcaggaggttgatgtcttagttcagttgttacaacacctcaaattctctcatatgccaacaattttgttgttgtacagctgagccaccactgatgagcaagtactcatgttttcattacactcagggtgtgggcagcatcagttttt

SEQ ID NO: 91867 - DNA, 599 bp, Chicken  19866894404055_1
  misc_feature (1)..(7): n is any nucleotide
nnnnnnnctactgctaggatgagacagctcatttcccaattcaggacggtgacgccccatctcccatgtgatccttgttccccccagtctttccatataatactgactcactccatatggtgctgactcatttctcccagcaacgtgtcatcgcaccaagcctctgcaccttcagcaagacccaagggagtctgacagcagggtcgctcccgggctccacataccaactttgtctactcacaacaggaatctacagcatctgttgacccaaattgccttatgaagcccattttttgagtyctggctgcctggtgctgacagctttggtgtcttcctgtgggtgtcccagcagctgcctccagtatcctcagtgggagtaacagggcaccggaacatggggagcctacggacaggactgggacacatctcgtttttcaggtacgtaacacctgcttcagtccttttgtcccaatagctttgagctgcctttccactggcaaacatyaggtaaatggattagccaggcacaattcccactctggggttactggggcagatgggctctcctggctggtctcatcctggggaggggactgaaa

SEQ ID NO: 91868 - DNA, 555 bp, Chicken  19866894404055_2
gctcccgggctccacataccaactttgtctactcacaacaggaatctacagcatctgttgacccaaattgccttatgaagcccattttttgagtyctggctgcctggtgctgacagctttggtgtcttcctgtgggtgtcccagcagctgcctccagtatcctcagtgggagtaacagggcaccggaacatggggagcctacggacaggactgggacacatctcgtttttcaggtacgtaacacctgcttcagtccttttgtcccaatagctttgagctgcctttccactggcaaacatyaggtaaatggattagccaggcacaattcccactctggggttactggggcagatgggctctcctggctggtctcatcctggggaggggactgaaagctgcagtgggagaatccttctcccccccaggttttctgctctctagagagtcattccacatcagaggcctgagaaacagtacttcttcccaaacatttgtttccattaggcatttaaatagctccctgggacatttcatcctgcctgcagtagccaaatt

SEQ ID NO: 91869 - DNA, 600 bp, Chicken  19866894404065_1
gatgggtacaaggaatctctattgtaaatgaaatgaagtcacagcatttggttatactcatcaaaagcatatagggacataaggcatacacaattcacactaaaggtttattggttttgctacagtgaggattttcaggggaagaagtcttcaagttgaaacagtcccatactgttttgcatgaaaaacaataaaaattctgattctgcaagttgttagaagcagtttcagtagctgctggagttatcagctcctgacattgactacttaaaattgatcccatttggtgatctcaattcraaataatcatgcttactattccagccctgcctctgtgatgtgagtggcgtattttttgcttaaataagaaataaagtatttgattcacaggcagcagagaagtgtttttaatatatatgtaattcaggcaaaaccaattccattttcacagctataggagcttatatcacgtctgttggagatgggagtttaatgtaagtcgtaagttatatctgacaattcctcagaagaaaaaccaaagctatttggaaaactgagattctcagaagaaaagtgaagagaaaaatgtcaaatgaagca

SEQ ID NO: 91870 - DNA, 600 bp, Chicken  19866894404065_2
gtttttaatatatatgtaattcaggcaaaaccaattccattttcacagctataggagcttatatcacgtctgttggagatgggagtttaatgtaagtcgtaagttatatctgacaattcctcagaagaaaaaccaaagctatttggaaaactgagattctcagaagaaaagtgaagagaaaaatgtcaaatgaagcatctcgtttacttcagaaggttaagaatggattcaaaatgagaaacaaatatttcagctgtaggggcgtcatcttttttttcttctgggctagaaatactcaayratgccaatgttcaaaattaaactattgtattcgaaattaatctactgtgttcagaattgtctgcagaaagtctaaatgtttacaccaaaattagcatctgccagtgagtaaagcagatgtgggatatttttgttagaaaaaccttctctgcaagtaatttcagaaattctatgtatctggaagccatggcagctgcagtgaaggacagagcttgttggtgtggctgcacctaggttaatacataaaccaggtgaagagcctaaattggactggtgctgggcactctcccattgctgccc

SEQ ID NO: 91871 - DNA, 600 bp, Chicken  19866894404065_3
tttttaatatatatgtaattcaggcaaaaccaattccattttcacagctataggagcttatatcacgtctgttggagatgggagtttaatgtaagtcgtaagttatatctgacaattcctcagaagaaaaaccaaagctatttggaaaactgagattctcagaagaaaagtgaagagaaaaatgtcaaatgaagcatctcgtttacttcagaaggttaagaatggattcaaaatgagaaacaaatatttcagctgtaggggcgtcatcttttttttcttctgggctagaaatactcaayratgccaatgttcaaaattaaactattgtattcgaaattaatctactgtgttcagaattgtctgcagaaagtctaaatgtttacaccaaaattagcatctgccagtgagtaaagcagatgtgggatatttttgttagaaaaaccttctctgcaagtaatttcagaaattctatgtatctggaagccatggcagctgcagtgaaggacagagcttgttggtgtggctgcacctaggttaatacataaaccaggtgaagagcctaaattggactggtgctgggcactctcccattgctgccca

SEQ ID NO: 91872 - DNA, 600 bp, Chicken  19866894404073_1
cattcacatgctggtggggatgaaataattaaattgtctatagttctgctggcttgtttattcacatagtaccatgaaccccatcatcattcaacaacagcaaacaggaaatgtgtagggaggagtagaagaccataaacacgtatgatattttatcaagtaccaaatactcgtccagtttctgatcatttcaggtttatcatccatgaaattggtctccccatgcacagttttattatgttgtgcatagttaaactttaaccatagattaaccatagagtgaaatgtaaatgatggatkgaattctgttgctttttgctttaatctgagttttcttttagctttttgtcagatgttcttacgcatttagatgtgtgggctttgtgtgtgggctttcttggttttggttttatttcttggtgtttttatggtaagaactaaatgttctgaaagtttacaaaaagctaattcagttttctgaactgagctttttaggatttgactactgtttgttgatgaagttctttagccttttatagaaaaggaagttgctgtttctcaggggtttctacccgaattaggaaatgtccatacatagaa

SEQ ID NO: 91873 - DNA, 600 bp, Chicken  19866894404075_1
ctccccagctgcctatttctgtcctgtgtctcagcgtgtttgtgttggatttggctgcgtttgacagagaagcttgggattttgggtgacgtgggagcatagtttatgcaattcttcagcctgcaagttcctaatcgggtcttattccacacatttggcaattaaatgagatctcatgtagagacttcccctgcctgagcctcccagcccccacctgctgggaatggggcaggtggctccaggtggtggtactggactaaccccagagtaaccccatttcagggtctctgagcactgacrgagctgtggtgtccctgttcattgcagggagtgggactgatggcctttraggttcccttccaactcaaacctttctatgataaccccagaacagccccagagtgatggcagcaccatcctcacacgctgccctctctcacttaygggctcgttgatgactggcagcatggagcgctgtactaaagacaaacgaatatataagcacaggttgtgtctatgctcctgcatggccgggctgcaatttcaggatctttgttggaagcacacagacccagagcacaggctgtggggtttcggctc

SEQ ID NO: 91874 - DNA, 600 bp, Chicken  19866894404075_2
tttggctgcgtttgacagagaagcttgggattttgggtgacgtgggagcatagtttatgcaattcttcagcctgcaagttcctaatcgggtcttattccacacatttggcaattaaatgagatctcatgtagagacttcccctgcctgagcctcccagcccccacctgctgggaatggggcaggtggctccaggtggtggtactggactaaccccagagtaaccccatttcagggtctctgagcactgacrgagctgtggtgtccctgttcattgcagggagtgggactgatggcctttraggttcccttccaactcaaacctttctatgataaccccagaacagccccagagtgatggcagcaccatcctcacacgctgccctctctcacttaygggctcgttgatgactggcagcatggagcgctgtactaaagacaaacgaatatataagcacaggttgtgtctatgctcctgcatggccgggctgcaatttcaggatctttgttggaagcacacagacccagagcacaggctgtggggtttcggctcatggatgtccccatgcagccccttgtgcctgctgggggaagctgaaggc

SEQ ID NO: 91875 - DNA, 600 bp, Chicken  19866894404075_3
ttccacacatttggcaattaaatgagatctcatgtagagacttcccctgcctgagcctcccagcccccacctgctgggaatggggcaggtggctccaggtggtggtactggactaaccccagagtaaccccatttcagggtctctgagcactgacrgagctgtggtgtccctgttcattgcagggagtgggactgatggcctttraggttcccttccaactcaaacctttctatgataaccccagaacagccccagagtgatggcagcaccatcctcacacgctgccctctctcacttaygggctcgttgatgactggcagcatggagcgctgtactaaagacaaacgaatatataagcacaggttgtgtctatgctcctgcatggccgggctgcaatttcaggatctttgttggaagcacacagacccagagcacaggctgtggggtttcggctcatggatgtccccatgcagccccttgtgcctgctgggggaagctgaaggccacgtggctcttcatcatcactgggggagatgtgtctcattcttccccttcccttccttcttctcacgcggtgctgctcccaatgttgtcaatgt

SEQ ID NO: 91876 - DNA, 599 bp, Chicken  19866894404076_1
  misc_feature (1)..(45): n is any nucleotide
nnnnnnnnnnnnnnnnnnnnnnnnnnnnnnnnnnnnnnnnnnnnnacattttggataagatctcagagcagacttttgctgttgcatacacagctgaactgagcgagttacctgcctgtcatcactagtcacccttctgcctcctgtatgctcatcctttcagacagcggctgtaatgccttttaaatgtacctttaaatcattttacccactccttcgtgtcattgccaaagtcactgattaaattaaaaaaaaaccacagtattcgcattgctcattacatactggtagctcatttaygaaaagaatgggaatcaaaagcaaatttttgcctgattctgagctttcccaggcatttggacacagcttctggtcagtgtcccacagtgaaggaagaaaggagaaacacatgagggcagcgaccaccatgtgggccaaatcccagtcactgatgccaaggaagttccagcactgacttgtgtagcaacaagagctagaagctttggaagatcagagacatttatggagttgacaataaagatgctaattctccttaatcctctaagtcccatgttatgtgcagtatgctattaagtaaa

SEQ ID NO: 91877 - DNA, 599 bp, Chicken  19866894404090_1
  misc_feature (1)..(199): n is any nucleotide
nnnnnnnnnnnnnnnnnnnnnnnnnnnnnnnnnnnnnnnnnnnnnnnnnnnnnnnnnnnnnnnnnnnnnnnnnnnnnnnnnnnnnnnnnnnnnnnnnnnnnnnnnnnnnnnnnnnnnnnnnnnnnnnnnnnnnnnnnnnnnnnnnnnnnnnnnnnnnnnnnnnnnnnnnnnnnnnnnnnnnnnnnnnnnnnnnnnnnnnctttggtggctgtgctttaaaacagttgagctgtgcttccttattctgaactgcttttggttgaagctgcaagggcttgacgaggattaaatagtaaataytatgtggaaaaaagcattttgtgaggagaaaacggggagtgcttcactctgcttttggggcccccagcacaagaaggggatagagttgggaggataggtttggagcagggtttggcccagatggacttgtagggycctgcatcatcagccctgctgtgattctgctggggggcacaacagggcgggcacatcgtaaggtaatctgaaaaactattttttatataatagcaaaaccagaatttgctgtttttggtacaggaagaaaatggaaagagtgaaagctgtattgctgattcaga

SEQ ID NO: 91878 - DNA, 599 bp, Chicken  19866894404090_2
  misc_feature (1)..(64): n is any nucleotide
nnnnnnnnnnnnnnnnnnnnnnnnnnnnnnnnnnnnnnnnnnnnnnnnnnnnnnnnnnnnnnnnctttggtggctgtgctttaaaacagttgagctgtgcttccttattctgaactgcttttggttgaagctgcaagggcttgacgaggattaaatagtaaataytatgtggaaaaaagcattttgtgaggagaaaacggggagtgcttcactctgcttttggggcccccagcacaagaaggggatagagttgggaggataggtttggagcagggtttggcccagatggacttgtagggycctgcatcatcagccctgctgtgattctgctggggggcacaacagggcgggcacatcgtaaggtaatctgaaaaactattttttatataatagcaaaaccagaatttgctgtttttggtacaggaagaaaatggaaagagtgaaagctgtattgctgattcagatggaaacacaggggactgcaaagtggataatcctctggaggatgtgaaagagaagtctgcttatcacatagagaagaactcaaacagcgaagaagagtcgtcaaggggtgatagaactggaatcattggagagga

SEQ ID NO: 91879 - DNA, 600 bp, Chicken  19866894404090_3
gctcagatacagtaagtgagaagaaaagggagcggccacgatcccaccccaggaggagttcacaaggattgctttccagcatagaaaacgcagaggctgatggctctgagaccaagaaggaaagtttaaagaaaaaatctggaaaaacaaaaaataaaagtgattctcttgaaggtaaacggaaggatgtccagccagaaagccaaagccatggggtgtcttctcaagtagatgaaagtaagaatctgtcggggatgaatgaaagtgaattaagcagtgaagtcagcacagatgcagcaytgatgtctgcaccatctgatgtgaaaaatcaagtgctgcttgcaggtgctgacgaagctgaggggtctgccagctcaaggacttctcccagtactcagaatgtgagcgtggaacaaagcaaagctggtgtgttgccagaatctttcagtgacccacgtgtgtctgatgaagttttgaaaggagatgaaaataaatgcattgaaaagcaaagctctgtggaacagcattcgagtgttcagcctgagaacgtacaaggagcaaacacttcaggtagtgacctctcctctttgcaaatgcagg

SEQ ID NO: 91880 - DNA, 600 bp, Chicken  19866894404099_1
ctgtggctgcaggctagtctctgagattcaactgctgcaagtattttgggacttaggagaatctgagctcagtcttgcacaaggggaaaaacagctattgtcttcctttccctctctggtacacattttgtaatgcttcctgtcacagggggaatcagctgaaagtggaagctttttgctgaaagaaacacaacgtttgccattctcttctgcttgccagcagacagtaactaatgctactggagactgccttttcctgttgcctttgatatctactctgcctgcactcctgcagcctcyctgaggaggacagcacacaaatgcatgttgatttagctttgactgttatatgacagattcaagtaagtgttcagactacttgactagttccagatgcaggggctgtcttccattaaatatgtaatccgcagatgatcagcgtggtatggaattgagtggcctgccatgttgagcttctatgagataacaataacatatatacagtaaagaagttaaagttgctttgggattctgtattgttgctcttgctgtaagctgctcctccccgagcttgactcatctctcacaggtggctgcaca

SEQ ID NO: 91881 - DNA, 599 bp, Chicken  19866894404100_1
  misc_feature (1)..(121): n is any nucleotide
nnnnnnnnnnnnnnnnnnnnnnnnnnnnnnnnnnnnnnnnnnnnnnnnnnnnnnnnnnnnnnnnnnnnnnnnnnnnnnnnnnnnnnnnnnnnnnnnnnnnnnnnnnnnnnnnnnnnnnnnntgcatattcaaagattagtgtggccccctatcaaaggtagtaaaaaaacaaacctctcatgacagatcgagtgcagggagtccaacagcacaaactgtggccatctgcaacagtataaagcagcccatgaagagtcatggtcccagtatgcagtgtttaatttggatagaaatggaagrcataggatgacttactgcatttagcaatggatgctgtgaagatctgccttccagaagctgtgagcactttaagtggatattaacttcagaaaatctctgtccacatgcatgtgtattgtgccagagagcatatgagtaataaaagctcaccagaatagttgacattcctcccactcccctacaaagcgttcctcttttccaaattatcctctgaaggaaaaatcttattttccaaaactttatccaatgtgctaatgattggagggcagaagggaactcatttcttatcaacaaatttc

SEQ ID NO: 91882 - DNA, 599 bp, Chicken  19866894404108_1
  misc_feature (1)..(57): n is any nucleotide
nnnnnnnnnnnnnnnnnnnnnnnnnnnnnnnnnnnnnnnnnnnnnnnnnnnnnnnnngttggggatgccccctccctggaagcattcaaggccaggctggatagggctttgagcaacctcgcctagagggaggtgtccctgcctatagcagggggtttggaagcaggtgatcttaaaggtcccttccaacccaaaccattctatgattgttaaaataattaacataataatgttaacatgaaataattaacattttaatgttaacataattaaagtcaaaataaagtaatgaaatgatamgtttgacttttcagcaaaatcattctagaaaacaaagttgatgaagtgtcaccattcaagatggcaagaagctgttatgagccatcaactgtgtatctgtggactatgtttatattcggtttcttttttgaagtgttcatctgcatgttatttgtttttatttcacatattacttatgaagtctacatttcacttatgttcatgtaatggatacattcccaaagagcagaaatattaaaagttccatttaatttattttttgtattattttacttcctataaggaaatgaagctctatt

SEQ ID NO: 91883 - DNA, 599 bp, Chicken  19866894404109_1
  misc_feature (1)..(118): n is any nucleotide
nnnnnnnnnnnnnnnnnnnnnnnnnnnnnnnnnnnnnnnnnnnnnnnnnnnnnnnnnnnnnnnnnnnnnnnnnnnnnnnnnnnnnnnnnnnnnnnnnnnnnnnnnnnnnnnnnnnnnnattagatttgtccatagaaagacacaaataccctgttagaaactgcaaatatttaatacatttaactgaggggtttttcttagcactctagaataattcttgctagaaatctttgccataatgataaaaaaaataacatcagtacataaaatgtgaacatcaggattggttcatatcaaacrtatatttatccctgagctaagtatacaggcatgtagatcatctaatttcaaatgattacctccagtgctagattggaagaggtaacacatgcattaccctattttttcctcaacttgttcgtgacttcatacaattcttatcatctctacttcatcttccttcttcaactgagcttcacggacagataagtcagactacttagctatcctttgtttcagagcttatctgtgtctgattacctatgcagtctcactgggtaccttgtctgtttttmcagtattccatcttaagataagga

SEQ ID NO: 91884 - DNA, 600 bp, Chicken  19866894404109_2
catcaggattggttcatatcaaacrtatatttatccctgagctaagtatacaggcatgtagatcatctaatttcaaatgattacctccagtgctagattggaagaggtaacacatgcattaccctattttttcctcaacttgttcgtgacttcatacaattcttatcatctctacttcatcttccttcttcaactgagcttcacggacagataagtcagactacttagctatcctttgtttcagagcttatctgtgtctgattacctatgcagtctcactgggtaccttgtctgtttttmcagtattccatcttaagataaggaaaatcagagaagcacagatttacacaatggaataccaaggctctggtaatttgcagtgttttttgtttgttttcctgttgtaacgatttctatgaggagaactgcagtctactcacttttcagctgctagcgagcaaagaattgctggttccgtaaaactgactattgcaactgcaagatggaaagatcaactcagggtgcagcatatgaagtttaggattattctcttcctatatgtatcagtttacatttgtctataataaatttggatcttgt

SEQ ID NO: 91885 - DNA, 581 bp, Chicken  19866894404116_1
agatttataggtattttgtagccagatacttgtaaagcttgctaaccagcccacatccctaggtcagaccatcatttgaccatctctcaatggagccaacagtaatgaattccacatactgtctaaatacagatgattgaaacaaagaggccatcaatttacttccatgtaggtaaatattttgtaaagattttgtaaagataatcaatattgtcatagattcaatggtacttccagtgcagaagtttggaggaaagagcaggggagaaatttcatgagatctttattactatctcaagmtggaatattagatacagttcattgtggtcagagaacaagatcccagcagcacagaagtgaccgagaagataaaaagtcttatcagttcaaataactaaataatttcccaatcaataacagaatgaaaattgttgttatgtctgttgttacattcgttaaagaaccacttcaacacaggagggaataaggcactttaatagtcctaaataaaatgaggacctgaaaaaaaaacatatgcttaaaaggtctttcatcgaaggagatacattctaataagaagt

SEQ ID NO: 91886 - DNA, 600 bp, Chicken  19866894404129_1
tggtttagcccgtggtagcggccgcttgtttgctcgctccccacacgacagctcctcgccgagtcccccgtcgaagaacacagattgcaactccgactcttcgctctcggaacagtgagagatgctcacggtcaacacagtccagatacggtgtcagatccccttctccaagacacaaacgggtacagccatccgcgggttgctggtggtcggttacagcatcagaccccgcaacagtccgatgtcagaaacacagcagccgcgtgtgtgtctgcctcctcctctctctcagatgttacygaagtggaagtgcttactggaagtgctgtaggaagatacgggtttctgcgatgcttatatttagatcaatttaaattaagaggaagtgatcacctacgaaggcaggtgtcctgcagcttcccactagacctaagaggtgacagtcgactttttttctttctttttttcttttttttctttttttttttttttttttctctctctaagtttggtcatttcgacacctgcgtgcaagaatacgttgtgctctcgcagtctgtgcttttgcctgagcaaagggagctcatttcggtctggctt

SEQ ID NO: 91887 - DNA, 600 bp, Chicken  19866894404133_1
taactggtgcttgcttgagtcatccaaaaattataactgattttgatacccgtaaggaaaatagtcctggaaattggcttcacctggccacatgctgctgtgggtggcatctaccttaatttaaggcagggaccatttcccagttattaaagagctgtctctgagaaaaaggcttttggtatcatttagctgaaaagggattttgttcactccagaaacagcccaggtgtgtgaggagacacaaaagttggctgtgaagggcaagggcaaggctgaaagctgtgggacatcaacagcaaycytcagtcaaagccttatcagctcagctctgtgggtttcttctatcccagtttcatcattttctcttctttacctccttgggaaatagtcaaaagagaargatctktgcatccttgttttggcagctttcacctttgcatgtagagatgagaaagcttgacctgttgagcataggacataggaacaagcttgggctttttgggggtgactctaggacttgggccccatgctcactgtttagttctgccttgctttcatcacctgctttgcaagtgtgatcatccattgcaccttactctc

SEQ ID NO: 91888 - DNA, 600 bp, Chicken  19866894404133_2
actggtgcttgcttgagtcatccaaaaattataactgattttgatacccgtaaggaaaatagtcctggaaattggcttcacctggccacatgctgctgtgggtggcatctaccttaatttaaggcagggaccatttcccagttattaaagagctgtctctgagaaaaaggcttttggtatcatttagctgaaaagggattttgttcactccagaaacagcccaggtgtgtgaggagacacaaaagttggctgtgaagggcaagggcaaggctgaaagctgtgggacatcaacagcaaycytcagtcaaagccttatcagctcagctctgtgggtttcttctatcccagtttcatcattttctcttctttacctccttgggaaatagtcaaaagagaargatctktgcatccttgttttggcagctttcacctttgcatgtagagatgagaaagcttgacctgttgagcataggacataggaacaagcttgggctttttgggggtgactctaggacttgggccccatgctcactgtttagttctgccttgctttcatcacctgctttgcaagtgtgatcatccattgcaccttactctcaa

SEQ ID NO: 91889 - DNA, 600 bp, Chicken  19866894404133_3
tgggtggcatctaccttaatttaaggcagggaccatttcccagttattaaagagctgtctctgagaaaaaggcttttggtatcatttagctgaaaagggattttgttcactccagaaacagcccaggtgtgtgaggagacacaaaagttggctgtgaagggcaagggcaaggctgaaagctgtgggacatcaacagcaaycytcagtcaaagccttatcagctcagctctgtgggtttcttctatcccagtttcatcattttctcttctttacctccttgggaaatagtcaaaagagaargatctktgcatccttgttttggcagctttcacctttgcatgtagagatgagaaagcttgacctgttgagcataggacataggaacaagcttgggctttttgggggtgactctaggacttgggccccatgctcactgtttagttctgccttgctttcatcacctgctttgcaagtgtgatcatccattgcaccttactctcaaaagctccaggcaamaattccctatacaaaactggcataatatgaaaattgcaagtgggaagaatgacctcactgaagaagtgtcattatcttgtgata

SEQ ID NO: 91890 - DNA, 600 bp, Chicken  19866894404133_4
gcatctaccttaatttaaggcagggaccatttcccagttattaaagagctgtctctgagaaaaaggcttttggtatcatttagctgaaaagggattttgttcactccagaaacagcccaggtgtgtgaggagacacaaaagttggctgtgaagggcaagggcaaggctgaaagctgtgggacatcaacagcaaycytcagtcaaagccttatcagctcagctctgtgggtttcttctatcccagtttcatcattttctcttctttacctccttgggaaatagtcaaaagagaargatctktgcatccttgttttggcagctttcacctttgcatgtagagatgagaaagcttgacctgttgagcataggacataggaacaagcttgggctttttgggggtgactctaggacttgggccccatgctcactgtttagttctgccttgctttcatcacctgctttgcaagtgtgatcatccattgcaccttactctcaaaagctccaggcaamaattccctatacaaaactggcataatatgaaaattgcaagtgggaagaatgacctcactgaagaagtgtcattatcttgtgatatggaca

SEQ ID NO: 91891 - DNA, 590 bp, Chicken  19866894404133_5
atcagctcagctctgtgggtttcttctatcccagtttcatcattttctcttctttacctccttgggaaatagtcaaaagagaargatctktgcatccttgttttggcagctttcacctttgcatgtagagatgagaaagcttgacctgttgagcataggacataggaacaagcttgggctttttgggggtgactctaggacttgggccccatgctcactgtttagttctgccttgctttcatcacctgctttgcaagtgtgatcatccattgcaccttactctcaaaagctccaggcaamaattccctatacaaaactggcataatatgaaaattgcaagtgggaagaatgacctcactgaagaagtgtcattatcttgtgatatggacaaatgaactacaggaatctgaacccaagcaatatttcctgtctgagaatattaaataataataataataataaatatatatatatgttgtctgaaaggcagaataattgtagaaggaggatacatctccactgcctgagtgacacaaaacatagccagaacagacttctcaggtgcacaggtttctgtgtgccaaccataa

SEQ ID NO: 91892 - DNA, 599 bp, Chicken  19866894404134_1
  misc_feature (1)..(135): n is any nucleotide
nnnnnnnnnnnnnnnnnnnnnnnnnnnnnnnnnnnnnnnnnnnnnnnnnnnnnnnnnnnnnnnnnnnnnnnnnnnnnnnnnnnnnnnnnnnnnnnnnnnnnnnnnnnnnnnnnnnnnnnnnnnnnnnnnnnnnnnactccctcccccttctcccctgctgtttcctggcaaagtgacagtagataaatcaggagaaaggctggtgatagcagacactggacatcacaggattttggtcactctgaaaaatgggcaaattctacacactattggaggtaaggttatgtaaattttgttacrgactttttcgtttaggggtggactatattctgtggtgctcctatgacctggtaattcataagcattggtagaattttttttctcagaaaatcacttttactggacatgggagggataaagcatagtactatcaatgagaaactcttatgtttctcattgatayatttgatttgaaaacaccaaaataaattacaaaaatacagtttttctttcttctgaaagagcttcaaatgcatttrgatttaagtgatgtatatccacatctagcagcaagatggggaaaagagataagaatgctt

SEQ ID NO: 91893 - DNA, 600 bp, Chicken  19866894404134_2
cctggcaaagtgacagtagataaatcaggagaaaggctggtgatagcagacactggacatcacaggattttggtcactctgaaaaatgggcaaattctacacactattggaggtaaggttatgtaaattttgttacrgactttttcgtttaggggtggactatattctgtggtgctcctatgacctggtaattcataagcattggtagaattttttttctcagaaaatcacttttactggacatgggagggataaagcatagtactatcaatgagaaactcttatgtttctcattgatayatttgatttgaaaacaccaaaataaattacaaaaatacagtttttctttcttctgaaagagcttcaaatgcatttrgatttaagtgatgtatatccacatctagcagcaagatggggaaaagagataagaatgcttccctttccaagaggaaaaagagaacattggattatggtggtggtgtgtttcaggggtgctttttgtttgtttttgaatgaagagcacctctcagtaggatcatcaaactycctataccagtggcacgaacagtgcactgagtcattatccaaatgaaccttggt

SEQ ID NO: 91894 - DNA, 600 bp, Chicken  19866894404134_3
ctctgaaaaatgggcaaattctacacactattggaggtaaggttatgtaaattttgttacrgactttttcgtttaggggtggactatattctgtggtgctcctatgacctggtaattcataagcattggtagaattttttttctcagaaaatcacttttactggacatgggagggataaagcatagtactatcaatgagaaactcttatgtttctcattgatayatttgatttgaaaacaccaaaataaattacaaaaatacagtttttctttcttctgaaagagcttcaaatgcatttrgatttaagtgatgtatatccacatctagcagcaagatggggaaaagagataagaatgcttccctttccaagaggaaaaagagaacattggattatggtggtggtgtgtttcaggggtgctttttgtttgtttttgaatgaagagcacctctcagtaggatcatcaaactycctataccagtggcacgaacagtgcactgagtcattatccaaatgaaccttggtcaaagtatcagtctcaatgctcctctcctacaagaagcacaaacagggtttattacgacaagagtcawacagtttg

SEQ ID NO: 91895 - DNA, 448 bp, Chicken  19866894404134_4
gagggataaagcatagtactatcaatgagaaactcttatgtttctcattgatayatttgatttgaaaacaccaaaataaattacaaaaatacagtttttctttcttctgaaagagcttcaaatgcatttrgatttaagtgatgtatatccacatctagcagcaagatggggaaaagagataagaatgcttccctttccaagaggaaaaagagaacattggattatggtggtggtgtgtttcaggggtgctttttgtttgtttttgaatgaagagcacctctcagtaggatcatcaaactycctataccagtggcacgaacagtgcactgagtcattatccaaatgaaccttggtcaaagtatcagtctcaatgctcctctcctacaagaagcacaaacagggtttattacgacaagagtcawacagtttgatctctgttttgtatgtg

SEQ ID NO: 91896 - DNA, 326 bp, Chicken  19866894404134_5
tgcatttrgatttaagtgatgtatatccacatctagcagcaagatggggaaaagagataagaatgcttccctttccaagaggaaaaagagaacattggattatggtggtggtgtgtttcaggggtgctttttgtttgtttttgaatgaagagcacctctcagtaggatcatcaaactycctataccagtggcacgaacagtgcactgagtcattatccaaatgaaccttggtcaaagtatcagtctcaatgctcctctcctacaagaagcacaaacagggtttattacgacaagagtcawacagtttgatctctgttttgtatgtg

SEQ ID NO: 91897 - DNA, 600 bp, Chicken  19866894404145_1
tacggaatcactgtagctgttacaccacagtggcaatatgctggtgccagagcttgttgtgtgactcatcagaagccagtgctatttgatgtgctgctgcactgcaaaaggacatgacggaatgtgaagcagcatggcagaaactggaatgcactattttcttccaaatttgatatctgctaagtcctagccatcaacagaacagggcctgggtgaacatgacagccttattatattaaaaataaattaatttaaaaagcacaataagagtgcacagtacttttgcatccagcttccagwacatcattgctgtctcacagaggactggatgatatcagttagctaccacactgagcagaggcactgcagagcacaatgtgtgtccctgcacccctgagatcagcrcaaacrtgagaactatcctcctgggcattctgastggtgtgcttgtgagagcaaaccttagagcctcccctccctgacattttaatttaaaygcaatggggaggacttccagaggcttccactgatggtcctgatggtggtatgacactgatgcctgcacccacccaagtgactattctcttcattaattcctgt

SEQ ID NO: 91898 - DNA, 600 bp, Chicken  19866894404145_2
aaaaggacatgacggaatgtgaagcagcatggcagaaactggaatgcactattttcttccaaatttgatatctgctaagtcctagccatcaacagaacagggcctgggtgaacatgacagccttattatattaaaaataaattaatttaaaaagcacaataagagtgcacagtacttttgcatccagcttccagwacatcattgctgtctcacagaggactggatgatatcagttagctaccacactgagcagaggcactgcagagcacaatgtgtgtccctgcacccctgagatcagcrcaaacrtgagaactatcctcctgggcattctgastggtgtgcttgtgagagcaaaccttagagcctcccctccctgacattttaatttaaaygcaatggggaggacttccagaggcttccactgatggtcctgatggtggtatgacactgatgcctgcacccacccaagtgactattctcttcattaattcctgttactctcaaatggagggcagcaggtaagagccaacaggacaccagctcagagtttagcctggatatttggtaagctttttttgttgctcatcccattcttacagc

SEQ ID NO: 91899 - DNA, 600 bp, Chicken  19866894404145_3
acatgacggaatgtgaagcagcatggcagaaactggaatgcactattttcttccaaatttgatatctgctaagtcctagccatcaacagaacagggcctgggtgaacatgacagccttattatattaaaaataaattaatttaaaaagcacaataagagtgcacagtacttttgcatccagcttccagwacatcattgctgtctcacagaggactggatgatatcagttagctaccacactgagcagaggcactgcagagcacaatgtgtgtccctgcacccctgagatcagcrcaaacrtgagaactatcctcctgggcattctgastggtgtgcttgtgagagcaaaccttagagcctcccctccctgacattttaatttaaaygcaatggggaggacttccagaggcttccactgatggtcctgatggtggtatgacactgatgcctgcacccacccaagtgactattctcttcattaattcctgttactctcaaatggagggcagcaggtaagagccaacaggacaccagctcagagtttagcctggatatttggtaagctttttttgttgctcatcccattcttacagcaagcct

SEQ ID NO: 91900 - DNA, 600 bp, Chicken  19866894404145_4
gaaactggaatgcactattttcttccaaatttgatatctgctaagtcctagccatcaacagaacagggcctgggtgaacatgacagccttattatattaaaaataaattaatttaaaaagcacaataagagtgcacagtacttttgcatccagcttccagwacatcattgctgtctcacagaggactggatgatatcagttagctaccacactgagcagaggcactgcagagcacaatgtgtgtccctgcacccctgagatcagcrcaaacrtgagaactatcctcctgggcattctgastggtgtgcttgtgagagcaaaccttagagcctcccctccctgacattttaatttaaaygcaatggggaggacttccagaggcttccactgatggtcctgatggtggtatgacactgatgcctgcacccacccaagtgactattctcttcattaattcctgttactctcaaatggagggcagcaggtaagagccaacaggacaccagctcagagtttagcctggatatttggtaagctttttttgttgctcatcccattcttacagcaagcctcttatactaactctttcccagcacaatc

SEQ ID NO: 91901 - DNA, 600 bp, Chicken  19866894404145_5
cagaacagggcctgggtgaacatgacagccttattatattaaaaataaattaatttaaaaagcacaataagagtgcacagtacttttgcatccagcttccagwacatcattgctgtctcacagaggactggatgatatcagttagctaccacactgagcagaggcactgcagagcacaatgtgtgtccctgcacccctgagatcagcrcaaacrtgagaactatcctcctgggcattctgastggtgtgcttgtgagagcaaaccttagagcctcccctccctgacattttaatttaaaygcaatggggaggacttccagaggcttccactgatggtcctgatggtggtatgacactgatgcctgcacccacccaagtgactattctcttcattaattcctgttactctcaaatggagggcagcaggtaagagccaacaggacaccagctcagagtttagcctggatatttggtaagctttttttgttgctcatcccattcttacagcaagcctcttatactaactctttcccagcacaatcttacccagatttagaagtgggacaaagacagctcactgatgccctctaacartaacca

SEQ ID NO: 91902 - DNA, 380 bp, Chicken  19866894404145_6
ttaaaygcaatggggaggacttccagaggcttccactgatggtcctgatggtggtatgacactgatgcctgcacccacccaagtgactattctcttcattaattcctgttactctcaaatggagggcagcaggtaagagccaacaggacaccagctcagagtttagcctggatatttggtaagctttttttgttgctcatcccattcttacagcaagcctcttatactaactctttcccagcacaatcttacccagatttagaagtgggacaaagacagctcactgatgccctctaacartaaccaaacagaagggagaactcagctcagttccctgttttatcacatatttcctatatgtcctttagaagtaattcagg

SEQ ID NO: 91903 - DNA, 599 bp, Chicken  19866894404147_1
  misc_feature (1)..(46): n is any nucleotide
nnnnnnnnnnnnnnnnnnnnnnnnnnnnnnnnnnnnnnnnnnnnnnaatgcaatgagaatagatgggcaagagtagtaataaattctaccccatagccttacctagcaagcctatagtctaggcacaggaagaagtatctaaggcacagtgtaattattctaggtatatcttctctgaattttctgtatcacctggaaaagtaggagccatggcagcgttatgttgtttgtctccagacaccaatgcctctttcattcagaattgtctcctttgtgatgattttgtagtaagtcgttacraaattgccagatgccagagctttccttaacagacagtggaatttcacttagatattatgaagacacaatccgatttgcatcctgtcactggtatatgtcacatataatatattctgcaaacgtttttatttctctgcaaagagatttgcctccctgttcaagtaaagcattcgcacgcaattcttctgcttgggatgacgctgatctctttacagattaccaaaccaaaactcctgacaggttattcgaaatatccttcttctgtggccaatgtgacaaaagtgcccagcatgatggaa

SEQ ID NO: 91904 - DNA, 599 bp, Chicken  19866894404152_1
  misc_feature (1)..(49): n is any nucleotide
nnnnnnnnnnnnnnnnnnnnnnnnnnnnnnnnnnnnnnnnnnnnnnnnntgaaggagctgacaaaggaatatcctttggttgacattctaatagcagatcctagggagagctactgtgtatttagaaagactatgtttagtgacgtgaggacaggttggctgctttgtgcttcccacgtacctaaaggctttccgaggctgagtccatcctacctctgtgagctaccctgggttcggttcagcttgtcagaaatccttcagggaactcttatagtccacaagtgcacagaacagcattgkgcagtgtgcagcaggcggggagatggtgagtgcagggcaaggtgtctggctatgattgcrccagctggctctgtgacacttatgttgtatatttctgcaaatactatttcatcttcagggcagggatgaggacaggataaacattttgaacgggagccatcaatagagcgagctgcgggggctgctgcctgctgtggggtcagcaattgcagccgtctgcgaggtacagcacgagagtgaggttaattccagcatttcctgatatctgagggctgtcttggcaccagtaaggttgcacc

SEQ ID NO: 91905 - DNA, 600 bp, Chicken  19866894404152_2
acaaaggaatatcctttggttgacattctaatagcagatcctagggagagctactgtgtatttagaaagactatgtttagtgacgtgaggacaggttggctgctttgtgcttcccacgtacctaaaggctttccgaggctgagtccatcctacctctgtgagctaccctgggttcggttcagcttgtcagaaatccttcagggaactcttatagtccacaagtgcacagaacagcattgkgcagtgtgcagcaggcggggagatggtgagtgcagggcaaggtgtctggctatgattgcrccagctggctctgtgacacttatgttgtatatttctgcaaatactatttcatcttcagggcagggatgaggacaggataaacattttgaacgggagccatcaatagagcgagctgcgggggctgctgcctgctgtggggtcagcaattgcagccgtctgcgaggtacagcacgagagtgaggttaattccagcatttcctgatatctgagggctgtcttggcaccagtaaggttgcaccactgatgccacactacaagctctatcattcacgccctggagcagatttgcagccttgtttt

SEQ ID NO: 91906 - DNA, 600 bp, Chicken  19866894404152_3
cactgatgccacactacaagctctatcattcacgccctggagcagatttgcagccttgttttcagaagacagcgtttcctgcggatatgttcctgcacttgtctgagcggagcgggctgtaacccccaggactacagcacaacccgcagcaagtactgccaatagcaccgctgctgctgggaggggatctgtgtttttcatgtcactgtctgattgctgtatcctcagacaccactgacagaagcaatggctgaaagcccaggagcatagctcacaggctcttcctcctctgctaccagrgaatggtgccctttccttgatcaggctgatgggaaacatcacaggatggaggtgagcgcacagcaatgtgctggacacgatgtgctgatggagcctgaacgacctccgccatgctgtggtggatctgcgaggtgctgccggcctggcacygagctgggccccggctctgctgggcaaaggacccgcgggcaaaggrgagcgcagagccaagtcagaagtggggaagggatatagcctttacattgagattagcactcgttttaacttggtggatgcattaatctattcacactcacacga

SEQ ID NO: 91907 - DNA, 600 bp, Chicken  19866894404152_4
aagtactgccaatagcaccgctgctgctgggaggggatctgtgtttttcatgtcactgtctgattgctgtatcctcagacaccactgacagaagcaatggctgaaagcccaggagcatagctcacaggctcttcctcctctgctaccagrgaatggtgccctttccttgatcaggctgatgggaaacatcacaggatggaggtgagcgcacagcaatgtgctggacacgatgtgctgatggagcctgaacgacctccgccatgctgtggtggatctgcgaggtgctgccggcctggcacygagctgggccccggctctgctgggcaaaggacccgcgggcaaaggrgagcgcagagccaagtcagaagtggggaagggatatagcctttacattgagattagcactcgttttaacttggtggatgcattaatctattcacactcacacgagcactgtacagtaatcatgtgcattaactccaatacctaatttacattttattttgttaggaaacaatgaagtattttttttacccctcacttagaaaatggaatawttaattgattgcaaaaacaacatttaaaaacggtttcttaact

SEQ ID NO: 91908 - DNA, 579 bp, Chicken  19866894404152_5
ttcatgtcactgtctgattgctgtatcctcagacaccactgacagaagcaatggctgaaagcccaggagcatagctcacaggctcttcctcctctgctaccagrgaatggtgccctttccttgatcaggctgatgggaaacatcacaggatggaggtgagcgcacagcaatgtgctggacacgatgtgctgatggagcctgaacgacctccgccatgctgtggtggatctgcgaggtgctgccggcctggcacygagctgggccccggctctgctgggcaaaggacccgcgggcaaaggrgagcgcagagccaagtcagaagtggggaagggatatagcctttacattgagattagcactcgttttaacttggtggatgcattaatctattcacactcacacgagcactgtacagtaatcatgtgcattaactccaatacctaatttacattttattttgttaggaaacaatgaagtattttttttacccctcacttagaaaatggaatawttaattgattgcaaaaacaacatttaaaaacggtttcttaactaataatacaacccaaaatgaggtgg

SEQ ID NO: 91909 - DNA, 368 bp, Chicken  19866894404152_6
gccatgctgtggtggatctgcgaggtgctgccggcctggcacygagctgggccccggctctgctgggcaaaggacccgcgggcaaaggrgagcgcagagccaagtcagaagtggggaagggatatagcctttacattgagattagcactcgttttaacttggtggatgcattaatctattcacactcacacgagcactgtacagtaatcatgtgcattaactccaatacctaatttacattttattttgttaggaaacaatgaagtattttttttacccctcacttagaaaatggaatawttaattgattgcaaaaacaacatttaaaaacggtttcttaactaataatacaacccaaaatgaggtgg

SEQ ID NO: 91910 - DNA, 600 bp, Chicken  19866894404156_1
tgcactgcagcccttcaggtgaggactgcactcctgggttaaacgttccttccttaaattaaagaaaatgcttcatttcaaattgctaagcctagctgaggaggctggctgaccagaagtgaccattgtgaaagcaaaccatcggctcccgtattgcccttcctgcacgcacataggaggggaaaagcgttctccctgtctgcctcggtcacaaatgcagctcgggcagctgcacggggccctcctttgctgcagggctgcctgggggatggaagcagcggggcatggagctgagctgtrctgcagggctccgagcggggtcggctccggcagcawmggctgccctgcgaggtgccggcagcgacagcagcacaaaggaacgtatcgttcataaacgcggcttagcccagctcccttatctcaggctgggaatgcccggagagctgggctggccgcttgygccttgcaggcggcaggactgtgctgctcagagcaagacaasgcacgtcccgaatagctctcgccagcatctccttcctgctgccgggtgagagccgtatctcttagacggggcgttgcagcagcgcggggggcggatgg

SEQ ID NO: 91911 - DNA, 600 bp, Chicken  19866894404156_2
ggttaaacgttccttccttaaattaaagaaaatgcttcatttcaaattgctaagcctagctgaggaggctggctgaccagaagtgaccattgtgaaagcaaaccatcggctcccgtattgcccttcctgcacgcacataggaggggaaaagcgttctccctgtctgcctcggtcacaaatgcagctcgggcagctgcacggggccctcctttgctgcagggctgcctgggggatggaagcagcggggcatggagctgagctgtrctgcagggctccgagcggggtcggctccggcagcawmggctgccctgcgaggtgccggcagcgacagcagcacaaaggaacgtatcgttcataaacgcggcttagcccagctcccttatctcaggctgggaatgcccggagagctgggctggccgcttgygccttgcaggcggcaggactgtgctgctcagagcaagacaasgcacgtcccgaatagctctcgccagcatctccttcctgctgccgggtgagagccgtatctcttagacggggcgttgcagcagcgcggggggcggatgggcagcttgcctggctgcagtgggggaagtacaaggg

SEQ ID NO: 91912 - DNA, 600 bp, Chicken  19866894404156_3
gttaaacgttccttccttaaattaaagaaaatgcttcatttcaaattgctaagcctagctgaggaggctggctgaccagaagtgaccattgtgaaagcaaaccatcggctcccgtattgcccttcctgcacgcacataggaggggaaaagcgttctccctgtctgcctcggtcacaaatgcagctcgggcagctgcacggggccctcctttgctgcagggctgcctgggggatggaagcagcggggcatggagctgagctgtrctgcagggctccgagcggggtcggctccggcagcawmggctgccctgcgaggtgccggcagcgacagcagcacaaaggaacgtatcgttcataaacgcggcttagcccagctcccttatctcaggctgggaatgcccggagagctgggctggccgcttgygccttgcaggcggcaggactgtgctgctcagagcaagacaasgcacgtcccgaatagctctcgccagcatctccttcctgctgccgggtgagagccgtatctcttagacggggcgttgcagcagcgcggggggcggatgggcagcttgcctggctgcagtgggggaagtacaagggc

SEQ ID NO: 91913 - DNA, 600 bp, Chicken  19866894404156_4
tcctgcacgcacataggaggggaaaagcgttctccctgtctgcctcggtcacaaatgcagctcgggcagctgcacggggccctcctttgctgcagggctgcctgggggatggaagcagcggggcatggagctgagctgtrctgcagggctccgagcggggtcggctccggcagcawmggctgccctgcgaggtgccggcagcgacagcagcacaaaggaacgtatcgttcataaacgcggcttagcccagctcccttatctcaggctgggaatgcccggagagctgggctggccgcttgygccttgcaggcggcaggactgtgctgctcagagcaagacaasgcacgtcccgaatagctctcgccagcatctccttcctgctgccgggtgagagccgtatctcttagacggggcgttgcagcagcgcggggggcggatgggcagcttgcctggctgcagtgggggaagtacaagggctaacaaagcccttctcaaaactgctgcctgggctcggagcgaggagaagtgaaatcgggggggaggaacgagccgtgccctggcgtagcacagcagccccgtacgtgcgttggctccgcaggg

SEQ ID NO: 91914 - DNA, 600 bp, Chicken  19866894404156_5
cctcggtcacaaatgcagctcgggcagctgcacggggccctcctttgctgcagggctgcctgggggatggaagcagcggggcatggagctgagctgtrctgcagggctccgagcggggtcggctccggcagcawmggctgccctgcgaggtgccggcagcgacagcagcacaaaggaacgtatcgttcataaacgcggcttagcccagctcccttatctcaggctgggaatgcccggagagctgggctggccgcttgygccttgcaggcggcaggactgtgctgctcagagcaagacaasgcacgtcccgaatagctctcgccagcatctccttcctgctgccgggtgagagccgtatctcttagacggggcgttgcagcagcgcggggggcggatgggcagcttgcctggctgcagtgggggaagtacaagggctaacaaagcccttctcaaaactgctgcctgggctcggagcgaggagaagtgaaatcgggggggaggaacgagccgtgccctggcgtagcacagcagccccgtacgtgcgttggctccgcagggggctccgctccctcccgggcagacggcgctccgcgggccctg

SEQ ID NO: 91915 - DNA, 599 bp, Chicken  19866894404158_1
  misc_feature (1)..(98): n is any nucleotide
nnnnnnnnnnnnnnnnnnnnnnnnnnnnnnnnnnnnnnnnnnnnnnnnnnnnnnnnnnnnnnnnnnnnnnnnnnnnnnnnnnnnnnnnnnnnnnnnnnagtgtgcaggatagtgtacctaagtgtacctagtgtacctaagaacagggtgctagcgggggtcctcaccctgctgaaccttatgatgaatacgcaagacagcaagctggcaatgctcaccaacagggctttacactacatttgatgagggagggggatgtattgctgagaagagtaaggaggctgtgatacttttgggaayagtgggggaaaacctgaatttttttccagagatttttgggagggcttctccatgaagataatgtggccaaaaaaccagctggagtgcctgaataccaacgtatgcaacatgggccataagcatgaggaacaggaaactgtaatgcagtaggaaaactgtaatcttattgctatcgtggaaagatggtgggatgattctcatatctggagtactgatatatgactacgtgcatttttggagtgataggagagttaagagaggtagggaggtggcactcagtgttaacaagtggatagact

SEQ ID NO: 91916 - DNA, 599 bp, Chicken  19866894404161_1
  misc_feature (1)..(238): n is any nucleotide
nnnnnnnnnnnnnnnnnnnnnnnnnnnnnnnnnnnnnnnnnnnnnnnnnnnnnnnnnnnnnnnnnnnnnnnnnnnnnnnnnnnnnnnnnnnnnnnnnnnnnnnnnnnnnnnnnnnnnnnnnnnnnnnnnnnnnnnnnnnnnnnnnnnnnnnnnnnnnnnnnnnnnnnnnnnnnnnnnnnnnnnnnnnnnnnnnnnnnnnnnnnnnnnnnnnnnnnnnnnnnnnnnnnnnnnnnnnnnnttgcttctctgtagggaaatgatgttttatcttctgcttttagctcagtgtcatgctgctgkaaggattgctcactgttatccctgtgggttgctctggtgaaagtgtgtttgtaggacaggcccacaaacttttaagtgtgtcttaaaggaattgctgagagtgtgtttccagtccctttcaaagatacagcgtgcttcatccacaagctttccgagtttgaaaccatagattcaaacaaacaaaatgccctgctgtaaagtgggtaacatctaytaatgaatgcatgygcagtgtcacagtgttaaggagatcaattccactagatgctcagctgtctcttggcctccagctgctgctt

SEQ ID NO: 91917 - DNA, 599 bp, Chicken  19866894404161_2
  misc_feature (1)..(24): n is any nucleotide
nnnnnnnnnnnnnnnnnnnnnnnnttgcttctctgtagggaaatgatgttttatcttctgcttttagctcagtgtcatgctgctgkaaggattgctcactgttatccctgtgggttgctctggtgaaagtgtgtttgtaggacaggcccacaaacttttaagtgtgtcttaaaggaattgctgagagtgtgtttccagtccctttcaaagatacagcgtgcttcatccacaagctttccgagtttgaaaccatagattcaaacaaacaaaatgccctgctgtaaagtgggtaacatctaytaatgaatgcatgygcagtgtcacagtgttaaggagatcaattccactagatgctcagctgtctcttggcctccagctgctgctttccctacgcttcacacctaaattgcatgaaaagtatttgtggcagtagggaaggtggagttaggtacatttgaggcatcttctgctaaaataagtagatatttcttctgcactcttcagaatagtttaatctgagtgyattttgaaattgcactgtaatattaaaagaaaagcagtacttacaatcagaaactccatccacttctttttatcta

SEQ ID NO: 91918 - DNA, 599 bp, Chicken  19866894404161_3
  misc_feature (1)..(10): n is any nucleotide
nnnnnnnnnnttgcttctctgtagggaaatgatgttttatcttctgcttttagctcagtgtcatgctgctgkaaggattgctcactgttatccctgtgggttgctctggtgaaagtgtgtttgtaggacaggcccacaaacttttaagtgtgtcttaaaggaattgctgagagtgtgtttccagtccctttcaaagatacagcgtgcttcatccacaagctttccgagtttgaaaccatagattcaaacaaacaaaatgccctgctgtaaagtgggtaacatctaytaatgaatgcatgygcagtgtcacagtgttaaggagatcaattccactagatgctcagctgtctcttggcctccagctgctgctttccctacgcttcacacctaaattgcatgaaaagtatttgtggcagtagggaaggtggagttaggtacatttgaggcatcttctgctaaaataagtagatatttcttctgcactcttcagaatagtttaatctgagtgyattttgaaattgcactgtaatattaaaagaaaagcagtacttacaatcagaaactccatccacttctttttatctaccatgtaatttctt

SEQ ID NO: 91919 - DNA, 408 bp, Chicken  19866894404161_4
catccacaagctttccgagtttgaaaccatagattcaaacaaacaaaatgccctgctgtaaagtgggtaacatctaytaatgaatgcatgygcagtgtcacagtgttaaggagatcaattccactagatgctcagctgtctcttggcctccagctgctgctttccctacgcttcacacctaaattgcatgaaaagtatttgtggcagtagggaaggtggagttaggtacatttgaggcatcttctgctaaaataagtagatatttcttctgcactcttcagaatagtttaatctgagtgyattttgaaattgcactgtaatattaaaagaaaagcagtacttacaatcagaaactccatccacttctttttatctaccatgtaatttcttctggcatatcttcttatg

SEQ ID NO: 91920 - DNA, 600 bp, Chicken  19866894404166_1
caaaaaagatgttcagaatgagtccacgcataatggcgaaaatggaagtattcaatcagaacacacagaagcttttttagtttactggatacatttctttctgagaattcaattttttgtttcaactgttgctcccaacttgatttgctaccactaacagtataactcaaccacttaccagtcaagttccagtatcagtatcttataataattttaaaaatgtttctgctgcttcatcatgtaacagcaataaactagtaacctttaaggaatctcccagcataggattttcagctaagyttgttaaatcaaaataacttttttcatcaaaagagttgcttgtggaatttaagcccttacaacaaatgatccttgtcaaattcagccagtggtttgcccgttttgcaatagaaacacttctaaaataaagcatctgctcagaagcagtaacaaaaagtcttaagaaaacataggaataagtacacataagtagaaactagaagtcattcagatagatgtacgaagaaaaagtgcagtaagtaaaaaggatttattagatgtttattactactacataaaaataattattctttaaattca

SEQ ID NO: 91921 - DNA, 600 bp, Chicken  19866894404168_1
gatggtttggcacgttgacatctgtagctccaacagaatggggtcttgagattcaccttcctctataagaagcaaatccagaagatgcctgccgctagttgatgggaaaaataaccagtatcttttatttatattatggtcagtatggctttcaggtgtttagcacctgcttgtcagacagtctacatacaataaccagcaggagaaaattccaacctagactactggtagagtacacctagaatattttatgtgcatctctgtcaataacattaccagtactcatgggacatgaaaagragctaaagatctgtaaaataggtagaagtagtatttattatctatgtaaatgctggatttcctagatttaaattaaaaaaaaaaaaaaaagagrtgggkgkaggtaggaaataaaagagcagcgaggtgcaccaacttgcacatgtgggaaacacaattgggtcaggcagtgtttggccaaagaataggcctgtaaaaatttttcatggctattcctatttctgtccttccataccttgccagagtgtatacataagaacagtcattcccgcttctaatccacacaggcaatacagtggc

SEQ ID NO: 91922 - DNA, 600 bp, Chicken  19866894404168_2
ctagttgatgggaaaaataaccagtatcttttatttatattatggtcagtatggctttcaggtgtttagcacctgcttgtcagacagtctacatacaataaccagcaggagaaaattccaacctagactactggtagagtacacctagaatattttatgtgcatctctgtcaataacattaccagtactcatgggacatgaaaagragctaaagatctgtaaaataggtagaagtagtatttattatctatgtaaatgctggatttcctagatttaaattaaaaaaaaaaaaaaaagagrtgggkgkaggtaggaaataaaagagcagcgaggtgcaccaacttgcacatgtgggaaacacaattgggtcaggcagtgtttggccaaagaataggcctgtaaaaatttttcatggctattcctatttctgtccttccataccttgccagagtgtatacataagaacagtcattcccgcttctaatccacacaggcaatacagtggccacaaattgtaagtcttttgctgtgatattgtggcttgaaaactctaatgattatctgaaattggattttgaggctgggatcttccttgttaag

SEQ ID NO: 91923 - DNA, 600 bp, Chicken  19866894404168_3
tgatgggaaaaataaccagtatcttttatttatattatggtcagtatggctttcaggtgtttagcacctgcttgtcagacagtctacatacaataaccagcaggagaaaattccaacctagactactggtagagtacacctagaatattttatgtgcatctctgtcaataacattaccagtactcatgggacatgaaaagragctaaagatctgtaaaataggtagaagtagtatttattatctatgtaaatgctggatttcctagatttaaattaaaaaaaaaaaaaaaagagrtgggkgkaggtaggaaataaaagagcagcgaggtgcaccaacttgcacatgtgggaaacacaattgggtcaggcagtgtttggccaaagaataggcctgtaaaaatttttcatggctattcctatttctgtccttccataccttgccagagtgtatacataagaacagtcattcccgcttctaatccacacaggcaatacagtggccacaaattgtaagtcttttgctgtgatattgtggcttgaaaactctaatgattatctgaaattggattttgaggctgggatcttccttgttaagcgcac

SEQ ID NO: 91924 - DNA, 600 bp, Chicken  19866894404168_4
atgggaaaaataaccagtatcttttatttatattatggtcagtatggctttcaggtgtttagcacctgcttgtcagacagtctacatacaataaccagcaggagaaaattccaacctagactactggtagagtacacctagaatattttatgtgcatctctgtcaataacattaccagtactcatgggacatgaaaagragctaaagatctgtaaaataggtagaagtagtatttattatctatgtaaatgctggatttcctagatttaaattaaaaaaaaaaaaaaaagagrtgggkgkaggtaggaaataaaagagcagcgaggtgcaccaacttgcacatgtgggaaacacaattgggtcaggcagtgtttggccaaagaataggcctgtaaaaatttttcatggctattcctatttctgtccttccataccttgccagagtgtatacataagaacagtcattcccgcttctaatccacacaggcaatacagtggccacaaattgtaagtcttttgctgtgatattgtggcttgaaaactctaatgattatctgaaattggattttgaggctgggatcttccttgttaagcgcactg

SEQ ID NO: 91925 - DNA, 540 bp, Chicken  19866894404173_1
tcagaaagactcagggctgtggggagggatatcacggggacaggactgcagagctgaatggcagcatggggaatccaccaacctgggtaggcactgcacagaatatctgaggccgtaccttgagttctcttgagttttgctgtagcttacagcagggcctacccttcataactggaggggcacccagcccccaggagtgaccgagtgcccaggtccatcagcagcagctgcacactgacattgttatggcattgatgaaccatagatgactgctgtttgattgagtgatactatcagagyggcaagaatttttgaccgacgtattcctaggaacattcactctggttgaaatacagctggcacagccactgtgggctctaaaggtgcaaaggatgcattgaactttcagtccttcagtctgtgctgcagccttcttacagtaacaaggtgctgacagtgaatattaagagcactcatttcagtgatatttgatattgatcaggaaaaaaagatgaaaattgaaatgaatttgtgtttctg

SEQ ID NO: 91926 - DNA, 600 bp, Chicken  19866894404189_1
tgtgctcattggaccttcacaaacatttttgttcaccaatccagaaaaactgtttggtttttgttttgctgtgcttctttagctgtctggcagttgtctggagtacaagtcttatgaggaatggctgagggaactgggattgtttagtctgaagaaaaggaggctcaggggaaagcctatcgctctctacaactatgaatcagtattattattaccttattagtatacagcattaatattactgatacctatcagtatcagtttattgaggcacctgatgagcaccagaggcagtaaaarcagcagtgtaggagagagctgaggaaatcaaactgccctctttcaacagcagtaacattttgatcagcttcactcagatgcacaaagtggcaggccaaggtatgatagctggaagagatgccttcctcaggcaagctgctgagatgttttcagaaagaagtgctggaagtcctgtactgggctgaccaagcagaactgaacctacagcactctcaggactccgatttcagcagcgtatgttactccatgtaagaaagggtgagagtttaaggccagaatgtgctctccatccaggggatt

SEQ ID NO: 91927 - DNA, 600 bp, Chicken  19866894404189_2
aacagcagtaacattttgatcagcttcactcagatgcacaaagtggcaggccaaggtatgatagctggaagagatgccttcctcaggcaagctgctgagatgttttcagaaagaagtgctggaagtcctgtactgggctgaccaagcagaactgaacctacagcactctcaggactccgatttcagcagcgtatgttactccatgtaagaaagggtgagagtttaaggccagaatgtgctctccatccaggggatttcacacttcatttttaatagaccaagttaggtttcctcaaaatragctactgaagacaaatttcctcttgattcagaatcacatatcatcagaccatgaagcacaagtgtctccccagcagccatgtgacctaggcaaattctgctgtcccragagctccacagaagaactttgttttctccagcaaaaactaacccacttttctgttaacttcagtaacttgctacattagtcatatgtagacagaacagagcaactgtgatacttctatcaggaccagccaccatgaataacagaggaggaatacctcagaagacagaaacaacacttccagactgtatttc

SEQ ID NO: 91928 - DNA, 600 bp, Chicken  19866894404189_3
gaaagaagtgctggaagtcctgtactgggctgaccaagcagaactgaacctacagcactctcaggactccgatttcagcagcgtatgttactccatgtaagaaagggtgagagtttaaggccagaatgtgctctccatccaggggatttcacacttcatttttaatagaccaagttaggtttcctcaaaatragctactgaagacaaatttcctcttgattcagaatcacatatcatcagaccatgaagcacaagtgtctccccagcagccatgtgacctaggcaaattctgctgtcccragagctccacagaagaactttgttttctccagcaaaaactaacccacttttctgttaacttcagtaacttgctacattagtcatatgtagacagaacagagcaactgtgatacttctatcaggaccagccaccatgaataacagaggaggaatacctcagaagacagaaacaacacttccagactgtatttcccactccaggtagtgttaactcttcaagttcagggtctatgtattgggtacaattgtgctgcctgccagccagcattatctgcaaaacctgacagaaaaagatgctga

SEQ ID NO: 91929 - DNA, 599 bp, Chicken  19866894404197_1
  misc_feature (1)..(34): n is any nucleotide
nnnnnnnnnnnnnnnnnnnnnnnnnnnnnnnnnnttgctggggtacaagtacacagcagagccgagatgcccatccccttgtggcagctcctgtggcacatcaacagctgccagaccccactgactgcagtagatgtggatggcaggatgaaatcagctgtgggggaacacacacagtgggtgtgcagcctgtgttttaagcagctgcatgctctaccttcatttcccatctttcctaaagctgagcacttaaaaccccaccaaaccaagcatctccctgccgtctctacagctgtcatyggaggtgaagttttgctaaaagacacgcaggtgaaatttcaggaatgggacaactcctgttagagcaggacctgaaaaacagggtaaataccctgttatctgaccagccaccttgccgtgagtgaggtgtccaccccgtgatacagacctgctgggtgagcagggatgctcggtgcagggcactgtgtggccagtgccactgagttaatgagaaggcaccaaaacagggatttattccttaccgggagcagaggggatagctgcagccacaggaacggctgagctggcctggtgctttt

SEQ ID NO: 91930 - DNA, 599 bp, Chicken  19866894404204_1
  misc_feature (1)..(20): n is any nucleotide
nnnnnnnnnnnnnnnnnnnntgatgcagagggattgcttgtacaccaggtaggtggttgtgagccagctgaagatactaagagaaaatcaatgctaaccttgcaacgtgaagctagataaagactatattgttcatgtctgtggtattcatcaaatgatgcccatttagtggctgcatatagaggaataatttcataaaagaaataactaatgtcttctggggattatcagttacaaacccttcttgttcatctaggaggaaccttacaaaagagtgcctgccttttctacaaacgtgtyctaaagcagattcaaaatcacataatatacatataatactaacattcaatatagcaatacatatgaaaattaccttctggtttgtaatcacaggaagcctaattcagcaggtgaaataygaggtggctgcctaccaaaaagaagttattctttttaacatttggcactctgttgtacccagtgactaatgtttcgtgtacgttactatggcttttgtaccaaacaatactttaggtaggaggacaatttaaaaacatttctatttttgaaggtcaggcctcagtggctgggatggtatg

SEQ ID NO: 91931 - DNA, 600 bp, Chicken  19866894404204_2
aagactatattgttcatgtctgtggtattcatcaaatgatgcccatttagtggctgcatatagaggaataatttcataaaagaaataactaatgtcttctggggattatcagttacaaacccttcttgttcatctaggaggaaccttacaaaagagtgcctgccttttctacaaacgtgtyctaaagcagattcaaaatcacataatatacatataatactaacattcaatatagcaatacatatgaaaattaccttctggtttgtaatcacaggaagcctaattcagcaggtgaaataygaggtggctgcctaccaaaaagaagttattctttttaacatttggcactctgttgtacccagtgactaatgtttcgtgtacgttactatggcttttgtaccaaacaatactttaggtaggaggacaatttaaaaacatttctatttttgaaggtcaggcctcagtggctgggatggtatgattaaaacaaatccagtttcattacaaatgtaaataaattatgaaggctctttttatcattctcttcttgttaaaattgaaagaactggggaaaaaaaaaatctgactgccagtagaaca

SEQ ID NO: 91932 - DNA, 600 bp, Chicken  19866894404210_1
cctgcttcatggctcttccctgttgtcatgcagcatccctgcagatgtggccccatcccatggtggggatgcagcccttgggtatgaagcacagggcagatgcaccccctgcccagcacaccacagcagcacagaaagctatgccacaggaagggtcagtgccgtttttcatggcctttcttgttcactttatgtttgcaaaaggagtcaacagtgggatatcactgcatgactcagaactggagccatccgtactgtaaacagcgcttccagctttcacagtgttctcccccaccagcyggtctggtaagctttgctgggagtccgaaagtccagaatggaggtttcctcttttaagtggtatcagaggaagatgcagtgcacctcagtgctggctcatccakaagtgaaatgccacttgcttctattgagttcggggtgrctcacccctcactgtgtgtcccaaggacatcaggggtcaccccagygtttcaggttgtacctggctaggtcccagttacctggaggctgccaacaggtgaggcccagcctcagcagctctggtctcttctctgggtgcctgctgcgaggagaaaaagc

SEQ ID NO: 91933 - DNA, 600 bp, Chicken  19866894404210_2
ccccctgcccagcacaccacagcagcacagaaagctatgccacaggaagggtcagtgccgtttttcatggcctttcttgttcactttatgtttgcaaaaggagtcaacagtgggatatcactgcatgactcagaactggagccatccgtactgtaaacagcgcttccagctttcacagtgttctcccccaccagcyggtctggtaagctttgctgggagtccgaaagtccagaatggaggtttcctcttttaagtggtatcagaggaagatgcagtgcacctcagtgctggctcatccakaagtgaaatgccacttgcttctattgagttcggggtgrctcacccctcactgtgtgtcccaaggacatcaggggtcaccccagygtttcaggttgtacctggctaggtcccagttacctggaggctgccaacaggtgaggcccagcctcagcagctctggtctcttctctgggtgcctgctgcgaggagaaaaagcacagggggataggtcccgcagcggggaaggagttaagtggctgaccagctgccgcctgtgaggcactgaattcctctccgtgcagcccagcagccagcacaggg

SEQ ID NO: 91934 - DNA, 600 bp, Chicken  19866894404210_3
gccacaggaagggtcagtgccgtttttcatggcctttcttgttcactttatgtttgcaaaaggagtcaacagtgggatatcactgcatgactcagaactggagccatccgtactgtaaacagcgcttccagctttcacagtgttctcccccaccagcyggtctggtaagctttgctgggagtccgaaagtccagaatggaggtttcctcttttaagtggtatcagaggaagatgcagtgcacctcagtgctggctcatccakaagtgaaatgccacttgcttctattgagttcggggtgrctcacccctcactgtgtgtcccaaggacatcaggggtcaccccagygtttcaggttgtacctggctaggtcccagttacctggaggctgccaacaggtgaggcccagcctcagcagctctggtctcttctctgggtgcctgctgcgaggagaaaaagcacagggggataggtcccgcagcggggaaggagttaagtggctgaccagctgccgcctgtgaggcactgaattcctctccgtgcagcccagcagccagcacagggacaggctatatttagagggctgataaaggcttggtgcc

SEQ ID NO: 91935 - DNA, 597 bp, Chicken  19866894404210_4
tttatgtttgcaaaaggagtcaacagtgggatatcactgcatgactcagaactggagccatccgtactgtaaacagcgcttccagctttcacagtgttctcccccaccagcyggtctggtaagctttgctgggagtccgaaagtccagaatggaggtttcctcttttaagtggtatcagaggaagatgcagtgcacctcagtgctggctcatccakaagtgaaatgccacttgcttctattgagttcggggtgrctcacccctcactgtgtgtcccaaggacatcaggggtcaccccagygtttcaggttgtacctggctaggtcccagttacctggaggctgccaacaggtgaggcccagcctcagcagctctggtctcttctctgggtgcctgctgcgaggagaaaaagcacagggggataggtcccgcagcggggaaggagttaagtggctgaccagctgccgcctgtgaggcactgaattcctctccgtgcagcccagcagccagcacagggacaggctatatttagagggctgataaaggcttggtgccgacagttgtcctgcccctagatgaagaaggcacggggagagag

SEQ ID NO: 91936 - DNA, 600 bp, Chicken  19866894404219_1
acaagaatttctgttatattctgttgcatgatgacaattcaatattttgaaataacagaagaggggaatgccaaggatatttcagttgatcatagcaagcctgtgaactcaggtgtgatttggctgtaaaaagtacgaatatcatcctcaaacatatcatttggggtatttttttggtagggattgagaagaactaatgcttcagtagttgaggcttgatctgtaacactgtatacagcttggttcacctgtgttcagtaaagatgaacacacttggaagttcaaaggaacagaaaccayacatttgacagactgaaagaaacttagcttsgcaaagcaagggctgacagattatatgtttttgttttgtaagtaaagttgaatgcagatttaaaaatataaagggaaaaagacactaaagcaaaaaggcagtagtatatgaacaagargaaaaawtatataaaatgaccatgaagagattaagactgcaaaatragaaagcagtttctaccattcaggaagataaaaagtcaagggaagaatcatagaatcatagaattatagaaccacagaatggcctgggttgaaaaaaacctcaaa

SEQ ID NO: 91937 - DNA, 600 bp, Chicken  19866894404219_2
tgacaattcaatattttgaaataacagaagaggggaatgccaaggatatttcagttgatcatagcaagcctgtgaactcaggtgtgatttggctgtaaaaagtacgaatatcatcctcaaacatatcatttggggtatttttttggtagggattgagaagaactaatgcttcagtagttgaggcttgatctgtaacactgtatacagcttggttcacctgtgttcagtaaagatgaacacacttggaagttcaaaggaacagaaaccayacatttgacagactgaaagaaacttagcttsgcaaagcaagggctgacagattatatgtttttgttttgtaagtaaagttgaatgcagatttaaaaatataaagggaaaaagacactaaagcaaaaaggcagtagtatatgaacaagargaaaaawtatataaaatgaccatgaagagattaagactgcaaaatragaaagcagtttctaccattcaggaagataaaaagtcaagggaagaatcatagaatcatagaattatagaaccacagaatggcctgggttgaaaaaaacctcaaagatyatctagtttcaacccccctgctatgtg

SEQ ID NO: 91938 - DNA, 600 bp, Chicken  19866894404219_3
aaacatatcatttggggtatttttttggtagggattgagaagaactaatgcttcagtagttgaggcttgatctgtaacactgtatacagcttggttcacctgtgttcagtaaagatgaacacacttggaagttcaaaggaacagaaaccayacatttgacagactgaaagaaacttagcttsgcaaagcaagggctgacagattatatgtttttgttttgtaagtaaagttgaatgcagatttaaaaatataaagggaaaaagacactaaagcaaaaaggcagtagtatatgaacaagargaaaaawtatataaaatgaccatgaagagattaagactgcaaaatragaaagcagtttctaccattcaggaagataaaaagtcaagggaagaatcatagaatcatagaattatagaaccacagaatggcctgggttgaaaaaaacctcaaagatyatctagtttcaacccccctgctatgtgcagggtcgccaaccaccagactaggctgcccagagccacatccagcctggccttcaatgtctccagggatggggcatccacaacctccttgggcaacctgttccagtgcatcaccgcc

SEQ ID NO: 91939 - DNA, 600 bp, Chicken  19866894404219_4
tcatttggggtatttttttggtagggattgagaagaactaatgcttcagtagttgaggcttgatctgtaacactgtatacagcttggttcacctgtgttcagtaaagatgaacacacttggaagttcaaaggaacagaaaccayacatttgacagactgaaagaaacttagcttsgcaaagcaagggctgacagattatatgtttttgttttgtaagtaaagttgaatgcagatttaaaaatataaagggaaaaagacactaaagcaaaaaggcagtagtatatgaacaagargaaaaawtatataaaatgaccatgaagagattaagactgcaaaatragaaagcagtttctaccattcaggaagataaaaagtcaagggaagaatcatagaatcatagaattatagaaccacagaatggcctgggttgaaaaaaacctcaaagatyatctagtttcaacccccctgctatgtgcagggtcgccaaccaccagactaggctgcccagagccacatccagcctggccttcaatgtctccagggatggggcatccacaacctccttgggcaacctgttccagtgcatcaccgccctctgtg

SEQ ID NO: 91940 - DNA, 600 bp, Chicken  19866894404219_5
aatgcttcagtagttgaggcttgatctgtaacactgtatacagcttggttcacctgtgttcagtaaagatgaacacacttggaagttcaaaggaacagaaaccayacatttgacagactgaaagaaacttagcttsgcaaagcaagggctgacagattatatgtttttgttttgtaagtaaagttgaatgcagatttaaaaatataaagggaaaaagacactaaagcaaaaaggcagtagtatatgaacaagargaaaaawtatataaaatgaccatgaagagattaagactgcaaaatragaaagcagtttctaccattcaggaagataaaaagtcaagggaagaatcatagaatcatagaattatagaaccacagaatggcctgggttgaaaaaaacctcaaagatyatctagtttcaacccccctgctatgtgcagggtcgccaaccaccagactaggctgcccagagccacatccagcctggccttcaatgtctccagggatggggcatccacaacctccttgggcaacctgttccagtgcatcaccgccctctgtgtgaaaaacttcctcctaatatccaacctaaacctcccct

SEQ ID NO: 91941 - DNA, 600 bp, Chicken  19866894404219_6
ttgacagactgaaagaaacttagcttsgcaaagcaagggctgacagattatatgtttttgttttgtaagtaaagttgaatgcagatttaaaaatataaagggaaaaagacactaaagcaaaaaggcagtagtatatgaacaagargaaaaawtatataaaatgaccatgaagagattaagactgcaaaatragaaagcagtttctaccattcaggaagataaaaagtcaagggaagaatcatagaatcatagaattatagaaccacagaatggcctgggttgaaaaaaacctcaaagatyatctagtttcaacccccctgctatgtgcagggtcgccaaccaccagactaggctgcccagagccacatccagcctggccttcaatgtctccagggatggggcatccacaacctccttgggcaacctgttccagtgcatcaccgccctctgtgtgaaaaacttcctcctaatatccaacctaaacctcccctgtcctaatttaaaaccattcccccttgtcctatcactatccatgctcgtaaacagctgtttcccctcctgttaatacgctcccttttggcttagatacttttgattctc

SEQ ID NO: 91942 - DNA, 600 bp, Chicken  19866894404220_1
ggactaagaaattgtaaaataactactctcatgccatagcaaaatttgcacctaaatgttaaatgaagccagaaatctcataaaaaataaaaataaaaaacaacaaaaaaagaacagcccccccttccccctccctaaaaaacatcacttaacaaacagaccataagcacatagctgacttaaacattttcccttttcttcactaattctgttacacatgaacagaaatatctgcacgtggttttgtgcactgaaaacatctgtaggtgctgtaaaaagagtaactgccttaatttagaytgtaagcagaacttcaggtcaaggcaagtaaaaaagcaccaaaatgatccatttttttcttttgatagcagaaaggcagcttcctcctaacatgggcagcagcagcagctctctttaaacattctgtcattggtgggaggtgaaggggaaaagcaacagagcatgttgcaaagcacctccatgtattgcaaagccatacctatggtaaagaatcccaggcttttttggttattgcaccaaatacatgtagctccccctctacccattgcttaagatgctgaagaacaaaagttataaata

SEQ ID NO: 91943 - DNA, 599 bp, Chicken  19866894404221_1
  misc_feature (1)..(189): n is any nucleotide
nnnnnnnnnnnnnnnnnnnnnnnnnnnnnnnnnnnnnnnnnnnnnnnnnnnnnnnnnnnnnnnnnnnnnnnnnnnnnnnnnnnnnnnnnnnnnnnnnnnnnnnnnnnnnnnnnnnnnnnnnnnnnnnnnnnnnnnnnnnnnnnnnnnnnnnnnnnnnnnnnnnnnnnnnnnnnnnnnnnnnnnnnnnnnctcattgtttgcaggatcagctaaacatgttaaaagctttctgtaacttttgtgcattgttgcactcccaatggtaacccttccacagagctcttcagaggaaatcagccyttcccctccctaacagttcataagtaattattggttaaccaggaattttacctcacacttcacattcatgagcagattggaaactattatgtccataataggaggaagaggctcagaattttatggtatgcttggcaataaaaaagcaaagcagttgtcacatgcgttttggcttgaatcatgacaagaagcagatgtgtggcatgccttttcctttgcttgcatttatgccaaacgacatgaaattcttcaatgttttctgttttttgttgcaatttaatcttcttctgaataaactc

SEQ ID NO: 91944 - DNA, 600 bp, Chicken  19866894404221_2
tacctcacacttcacattcatgagcagattggaaactattatgtccataataggaggaagaggctcagaattttatggtatgcttggcaataaaaaagcaaagcagttgtcacatgcgttttggcttgaatcatgacaagaagcagatgtgtggcatgccttttcctttgcttgcatttatgccaaacgacatgaaattcttcaatgttttctgttttttgttgcaatttaatcttcttctgaataaactcaacatgacagtgagtccatccagagcagttgcagtttgatgtttctgcwgcttttcagaaagtgcttgatttatgtttattttcaactaaactaggggaaagatcatgtttatcttgcggtgaaaagattaggtatactttcaggttggaaagctacaagaggcatactatcgatttacaaataatggttgtatatttttaaagcacagaggccagtgaactctctcgtacaatttagagttttattatttgggtttagatgcacttatgtctgttcaaaaatacaggcatgattaaatccaaatttatcgggtgaatccagtgtccagattgtgacatgccatatgcc

SEQ ID NO: 91945 - DNA, 600 bp, Chicken  19866894404223_1
tccagaatgccttcacaacttagcctgcctcatacagagagagatttacattccccaagcccaggtactaaatccttaaattatgatttaaatggacatttactatcatttcagattgctattagaaacaccattctcattcaaagtatccaggcaagtacaactgtagaaaagaaccatgccattgacgagaattataggctagactttttgctgctttatatagctgtgcagcctcctaaagtcaggcagttcccttctatttaacgtctgtttctaagaatctctgaaatactcacytctctctgcaaattgttactatcaacaggcatgtgatataggtgcatagataaaggtgtatccagtgttttttaaatgcctcastgctaatcacttgctgaacattagcataatccctaatgttatgcaaatgtaaggcttataaaaggatggatcattagggctattttgccaaaactttatacasgtgctctagggatttctactctccccatcatttatactcatctttaaagatcaatctgtagcaaatcagtgagtgtaaattatgttgcagaaacatcaatgaataaattttac

SEQ ID NO: 91946 - DNA, 600 bp, Chicken  19866894404223_2
gatttaaatggacatttactatcatttcagattgctattagaaacaccattctcattcaaagtatccaggcaagtacaactgtagaaaagaaccatgccattgacgagaattataggctagactttttgctgctttatatagctgtgcagcctcctaaagtcaggcagttcccttctatttaacgtctgtttctaagaatctctgaaatactcacytctctctgcaaattgttactatcaacaggcatgtgatataggtgcatagataaaggtgtatccagtgttttttaaatgcctcastgctaatcacttgctgaacattagcataatccctaatgttatgcaaatgtaaggcttataaaaggatggatcattagggctattttgccaaaactttatacasgtgctctagggatttctactctccccatcatttatactcatctttaaagatcaatctgtagcaaatcagtgagtgtaaattatgttgcagaaacatcaatgaataaattttactccagagtcttcatgtaatagagagcatggaggatcatgaagcagagacataacattggcctttatctraagagcaaaatctat

SEQ ID NO: 91947 - DNA, 600 bp, Chicken  19866894404223_3
acgagaattataggctagactttttgctgctttatatagctgtgcagcctcctaaagtcaggcagttcccttctatttaacgtctgtttctaagaatctctgaaatactcacytctctctgcaaattgttactatcaacaggcatgtgatataggtgcatagataaaggtgtatccagtgttttttaaatgcctcastgctaatcacttgctgaacattagcataatccctaatgttatgcaaatgtaaggcttataaaaggatggatcattagggctattttgccaaaactttatacasgtgctctagggatttctactctccccatcatttatactcatctttaaagatcaatctgtagcaaatcagtgagtgtaaattatgttgcagaaacatcaatgaataaattttactccagagtcttcatgtaatagagagcatggaggatcatgaagcagagacataacattggcctttatctraagagcaaaatctataaatttcattttcccatgacrattgtaactaaggtatttaaagaatttacacccattatgggagatgataaacatattttaatccacgtttccacccccttca

SEQ ID NO: 91948 - DNA, 600 bp, Chicken  19866894404223_4
ttttaaatgcctcastgctaatcacttgctgaacattagcataatccctaatgttatgcaaatgtaaggcttataaaaggatggatcattagggctattttgccaaaactttatacasgtgctctagggatttctactctccccatcatttatactcatctttaaagatcaatctgtagcaaatcagtgagtgtaaattatgttgcagaaacatcaatgaataaattttactccagagtcttcatgtaatagagagcatggaggatcatgaagcagagacataacattggcctttatctraagagcaaaatctataaatttcattttcccatgacrattgtaactaaggtatttaaagaatttacacccattatgggagatgataaacatattttaatccacgtttccacccccttcatctcccaaatcattagtgtttcatcttgaattccaatgttatttttttcaagcctcaaaattagagtcaaaccactactagcaagcatgaaatctgctggttaattactgggactagaacatgcaatattcatttgtcttccaacttataggggttacttttcagtacatctaatctttacc

SEQ ID NO: 91949 - DNA, 600 bp, Chicken  19866894404223_5
tagcataatccctaatgttatgcaaatgtaaggcttataaaaggatggatcattagggctattttgccaaaactttatacasgtgctctagggatttctactctccccatcatttatactcatctttaaagatcaatctgtagcaaatcagtgagtgtaaattatgttgcagaaacatcaatgaataaattttactccagagtcttcatgtaatagagagcatggaggatcatgaagcagagacataacattggcctttatctraagagcaaaatctataaatttcattttcccatgacrattgtaactaaggtatttaaagaatttacacccattatgggagatgataaacatattttaatccacgtttccacccccttcatctcccaaatcattagtgtttcatcttgaattccaatgttatttttttcaagcctcaaaattagagtcaaaccactactagcaagcatgaaatctgctggttaattactgggactagaacatgcaatattcatttgtcttccaacttataggggttacttttcagtacatctaatctttacctagtgatttactgttttcttttttctttttttttcc

SEQ ID NO: 91950 - DNA, 600 bp, Chicken  19866894404232_1
caggaatgcttttcctggtacagccaggcttgggcaccccaacatgactgaggtcccaaagggctctgacagcccagaactgctctgggactggatagaacccccagaaggcacaggtggcccctgctctccccacatctctgatggggtacagagcacagtataacaaaggcacatgcaatgctcagagtagggagaaagaacagtcataacttggtaatgccactatccctactaccagtgagctagagtgccccacagcacttgctgcctctgctccatcctattcttcctcccacyggctcaacgctctgtgacccatgaggtctgggatggactgtgggggcagtcactcctgcttagagtgttgttctttcatcaagtgttgctcccactctgcctccacgaccttgtacagctccatggtggtcctggcrtcctccactgaacaatgtccgcttttgccaacctgttggggacagtgacaaagggttggcacagcccagggcactgctgagaatgaaaaagccccagcaacattctcagctgctggctctgcagctaagctgctcttgtaagaggccctccagggaagagacc

SEQ ID NO: 91951 - DNA, 600 bp, Chicken  19866894404232_2
tctctgatggggtacagagcacagtataacaaaggcacatgcaatgctcagagtagggagaaagaacagtcataacttggtaatgccactatccctactaccagtgagctagagtgccccacagcacttgctgcctctgctccatcctattcttcctcccacyggctcaacgctctgtgacccatgaggtctgggatggactgtgggggcagtcactcctgcttagagtgttgttctttcatcaagtgttgctcccactctgcctccacgaccttgtacagctccatggtggtcctggcrtcctccactgaacaatgtccgcttttgccaacctgttggggacagtgacaaagggttggcacagcccagggcactgctgagaatgaaaaagccccagcaacattctcagctgctggctctgcagctaagctgctcttgtaagaggccctccagggaagagaccgaggtacaaggcagtgactgaccttgggattccccagacccaggatgggacacaacacacctccatcccctacctgagcacagaatacaaacaagcagggcaaaccttcctgctcttgcacactccccacagcccct

SEQ ID NO: 91952 - DNA, 600 bp, Chicken  19866894404233_1
aaacgcaacttttgccataagaaagcagaaacgggcacgtaagagaacacaggaagctgaagagcagaatagtgacttacttctgcagcatggcctgccactcgcctagcctgtctcctatgggaaacctcttaatggtgctctgaatcttcgctcgccactccctcatgtagtcctcgatgtcaaacacaaatggctgctgcccaaagttggcatccactatctctcctggagtctggaggcccaccgtagggtacaggtttgactgggaaagaggaagaaacatgcgtgaaactcagytttctcttagtggttctggttacgtggtttggtaaaccaaagagctgctctttaaaatgaaatgcataggagaacaagaaggggcaacagaccctttacaggtacatctcgaggaacctygtgacgtactgtgcagttattaggagctattgcataaaaccaaagcaatgggttcagtctcaaacagcaaatctaagtgttttccactgtttcaaatgaactcacttattccttgacgagaacaactatcagggtattttacacctctgatggtaaggatggtatggagccacccacaca

SEQ ID NO: 91953 - DNA, 600 bp, Chicken  19866894404233_2
tgggaaacctcttaatggtgctctgaatcttcgctcgccactccctcatgtagtcctcgatgtcaaacacaaatggctgctgcccaaagttggcatccactatctctcctggagtctggaggcccaccgtagggtacaggtttgactgggaaagaggaagaaacatgcgtgaaactcagytttctcttagtggttctggttacgtggtttggtaaaccaaagagctgctctttaaaatgaaatgcataggagaacaagaaggggcaacagaccctttacaggtacatctcgaggaacctygtgacgtactgtgcagttattaggagctattgcataaaaccaaagcaatgggttcagtctcaaacagcaaatctaagtgttttccactgtttcaaatgaactcacttattccttgacgagaacaactatcagggtattttacacctctgatggtaaggatggtatggagccacccacacaagaaattatcaacatatgagttttattaagacactgaggccttggagggtgaccaaagaaagacaatgaggctggtgattatatacaggtgaaaatataaaggctaccattgtgaaaata

SEQ ID NO: 91954 - DNA, 600 bp, Chicken  19866894404243_1
tttaaagttggaataagacaatgtctgaaacagctcaactggaatggtctcgcttgcttaattcaggggttttgtgtgcatgtgtgtttttaatgccctcccccaccgattcgctcccaatctaaaagcctgaaatatttgctttaaaatatactgctttctttccttcttagctgtcagtgttgctatacctgagctctgttgctgttctttagaatggagctcagcagcaaagctgggctgctgttggttgatgaagagcctttcctctgagggtgtggattctgaaaaacaccactrgaaaaatgcaggtacagtccattgtttagagcctgcttcttcctttccaaaggtaatactgttggatttttatgcccttattctttgcaaggtaaccattctagtgcaattcaactctatggatgggcactctggactcagctctgccatctctttctcagcagaaattttctaacagcatgtactagcaaaatcacgagatgattgggagagtctccatatttcagagaaaaagcaggaaaatatttatctgaaatagtaggagctgtggtgagacatgctggaagtgtagccaggaag

SEQ ID NO: 91955 - DNA, 600 bp, Chicken  19866894404243_2
aaaaagcaggaaaatatttatctgaaatagtaggagctgtggtgagacatgctggaagtgtagccaggaagcgatgtggagattgtagggggacaaacagcagagcagctaaagtatgttgtgttcctgacccctctctctaagaagtcacctcagaactgtttagtgctgtgtgagggtgtgtgtggtcaagttactcacaatttgaagttctgttggtccactgatggtgtgtggttgttccaagaagtcagtggcagtgagccattccctaggcaggtgcaagtcctgttggcttcstccttaacagagctccacccaaagggtaaagcagaccaagagcacatcagcagatyccataaccctcttcaattaggtgggcttgggtttgaaagggaatttctctcagtgccaacaaacccagcagccaatcttcctgttggtgtgagcggggcctgcattgcgtggcctccattttgttggcgtgagagcggggcctgcattgcgtggcctccattttgttggcgtgagcggggcctgcattgcgtggcctccattttgttggcgtgagcggggcctgcattgcgtggcctccatttt

SEQ ID NO: 91956 - DNA, 600 bp, Chicken  19866894404243_3
agtgtagccaggaagcgatgtggagattgtagggggacaaacagcagagcagctaaagtatgttgtgttcctgacccctctctctaagaagtcacctcagaactgtttagtgctgtgtgagggtgtgtgtggtcaagttactcacaatttgaagttctgttggtccactgatggtgtgtggttgttccaagaagtcagtggcagtgagccattccctaggcaggtgcaagtcctgttggcttcstccttaacagagctccacccaaagggtaaagcagaccaagagcacatcagcagatyccataaccctcttcaattaggtgggcttgggtttgaaagggaatttctctcagtgccaacaaacccagcagccaatcttcctgttggtgtgagcggggcctgcattgcgtggcctccattttgttggcgtgagagcggggcctgcattgcgtggcctccattttgttggcgtgagcggggcctgcattgcgtggcctccattttgttggcgtgagcggggcctgcattgcgtggcctccattttgttggtgtgagtggggcctgcattgcgtggcctccattttgttggtgtgagcgggg

SEQ ID NO: 91957 - DNA, 599 bp, Chicken  19866894404246_1
  misc_feature (1)..(57): n is any nucleotide
nnnnnnnnnnnnnnnnnnnnnnnnnnnnnnnnnnnnnnnnnnnnnnnnnnnnnnnnncacttcatccagctgcaaaagcaaacaaaccaggggcagtccttagggactgcataaagtagcagagatggccctgaagaagttagagtgaaaaccgtaattggatgggcacagaaaaattgtcaatctctttttattgctgtggagcagctctgatggaactccattctccaactgtactagaggggacttcatacaggatagctactatgtagaaagtagtgggtagcatggcaggctgtwgcactttctgctggaaaaaggtgcacagaaaagtgycagtgctttgcccctaagtaattttccagctgaggtgtggggagaagggtaaagcccaagtggaccarctattttagagacattatctctctttrttcaccatgcagccatagaggayataatttcatcgacatgtaatcagaaaagggaaggaacgttttctccagtcttgaaaaagtttctaaaacaccattcactttcctattctctgttagtaccaaattagtttttcatgaaggggaagraccaagctgttgattcca

SEQ ID NO: 91958 - DNA, 599 bp, Chicken  19866894404246_2
  misc_feature (1)..(21): n is any nucleotide
nnnnnnnnnnnnnnnnnnnnncacttcatccagctgcaaaagcaaacaaaccaggggcagtccttagggactgcataaagtagcagagatggccctgaagaagttagagtgaaaaccgtaattggatgggcacagaaaaattgtcaatctctttttattgctgtggagcagctctgatggaactccattctccaactgtactagaggggacttcatacaggatagctactatgtagaaagtagtgggtagcatggcaggctgtwgcactttctgctggaaaaaggtgcacagaaaagtgycagtgctttgcccctaagtaattttccagctgaggtgtggggagaagggtaaagcccaagtggaccarctattttagagacattatctctctttrttcaccatgcagccatagaggayataatttcatcgacatgtaatcagaaaagggaaggaacgttttctccagtcttgaaaaagtttctaaaacaccattcactttcctattctctgttagtaccaaattagtttttcatgaaggggaagraccaagctgttgattccagctactggtccagcactcagcatgggaatgagttgg

SEQ ID NO: 91959 - DNA, 600 bp, Chicken  19866894404246_3
gactgcataaagtagcagagatggccctgaagaagttagagtgaaaaccgtaattggatgggcacagaaaaattgtcaatctctttttattgctgtggagcagctctgatggaactccattctccaactgtactagaggggacttcatacaggatagctactatgtagaaagtagtgggtagcatggcaggctgtwgcactttctgctggaaaaaggtgcacagaaaagtgycagtgctttgcccctaagtaattttccagctgaggtgtggggagaagggtaaagcccaagtggaccarctattttagagacattatctctctttrttcaccatgcagccatagaggayataatttcatcgacatgtaatcagaaaagggaaggaacgttttctccagtcttgaaaaagtttctaaaacaccattcactttcctattctctgttagtaccaaattagtttttcatgaaggggaagraccaagctgttgattccagctactggtccagcactcagcatgggaatgagttgggttgctgtgtattggccagtcctatacaaagaccacccttcagagggttgtaaggcagaagagggaaag

SEQ ID NO: 91960 - DNA, 600 bp, Chicken  19866894404246_4
tgaagaagttagagtgaaaaccgtaattggatgggcacagaaaaattgtcaatctctttttattgctgtggagcagctctgatggaactccattctccaactgtactagaggggacttcatacaggatagctactatgtagaaagtagtgggtagcatggcaggctgtwgcactttctgctggaaaaaggtgcacagaaaagtgycagtgctttgcccctaagtaattttccagctgaggtgtggggagaagggtaaagcccaagtggaccarctattttagagacattatctctctttrttcaccatgcagccatagaggayataatttcatcgacatgtaatcagaaaagggaaggaacgttttctccagtcttgaaaaagtttctaaaacaccattcactttcctattctctgttagtaccaaattagtttttcatgaaggggaagraccaagctgttgattccagctactggtccagcactcagcatgggaatgagttgggttgctgtgtattggccagtcctatacaaagaccacccttcagagggttgtaaggcagaagagggaaagaatttgctgagctattgttatagggaa

SEQ ID NO: 91961 - DNA, 600 bp, Chicken  19866894404246_5
taattggatgggcacagaaaaattgtcaatctctttttattgctgtggagcagctctgatggaactccattctccaactgtactagaggggacttcatacaggatagctactatgtagaaagtagtgggtagcatggcaggctgtwgcactttctgctggaaaaaggtgcacagaaaagtgycagtgctttgcccctaagtaattttccagctgaggtgtggggagaagggtaaagcccaagtggaccarctattttagagacattatctctctttrttcaccatgcagccatagaggayataatttcatcgacatgtaatcagaaaagggaaggaacgttttctccagtcttgaaaaagtttctaaaacaccattcactttcctattctctgttagtaccaaattagtttttcatgaaggggaagraccaagctgttgattccagctactggtccagcactcagcatgggaatgagttgggttgctgtgtattggccagtcctatacaaagaccacccttcagagggttgtaaggcagaagagggaaagaatttgctgagctattgttatagggaatagacaaagatgagagacagaca

SEQ ID NO: 91962 - DNA, 600 bp, Chicken  19866894404246_6
ggtagcatggcaggctgtwgcactttctgctggaaaaaggtgcacagaaaagtgycagtgctttgcccctaagtaattttccagctgaggtgtggggagaagggtaaagcccaagtggaccarctattttagagacattatctctctttrttcaccatgcagccatagaggayataatttcatcgacatgtaatcagaaaagggaaggaacgttttctccagtcttgaaaaagtttctaaaacaccattcactttcctattctctgttagtaccaaattagtttttcatgaaggggaagraccaagctgttgattccagctactggtccagcactcagcatgggaatgagttgggttgctgtgtattggccagtcctatacaaagaccacccttcagagggttgtaaggcagaagagggaaagaatttgctgagctattgttatagggaatagacaaagatgagagacagacagatattacagcttcaataggaactaatccaaagttttactggaaattcagtaccattcctcttgagtttttttctttcaatagttactctcaacgagatcaagagaaggtttattcgcaatttacct

SEQ ID NO: 91963 - DNA, 600 bp, Chicken  19866894404263_1
gcgcttggatcatgcactaaatttctttgccggctgagtgttattccttgcctcctttgtttgcatcaggaaaatgccctgcatctgggcacttggactttcatggtatgctcaggaaaaccatcgactgtttgttggaagtgatgcaaatggacacaatgcaaatgtgtgtaagtggtgactctggctctccttcatacctgctctccctaactgggaacattgtctagtaacttctagccctgtcatttctgttgaagagcagtttagccctttagtggtattgactgcaaatctttmtgctttgcagcttattttccttctacaacaggccccaccatgtttaaattaatgtattcaaaaattcatagtgaggtgcagaaataaaatttcatttccaattaggtagcttgaattattactggagatggctgaaataagagttacacagggtgcacagttcatgtatgtaattctctttctagtgttttgctttctgctttttctaaaatagttctggagacaagcaatcccttgcagactcctctataatatttccattcaggtggctgcaggtatagctaaaactgctgtaagaga

SEQ ID NO: 91964 - DNA, 600 bp, Chicken  19866894404266_1
tgtggaggggctggcagcagaaggcagggttacaggagcaggaggcactgagggctgctttttggacagatggtaagagcagtgaaggagaaagccaaaagcagagaggtttgtcaaagaataaatgtaaatgctatatggggaggcaggagcatatcagtgaaagctgaggtaggaatctgagaagatcaggtgagcctctggacaatagtaacagaaagagcaattttatctttcttttaagttgtaaagagtatgcaatatggcttcactatctgaagcttccttttcccacagaaktgaaacccttgtaatggctgaaaacacaagggtgaatttccctctgttatttttgctttcaaggaagccttgtgctcctagctatagctgtgtctcagtctgaaatcagacattttaagacaggtgaaaaaaaaaaagaacacttcaaacattcacatatttaatgaatggttcatatcagatcactgtcctgagcaccagcagagctttcagtcttctgtgggggaagaagctggggcaagtgacctccaatggaattgaacagtctgtgagggctttttcctgtttaatacttttttg

SEQ ID NO: 91965 - DNA, 479 bp, Chicken  19866894404269_1
acacttggcaacttcttatcttgtccagtacgtttaagatgaaatattatacagtgtgtttccaaatgaagtgttgcacacatgataaatagtcattatattgtgcctcacagatgacatcatacttagtaatacattaggtgggtagttgtagctgtgcagctcccaggagtcaattattttgtcagccagtgctgcctcatgaaaacagcagtttttttcactggggccaggcaactagccgtgaaaggtaaactaaagtggatgttttagtgtgaaatgtgggattgcaaggctggygcaggcaaagttgcgcgtaagaagtagagagctgtgagagtgatgctttttcctcttgtccagcttgctgacagtagcagatggccaaagtgcagaagcaggtgttcagctttaaacataagggggagaaacaagtgttctgaacagggggctcgtgcctccttcaggatgagtacatc

SEQ ID NO: 91966 - DNA, 600 bp, Chicken  19866894404272_1
gctaaatgagtgtgattttctgagcaaccttcttccttaactgtgcctcttgaactatgaaatttgttgttgcttaacattgctgcacttggctcctaggtgccaggagcagcagcaggttatttatgaatgctttaaaggcccttattgtttggattaatgtaggagctgaggcaaaacaaatggaaatccaacaaaatggtattagaatcaatgctctggatttgcaccaaagtagaagaaatttgtaaaatcagaggagagaaaacttggtttactatctatcttttaattcctttytcctccttacaactttcttcatgcttacagaataatctgcgagtacagaagttgccttaaagccctttccacttggcctcgttgccaccacgttcagcaatcagtgggtaaatgctgatttgtcttgtcttgtaggtggccttactttcggcatcatctgattgtttttgtaagttttttttgaaccactgcaaacctgcatttttagcaattagtttatgcaactacttttctctttgcatctgaacagtagcgtacatggtcttgaaagatattctatgactcagatatttagaagaa

SEQ ID NO: 91967 - DNA, 600 bp, Chicken  19866894404272_2
tttatgcaactacttttctctttgcatctgaacagtagcgtacatggtcttgaaagatattctatgactcagatatttagaagaaagaaatttaagagtgtattttgattcttataggtatacaaaaaagtagcaaacagaatggagaggattgcttgagtataaagttctctagttcatatccttgcgtacatcttatcctgtgctagattcatacagccttaatcgtgcttgtcctgcatttttgtctgtgctctgccactcactgagtgatggtctccaactgtttcatcgtaagaraagcaggcagatatgccactttagacaatgaagatctttttgtgggtattgctgtaccctctgctctgctgagcgagggacagccagaacttcaccaggttttatgagcagtgcaggagacccaccttcctgtgccataggtgctttctttttgtttgtttcaaggttaagttgtaaggagcccacatgaagctggtcagtcttgacactttattgatggtttggcaatgcatgatcatctcacttttgtatgaaaatgcaagtgcaagtaggtctggaataagagcaaaattgaaatta

SEQ ID NO: 91968 - DNA, 600 bp, Chicken  19866894404278_1
acgtgagtatcatcagccctatttaatggtgagaagcagacacagagaggtgaaatattctgcttacaattatactgtatgctggagatataggtgggaataggacttgaactcctcatccctatacactgtgatgcagcctgtagaaacaaactcatttccatgatccgtacaaaactactatatccagacttcacaaaagcaaaacaatcattttacttgaagcagagaaaaacagttttatttggttctctgtgaggaaacgtcaccttcccagatttcctttcattttcttcacakcttattccctttcagcaaagcagccaacaaactcatcgttcctttgaagtttctttgctttctcccacactggcattaggtacacagaaaattctcctttccccttcagtagggaagggtgaattgtagccgggctgtttggcatcggtttaggatattatttgctatgtgcctgcaaatagctgcagtatcattgcatatctatttttatgactaactttcaaagcaacacaaaaatgaataaggatggattttctaggaaccaataaagaaagggaaggaaatagatctctgcacaaa

SEQ ID NO: 91969 - DNA, 600 bp, Chicken  19866894404284_1
atgcaacgataggcaagcaaaacaagtaggtggaaaggcagcaagctttaaataaatgtaagctgaaatacgggcaggatcacaggaggcatgcgagaataacaaaagaaatggattcctgccaaggaacagctgggaactggaggaggaggaaggagaggaaagggtgaacaaggcagaactgcctttatgcaaaaagcagaagagcaagaagtaagggctgctgctgggtttcaagatgaatgcaaagagatggatggacggaaggaagtctccttaaatctgcaagttctatcatgygttagaagtcaatgaattgaagggcaaggcctgaaaggaccaagaagctgcatcttatccttagttttcttctgaaggaaaactgaaaaaaaaaacacgtaaagagtgaataaattcagttccaagtcatcagcaattcactgcttttaagtgtttcaaaaatagctttgccaggaaaaactgcttttaccttcatgaattcacagtgagggactgtctgtgtattaaagcagaattaacatctcatacacatgaatttagtggctgctgttttgggcaattagaaatacaagcctttgc

SEQ ID NO: 91970 - DNA, 600 bp, Chicken  19866894404294_1
attaataaacgcaagtctgaatttaatgaaaggtaaagattagtaacagaaatgttgagttgatgaaagcagtgcccagccaatgaggatttattaaatgccagagtctggggaaagatgatttgttgagttagaaatgtaaatacttggtaactgcttgggagttgtacgcccattgatgcagtgaggtgggggaggtttaaggggataaaaccatggcaagtgaagcagtgcagcatggacaagatttccaggagcctgaagcaaccaatgggtcttgtttggggtcttcaaatcctrttggtgtccttagcaccaactgatttggggttccagctcaaactgacccatgctcccaagtccagaacatgggtacctcagctgcccaactccgcaggtccagacttggctgcccaactcacccacctgagtgcaattaggactgctagtggatatcatttattataaatgcaattaaataggagtcttctccatggccaccctttccctctcctgccatcttcctgcactcagcccccagatctcaatttcccccacagtaggaactaaggctaaaagggattgacacaaggggacaag

SEQ ID NO: 91971 - DNA, 600 bp, Chicken  19866894404294_2
gctgcccaactccgcaggtccagacttggctgcccaactcacccacctgagtgcaattaggactgctagtggatatcatttattataaatgcaattaaataggagtcttctccatggccaccctttccctctcctgccatcttcctgcactcagcccccagatctcaatttcccccacagtaggaactaaggctaaaagggattgacacaaggggacaagacaggtggtcacggattagggctgcaagaggaaaacagccaccccaccattctgtacgcaccacagatttgtagctcatyattgttttaactgcatttcccttgtgcaagatggaagtgcccaaagtggatgccccgtccccgaaggtgctcaaggccgggttggacaggtccctgggcaacctgatctgatgggtggtaaccagaccatggcaaggggattggaagtggatgaactttaatgtctctttccaacctaagccattctctgctaagtagagagagggcagttgtcccccacgagcaccagtctttcacagtaagcccatgggcactgagaaggcaaacagggcagacacacaactggggctgtgttgatgg

SEQ ID NO: 91972 - DNA, 599 bp, Chicken  19866894404306_1
  misc_feature (1)..(8): n is any nucleotide
nnnnnnnnctgactcctcgatgcactcagacaaacctaccaaaactattacttatccttgtaaacggttaaaacatcgggctgaacagtcatctcaattctgacaattgcagaacgcaacagctaatatacttactctttagactgctctaacttcttagctgcttctttctttagtttctccttttctaggtattcttcaagttcttttccttccaacttgacacgtcttctcaacttacaaataaagtaaaaattagaatttctgtgaggagctgacttgcttttaatacttctacaygctgctggtaagataatatttatatttaagtaccaaggacagatacagtcttgtcctttatgtagccacttacataaacacgtggcaycttagcatgccaacatcatgacaatgttatcaattaatatagactacgtaagaatataaaattaattctgaagtattaaaatcaattcattttacaacaattccttaaaatatcttgaggaaacatctcccttcagtaactaagtgcaaatactctaaggtgagcagctattttttgacctctgtgtcactaagtgaacagaagaatctgg

SEQ ID NO: 91973 - DNA, 600 bp, Chicken  19866894404306_2
tcatctcaattctgacaattgcagaacgcaacagctaatatacttactctttagactgctctaacttcttagctgcttctttctttagtttctccttttctaggtattcttcaagttcttttccttccaacttgacacgtcttctcaacttacaaataaagtaaaaattagaatttctgtgaggagctgacttgcttttaatacttctacaygctgctggtaagataatatttatatttaagtaccaaggacagatacagtcttgtcctttatgtagccacttacataaacacgtggcaycttagcatgccaacatcatgacaatgttatcaattaatatagactacgtaagaatataaaattaattctgaagtattaaaatcaattcattttacaacaattccttaaaatatcttgaggaaacatctcccttcagtaactaagtgcaaatactctaaggtgagcagctattttttgacctctgtgtcactaagtgaacagaagaatctggcaaaattgcacataagcaggcaaagcaacatcaggccttgtttcttgtttttttttttgtagaacagattagactataggtcacatcca

SEQ ID NO: 91974 - DNA, 600 bp, Chicken  19866894404322_1
ggcaaaactaacattttaaactactttagaaaaaataaaaatcctgacttttttaacaatcaacctcctctactcattggtgagatgctccagcccttcattatctctacagccctttgctggactatttccagcagccccatatctcttgtctacaactattggcaggcacaaaaagcgaaggaaggaaatcgtgatgctagaaaagttgttatgacaaaatgaatatggtcacattactcacaaaaggtgaagtcacctgtgaatttcttcatattcatcaagtgcatgccaaactgmagcaccagatgatcacatttctgcatgaaccaaaccatttacagaaaagctattttaaacactgcttttaagaatttccaatattttcatgtcccaatacctctcaagtcaggctccctcagtgccctcagtcaaatgatatcagcctcagaatgaaagaaagattttaacaaatacattttagaaatctcaaagtgattaaagtagtttttctatgcatagtaatgaggtgattttcagttggctcttaaagggctcaacacaaattttaagagctgaaagtgacatgcccactgcaaa

SEQ ID NO: 91975 - DNA, 600 bp, Chicken  19866894404328_1
tcaagagtgagggatggaaaaatgtgatggtgaagtactcagacctgtagatgcagtagcagagatttttgagaacgatgatctcttctgaaaataacattagagtaactgcctgtggagttctgtggagctctcttcagcttattcatcacagcaattagttttctaaaacacactttatgatctaaagtagtttagattcttaagttggcgatcttgcctttttttaattattattattattactattattgttgttatttggtagaaatccctgataaaatgagaaaaacccaataytgtgttaggaccttgcagtcgtgatatagggccacaaacgtttgagaagacagttttacaagtaagtatgggataattcagttttgcaatttggagttggtgtttctacctgtgacttgagaactatctatccataccctaaagatactagtggagaagtgtatttttttatatatataacagaaacacaagagtatatttcccttatgttaaaaaaaaagatagaaatcagcctccttgattttctttttcttcagaatatactccataaattcagcttctctccactgtttttgagtc

SEQ ID NO: 91976 - DNA, 599 bp, Chicken  19866894404335_1
  misc_feature (1)..(111): n is any nucleotide
nnnnnnnnnnnnnnnnnnnnnnnnnnnnnnnnnnnnnnnnnnnnnnnnnnnnnnnnnnnnnnnnnnnnnnnnnnnnnnnnnnnnnnnnnnnnnnnnnnnnnnnnnnnnnnncattcttagcagctgtaggattaagaagcctacgtggttaaggaggttcctcatactttggatgagcacagtcagacattagagagtgtaaattctcagtttccacctcaggttactcttcgaaaggatgatgccagatgtggtcacgctgttctttggaaggttcagctacaataacatgcacacttkcagccagtcttacctgaatactaaataaaaagtttcacggcagttgcagttgggagaaagtgcctttccttctgagatgccccaagtggacttggaccttcagagcatttgagagtgctggacaggygttttgctcagcaaggacgcttgtgccaccttcacaacctaaaaagtagctctcaagctgccagagacagcagctgtgttaggagggcacatggtgcagcctgtgcctctctctgccaggtgacagtggccttggatgacaatgaagacataggatgaccaacattttgaaa

SEQ ID NO: 91977 - DNA, 600 bp, Chicken  19866894404335_2
aggattaagaagcctacgtggttaaggaggttcctcatactttggatgagcacagtcagacattagagagtgtaaattctcagtttccacctcaggttactcttcgaaaggatgatgccagatgtggtcacgctgttctttggaaggttcagctacaataacatgcacacttkcagccagtcttacctgaatactaaataaaaagtttcacggcagttgcagttgggagaaagtgcctttccttctgagatgccccaagtggacttggaccttcagagcatttgagagtgctggacaggygttttgctcagcaaggacgcttgtgccaccttcacaacctaaaaagtagctctcaagctgccagagacagcagctgtgttaggagggcacatggtgcagcctgtgcctctctctgccaggtgacagtggccttggatgacaatgaagacataggatgaccaacattttgaaaggttaggaaaggccactcagtgcaatcagagtgaggtacccgccatcccttcctcaactagcacatctgtgagagtgcaaaatattttctgacaaaaagcaactgaatggctggcctgaggagccacc

SEQ ID NO: 91978 - DNA, 600 bp, Chicken  19866894404339_1
agagttctgtgccattgatttgtgagctctctaaacaggctgacaaacacatgatattaaattcaatctgaaattatcccagagtcaaacctcatgctgatcatgaatgatccctaagcaaaccacatacaaataaacttccgtttattaatctcctggagtttcaggtgtacaggcaaacttatgtgaaatatgctcagctgccctgtttttccctcagctgatgtttctttggctgtcttcctgtgtcatttctctgcctttattctacattgggtgaggaactggtgataaataaaytcttggaatctgtgctagaaacattctgtaattctctgtaataaagtagagaagataacagaagatcaatttatcactcttagacgtgtttttcagctttggmcccgtgtcatatattgatgcatttgtttgctgtcatgcagaaatgtcaggcatgccccactatccctatttcctgatgcataaaaaatactgtgcaggccctcaaaataactccaataactgaatttcagaaatgtaaatgttccatatatgctgataaytgcaagacagttgttctgtagtgagccctggatacaa

SEQ ID NO: 91979 - DNA, 600 bp, Chicken  19866894404339_2
tgaatgatccctaagcaaaccacatacaaataaacttccgtttattaatctcctggagtttcaggtgtacaggcaaacttatgtgaaatatgctcagctgccctgtttttccctcagctgatgtttctttggctgtcttcctgtgtcatttctctgcctttattctacattgggtgaggaactggtgataaataaaytcttggaatctgtgctagaaacattctgtaattctctgtaataaagtagagaagataacagaagatcaatttatcactcttagacgtgtttttcagctttggmcccgtgtcatatattgatgcatttgtttgctgtcatgcagaaatgtcaggcatgccccactatccctatttcctgatgcataaaaaatactgtgcaggccctcaaaataactccaataactgaatttcagaaatgtaaatgttccatatatgctgataaytgcaagacagttgttctgtagtgagccctggatacaatgtcctagcattatttagactcagaccgtcatggaaagcactgtagttttcatcctgcccacagtcccagcctctcttccattaaaaagaacaggcacgtagc

SEQ ID NO: 91980 - DNA, 600 bp, Chicken  19866894404339_3
tattctacattgggtgaggaactggtgataaataaaytcttggaatctgtgctagaaacattctgtaattctctgtaataaagtagagaagataacagaagatcaatttatcactcttagacgtgtttttcagctttggmcccgtgtcatatattgatgcatttgtttgctgtcatgcagaaatgtcaggcatgccccactatccctatttcctgatgcataaaaaatactgtgcaggccctcaaaataactccaataactgaatttcagaaatgtaaatgttccatatatgctgataaytgcaagacagttgttctgtagtgagccctggatacaatgtcctagcattatttagactcagaccgtcatggaaagcactgtagttttcatcctgcccacagtcccagcctctcttccattaaaaagaacaggcacgtagctgggtaagggcttgtgctaacataattagctccctagcatggagttatggcgtggtgagtgtgtgtcaygcagcataccaggatttatgcagtgtaccaagcctggcagatagtgcgcctgggaagacactgcatcagccattagctgtcaaatatcaag

SEQ ID NO: 91981 - DNA, 600 bp, Chicken  19866894404339_4
ttcctgatgcataaaaaatactgtgcaggccctcaaaataactccaataactgaatttcagaaatgtaaatgttccatatatgctgataaytgcaagacagttgttctgtagtgagccctggatacaatgtcctagcattatttagactcagaccgtcatggaaagcactgtagttttcatcctgcccacagtcccagcctctcttccattaaaaagaacaggcacgtagctgggtaagggcttgtgctaacataattagctccctagcatggagttatggcgtggtgagtgtgtgtcaygcagcataccaggatttatgcagtgtaccaagcctggcagatagtgcgcctgggaagacactgcatcagccattagctgtcaaatatcaagttatgaaatttagttgtattcgtctatcagtgcttatgaaatgaatcatcgtacccatgaaatctattactctactacttcttctgtaggagagctatatccagttaaaatagccttagcgcttttggaaggccagggcattcagaaagctcaggatcagcctgaccctgggaagtgatactcacagggctgctatggagcatggtcct

SEQ ID NO: 91982 - DNA, 600 bp, Chicken  19866894404350_1
agatgtactgccctaaggagatccaaggggctgtcaagtatggtcatcagagccgtggagactcagaatggggtctggtctgagatgggacctgccattcttgcctacaaagagtcctacaagggaaagaaaattaaaaatatgaacgccacaaatggaatatgatcaacagaaaatacaaagaatccaggaatgagccacaggacaaaacatgaaagcagaaaaggctgcaagccagctacagcagcaattagatcccagctgactgtatggcactgtagcaaaagtctctacagaaamcctgccagttgtcaagaaactcaagaggctcaaaggattctttcttttgcagtcattcaggttagatctttcagaccttttggaaaagcacagattctgtgaaccatggtttgctgaagtcatctggaagatggctgcacatgctgtcatgtctgctgtactcgtctcacccctttcttgcctgaagattaaaggcaaccccagctttgtggtttgatgaagatgatctgttttgggttctccatgacctctttttggcagcaacacgaactacactggctactttgcattgggcactgc

SEQ ID NO: 91983 - DNA, 600 bp, Chicken  19866894404355_1
agagttaagtggtatgtttttttaaaagcaaattagcaattgatttttaagcacactcagaatgctctgtcattgtgggctgtatttttaacttctggttttcaagaacaatctgatgtgatgtttcacaaaaatgtaactgtgaatggttgggggaaaaataatatctttgtaaccaacctaggctgagtgtatgatatgagagtataagtgataaaaagatacgattatcattgtagcactgtatgtattgatagtatttcaattcagtaaaagctgtgatccagaatcaaacagttytgaccttcaaacaagctaagaatgttaaggcaaagcagacaaatcagggggcaatgaggagataggttgctaaccctgaaaaaggggactagcttgttcacatcagagcttgattgtcacttggctgtaatactacacgttgctgtgatgtgatgctagatctagctgagtctgaagggaaaaatcagaacagcagaatgcaatcacccacwttggaatttggccaggatatagaggttagtgttttagtgcttgggaaaagtagcaaagggctttcatcatctctttgtacttgtccgt

SEQ ID NO: 91984 - DNA, 600 bp, Chicken  19866894404355_2
gataaaaagatacgattatcattgtagcactgtatgtattgatagtatttcaattcagtaaaagctgtgatccagaatcaaacagttytgaccttcaaacaagctaagaatgttaaggcaaagcagacaaatcagggggcaatgaggagataggttgctaaccctgaaaaaggggactagcttgttcacatcagagcttgattgtcacttggctgtaatactacacgttgctgtgatgtgatgctagatctagctgagtctgaagggaaaaatcagaacagcagaatgcaatcacccacwttggaatttggccaggatatagaggttagtgttttagtgcttgggaaaagtagcaaagggctttcatcatctctttgtacttgtccgtgaggtcaaaggcaaatcttcatttgacttctatggaaggaggtagaagtatcattaatgccatccaaatgggcaaacaaacctaaaacagtccccccattctcatctttgcaacaaatattcattacataggcagccttgagtcaataattttcctctgcaaaaatttaatctactcttctgtcatagatatgaaaggtgagactaacccat

SEQ ID NO: 91985 - DNA, 600 bp, Chicken  19866894404356_1
tacactcagcctaggttggttacaaagatattatttttcccccaaccattcacagttacatttttgtgaaacatcacatcagattgttcttgaaaaccagaagttaaaaatacagcccacaatgacagagcattctgagtgtgcttaaaaatcaattgctaatttgcttttaaaaaaacataccacttaactctatgtcatgttaaagcactaatttattacagtttaaagagattcttatttccatagccatacagcttaatcatttatatatatatatatatatatatacatatatakagagaagaaatttgcacatcactgctagcagaattcatttaattcacactcagctgtggtctgagacacyacatcttagaaaagacatttactaccaaagtttaacagttctgatgtagctgctgttttcattttgtctctataaaggtgtactgtttggactccagataactgttagtttgagtaatttatgctacttagaaataccagcacaataccagcaccagtataagcacttccatctaaaatagaggattcagaatacagtcttgaataaaacagcagcaagtataggctggt

SEQ ID NO: 91986 - DNA, 600 bp, Chicken  19866894404356_2
acatcacatcagattgttcttgaaaaccagaagttaaaaatacagcccacaatgacagagcattctgagtgtgcttaaaaatcaattgctaatttgcttttaaaaaaacataccacttaactctatgtcatgttaaagcactaatttattacagtttaaagagattcttatttccatagccatacagcttaatcatttatatatatatatatatatatatacatatatakagagaagaaatttgcacatcactgctagcagaattcatttaattcacactcagctgtggtctgagacacyacatcttagaaaagacatttactaccaaagtttaacagttctgatgtagctgctgttttcattttgtctctataaaggtgtactgtttggactccagataactgttagtttgagtaatttatgctacttagaaataccagcacaataccagcaccagtataagcacttccatctaaaatagaggattcagaatacagtcttgaataaaacagcagcaagtataggctggtggagtactcatatggagaagccacacagattctagctctggggatgtgaattgattgcttagtcccagta

SEQ ID NO: 91987 - DNA, 600 bp, Chicken  19866894404358_1
tttctcaaccttcactaaattgtagaagaaaagtgaagttgaaaactaaaactggtcattatggatatgttttcctgactgtgacttacgacacatcctttagctagcatttaggtgcttatctcgtgggcttcgtttttttccggagtattcatataaaagtatgccagagataaccctgagttacaagaaacatgaaggtgtgccaaacacaagccacaaaatgccaaggaggggctgcctctgaaagaaactttcctacgagctttaaaataccttcctatcagcagaagtcagcaygccactagcacacattattttcagaagaactgacgctttgctgagtctaaattaatccatcatgagagatggtttagcaacttcacattgtgggttagtctgtttttagctgtgctgcaacatcaggaagtcttaaatggagggtgttatgtcaagctagcctatctagcaaggtgcaaggcctacaaggcaaagcccttgctacgcgttctgatgctgtgacctacaggagctttttgccctcatgatagtactgtgttgagagatacggcccgtatcctcatgtggtttgcgtgaagc

SEQ ID NO: 91988 - DNA, 600 bp, Chicken  19866894404363_1
ggaattcagcgggaagctgccttcttcaatggttgatggatcaaatggagtacgtcatcatagctcattgatgcttcccctttctcttcattaacactaattttgtacattataaagtccgaaaaatttctgaagcttttttgtgctgagttacaaagtctctgcatctcacagattgaaaggccacatcaaatggcagtacttcatatcagttctggaatcaaaactaacactgatcatccaggactattgtctggtacacccctaagactgctgtatcaaataccaaaaggtatacaygatcatactgtcttcctagcctcaaaatgtacaaactgatgaatttcaagagtcttactggactgaagaaacagagtacaaagccatttattacctgattagcattcaggtcctgtccagaagaagaagaaagtattactgcgtggcataaggggagctggggagagtttgggggcttgagaaaacatttcacaaagcaacatcctagcaaataggtaaatgaattttacagataggatgacatatacttgcctatttaatcttcgaagaccacaggttttatctcaagcatagcaataa

SEQ ID NO: 91989 - DNA, 600 bp, Chicken  19866894404366_1
ttggataccacaagaggtatgattcatattattctttagaaatgctttttaatagacaagctttacaaatgagagagcatttgagttttgaagatatactttccaatgaagttctgatatcagatctttattgcatttctttttctgcatttttaagtaaagactgtaagtaaagacttattttactttttaaagacttaagtaaagactgatttttcttagctaccatcatctaagcaaatttctctgaaggaaaataaactcatatatagccaaaaagaacccaccaaccaccactcyctatgcagttcccttcacagaattttcctctattatttaggggacaatggaaggtagggagaataagaggaagaactcttcccattgaaggcaatgtctagtaagttcctgccatccaaccacacaggtttatttatcaacagaactgttgtataagaatacacaagggatgaatgcctaatttaatacaaaaccagactaacctgactgtcacatatttatgtaggaatataaaaataaccaactaggatgcaatgttgacttttcctaacaataagagaatgtgaacgctgttgggat

SEQ ID NO: 91990 - DNA, 600 bp, Chicken  19866894404369_1
aatactcagggttctctccttgcattacagccagctaccaggtatgtgggacagtcccctgattttaccttatgctttcagcaatatggtgacatgcctgacattcacagctctgctgagcccaccaaggacaatgatgccagcatgctgcagcacagggggactcctctggggcctgggggaagcccagacaagtgagcagcctgagtgtggcttttagagaggtgcctgtgcttgagctgctgactgcaggctgtgccagatctgtgatgttcctccctatgttttccccttgttacrgatttgtgtcttgtgctatctgccttcagtttctatccacaatgttttgactgacctctgtctgcaaacttggtaagcagcgttatctgaatggtgactccatcagtgtctgctgcgacgggtgaagaaatgtggctgtgtaattaatggaagcttagatggaaagttgtcctctgcatagttcatgtgtgactggagccttaatccagttgtcagcaacttctggaggaaggatggagacatcacagtgccatcaagtcactggagatgtggcctcctctgtcagtcctgtgggaatgg

SEQ ID NO: 91991 - DNA, 600 bp, Chicken  19866894404369_2
tgcagtcaacatccagtctgatgtttgccagaacctcccagaaacgcaggggaagaggacagcggagaatgcttcctttttgtatcacatgaagtgaattataaaatatcctgagttagaaggacccatagtgatcatcaagttcaacatctcccacccaaaaatcagaccacacatctgagaacatttgtacagatgctgctttaactccagcaagatcagtgctatgacctcttccctgggtagcatgctccagggtctgaccaccctctcaatgaagagatgtatctctcctgcagrgagagaagcctgtgaaggcatcccacatagatgtgcctaagtgcagtaaccagaacctaggctattcttcagcctttttgcaggaggactaaggcaaagcatgatgtggtcttccaagagttgatctcgtgacttatctccaggtcacctttcctttaccctcctgcagaaaaaaaaaaaccactcttctctttttctccacagcttttgctggagaatagggattctcttatagcctccttcactttcttttttccatgccgtcacctcaaagttgatgttcacttcctctatgtcatc

SEQ ID NO: 91992 - DNA, 600 bp, Chicken  19866894404374_1
aagtctttgttgtggatttgtgttgtgcctgtaataaaggcagtggacctgtagcttctgctgcaatacaaataaagaataataacagcgatacttttctcatttgaggttacctgggtataaagttgctggaggcatctgactttgatatagagtcagctatgtctcacatcccattacacttaaccacatggtctaacaagctgccattagggcagtgagagccccagtttgatagcggggttagcttcaaaaaatctaatgcttgcatttggagtgacttccttccctcgtgcccasactgtgctgaagggcatgaggggagcttcacattcagatgatacatgaccagcttgagagctgtgccttagaagatggttgcacaatctctgctgccatttttgtaatcttatagcttgcaatataagctcttgccctaacagctctgtgctcaaatttcactcctatgtgaaaaacaaacagccaaaggaaagcccaacctttgaaggaaaaaaatctttgcaattttttttcttttcttttttttttttaactttgagaaaaacaaaagctgttttagatgacagatggacccgaatc

SEQ ID NO: 91993 - DNA, 600 bp, Chicken  19866894404381_1
agatggctcagattctagccatcttttcttcagacatcatcctttataggggatcattgacatgagtgagcccttctctggcatcacacagcgctgtttgcacagacttcacaggtcaaaggcgatgaacatggatggtaatcctagctgtatggtgagaaaaggtgtcatatgcccttcctggcttggatacaaaccatttaaacaaggtttttaagactgaattgtagttctgaaggtttgtatagctctcaccaccactaggtatatggatttcacaagcactgatgagtttatttkcacaccttgtcaagatgagattttagtggcatagttacctgtgaactgagacataggcccttagaaaatcaattattcagtcatacacttttttatctttcttttttttttctttctttcttttgatagaggtaagaggggtatttttctgttttagagcacctcaaactcatttctttgttgcctaacaaatacttaaattttaacaataagctttaggaattaagagcataatacagtatattaatgacttgagtgccaagtccagcacctgggaaatgagaaaccccatgaaatgaa

SEQ ID NO: 91994 - DNA, 600 bp, Chicken  19866894404381_2
tcatacacttttttatctttcttttttttttctttctttcttttgatagaggtaagaggggtatttttctgttttagagcacctcaaactcatttctttgttgcctaacaaatacttaaattttaacaataagctttaggaattaagagcataatacagtatattaatgacttgagtgccaagtccagcacctgggaaatgagaaaccccatgaaatgaatcgttggtttgaactacttgcctgaattcatagagaagctctgtgaaattagaagtgagaagttctttctatggtttttrtttttaacaaatgttcaattgctcttactacttttgcaattcatgacctcattcaatacagcttttcaagagagcagtgaggagtcctagaaacaagtatcccttgcaatgtagcacttgttcattcctagtgggagtcacttgtgttcttagaataaggaaggtaacctaccgggaaaagcagtatgttgccattcaattggaggttgcatcataaaacagatacatgagggatgatggtaaagagggaattaatgtttcatgggtatccttagcgtagaagcttagcttctgcgtctt

SEQ ID NO: 91995 - DNA, 599 bp, Chicken  19866894404382_1
  misc_feature (1)..(117): n is any nucleotide
nnnnnnnnnnnnnnnnnnnnnnnnnnnnnnnnnnnnnnnnnnnnnnnnnnnnnnnnnnnnnnnnnnnnnnnnnnnnnnnnnnnnnnnnnnnnnnnnnnnnnnnnnnnnnnnnnnnnnagatttatattgatacgggctaatacactggaataatcccaggatccttgtttttcagctgagtattaagtaataaaaatgctcaatcaaatcataattaaattctcagcagcagacacagggaatatctaccactactagagaaatacacaacaaagaaatgtcagtgccaaaaaaaacccrragagtaaaaattgcaattgcaggctccaaacctactgcgctcattggagtaaaaaatgcccagaaaattaaacaaatcaatattcaaattttacaatcagttgtggagctatttgtcatgagcataaatgctaataacgtaaatactgttatcctggcaaagctgttagaggcagaatggttttggagactgtaaaattaaggccagcatgaaagagatgagtagagaaaagatattattcacaatactagaacacttcatcctgcgctccttgttaacaggcaacaaggttacagca

SEQ ID NO: 91996 - DNA, 599 bp, Chicken  19866894404382_2
  misc_feature (1)..(116): n is any nucleotide
nnnnnnnnnnnnnnnnnnnnnnnnnnnnnnnnnnnnnnnnnnnnnnnnnnnnnnnnnnnnnnnnnnnnnnnnnnnnnnnnnnnnnnnnnnnnnnnnnnnnnnnnnnnnnnnnnnnnagatttatattgatacgggctaatacactggaataatcccaggatccttgtttttcagctgagtattaagtaataaaaatgctcaatcaaatcataattaaattctcagcagcagacacagggaatatctaccactactagagaaatacacaacaaagaaatgtcagtgccaaaaaaaacccrragagtaaaaattgcaattgcaggctccaaacctactgcgctcattggagtaaaaaatgcccagaaaattaaacaaatcaatattcaaattttacaatcagttgtggagctatttgtcatgagcataaatgctaataacgtaaatactgttatcctggcaaagctgttagaggcagaatggttttggagactgtaaaattaaggccagcatgaaagagatgagtagagaaaagatattattcacaatactagaacacttcatcctgcgctccttgttaacaggcaacaaggttacagcaa

SEQ ID NO: 91997 - DNA, 600 bp, Chicken  19866894404382_3
acctactgcgctcattggagtaaaaaatgcccagaaaattaaacaaatcaatattcaaattttacaatcagttgtggagctatttgtcatgagcataaatgctaataacgtaaatactgttatcctggcaaagctgttagaggcagaatggttttggagactgtaaaattaaggccagcatgaaagagatgagtagagaaaagatattattcacaatactagaacacttcatcctgcgctccttgttaacaggcaacaaggttacagcaaacagtgagaagaatctcctccttccccatsccattatctgccaaaagacactacaaagccaatctgtagaactttacaggacactgtgaagatcaaaagtataaacagatgcaagaggtggaacagtggctccgtggacctctgagccgtacatatcagttatgttctttttggtttattttgaacagcaaaaaaatattcaacctttcttccaagttgcactccattaataagagtctatctgcactttccaacgtgattcttccctacaaatgacctgctgtattcaaataatgcatgaaatcacaaattatacttctactactatta

SEQ ID NO: 91998 - DNA, 600 bp, Chicken  19866894404390_1
caagagatctaaaggtatattttaaaataaaacaagaaagatgaatattaactcttcttcagcctcagctccgaatgtatttgtggcttagtgttctgagttgagagcattctaaatcaagaagggaagctatccttaagcaactacaggatgattaaaatagccatctcctcccgttgggcttgtgggatcatctctgctggtgcacaaactcaaagctccaagcagtattttattagctttggagacttaaaaagctttcttggttttcttgctggtaaacactttgccagtcgtatrtgggctttaaaagacagagtgatgtgaaagaagtcagtgttgcagtttcccagaaatgcagacctcttaatgatggctgcagaggccaaggcatgaggggtggtgagagcacagagtgagggccagttctttgcatgagggtgtggctgtattgtaaatgaagtttactctgcttatatttcaataatgtgttccaaaatcgttaactatatgaactgtcctccagcagcgtgaggaatccacatctttgggtccttagtcccttggggaaggccgtgcaccagtggtgcagctgctggt

SEQ ID NO: 91999 - DNA, 600 bp, Chicken  19866894404390_2
agagtgatgtgaaagaagtcagtgttgcagtttcccagaaatgcagacctcttaatgatggctgcagaggccaaggcatgaggggtggtgagagcacagagtgagggccagttctttgcatgagggtgtggctgtattgtaaatgaagtttactctgcttatatttcaataatgtgttccaaaatcgttaactatatgaactgtcctccagcagcgtgaggaatccacatctttgggtccttagtcccttggggaaggccgtgcaccagtggtgcagctgctggtttgaagcctccccasgagcrgatttttcatgcaccccctcacacatggagctgttggggttctcccactgccttgtttgctgcagcagtcttgtgtccaaagctgcatcgcactatttcatacatggcagcaaacacattatcatagcaaatagtacctcatatgctgtgggagaattagcataacccagtgctgcaagctgtgagtgtccctgaatagccactgctattacagaactgcaggctgctgcatgctgtttacttactgctgctgggaaagagaatgacagacaggcaatgcatgaggagcttttcc

SEQ ID NO: 92000 - DNA, 600 bp, Chicken  19866894404390_3
gatgtgaaagaagtcagtgttgcagtttcccagaaatgcagacctcttaatgatggctgcagaggccaaggcatgaggggtggtgagagcacagagtgagggccagttctttgcatgagggtgtggctgtattgtaaatgaagtttactctgcttatatttcaataatgtgttccaaaatcgttaactatatgaactgtcctccagcagcgtgaggaatccacatctttgggtccttagtcccttggggaaggccgtgcaccagtggtgcagctgctggtttgaagcctccccasgagcrgatttttcatgcaccccctcacacatggagctgttggggttctcccactgccttgtttgctgcagcagtcttgtgtccaaagctgcatcgcactatttcatacatggcagcaaacacattatcatagcaaatagtacctcatatgctgtgggagaattagcataacccagtgctgcaagctgtgagtgtccctgaatagccactgctattacagaactgcaggctgctgcatgctgtttacttactgctgctgggaaagagaatgacagacaggcaatgcatgaggagcttttccacatc

SEQ ID NO: 92001 - DNA, 600 bp, Chicken  19866894404390_4
gatgagaagctgtaatgagaagctgggcttgttgacctctgataccttagggaacaacataatgagaagctttacctttgtgcagaagtactgattagcagggatgtgaagcttaagctctgaatctgaatcacaaaattgatgattacctgccatgcttaagagaacctaaatgctgtggttatttacatcagccttttgatttactacagctgctatatttacccatttggcaagcgtgtcttagttacactgtacttcaaagctctggtctttaagtacctgaagatgtggaaccgrccgttctcccttgggctggcttgaagtggcatgaagtacaacaaaggagaactggttgtcctgaactaaagacttattttaaaaactacactacataccacacacatttaaacacttcttgggcttggatactcagtcacgtttacaaaagtaaaatctcattatggtctaaacacaggcctggcatcctgctccaaatgcaggcctttacgtacctcaagtaccatgcttaggatagagacagtacagcagtgaagtcttgaattgctgagactttgataatttttaggaaatgatgga

SEQ ID NO: 92002 - DNA, 600 bp, Chicken  19866894404391_1
tgtagctgtgggcaccagacgtacccagggagctctgtcatgctgctgccactgttctctcctatggctctgtgatgaattccatctccctcctttctttcctctctgctcatcctgactccgagcccattctcttcagatgaagtgcttggtgcattgggcagcaggaaggaatcctggcataatggctaaatgcttacaaatatttagactgtatttttcttagcaaaaaaataataaatcagtctgtttgatgctcactgaccccatcacgtcccctctggcatatgccattcaggraaccccagaggacaacaagtctgagatttcctctgttccacacacactgcagcaacatggatgctcagaggcattgagatcaaccccagctttcagaagcagcaatccagcccccagacttcattcagagggaattacccatctcagaataaagactgaagtcacggatttttacagcttgcttaagtccctccacacacaaaatctttaaattgggcattactatgccaagccaattgccaaggacttagggcaggctcacagctggctctaggcacttaaagctgtcgtgtagagtca

SEQ ID NO: 92003 - DNA, 600 bp, Chicken  19866894404393_1
tgttaaattatctgatattatctactgcattggtaatcaatttctccttcctccaccagaccaactttttaaaatattcttgtatatttaggcttaggagttatagttttacagagcactggaacgttctgctgtctcctttgaaaaatcttcatttttatggacgtgtcatagactacacaaagcttttattaatcaagtctggtgatgcattcaacatgtcagttttcagggtttccaagtctcactctaatctgtgcaatagtaagtgctttattaaagaaccacataatggagacytgtaataatgtgagaagtctcattcttttctttctacctttgcatcccacttcacaaaccagaacaaacacataatgcctcaagactgaattttccaaatgagaagataaataaatttaaattcaaggtttwtgtttgaatcaagatccttaatgaaatcttgtttttgtaaggagctttatttccttatttttcttgtttacacttgtagagctggattatatctttcagaacttcagcaatttcccaagtggttatttgtttggttgtgttaaacttgaaactggctacggtaatgaa

SEQ ID NO: 92004 - DNA, 600 bp, Chicken  19866894404393_2
tgtctcctttgaaaaatcttcatttttatggacgtgtcatagactacacaaagcttttattaatcaagtctggtgatgcattcaacatgtcagttttcagggtttccaagtctcactctaatctgtgcaatagtaagtgctttattaaagaaccacataatggagacytgtaataatgtgagaagtctcattcttttctttctacctttgcatcccacttcacaaaccagaacaaacacataatgcctcaagactgaattttccaaatgagaagataaataaatttaaattcaaggtttwtgtttgaatcaagatccttaatgaaatcttgtttttgtaaggagctttatttccttatttttcttgtttacacttgtagagctggattatatctttcagaacttcagcaatttcccaagtggttatttgtttggttgtgttaaacttgaaactggctacggtaatgaaagatgtttcttctattatgatagctactgatgtaagtgagttggatgaagatcttcatttggtagatgaaaaaaagatgtttacgatttttagttatgaagataataatagccccatagcagtgccactagt

SEQ ID NO: 92005 - DNA, 600 bp, Chicken  19866894404396_1
gtaacttgaagcactggggagaccataactgcaagcatgatgaagatgctagtgttgtgtgttcaggtaagtgcccagctcatggatgcacggagaagtttttctgcaagtactctagcatctaattttagtttgcttccctctttacacaaatttcctttgtctataatgctactgcaagcagtagtgcttgagagataactccgttcttgtaggcgttctatcaacagattatctgggtacaaatttgttctaatcctttgtctgacactttagcatagcaattctcaagtggctcaycacatctatcatgcaggtctgctctgaacgtttcaatgtgtgtgcactcagagaattcatttggccaacaatgctgggtgcggtctattccatttttatgtcccaagtttcttctggatctctagaggtgattgaagattgaaagatattttccctttcctctagcttgcaatgggatgccatccttgtgaaccagaagagaaaatctgggtgccttcaggcagcatttgcagggagctttagtagatgagactaaatagcatggaaggacatagtgatgccatgttcccacaaaacctt

SEQ ID NO: 92006 - DNA, 600 bp, Chicken  19866894404400_1
gaatagctttatgcatttattctgaaatagatatacattgggtatattttccccagaatagacctaagtgtgttctgaagtgtttatagatgtagctaataggaaaactgagataatattttcataaaactattgacttgtaactagcttattttagtggacatacattaatttcagtgatcttttatgtagaatatcttcgggtacatatttctgatagcttttgctgatacagagacacaaagaaaagctaagaacacggttcacagcctctgccccttaaagcatctgttttaacayttcccttcccttccctccccccaccaaaagagaagagttccaggattgttttcatttagttcctatgcagactaaaaacaaatgtcagacactgagagctttcacacactgaaacattattctccagacagtcacagctatggtgcaactacatcatgtgtgtaaataagcacagaaagaattagattattttaaatgccctcgtctaagcaaaaactaaataaaagcctaacaagtacacattgtaagaaacaaaaattgtaaaattaaaaaaattaaacaggaaacaatgaggacacc

SEQ ID NO: 92007 - DNA, 600 bp, Chicken  19866894404400_2; identical to SEQ ID NO: 92006

SEQ ID NO: 92008 - DNA, 600 bp, Chicken  19866894404400_3; identical to SEQ ID NO: 92006

SEQ ID NO: 92009 - DNA, 600 bp, Chicken  19866894404400_4; identical to SEQ ID NO: 92006

SEQ ID NO: 92010 - DNA, 600 bp, Chicken  19866894404400_5; identical to SEQ ID NO: 92006

SEQ ID NO: 92011 - DNA, 600 bp, Chicken  19866894404411_1
tgatttatgaaactcatgctgtatgcctgaggttcacaacactggctccttcatatgtacaacatgccaaatcctagtatgtaacataagaaggattcttcacgggcaacacagctgctggggggaggcataaccccttcccacaacttcttgtgggtatcatcatctgttctttcttctggagaagacaattttatgaccaaacacgatgtctgaggaagataagtcagcagagcatggagcatgtcatctggcaggtgacaagaatagggcattattgaattttgctctttttgaacwaaatgagcagacaatcgagtaagtaaaacatgcaaatcaaggatacttttttttttttccagacaatctaatgcattcctcatgaaagacatggacatggaatgtagttttcaagaaaagctattataaaacatcattttccatgaaaagtctctaagaacatttcaattcaaacagttccaggaggaaactgcaacacatatctcctgtgtacgtgtagacagtgcatatagttgcaatactatttatgttttcagatacaggattataaactttgccatcttgagcagctgaggagaa

SEQ ID NO: 92012 - DNA, 599 bp, Chicken  19866894404412_1
  misc_feature (1)..(156): n is any nucleotide
nnnnnnnnnnnnnnnnnnnnnnnnnnnnnnnnnnnnnnnnnnnnnnnnnnnnnnnnnnnnnnnnnnnnnnnnnnnnnnnnnnnnnnnnnnnnnnnnnnnnnnnnnnnnnnnnnnnnnnnnnnnnnnnnnnnnnnnnnnnnnnnnnnnnnnnnnnnntcagcctgaggcagacacctggcacagtcaaatagctgcaaatatgagaagttatatctaactcagaagaggattggtaataggaaggacattgttagtatttatgtgacacattttaaatattaatgactatatctatgtagyattaacaacataatgccaattcagtggacaatgcttcaygctacaagagtaatgcaaccttcactacacaaggactaagcattcgaaggcagacaggaacaatttcatcatttaaccagacaaggtaatgaagctgggcacaaggtagcaatactggaatacgtcagctgaaattaagtctgcactcttgtgctctgaatgagcgttaaagattcagaaggcccaaatactatggcttcatttccgcccctgctgattctttagttattacagtgtttggggaattcctgaaacctgca

SEQ ID NO: 92013 - DNA, 599 bp, Chicken  19866894404412_2
  misc_feature (1)..(117): n is any nucleotide
nnnnnnnnnnnnnnnnnnnnnnnnnnnnnnnnnnnnnnnnnnnnnnnnnnnnnnnnnnnnnnnnnnnnnnnnnnnnnnnnnnnnnnnnnnnnnnnnnnnnnnnnnnnnnnnnnnnnntcagcctgaggcagacacctggcacagtcaaatagctgcaaatatgagaagttatatctaactcagaagaggattggtaataggaaggacattgttagtatttatgtgacacattttaaatattaatgactatatctatgtagyattaacaacataatgccaattcagtggacaatgcttcaygctacaagagtaatgcaaccttcactacacaaggactaagcattcgaaggcagacaggaacaatttcatcatttaaccagacaaggtaatgaagctgggcacaaggtagcaatactggaatacgtcagctgaaattaagtctgcactcttgtgctctgaatgagcgttaaagattcagaaggcccaaatactatggcttcatttccgcccctgctgattctttagttattacagtgtttggggaattcctgaaacctgcagtattttgtgaactgagatatccttccctttctctctat

SEQ ID NO: 92014 - DNA, 600 bp, Chicken  19866894404417_1
gatgaagacaacgttcacatttcatttgaaagacagaccgaatattcaaacattctaaagcacactgttaattaaaaacatattttccactgaagttacattgccgtacatcagcgacttggacaatcagcacagccattcccactggatgatctcaggagagatgtgaaagccaaggaagctttaatatgccagcattactgtgtttcaaatagtaagagtggcagtttgcaggtttctttccctttgggtatactgcatttctcattataaaccagagtttcatctgaggtactttaytgcactatggcccacagcagagctattggcccagtatcatccaacctgcaatagtgccaagcagagccakacccaaagcagcagtaaccaagctagctcatgtactcacataacagaaccactagtggtgcaggtagcaacttctgattacatatggccatgggcaggctataagagtgaagagcaaagcctgctgctgctctattcccttggctgatctctgaatcacagacttagaaatgcctgcatatgctgcgctcacacctcccaatctgcagtgcaggcagaaccttactctgc

SEQ ID NO: 92015 - DNA, 543 bp, Chicken  19866894404417_2
attaaaaacatattttccactgaagttacattgccgtacatcagcgacttggacaatcagcacagccattcccactggatgatctcaggagagatgtgaaagccaaggaagctttaatatgccagcattactgtgtttcaaatagtaagagtggcagtttgcaggtttctttccctttgggtatactgcatttctcattataaaccagagtttcatctgaggtactttaytgcactatggcccacagcagagctattggcccagtatcatccaacctgcaatagtgccaagcagagccakacccaaagcagcagtaaccaagctagctcatgtactcacataacagaaccactagtggtgcaggtagcaacttctgattacatatggccatgggcaggctataagagtgaagagcaaagcctgctgctgctctattcccttggctgatctctgaatcacagacttagaaatgcctgcatatgctgcgctcacacctcccaatctgcagtgcaggcagaaccttactctgcctgggaacatcag

SEQ ID NO: 92016 - DNA, 600 bp, Chicken  19866894404418_1
gggtcttttttttttttttttgcctcccttcaattaaatgtttaattaaagtggcatgactccctttcatttggaaaagtaattgaggactcaagtgtgtaaaaaatgtgctgagaaacgagctggagcgcccacagcacagagcgccaggcaggcctgtggaaacgccgcccttcattcgtctgggtgccgcatccaattgccatgatggggaggcgatacagctgtgggaacatctggaaggagctgataaacatgcgtttggttgggtgtgaaggatgtgtacaggctagcttgctygttggtttgggtttttttttaatcttgaatggtcagctcagtgtggccgggggagaaaagtgacattcacaaagatgcgttattggtcacttttcatgttgtgatccaggtgagcttgttgagttgctgataagtaggctgattgtaggctggtggctaataaggattttctgcagtatcttgtagatcagccttcgccatgttgcatgaagccttactgccctgacgcgttgcagcaccagagaaagcctctactcttgttgtgggactcttcatccccatatcttcattgaggcctca

SEQ ID NO: 92017 - DNA, 600 bp, Chicken  19866894404426_1
ctaacagttctcttaatatcagtgttctcagattgtattaggttgttcactttctcatccaattttggttctccatggcttttttgaggtaagagatttaattttgcagctctcggaggtgcagagcaaaaactgcagcccaagcacaactttattcaacttgtgcaccctccaactcctgggctgcagaggccaacgcctccagcaaagccctgcaaatatctgcagtgcagtcacaggggtggtgccagattgaccgcttggggtgccagtggcagccatggggaagacatcacccasaaagctgagtggtatgcatgcactgcttgcagatttccaagggcaggtgatggcatctttagaagaacacagtacagaaaccccacatatcttagaagggcttttgtaccttgctgagtcatctccatttttttaaggaagtgatgaaaaccggtggtgaggcaaagacaataccccttacattccaattttctttctcctaggaatggccaagcactggagtgctacttgtataacaaacagcatttgaccagtgacacaatacaaagcacagaaggtgcataatatctaccttagttg

SEQ ID NO: 92018 - DNA, 600 bp, Chicken  19866894404431_1
ctgatatttttttgttgttagaaatgacaagtggcacatcaccacgttattcacgattttaaagacttctgttgtatttattcccatgttgaagatctccggcctacataatcatcctctgggtagaagtcattcccttttgaattccctttctctgaacttttctagtatttatttctgaggccagaaaatagccggttgatggtgtcaacaaaccagggattcccttttcctactctagccatcccaaactgtggatttcttcttgacctttactgagttccacacacagcatggctytctatactatgattcctaaatggtaattgttatcatgttgtatatgatatgtgtaatatgcatttaggaaaacctttctcatgtacaaaactctatgataaatgcactcaaattgtaatatgcatttaggaaaacctttctcatgtacaaaactctatgataaatgcactcaaattgtaatacatagtttgtagataataatttagagaataatttagtccagaaatgaaaaccaggaatagtaacacgatcagtggcatatggaaaatggagatcagattactaatgcctactacaata

SEQ ID NO: 92019 - DNA, 599 bp, Chicken  19866894404433_1
  misc_feature (1)..(6): n is any nucleotide
nnnnnnctgagacttggtgttcttttgggtttttctcgtgctttgggctgatggcatcttgttggtggcccatgtgtgtagccatgagcgtgtggctcctgagtagctctgaggaaacaatacgtacaaactgtttgtttgccaaacatcctcttttttaaagagaaggtgttttgttttcttgactttcattaggaaaaaagcaactttggataatagcatttaatgtgctttaagactagccccagtaatcaccttgcgcctatttgaaccacacatatatttaattcaacacagcaygctcaaagcagcagatatacagcaaaacataaaacttcgtctgttcagcgggtgatgaagtgagttaccccagccataaaggtttgacatgcagttatttgggagtgtatttggatcarcgcgttctcaaagtcacaggaacttgaagctaaattccacgagtcatctctatgagttcttggttcagtgaattttaagccggcaatgaaaataggacaggtacaaaatattagccaaggaacagagggaataatcgataaagtgcaaaawgtgttgttgcaaaaagcccrgcatattga

SEQ ID NO: 92020 - DNA, 600 bp, Chicken  19866894404433_2
atacgtacaaactgtttgtttgccaaacatcctcttttttaaagagaaggtgttttgttttcttgactttcattaggaaaaaagcaactttggataatagcatttaatgtgctttaagactagccccagtaatcaccttgcgcctatttgaaccacacatatatttaattcaacacagcaygctcaaagcagcagatatacagcaaaacataaaacttcgtctgttcagcgggtgatgaagtgagttaccccagccataaaggtttgacatgcagttatttgggagtgtatttggatcarcgcgttctcaaagtcacaggaacttgaagctaaattccacgagtcatctctatgagttcttggttcagtgaattttaagccggcaatgaaaataggacaggtacaaaatattagccaaggaacagagggaataatcgataaagtgcaaaawgtgttgttgcaaaaagcccrgcatattgaatatttatcaraagggttttgaatgtttagaagaaagttcagatttctcwattttcaatttcccagaatccctgcttttatcaagagcatttactggccattggtttcaattcaaaaaca

SEQ ID NO: 92021 - DNA, 600 bp, Chicken  19866894404433_3
accacacatatatttaattcaacacagcaygctcaaagcagcagatatacagcaaaacataaaacttcgtctgttcagcgggtgatgaagtgagttaccccagccataaaggtttgacatgcagttatttgggagtgtatttggatcarcgcgttctcaaagtcacaggaacttgaagctaaattccacgagtcatctctatgagttcttggttcagtgaattttaagccggcaatgaaaataggacaggtacaaaatattagccaaggaacagagggaataatcgataaagtgcaaaawgtgttgttgcaaaaagcccrgcatattgaatatttatcaraagggttttgaatgtttagaagaaagttcagatttctcwattttcaatttcccagaatccctgcttttatcaagagcatttactggccattggtttcaattcaaaaacaaaagcacgttgcttgcaacttcagaaactttacaagattctgcgagtgaacctcagtgcctggttaaagtctgtcttcttttcctttactgcactgtctggraacagcctctcaaaaatatgttcatgagctttgtgcttcattatgaggc

SEQ ID NO: 92022 - DNA, 600 bp, Chicken  19866894404433_4
aacacagcaygctcaaagcagcagatatacagcaaaacataaaacttcgtctgttcagcgggtgatgaagtgagttaccccagccataaaggtttgacatgcagttatttgggagtgtatttggatcarcgcgttctcaaagtcacaggaacttgaagctaaattccacgagtcatctctatgagttcttggttcagtgaattttaagccggcaatgaaaataggacaggtacaaaatattagccaaggaacagagggaataatcgataaagtgcaaaawgtgttgttgcaaaaagcccrgcatattgaatatttatcaraagggttttgaatgtttagaagaaagttcagatttctcwattttcaatttcccagaatccctgcttttatcaagagcatttactggccattggtttcaattcaaaaacaaaagcacgttgcttgcaacttcagaaactttacaagattctgcgagtgaacctcagtgcctggttaaagtctgtcttcttttcctttactgcactgtctggraacagcctctcaaaaatatgttcatgagctttgtgcttcattatgaggcacgcctggcccctaacagta

SEQ ID NO: 92023 - DNA, 600 bp, Chicken  19866894404433_5
gcagatatacagcaaaacataaaacttcgtctgttcagcgggtgatgaagtgagttaccccagccataaaggtttgacatgcagttatttgggagtgtatttggatcarcgcgttctcaaagtcacaggaacttgaagctaaattccacgagtcatctctatgagttcttggttcagtgaattttaagccggcaatgaaaataggacaggtacaaaatattagccaaggaacagagggaataatcgataaagtgcaaaawgtgttgttgcaaaaagcccrgcatattgaatatttatcaraagggttttgaatgtttagaagaaagttcagatttctcwattttcaatttcccagaatccctgcttttatcaagagcatttactggccattggtttcaattcaaaaacaaaagcacgttgcttgcaacttcagaaactttacaagattctgcgagtgaacctcagtgcctggttaaagtctgtcttcttttcctttactgcactgtctggraacagcctctcaaaaatatgttcatgagctttgtgcttcattatgaggcacgcctggcccctaacagtagtttttgcagtacaacatca

SEQ ID NO: 92024 - DNA, 600 bp, Chicken  19866894404433_6
gggtgatgaagtgagttaccccagccataaaggtttgacatgcagttatttgggagtgtatttggatcarcgcgttctcaaagtcacaggaacttgaagctaaattccacgagtcatctctatgagttcttggttcagtgaattttaagccggcaatgaaaataggacaggtacaaaatattagccaaggaacagagggaataatcgataaagtgcaaaawgtgttgttgcaaaaagcccrgcatattgaatatttatcaraagggttttgaatgtttagaagaaagttcagatttctcwattttcaatttcccagaatccctgcttttatcaagagcatttactggccattggtttcaattcaaaaacaaaagcacgttgcttgcaacttcagaaactttacaagattctgcgagtgaacctcagtgcctggttaaagtctgtcttcttttcctttactgcactgtctggraacagcctctcaaaaatatgttcatgagctttgtgcttcattatgaggcacgcctggcccctaacagtagtttttgcagtacaacatcaggcacattttgcgcatgctgttgcttagaattcagccag

SEQ ID NO: 92025 - DNA, 600 bp, Chicken  19866894404433_7
acaaaatattagccaaggaacagagggaataatcgataaagtgcaaaawgtgttgttgcaaaaagcccrgcatattgaatatttatcaraagggttttgaatgtttagaagaaagttcagatttctcwattttcaatttcccagaatccctgcttttatcaagagcatttactggccattggtttcaattcaaaaacaaaagcacgttgcttgcaacttcagaaactttacaagattctgcgagtgaacctcagtgcctggttaaagtctgtcttcttttcctttactgcactgtctggraacagcctctcaaaaatatgttcatgagctttgtgcttcattatgaggcacgcctggcccctaacagtagtttttgcagtacaacatcaggcacattttgcgcatgctgttgcttagaattcagccagtcacttatttctgtgtgccagcagcgggggatggctgctctgcaatctgaggaccctaactttcagaatctggtgacatcaggaagtctcaatctggtttatctgctcaaaacctccgttaggtttgtcttggcgtgcggcgctccggtgcggtgttgcagttggagaggtt

SEQ ID NO: 92026 - DNA, 600 bp, Chicken  19866894404439_1
gaagcacataaaacataagaaaagcaattacatgcctttggtttccactcctctgtttttatagggcttgtcttaggatctgagtgattttatgcatcagagaaagatgacaatcaagatgagttgcaatgatatgcatgggaggctgagacactgtgccttcagctatttatttccctgcagctacaggtcttctaaacatcgtatttcttcagagggatgagggaaccccaaattttgcagctgaatattactggcactaagactttacatgagagcccaagtgacagccaccagaargcaactcaatgcaatcccttctcctccccctctaaggggaatgtatggggtactgagcragaygcagccccagcatctcagtgttgaggtgtctgactgcctcctgcaaccccattacacctccttttgtgctacagaggcactcctgggaccaggagatgctctttgacactcgtcatcaagcacatgtaacacccatcgttgctgctacctccacccaaagctttgctcaccaacagtaaaccaccccgtttctactgcatcagaatttctgggcaaacgagagcaaaaggcaggact

SEQ ID NO: 92027 - DNA, 600 bp, Chicken  19866894404439_2
tatagggcttgtcttaggatctgagtgattttatgcatcagagaaagatgacaatcaagatgagttgcaatgatatgcatgggaggctgagacactgtgccttcagctatttatttccctgcagctacaggtcttctaaacatcgtatttcttcagagggatgagggaaccccaaattttgcagctgaatattactggcactaagactttacatgagagcccaagtgacagccaccagaargcaactcaatgcaatcccttctcctccccctctaaggggaatgtatggggtactgagcragaygcagccccagcatctcagtgttgaggtgtctgactgcctcctgcaaccccattacacctccttttgtgctacagaggcactcctgggaccaggagatgctctttgacactcgtcatcaagcacatgtaacacccatcgttgctgctacctccacccaaagctttgctcaccaacagtaaaccaccccgtttctactgcatcagaatttctgggcaaacgagagcaaaaggcaggacttctgacccattcactgctgtgcactgtccatatggctccttggtcatgcagttcattgg

SEQ ID NO: 92028 - DNA, 600 bp, Chicken  19866894404439_3
gggcttgtcttaggatctgagtgattttatgcatcagagaaagatgacaatcaagatgagttgcaatgatatgcatgggaggctgagacactgtgccttcagctatttatttccctgcagctacaggtcttctaaacatcgtatttcttcagagggatgagggaaccccaaattttgcagctgaatattactggcactaagactttacatgagagcccaagtgacagccaccagaargcaactcaatgcaatcccttctcctccccctctaaggggaatgtatggggtactgagcragaygcagccccagcatctcagtgttgaggtgtctgactgcctcctgcaaccccattacacctccttttgtgctacagaggcactcctgggaccaggagatgctctttgacactcgtcatcaagcacatgtaacacccatcgttgctgctacctccacccaaagctttgctcaccaacagtaaaccaccccgtttctactgcatcagaatttctgggcaaacgagagcaaaaggcaggacttctgacccattcactgctgtgcactgtccatatggctccttggtcatgcagttcattggctcc

SEQ ID NO: 92029 - DNA, 600 bp, Chicken  19866894404441_1
ggctgacctgcaacacagagggcacaaaacctgctcaacacttgtacagaggaagtggagtgatggagctccatatgcttttgacacagagtgggtagtaaaccatcttgtggtgtgagattttgtgctgcgacactggacaaattcgtcgtgatattccctagatagagaaggctgcctgctggcaatagatacaggagttcaatgtgtaaactctgataaggatgacatgtaatttgtgttacagttggactgttaattgtatataaagctgcagcctctacagatctttcactgagwgtccttaattgggaaaaggagtaaatccagaatcactatgtcagtgtaagtttgtatattttctgagatgtagtgacacagatcatctatggccaacagttctaagggcagtggtacatttacatattttaagtgttagaggggtaagtaagagttcctaacaattagaatacagtttttatttgtttttaatgtggctatgtgttcttgcaattcggtcagagtaagagatacgaggtaccctgtattcagtgtcaatttcccaatctctctttgtttttgtttttttcctctggtcta

SEQ ID NO: 92030 - DNA, 600 bp, Chicken  19866894404445_1
gtgatgcttccttttttatttattacatttaaagcagctttgccaggggggagcccaagagaagacgcagcttactgtcctgggggttcgaggagctgggctgcacacaaagcagaaggcagcaccccaccacacatgcaacagtctgtgctcctggggggcagagagggccaggggaaggtggggaccacctggttcagcagcactgagtcgtttgctgagctctcctcctgaccgctgggcagttattatcaatgccatgcagctgtaaatgttctctctgcagctgggacctgggakcagagagtgcggctcagctgagtgtgttattggattagcagctgattagagctgttaagagtccactcttgaataatcaacatggtgctttttggctgctgtgtagtggtgggaggaggaaggaggcagagcagcttggctgactgctgttgattcacagctgagccctggcctggtagtcagcaaaccctgttcagaggggaggcctggttccccaccttccccaggaccactggtgggacgtagagctgtaaggggacctcctatttctctgactcgtgtttcaggctatggattttc

SEQ ID NO: 92031 - DNA, 600 bp, Chicken  19866894404450_1
cacttattcctaacaaagaaacattcaggggacccgctttccactgatgtgtacaatagataaattaattaatgccgttcacaccctgtctctttcttggggtaggaggcttagagaaaggtcagaactagaagaaaaatgagaagtgagattgtatgagaaagttccgaggtcagtttttcctgattattattggaagcagttaagcctttgaaggggaaaggctggtatgtgatcaaataaaaataatataataccagcagtgtaagtgcatgtatgatcactctaaattgatttaarctgacaaggggaagtaacaaatgcccggttcccttgaaaaatatattctatgtgttttcttcatctttaggacgtgaaggaaagaaacgttactatcttttaaatattaaagtggtttcattttgcagagttcaaaatatatctttatatttgggagaggtagaaataatgttacctttcatgtttttgtaaaaacagtcatcaaataataatcggaagagtggaatttaatgcacagctttcrgtaaaagaaagtactgatgatcacttcaaagttgtaaataaactcttggcwagaaa

SEQ ID NO: 92032 - DNA, 600 bp, Chicken  19866894404450_2
aataatataataccagcagtgtaagtgcatgtatgatcactctaaattgatttaarctgacaaggggaagtaacaaatgcccggttcccttgaaaaatatattctatgtgttttcttcatctttaggacgtgaaggaaagaaacgttactatcttttaaatattaaagtggtttcattttgcagagttcaaaatatatctttatatttgggagaggtagaaataatgttacctttcatgtttttgtaaaaacagtcatcaaataataatcggaagagtggaatttaatgcacagctttcrgtaaaagaaagtactgatgatcacttcaaagttgtaaataaactcttggcwagaaaatgtcacatttagcacagattattgacctcatcgcaaaayagttattactttacggacgttttcaggaagaaaaaaagcaaataccttttcatattttctcaaatggagttgctgtttcagggaaagtattcccctgaattccggagagaaaatcacactcaaaaactratttattgagaaaagaaaccagcttcrgtttcttacttgttctcagttgttctgatagaaacagctgagttaaaa

SEQ ID NO: 92033 - DNA, 600 bp, Chicken  19866894404450_3
ttaarctgacaaggggaagtaacaaatgcccggttcccttgaaaaatatattctatgtgttttcttcatctttaggacgtgaaggaaagaaacgttactatcttttaaatattaaagtggtttcattttgcagagttcaaaatatatctttatatttgggagaggtagaaataatgttacctttcatgtttttgtaaaaacagtcatcaaataataatcggaagagtggaatttaatgcacagctttcrgtaaaagaaagtactgatgatcacttcaaagttgtaaataaactcttggcwagaaaatgtcacatttagcacagattattgacctcatcgcaaaayagttattactttacggacgttttcaggaagaaaaaaagcaaataccttttcatattttctcaaatggagttgctgtttcagggaaagtattcccctgaattccggagagaaaatcacactcaaaaactratttattgagaaaagaaaccagcttcrgtttcttacttgttctcagttgttctgatagaaacagctgagttaaaaatgtgtgaggcattcaaatataaaaaattggataacatgaaaaacattgaa

SEQ ID NO: 92034 - DNA, 600 bp, Chicken  19866894404450_4
atatattctatgtgttttcttcatctttaggacgtgaaggaaagaaacgttactatcttttaaatattaaagtggtttcattttgcagagttcaaaatatatctttatatttgggagaggtagaaataatgttacctttcatgtttttgtaaaaacagtcatcaaataataatcggaagagtggaatttaatgcacagctttcrgtaaaagaaagtactgatgatcacttcaaagttgtaaataaactcttggcwagaaaatgtcacatttagcacagattattgacctcatcgcaaaayagttattactttacggacgttttcaggaagaaaaaaagcaaataccttttcatattttctcaaatggagttgctgtttcagggaaagtattcccctgaattccggagagaaaatcacactcaaaaactratttattgagaaaagaaaccagcttcrgtttcttacttgttctcagttgttctgatagaaacagctgagttaaaaatgtgtgaggcattcaaatataaaaaattggataacatgaaaaacattgaaaaatgttgatctatagaaggctatataaaatcctcttcctttgga

SEQ ID NO: 92035 - DNA, 600 bp, Chicken  19866894404450_5
tgttacctttcatgtttttgtaaaaacagtcatcaaataataatcggaagagtggaatttaatgcacagctttcrgtaaaagaaagtactgatgatcacttcaaagttgtaaataaactcttggcwagaaaatgtcacatttagcacagattattgacctcatcgcaaaayagttattactttacggacgttttcaggaagaaaaaaagcaaataccttttcatattttctcaaatggagttgctgtttcagggaaagtattcccctgaattccggagagaaaatcacactcaaaaactratttattgagaaaagaaaccagcttcrgtttcttacttgttctcagttgttctgatagaaacagctgagttaaaaatgtgtgaggcattcaaatataaaaaattggataacatgaaaaacattgaaaaatgttgatctatagaaggctatataaaatcctcttcctttggaaaaaaaatgtggccagctgtatttagtaccctttaattatgtatttgatccagaatgtcatttattcatcctgctttccccagctgatttctgactgagcagttctgaagaatacagttgtaactgggt

SEQ ID NO: 92036 - DNA, 600 bp, Chicken  19866894404450_6
agtcatcaaataataatcggaagagtggaatttaatgcacagctttcrgtaaaagaaagtactgatgatcacttcaaagttgtaaataaactcttggcwagaaaatgtcacatttagcacagattattgacctcatcgcaaaayagttattactttacggacgttttcaggaagaaaaaaagcaaataccttttcatattttctcaaatggagttgctgtttcagggaaagtattcccctgaattccggagagaaaatcacactcaaaaactratttattgagaaaagaaaccagcttcrgtttcttacttgttctcagttgttctgatagaaacagctgagttaaaaatgtgtgaggcattcaaatataaaaaattggataacatgaaaaacattgaaaaatgttgatctatagaaggctatataaaatcctcttcctttggaaaaaaaatgtggccagctgtatttagtaccctttaattatgtatttgatccagaatgtcatttattcatcctgctttccccagctgatttctgactgagcagttctgaagaatacagttgtaactgggtcagctatatttttggtgggacttgaaa

SEQ ID NO: 92037 - DNA, 599 bp, Chicken  19866894404463_1
  misc_feature (1)..(181): n is any nucleotide
nnnnnnnnnnnnnnnnnnnnnnnnnnnnnnnnnnnnnnnnnnnnnnnnnnnnnnnnnnnnnnnnnnnnnnnnnnnnnnnnnnnnnnnnnnnnnnnnnnnnnnnnnnnnnnnnnnnnnnnnnnnnnnnnnnnnnnnnnnnnnnnnnnnnnnnnnnnnnnnnnnnnnnnnnnnnnnnnnnnnntttagattaaaagggaatcctctgaaaataaagactgccaatatgtcatacatgcaaaatcattttgaaaattctggcctgaaacaaaatgtattattacttaaaaaaaaaaaaaaaaraaagaaaagaaaagaaaagaaaagaaaagaaaagaaaagaaaagaaaagaaaagaaaagaaaagaaaagaaaagaaaagaaaagaaaagaaaagaaaagaaaagaaaagaaaagaaaagaaaagaaaaagaaaaagaaatccattattttagtctactgttattttgccagcccttcaagttagatttaaatgaactcaaatcaaagaaatatgaggaaaagaaagtaggcttagcaacactactctcagtagctgttgactgctctttggatttcaacttctgcaattaataagaaaa

SEQ ID NO: 92038 - DNA, 600 bp, Chicken  19866894404476_1
tgctaaagctcaaaatatgattgcaatgtgtcccaggggctggaacaggagctgctgctgctgttctgcagtgcccagtgggggaattttggccatgcccacataaagacaggtggtagagtcccagcaaaacctcatttgtctttcaggttattttaaggaactgcagcaattcccttcccatcattcagggctgcctgcgccatctctgtgcagactctgtatgggtagcatgggatggtagtgtggaggtggagggacaagtgcctctgttcccagagaaacacagccttgtccagwgcaaatgaagtgaccaaggtgtgcaggtgctgctgagatcttgctggtgtcacccaactgtaatttgttgtacaatgcctgattgtgttggtgcaatgtgctaccatggtgctgagctcctgggatcgcatcctcagagcgcctactgagcctcatttctccagactggatcgccaacaattttaagtaatggggaattcttaaaaaaaaaaaaaaaagaactttactgagcaaaggagacacaaaatacactgagagaagtatttgttactgctcacacgctctgctcaatgttaaatg

SEQ ID NO: 92039 - DNA, 600 bp, Chicken  19866894404476_2
attgtgttggtgcaatgtgctaccatggtgctgagctcctgggatcgcatcctcagagcgcctactgagcctcatttctccagactggatcgccaacaattttaagtaatggggaattcttaaaaaaaaaaaaaaaagaactttactgagcaaaggagacacaaaatacactgagagaagtatttgttactgctcacacgctctgctcaatgttaaatgtgaacagaccgcagcaggtgtgaagggacgtgatgcaggcttggaaaccccggagtgtgctgagggaagggctctgagaaraggagaaaaatgcaacatgatgatgaaacacaaatatttccgcagatgtgtttaagtgcaggatccggggcaatccagctgtccgttggccgctttcagccaaaagacaacagaaggcaacagatgatctcaccccgctcctcttcaattgacgaatcttccccacagttgtttaaatatcagtttttctagggctattcttcaccagctgtttggcaagccctggcgtgggctgaaggttttcttcccttctctcgctgcttctttgtgaagcaggaaaccactcgggtgtgcgggatg

SEQ ID NO: 92040 - DNA, 600 bp, Chicken  19866894404477_1
atgctaattagcattctaagaatattagaataagagaaacatgcacaggaatgaaatgaaaacctaatacagttcaatctttaaaagaaaattttcaataaaagcactaaataggatttttactacaagaatacctacgcaatatacagaacaaagtatgtttgaaaacatgcagaattaaggagaacttaaaaaaaaaaaaatcagatctgcttcaaccaaatggagcaaggcagcagaacacagctcagcttcacacacaccagaaagcatgatatgcagtgagcagcaactccatayatccagcctcattttatttctagattacagcaggatacttgtccctgtgcactcatggaagtaacagctaaggtccagcctgaagttacaataatattacgtgtggttgtcctatgcaagggttttcacccacacttgcaacaaaattctagaaaaagccaccagcaataacaggaccttggtgagcttgagaaagtcactttacctctgtatcacatggtcctgaaacgtaaaacagggccaatacttgctgtctccaaaccatgctatggaggaggtgagtagagtctgcagtgtggt

SEQ ID NO: 92041 - DNA, 600 bp, Chicken  19866894404478_1
aaggatatcgatgtgtgtatgtggggagtgatgtcatctgtggatcatcctaacaggttgggaagccggggctctttgggatgctgcccacaggggctctttgggggtttccagttggatcctgatcagtttgtggggggagctgaaagcaacgcaccagatactgcaataatgttcaaacagacctagcacttttcaaattactctgcaaatattaactaattagattgtttttcctccttaggaacagttagcaaaatagtggctggggagctactgggaatatgatttatttaagcrttgaaatgctttgtataagtccctcacaggaggtcgttaggaaaatgtggttactttaggatgtgaagaacaatcttktactgtgcggggagaggaagcaaagagcagtcagttttattatggacaaagataatctttgagcacctcagttgtaagtgctgagagttcaaaatgggtcttgacagcctatttgagaggcaatgttttctatcatgaactgtgcttggatgaatttggtaatgtgcttgaacaaattcagtatagaagagggagatttgtgagccctccagtacaacttgt

SEQ ID NO: 92042 - DNA, 600 bp, Chicken  19866894404478_2
ggatgctgcccacaggggctctttgggggtttccagttggatcctgatcagtttgtggggggagctgaaagcaacgcaccagatactgcaataatgttcaaacagacctagcacttttcaaattactctgcaaatattaactaattagattgtttttcctccttaggaacagttagcaaaatagtggctggggagctactgggaatatgatttatttaagcrttgaaatgctttgtataagtccctcacaggaggtcgttaggaaaatgtggttactttaggatgtgaagaacaatcttktactgtgcggggagaggaagcaaagagcagtcagttttattatggacaaagataatctttgagcacctcagttgtaagtgctgagagttcaaaatgggtcttgacagcctatttgagaggcaatgttttctatcatgaactgtgcttggatgaatttggtaatgtgcttgaacaaattcagtatagaagagggagatttgtgagccctccagtacaacttgttcatttttttcaggagtggagaggaagcactaccacttagttggactgaatgggtccagaggtaaacagcaggatggg

SEQ ID NO: 92043 - DNA, 414 bp, Chicken  19866894404488_1
gggaaaagcacttctgaagcaagaaatgacccacgcatcaaaacatgctgagatggcaaacagccacagtctcgaggctcggtcaggaggcggctgtgccacgctcaccccggcggccctgaagccacacgccaggagaccacggctccgcagagctgccagcagcaggaggaggatgaggcagatggatgggcttaaataggaaaccacgtcctctccatccatctatgcaacccagaggtgcctgccccactcccgtcagcagctcagccgtgcccatggaagcttcccaacttcccrtgggggctccagccagaatgagagctgcaaacgccctaaccccaatcccaaagaagcagctgctttcaatctggggcacagacatcacacccacgcgccacagaggggatgcta

SEQ ID NO: 92044 - DNA, 600 bp, Chicken  19866894404508_1
atacactgaatcttccttagagttcccaaagttaatctagaagcaaaccctaaaaaaggagcccactgaaaacttgagaaatgaaattggtgggcagtacatgtggaagggagcagtggtcagggttaaagtccccacagtacaaagtgagaggactgcaaatagatcctgaatgggtgacagggtctcactccctgaaaacacaaagcagctgctagatgcttcccatcactttacttgatgaaagcctgtgccattatggatcagggtgcataactgaagaggtgaggagcaaagtgyccacacttctccctgctgctgcagaggcctttgcagcaaaggtctacactaagactyctgtctggagaagagaaatgtctggggagatcctgtgaactgtcacaagtacatgagcacctcctagttgggctagaccacccatggctgctattggaagcaggccactgaggaaagcggcccttttgggtcacgtcccagacttcaggtcttccaaacagtgacattaacttcatgtggccaaaccactgtcttaaaatacagatctcaaaagtgaaacacagacaatgaaatcatgttttt

SEQ ID NO: 92045 - DNA, 600 bp, Chicken  19866894404508_2
ggagcccactgaaaacttgagaaatgaaattggtgggcagtacatgtggaagggagcagtggtcagggttaaagtccccacagtacaaagtgagaggactgcaaatagatcctgaatgggtgacagggtctcactccctgaaaacacaaagcagctgctagatgcttcccatcactttacttgatgaaagcctgtgccattatggatcagggtgcataactgaagaggtgaggagcaaagtgyccacacttctccctgctgctgcagaggcctttgcagcaaaggtctacactaagactyctgtctggagaagagaaatgtctggggagatcctgtgaactgtcacaagtacatgagcacctcctagttgggctagaccacccatggctgctattggaagcaggccactgaggaaagcggcccttttgggtcacgtcccagacttcaggtcttccaaacagtgacattaacttcatgtggccaaaccactgtcttaaaatacagatctcaaaagtgaaacacagacaatgaaatcatgttttttttccctggagtcctgtgccaaaatacccttgatgataactgaagactccaagggtc

SEQ ID NO: 92046 - DNA, 599 bp, Chicken  19866894404513_1
  misc_feature (1)..(211): n is any nucleotide
nnnnnnnnnnnnnnnnnnnnnnnnnnnnnnnnnnnnnnnnnnnnnnnnnnnnnnnnnnnnnnnnnnnnnnnnnnnnnnnnnnnnnnnnnnnnnnnnnnnnnnnnnnnnnnnnnnnnnnnnnnnnnnnnnnnnnnnnnnnnnnnnnnnnnnnnnnnnnnnnnnnnnnnnnnnnnnnnnnnnnnnnnnnnnnnnnnnnnnnnnnnnnnnnnnnattctttctgtgggtctgtcagagatgttggtgcctgcagggaaactcttcccctgtcagtcagtgctctgtttgaatggatgggaacygggtgagcagaaggaatgggagtactgctgctaagctgctgcttactttcatgctgttgttttcccatgtaatggctttactgtggtgccaggagagctgtttgtgctttactgactgagcctgaatgggtctgtttctttttcttttccccagtactgttcctgttggagagttctgacatattctttcatttgtttttaactggagaactgagatgcccattaataggctttcagtgatgagccttactgcgactagcaatgatgtgatggggactgggatgccagaggacttgtta

SEQ ID NO: 92047 - DNA, 463 bp, Chicken  19866894404513_2
cctgttggagagttctgacatattctttcatttgtttttaactggagaactgagatgcccattaataggctttcagtgatgagccttactgcgactagcaatgatgtgatggggactgggatgccagaggacttgttaaggatatgagttggtgggtgcttagcagaaaggtgtgagctgttgcaatgcatctgccttagagaagtgttacctacatggtggggataatcagtcagttatgtcacaggaaggaaccttggtgtaaaacacaagcatgaaggcagtaggactcattaaccscaaagaggggtttcatacatcagtgaaaccatgacaagttagtttgggagcccagcagttcctttcattcatgtgttgggtgtggaactttgcacgtgcaggtaatgtgcattgtaccaagggtgagaacggtgggttgtgtgactcggatctgcagcagtgt

SEQ ID NO: 92048 - DNA, 600 bp, Chicken  19866894404521_1
ccatgaagagatgtctctgaagagcatgacaaacaaaaatcccttccaatctcttctgaaattgttaactgcgcatgttcatttcagaataggtacctaaactatcagtcctggatggtgagggggaatagctgcccagtttaaagcatctctaaaggtgatgactattcattcaataatctctggaagtatttctataggaattattttcctatagaatggagactcctcaaactgagttttctttcctaagccatactactgcatgtgattactaaccatatttttcaaatatgtacmtcatcaacaaagctctttgacaaatatagaaataagacaccaattatgagctataagtatacacagcagaaggaaagaaaataatagcatacaaagcaagcatatactacttcttatagaaaggtttaaggaagacagttaatttgctatagaaattatcttcagtttccttaatcaattacagttctaaagaccagcatttgagacgcttctcaaatacaagagggaattccatcacagtgaaagttcaagttttataaaacctcaaatcccacacttgcttacttgcattagcttttt

SEQ ID NO: 92049 - DNA, 600 bp, Chicken  19866894404530_1
caaacacatggaagagggagtgcagagttggtctgaccctgggtagtcatcggtgcaaaccaggaatgcgtgaatgcctttcaacacaagataggtttttataacctctgttatccgtaagagatcttctcttctgcctctctcgcgcttctgcagtctttagtctttctgtagctcagttccattcccagaggcctgaaatgaataaatccaaacatgctctatttcaacttataccccatgagcagcactgccgatgtggcattttggagactgagggaagcgagccacatttgctcrtggaaaaaaaaaaaagaaagaactgcagcaacacaatgacgtaaggtttatcctgcaggttcacctcgggttacaaccggatctaattcagcatgctcttgtcagtacagcttacttcagctgaascaagaaatacagttcaattctgcatgcagctaactcccacataaagcttcagaacctttccaatctgatttttttttttaattgtaattttttttttttcacttgaggaactcttgggcctgaataatgtgggtttatttatctgtctgctaccagctgaaagtaatttcatga

SEQ ID NO: 92050 - DNA, 600 bp, Chicken  19866894404530_2
ttctcttctgcctctctcgcgcttctgcagtctttagtctttctgtagctcagttccattcccagaggcctgaaatgaataaatccaaacatgctctatttcaacttataccccatgagcagcactgccgatgtggcattttggagactgagggaagcgagccacatttgctcrtggaaaaaaaaaaaagaaagaactgcagcaacacaatgacgtaaggtttatcctgcaggttcacctcgggttacaaccggatctaattcagcatgctcttgtcagtacagcttacttcagctgaascaagaaatacagttcaattctgcatgcagctaactcccacataaagcttcagaacctttccaatctgatttttttttttaattgtaattttttttttttcacttgaggaactcttgggcctgaataatgtgggtttatttatctgtctgctaccagctgaaagtaatttcatgagtttgattaaacaaccgcctcaaagtaaactggagaatcacacacttaaaggagctgctcccacacacaggcactgatgaggccgtacaggagaacgtcgctgtttggggcctctgcacatcccca

SEQ ID NO: 92051 - DNA, 599 bp, Chicken  19866894404534_1
  misc_feature (1)..(72): n is any nucleotide
nnnnnnnnnnnnnnnnnnnnnnnnnnnnnnnnnnnnnnnnnnnnnnnnnnnnnnnnnnnnnnnnnnnnnnnntcggtgttactgcattccctgcaagtttctcagctctccagatatatttgttttataccatttgtaattagcctgttactaactgcaatacccacctcgcttcagttggttttggatcaacagaaacagacttgctggaaatgagacaaaataaatcagactactgtataaagtttagaaagacaaagtgcagagaccacttcttgttgagggtggtgtcccctgcgrggcccctggacatgaggccgacgcagcacagaaatagggtttgaaccaccccgagcctatattcacacctccagctatagcacaggaccattccgtgcattttctttaagccaaatttctgtccttcatgttcggagatggtcacagagcccgtgcaatccttgctatattttagagcaaccaatggggggacatgctaattgcgatagccgtctgcaacccaaaaggactgttgtagwgctctcccctcccgctgttccctttccttcttcccttctcccagccttgtgccgtcagtc

SEQ ID NO: 92052 - DNA, 563 bp, Chicken  19866894404534_2
ataaagtttagaaagacaaagtgcagagaccacttcttgttgagggtggtgtcccctgcgrggcccctggacatgaggccgacgcagcacagaaatagggtttgaaccaccccgagcctatattcacacctccagctatagcacaggaccattccgtgcattttctttaagccaaatttctgtccttcatgttcggagatggtcacagagcccgtgcaatccttgctatattttagagcaaccaatggggggacatgctaattgcgatagccgtctgcaacccaaaaggactgttgtagwgctctcccctcccgctgttccctttccttcttcccttctcccagccttgtgccgtcagtcagcacgcggctcacaagccttttgcacaggtttgtcttatcaaacrcagacttatcaaacagacagggcccgtctgtcctgtaggggacatccacaggaggcctccggcgatctgcctccgaaatcccacttcatacgaggaacactaggtggcacacaacaaccactggattacttctttcctggctcagaaacgaaaaaag

SEQ ID NO: 92053 - DNA, 457 bp, Chicken  19866894404534_3
ccaccccgagcctatattcacacctccagctatagcacaggaccattccgtgcattttctttaagccaaatttctgtccttcatgttcggagatggtcacagagcccgtgcaatccttgctatattttagagcaaccaatggggggacatgctaattgcgatagccgtctgcaacccaaaaggactgttgtagwgctctcccctcccgctgttccctttccttcttcccttctcccagccttgtgccgtcagtcagcacgcggctcacaagccttttgcacaggtttgtcttatcaaacrcagacttatcaaacagacagggcccgtctgtcctgtaggggacatccacaggaggcctccggcgatctgcctccgaaatcccacttcatacgaggaacactaggtggcacacaacaaccactggattacttctttcctggctcagaaacgaaaaaag

SEQ ID NO: 92054 - DNA, 600 bp, Chicken  19866894404535_1
gcactctttcctaacaaaaccacgcgtacagaacggcgcttggaacaatgaatactgagccacaaaaaaagtgatgtgtttaaagaatgagcgcagtttttgtaaagctggaatatttccacgaacccgtcctttagctctggattaaccaaaccttgcaggaaaacaaaactattttactcattaatatattctgacaatattgcaacataatctgagtttcattcggagcagtgagaaaatctttttattttaataggaaggagagaagaaaggctaagttgagagaacccttttctktaagggaaaaaaaaagaactggcgagcttctttcttctcctgccatatagcagatctcttcttggatttcacaccaccaaccataccctgtcagagatcttgaacagtttacattacttcttttgaaggattaatctagaccggcccagagataaaaaccaaaatgcacaatgaattcctgcactgaattccagcttgttactgtgaactcaacacaagaaaagaaaaaagtaatcccacacatcttgtagcatacacactgctttcacacagcatctgacttagacagaggaatacgta

SEQ ID NO: 92055 - DNA, 600 bp, Chicken  19866894404541_1
ttactctcacctgtccactgcatgtcagacaacccctatggaagtaagctaatgccaacacagtggaactaaggagctgctcaacaaccactgtcagacagttaatccatagtaagagtctcttgttcttgtcagttaaacttccacaagtaacttctgagtaagcacattcaaaaaaaaaaaaaaaaaaaagatttggctagtacaacatatattttaagctcagctattgacactaaattttacttttctttcactatttagttcatatatcctagtttatatcctagttttcagtgmaagctattgcctcagttcaaatttcagaccctctttcaaactctgtcactgtagcaaatattctacagcacctccagttctctgtcctgtctacagaaaggatttacagcccattcaaaaggatctgctaaaggaatcccttttcccctgttttcttagaacactgagaacatgggatttttgcagcatctttttttctgtcttcttatgaccaaggaattaatttaggaagaagaattaaagacagaggacctaaaacaaagttttcctatggtcctgatacgtataattccctgtcct

SEQ ID NO: 92056 - DNA, 599 bp, Chicken  19866894404544_1
  misc_feature (1)..(149): n is any nucleotide
nnnnnnnnnnnnnnnnnnnnnnnnnnnnnnnnnnnnnnnnnnnnnnnnnnnnnnnnnnnnnnnnnnnnnnnnnnnnnnnnnnnnnnnnnnnnnnnnnnnnnnnnnnnnnnnnnnnnnnnnnnnnnnnnnnnnnnnnnnnnnnnnnnnnntttttgtgcattttaattttaataaatgtacttctttcctgtgccataccacccaagactttaaaaagttacacattctcaagaatagaacttctcaattcctttacatccctcaaacacatttttggcacttctaccctatcttactgcracttgagccctctttccttcagatatatttcacttccatagaatctcagtcaccttttattatgccctgctaaacctccctaargatctatctgaggcttaaaagcagcctccagctrctgctaccttagtaatagtagggttatcagaatctgttgtgctctggaccatctccagaaactggggcaaaacttactgagaattggctgttccactatatacctgtggctcagagatgcctttttagttactgcttcggggaccatctcatacacagtttgcccccaaaggcaccatggt

SEQ ID NO: 92057 - DNA, 599 bp, Chicken  19866894404544_2
  misc_feature (1)..(65): n is any nucleotide
nnnnnnnnnnnnnnnnnnnnnnnnnnnnnnnnnnnnnnnnnnnnnnnnnnnnnnnnnnnnnnnnntttttgtgcattttaattttaataaatgtacttctttcctgtgccataccacccaagactttaaaaagttacacattctcaagaatagaacttctcaattcctttacatccctcaaacacatttttggcacttctaccctatcttactgcracttgagccctctttccttcagatatatttcacttccatagaatctcagtcaccttttattatgccctgctaaacctccctaargatctatctgaggcttaaaagcagcctccagctrctgctaccttagtaatagtagggttatcagaatctgttgtgctctggaccatctccagaaactggggcaaaacttactgagaattggctgttccactatatacctgtggctcagagatgcctttttagttactgcttcggggaccatctcatacacagtttgcccccaaaggcaccatggtcctcatctttcctgtgacttagatgtgcagggaacaggccagcctctcacaatgggggacagagaacataaagaagcatccagc

SEQ ID NO: 92058 - DNA, 599 bp, Chicken  19866894404544_3
  misc_feature (1)..(31): n is any nucleotide
nnnnnnnnnnnnnnnnnnnnnnnnnnnnnnntttttgtgcattttaattttaataaatgtacttctttcctgtgccataccacccaagactttaaaaagttacacattctcaagaatagaacttctcaattcctttacatccctcaaacacatttttggcacttctaccctatcttactgcracttgagccctctttccttcagatatatttcacttccatagaatctcagtcaccttttattatgccctgctaaacctccctaargatctatctgaggcttaaaagcagcctccagctrctgctaccttagtaatagtagggttatcagaatctgttgtgctctggaccatctccagaaactggggcaaaacttactgagaattggctgttccactatatacctgtggctcagagatgcctttttagttactgcttcggggaccatctcatacacagtttgcccccaaaggcaccatggtcctcatctttcctgtgacttagatgtgcagggaacaggccagcctctcacaatgggggacagagaacataaagaagcatccagcctgggaagaggactctgggacagcatgctaaagg

SEQ ID NO: 92059 - DNA, 389 bp, Chicken  19866894404544_4
gcaccatggtcctcatctttcctgtgacttagatgtgcagggaacaggccagcctctcacaatgggggacagagaacataaagaagcatccagcctgggaagaggactctgggacagcatgctaaaggagcagctgcctacaagagctatacaagtatgagccaaagactttgtctgttttagacctacttcagcaaaaagatcttggacagacatattgacctagaccattacctgatcaagatgcaaaaacaatgttgactggaaagatggaaacctcattagtagacctacatgcarccaagggacagaataatgatcctttgcaaactgcagaccgaccagaggcccaaatgcagctggcagtaccaagaaaagactaatagagt

SEQ ID NO: 92060 - DNA, 600 bp, Chicken  19866894404547_1
actaatagtaattttattgtaaaaattccctccccaccacttgaagcagcagtgaggccaaaaaggatctctactgagctggaaaccatcccctgcgaatttttaataatatgcataatgattacttacaaaagcttttactataaatcaatactgctacttgcatgaagatcactcaaatgaatgcttgcaatagagagactccttgaaatcctacagactgaaactatttaaattatatgttttgtctctgtgtatatactttggatatgtacattattttaaatcgaaaaagaaaawgtattggctgcttatattcagtttgcttttctatactgatatacagctcttttgtaattggaagatattaatattggataaaagtcacagaatatgcttcttgcatgtagacaatgtggaaatgttgtgttgtgacaaatgaaaatcatattaacagagcacagatttatttgttgctacaaagtatatggatgtttatattctaattacaatagtagaaaccaccaawaattagtatttctagcagaattcttatgttatcagcagtactgtttggcaattttcagactggtccttttt

SEQ ID NO: 92061 - DNA, 600 bp, Chicken  19866894404547_2
tttaaattatatgttttgtctctgtgtatatactttggatatgtacattattttaaatcgaaaaagaaaawgtattggctgcttatattcagtttgcttttctatactgatatacagctcttttgtaattggaagatattaatattggataaaagtcacagaatatgcttcttgcatgtagacaatgtggaaatgttgtgttgtgacaaatgaaaatcatattaacagagcacagatttatttgttgctacaaagtatatggatgtttatattctaattacaatagtagaaaccaccaawaattagtatttctagcagaattcttatgttatcagcagtactgtttggcaattttcagactggtcctttttttctttttttttttctggtttcctccttttctcaaccctctatttttgtcactcacattcagaaaatggtcaccagcacccactggtttctcctgattttatattattccttctgagctgcaatgcaacttcttatcagtaacactataaactgaaaatatatactccccttctgaacagatgagtaagatagactgtagaggagagaggaatatatgaatagaaatgt

SEQ ID NO: 92062 - DNA, 600 bp, Chicken  19866894404549_1
agagtgcaatgaatctgctctaagtagggaatagaatcatatggataggaagagctattgagcagagtattaaaaaacaaagccaccaagcaaacaaaagcctgcgtgtttgttgagctgcagaagtttcacacaaaaagtgctcttctgctcccattttactaacagaatggaagacagaggatatgcgttcctaaatcgaattattccaagacatctatttatctaagacgtgtaagacatctgaacctaagtgtaagtaaccatgctcagtgggattcaccttacacaggagaggargagaacagttcttacagcgcaggaacagatggctagattgtgtgtaggaaaacggaagagttccttgagacctcatggtaaaaataaataaataaattctaccacctagctcattagatcagaattatagaatgacttgtgttggaaaggaccttaaagrtcatctagttccagccyctctgctacaggcagggacacctccctctggaccaggttgctcacagccccatccagcctggcctggaaygattcsagggagggggcatccacaacctcactgkgcaacctgtgccartgtct

SEQ ID NO: 92063 - DNA, 600 bp, Chicken  19866894404549_2
actaacagaatggaagacagaggatatgcgttcctaaatcgaattattccaagacatctatttatctaagacgtgtaagacatctgaacctaagtgtaagtaaccatgctcagtgggattcaccttacacaggagaggargagaacagttcttacagcgcaggaacagatggctagattgtgtgtaggaaaacggaagagttccttgagacctcatggtaaaaataaataaataaattctaccacctagctcattagatcagaattatagaatgacttgtgttggaaaggaccttaaagrtcatctagttccagccyctctgctacaggcagggacacctccctctggaccaggttgctcacagccccatccagcctggcctggaaygattcsagggagggggcatccacaacctcactgkgcaacctgtgccartgtctcaccaccctcacagtaaacaatttcttcctgatatctagtctaaatccaccctcttccttttaccactaggggctgaaatacgagttatggctaactgagggttttacaggcattccttgtatttacaaataaaatacttgactttttaggccagtgcag

SEQ ID NO: 92064 - DNA, 600 bp, Chicken  19866894404549_3
cagaggatatgcgttcctaaatcgaattattccaagacatctatttatctaagacgtgtaagacatctgaacctaagtgtaagtaaccatgctcagtgggattcaccttacacaggagaggargagaacagttcttacagcgcaggaacagatggctagattgtgtgtaggaaaacggaagagttccttgagacctcatggtaaaaataaataaataaattctaccacctagctcattagatcagaattatagaatgacttgtgttggaaaggaccttaaagrtcatctagttccagccyctctgctacaggcagggacacctccctctggaccaggttgctcacagccccatccagcctggcctggaaygattcsagggagggggcatccacaacctcactgkgcaacctgtgccartgtctcaccaccctcacagtaaacaatttcttcctgatatctagtctaaatccaccctcttccttttaccactaggggctgaaatacgagttatggctaactgagggttttacaggcattccttgtatttacaaataaaatacttgactttttaggccagtgcagttagctggtacaccagg

SEQ ID NO: 92065 - DNA, 600 bp, Chicken  19866894404549_4
acctaagtgtaagtaaccatgctcagtgggattcaccttacacaggagaggargagaacagttcttacagcgcaggaacagatggctagattgtgtgtaggaaaacggaagagttccttgagacctcatggtaaaaataaataaataaattctaccacctagctcattagatcagaattatagaatgacttgtgttggaaaggaccttaaagrtcatctagttccagccyctctgctacaggcagggacacctccctctggaccaggttgctcacagccccatccagcctggcctggaaygattcsagggagggggcatccacaacctcactgkgcaacctgtgccartgtctcaccaccctcacagtaaacaatttcttcctgatatctagtctaaatccaccctcttccttttaccactaggggctgaaatacgagttatggctaactgagggttttacaggcattccttgtatttacaaataaaatacttgactttttaggccagtgcagttagctggtacaccaggcagcgcagaagccgtgtgacatgactatttttggatttgttttttaacagtatgtcataattcttgggag

SEQ ID NO: 92066 - DNA, 600 bp, Chicken  19866894404549_5
gtgtaagtaaccatgctcagtgggattcaccttacacaggagaggargagaacagttcttacagcgcaggaacagatggctagattgtgtgtaggaaaacggaagagttccttgagacctcatggtaaaaataaataaataaattctaccacctagctcattagatcagaattatagaatgacttgtgttggaaaggaccttaaagrtcatctagttccagccyctctgctacaggcagggacacctccctctggaccaggttgctcacagccccatccagcctggcctggaaygattcsagggagggggcatccacaacctcactgkgcaacctgtgccartgtctcaccaccctcacagtaaacaatttcttcctgatatctagtctaaatccaccctcttccttttaccactaggggctgaaatacgagttatggctaactgagggttttacaggcattccttgtatttacaaataaaatacttgactttttaggccagtgcagttagctggtacaccaggcagcgcagaagccgtgtgacatgactatttttggatttgttttttaacagtatgtcataattcttgggagtgtttt

SEQ ID NO: 92067 - DNA, 600 bp, Chicken  19866894404549_6
accttacacaggagaggargagaacagttcttacagcgcaggaacagatggctagattgtgtgtaggaaaacggaagagttccttgagacctcatggtaaaaataaataaataaattctaccacctagctcattagatcagaattatagaatgacttgtgttggaaaggaccttaaagrtcatctagttccagccyctctgctacaggcagggacacctccctctggaccaggttgctcacagccccatccagcctggcctggaaygattcsagggagggggcatccacaacctcactgkgcaacctgtgccartgtctcaccaccctcacagtaaacaatttcttcctgatatctagtctaaatccaccctcttccttttaccactaggggctgaaatacgagttatggctaactgagggttttacaggcattccttgtatttacaaataaaatacttgactttttaggccagtgcagttagctggtacaccaggcagcgcagaagccgtgtgacatgactatttttggatttgttttttaacagtatgtcataattcttgggagtgttttttcattgcttcatgaagagtaaaatata

SEQ ID NO: 92068 - DNA, 600 bp, Chicken  19866894404549_7
aggargagaacagttcttacagcgcaggaacagatggctagattgtgtgtaggaaaacggaagagttccttgagacctcatggtaaaaataaataaataaattctaccacctagctcattagatcagaattatagaatgacttgtgttggaaaggaccttaaagrtcatctagttccagccyctctgctacaggcagggacacctccctctggaccaggttgctcacagccccatccagcctggcctggaaygattcsagggagggggcatccacaacctcactgkgcaacctgtgccartgtctcaccaccctcacagtaaacaatttcttcctgatatctagtctaaatccaccctcttccttttaccactaggggctgaaatacgagttatggctaactgagggttttacaggcattccttgtatttacaaataaaatacttgactttttaggccagtgcagttagctggtacaccaggcagcgcagaagccgtgtgacatgactatttttggatttgttttttaacagtatgtcataattcttgggagtgttttttcattgcttcatgaagagtaaaatataagtattatggtggt

SEQ ID NO: 92069 - DNA, 600 bp, Chicken  19866894404560_1
ctcctgtccccagcttggggccattcaataaatcctagtctgagggtctcccagtgttctgttccttcatgaatgtgaaatagcttgtgtgcgtggggagagatgggtaagtggatgtgacactcgtaatggctctggcttttatgtcccttagacctgtctgaaccctaatgactttattacaagagcctgtcacaaaaataaatcctgctctgcacattctgtttttacagcttaggagatcatttcttgttacaacttgctgagtaagtgatgtgcacttaaaaatgcctgtgtatwcctaaatcctgaaatcatggtgcatgtttttgatgctttaattgtaaaaaggtaaagcaccacgtttctgagaagtggtctctggaaatgaggtgggaggtgggaaaagagaacaaaacaaaaagagattgcatgggagaaactagatgagttctagaggcttaatgatcagaaagtcaatttatgagaatcttatgttctggatctataaacataaaactttatcagacagcgttagagctcttaggattctcaagtgatagaaaatggttctcttttccatctccttcacagggcaga

SEQ ID NO: 92070 - DNA, 599 bp, Chicken  19866894404567_1
  misc_feature (1)..(29): n is any nucleotide
nnnnnnnnnnnnnnnnnnnnnnnnnnnnngctgggagggggtccaatcttgcagatgattttgaaatacaaggtgtgaggtcagggtaacactgaagagctcagtacccttcacagagcccaggccagcagcaaataaaacaaagctgaagaaacagtaggtttgggactgcccaactgtgtgtcccttttgtccttggggttatatccttaggttaggtcggtaagatgtatcgaaaagttctgacatagctcatctgatatgaaacactgtctctgaactggaattgtttctaggcaracagcaaaatggtaacaataaccgtagttcaaagtataacagtgcaatgagcactgggacccactacacacacgtgcaaatgcctacacaaaagactttatcacttaagtcctatttctttatgaaattacatttcagtgggcctctgctgmatccasgcttgttcctttgctgcagaaataatgcaaagattatttttcttcttgttggcttacgatttgcctgtyctagaagtaaaacaaatctcagaatctgaaactgatgcagctcttcctgcatatggagttcagactagctgt

SEQ ID NO: 92071 - DNA, 600 bp, Chicken  19866894404567_2
aacagtaggtttgggactgcccaactgtgtgtcccttttgtccttggggttatatccttaggttaggtcggtaagatgtatcgaaaagttctgacatagctcatctgatatgaaacactgtctctgaactggaattgtttctaggcaracagcaaaatggtaacaataaccgtagttcaaagtataacagtgcaatgagcactgggacccactacacacacgtgcaaatgcctacacaaaagactttatcacttaagtcctatttctttatgaaattacatttcagtgggcctctgctgmatccasgcttgttcctttgctgcagaaataatgcaaagattatttttcttcttgttggcttacgatttgcctgtyctagaagtaaaacaaatctcagaatctgaaactgatgcagctcttcctgcatatggagttcagactagctgtgggttttataaggtgcccaccagcccctgattggttgcatcagagctcytctggctttctttgtatttctggaagaggctctagatgatgtacgaaggacctgagcctactgagacaggggctgatgagccagaacttctggtgttgtgcagc

SEQ ID NO: 92072 - DNA, 600 bp, Chicken  19866894404567_3
aggtttgggactgcccaactgtgtgtcccttttgtccttggggttatatccttaggttaggtcggtaagatgtatcgaaaagttctgacatagctcatctgatatgaaacactgtctctgaactggaattgtttctaggcaracagcaaaatggtaacaataaccgtagttcaaagtataacagtgcaatgagcactgggacccactacacacacgtgcaaatgcctacacaaaagactttatcacttaagtcctatttctttatgaaattacatttcagtgggcctctgctgmatccasgcttgttcctttgctgcagaaataatgcaaagattatttttcttcttgttggcttacgatttgcctgtyctagaagtaaaacaaatctcagaatctgaaactgatgcagctcttcctgcatatggagttcagactagctgtgggttttataaggtgcccaccagcccctgattggttgcatcagagctcytctggctttctttgtatttctggaagaggctctagatgatgtacgaaggacctgagcctactgagacaggggctgatgagccagaacttctggtgttgtgcagctgaaat

SEQ ID NO: 92073 - DNA, 600 bp, Chicken  19866894404567_4
atgtatcgaaaagttctgacatagctcatctgatatgaaacactgtctctgaactggaattgtttctaggcaracagcaaaatggtaacaataaccgtagttcaaagtataacagtgcaatgagcactgggacccactacacacacgtgcaaatgcctacacaaaagactttatcacttaagtcctatttctttatgaaattacatttcagtgggcctctgctgmatccasgcttgttcctttgctgcagaaataatgcaaagattatttttcttcttgttggcttacgatttgcctgtyctagaagtaaaacaaatctcagaatctgaaactgatgcagctcttcctgcatatggagttcagactagctgtgggttttataaggtgcccaccagcccctgattggttgcatcagagctcytctggctttctttgtatttctggaagaggctctagatgatgtacgaaggacctgagcctactgagacaggggctgatgagccagaacttctggtgttgtgcagctgaaatctgatcctctttttagaacacccagagcagttcatgtcctgggatgtatggatgttaagatatgcagtc

SEQ ID NO: 92074 - DNA, 600 bp, Chicken  19866894404567_5
gagcactgggacccactacacacacgtgcaaatgcctacacaaaagactttatcacttaagtcctatttctttatgaaattacatttcagtgggcctctgctgmatccasgcttgttcctttgctgcagaaataatgcaaagattatttttcttcttgttggcttacgatttgcctgtyctagaagtaaaacaaatctcagaatctgaaactgatgcagctcttcctgcatatggagttcagactagctgtgggttttataaggtgcccaccagcccctgattggttgcatcagagctcytctggctttctttgtatttctggaagaggctctagatgatgtacgaaggacctgagcctactgagacaggggctgatgagccagaacttctggtgttgtgcagctgaaatctgatcctctttttagaacacccagagcagttcatgtcctgggatgtatggatgttaagatatgcagtcactgtcctctgtaggaacaggagcagcaacrcatcaacaatgtgatagaagtgaaggcaaaccagtgtggcttcctatttctgggatcaccagctgggaatcctctgggctgccttttagg

SEQ ID NO: 92075 - DNA, 600 bp, Chicken  19866894404567_6
ctgatgcagctcttcctgcatatggagttcagactagctgtgggttttataaggtgcccaccagcccctgattggttgcatcagagctcytctggctttctttgtatttctggaagaggctctagatgatgtacgaaggacctgagcctactgagacaggggctgatgagccagaacttctggtgttgtgcagctgaaatctgatcctctttttagaacacccagagcagttcatgtcctgggatgtatggatgttaagatatgcagtcactgtcctctgtaggaacaggagcagcaacrcatcaacaatgtgatagaagtgaaggcaaaccagtgtggcttcctatttctgggatcaccagctgggaatcctctgggctgccttttaggcaccgctgctgctgccttcttcctcatgcaccatctgcctgtgctttcttagcaagaaataggaagaacagacttgtccactaaagcactttttctgttcttatttcaacatttcagtgcatgggcaggcagcccaccagcctcagcttcagagcaaggagaagacggttaagaacaacagcaggggctagaatggctgtgagaagtttc

SEQ ID NO: 92076 - DNA, 600 bp, Chicken  19866894404567_7
tgaaggcaaaccagtgtggcttcctatttctgggatcaccagctgggaatcctctgggctgccttttaggcaccgctgctgctgccttcttcctcatgcaccatctgcctgtgctttcttagcaagaaataggaagaacagacttgtccactaaagcactttttctgttcttatttcaacatttcagtgcatgggcaggcagcccaccagcctcagcttcagagcaaggagaagacggttaagaacaacagcaggggctagaatggctgtgagaagtttcttacagcatcagcaaggagmtgagaatcaccttttaaagtctgcctgcagagaaaggtaagatggctgtcacatcagtagcgtttacctactgtgttcctcccagggtggaggggactgcgtcaccaaagagatgctcttctgagcagtgtttgcccatgactttttgtggcttgacgagcaaagaaactgaattgctaaggaggtggtcagtagcacatatttacataggttaattgcatagcataattgagggatcagtttgattttcattggggctactgatggagacatctccctgacagtgcttatgaccgacac

SEQ ID NO: 92077 - DNA, 599 bp, Chicken  19866894404572_1
  misc_feature (1)..(176): n is any nucleotide
nnnnnnnnnnnnnnnnnnnnnnnnnnnnnnnnnnnnnnnnnnnnnnnnnnnnnnnnnnnnnnnnnnnnnnnnnnnnnnnnnnnnnnnnnnnnnnnnnnnnnnnnnnnnnnnnnnnnnnnnnnnnnnnnnnnnnnnnnnnnnnnnnnnnnnnnnnnnnnnnnnnnnnnnnnnnnnnngcatatgaaatggccgacatgaaaacggacttgaataaaattgacctccttgatcatgctggtaatatcaaagctctaggttaagagaagaaagcaaaatcattacagtgctgacattatttaygagacttataatcactgtcacattggggttttaataccatacacatactattcaaaagcatttgaactacagcttcaacaggctctagttttgaagagaagaaaggataatccttattgaaaaaacaaaatgcacagtagaattctagatacaagatccttctggacaaaccactttgcccatgctgagtcctcactgcaggctgcagcagtatggctgcacaccaaactgcttgaagaatgaagatggctagagaatctctcccctcctgcctcactcagaactcacctgcatttttt

SEQ ID NO: 92078 - DNA, 590 bp, Chicken  19866894404572_2
acacatactattcaaaagcatttgaactacagcttcaacaggctctagttttgaagagaagaaaggataatccttattgaaaaaacaaaatgcacagtagaattctagatacaagatccttctggacaaaccactttgcccatgctgagtcctcactgcaggctgcagcagtatggctgcacaccaaactgcttgaagaatgaagatggctagagaatctctcccctcctgcctcactcagaactcacctgcatttttttagaaaggcactttgttccaagtcagaaagctgttctatayaggattccctccaactcacactgtgctgccaacttctctawcacaaaccactgagctgacttttgcatgaatgctgcaaacctgtatttcacaccacctcccctcccatccataaaacttayagacactcatcccctgttagcacctcacaaagaatttgggggcttcctcattggctcacaaaagcctcttcagtgtggctggatagagggggaaacattcagtttcagaattgtcctgtgctgtcaagacaatatgtttctaacaactaacactcatttattctaaat

SEQ ID NO: 92079 - DNA, 549 bp, Chicken  19866894404572_3
gctctagttttgaagagaagaaaggataatccttattgaaaaaacaaaatgcacagtagaattctagatacaagatccttctggacaaaccactttgcccatgctgagtcctcactgcaggctgcagcagtatggctgcacaccaaactgcttgaagaatgaagatggctagagaatctctcccctcctgcctcactcagaactcacctgcatttttttagaaaggcactttgttccaagtcagaaagctgttctatayaggattccctccaactcacactgtgctgccaacttctctawcacaaaccactgagctgacttttgcatgaatgctgcaaacctgtatttcacaccacctcccctcccatccataaaacttayagacactcatcccctgttagcacctcacaaagaatttgggggcttcctcattggctcacaaaagcctcttcagtgtggctggatagagggggaaacattcagtttcagaattgtcctgtgctgtcaagacaatatgtttctaacaactaacactcatttattctaaat

SEQ ID NO: 92080 - DNA, 468 bp, Chicken  19866894404572_4
tggacaaaccactttgcccatgctgagtcctcactgcaggctgcagcagtatggctgcacaccaaactgcttgaagaatgaagatggctagagaatctctcccctcctgcctcactcagaactcacctgcatttttttagaaaggcactttgttccaagtcagaaagctgttctatayaggattccctccaactcacactgtgctgccaacttctctawcacaaaccactgagctgacttttgcatgaatgctgcaaacctgtatttcacaccacctcccctcccatccataaaacttayagacactcatcccctgttagcacctcacaaagaatttgggggcttcctcattggctcacaaaagcctcttcagtgtggctggatagagggggaaacattcagtttcagaattgtcctgtgctgtcaagacaatatgtttctaacaactaacactcatttattctaaat

SEQ ID NO: 92081 - DNA, 599 bp, Chicken  19866894404574_1
  misc_feature (1)..(11): n is any nucleotide
nnnnnnnnnnnaagtcttgcaaaccttttaactgaataatttttattaacaagtgatgacagagagaaatactttacctgccaacactgggtaaagctgtaggagactggaactttcatggatggtcaaatccatcatgacagaaaatgtttctgatcctagctttccagtgtggtttgcactaaacatcaaggctaaaatttagagttaacacccacagcattttccctgggtttcggaagaaaagtcttaccctatcctctcccttcttcagattttgtaaggcaaacctgcttcatwtaagatggcagttcagtgtkcattcctggtcagtacagccctccttgcagcacggatttggattctgcaagcaaataaaaattcagtcctacagcactacacttgttttttttttttcycaccaattggttcacactgaccttccccggagggcaaactccaatttttaggtgtctaattctcccgtcattatttggcacagtctacatgcaaatcattatgcctaataattagacgctgcattgctcggggttgtgacacgagacttttggaatcattaatattgtgcctccactgta

SEQ ID NO: 92082 - DNA, 600 bp, Chicken  19866894404574_2
aaaccttttaactgaataatttttattaacaagtgatgacagagagaaatactttacctgccaacactgggtaaagctgtaggagactggaactttcatggatggtcaaatccatcatgacagaaaatgtttctgatcctagctttccagtgtggtttgcactaaacatcaaggctaaaatttagagttaacacccacagcattttccctgggtttcggaagaaaagtcttaccctatcctctcccttcttcagattttgtaaggcaaacctgcttcatwtaagatggcagttcagtgtkcattcctggtcagtacagccctccttgcagcacggatttggattctgcaagcaaataaaaattcagtcctacagcactacacttgttttttttttttcycaccaattggttcacactgaccttccccggagggcaaactccaatttttaggtgtctaattctcccgtcattatttggcacagtctacatgcaaatcattatgcctaataattagacgctgcattgctcggggttgtgacacgagacttttggaatcattaatattgtgcctccactgtaattctttctccttcctaaggt

SEQ ID NO: 92083 - DNA, 600 bp, Chicken  19866894404574_3
ggatggtcaaatccatcatgacagaaaatgtttctgatcctagctttccagtgtggtttgcactaaacatcaaggctaaaatttagagttaacacccacagcattttccctgggtttcggaagaaaagtcttaccctatcctctcccttcttcagattttgtaaggcaaacctgcttcatwtaagatggcagttcagtgtkcattcctggtcagtacagccctccttgcagcacggatttggattctgcaagcaaataaaaattcagtcctacagcactacacttgttttttttttttcycaccaattggttcacactgaccttccccggagggcaaactccaatttttaggtgtctaattctcccgtcattatttggcacagtctacatgcaaatcattatgcctaataattagacgctgcattgctcggggttgtgacacgagacttttggaatcattaatattgtgcctccactgtaattctttctccttcctaaggttgtgcgtcatgctcagagagatgctgtggtatatcagacatcagtatgaaagcactgaaaagattacctttccggtaatgatctctgcgttgcaaataa

SEQ ID NO: 92084 - DNA, 600 bp, Chicken  19866894404578_1
ccgtaatctgtttcttcccctaacaacaaaaaagggaattataacatctgtttggaagaaacattaaagatggtgtatcactcataaaccttagtggtgcgtcctgcagatgctgtcagtgcaggacagcttctttggccaaacaagccacctgccatggaacagttcgtggaaagccatgtgacatctttgctactgctcacagcagtcaaaggaagagggtcccatgtgagaggcagctaaccatgctgctccatcacacacacacctctacatgcttcagtgtatggctgaggaccrcagactggcagacccaaccccaccattaggcacwctcctgtytgcaatctgctatttttctaaagcatgtgcttgtttcaggtgtctccacaggtgatgcctcaaggctgctgctgatgtccagggaaactatgcagattcagcactcctaatgtggaaaaacaaccacgtgttacaaattgcatcgcgccaaaaaagatagcagcaacatttttaccttgcaagcctccccctggatatgcctccaggtaatctgtgtacccatctctctgggactgtcatgtctgtacctccacttaa

SEQ ID NO: 92085 - DNA, 600 bp, Chicken  19866894404578_2
ggaattataacatctgtttggaagaaacattaaagatggtgtatcactcataaaccttagtggtgcgtcctgcagatgctgtcagtgcaggacagcttctttggccaaacaagccacctgccatggaacagttcgtggaaagccatgtgacatctttgctactgctcacagcagtcaaaggaagagggtcccatgtgagaggcagctaaccatgctgctccatcacacacacacctctacatgcttcagtgtatggctgaggaccrcagactggcagacccaaccccaccattaggcacwctcctgtytgcaatctgctatttttctaaagcatgtgcttgtttcaggtgtctccacaggtgatgcctcaaggctgctgctgatgtccagggaaactatgcagattcagcactcctaatgtggaaaaacaaccacgtgttacaaattgcatcgcgccaaaaaagatagcagcaacatttttaccttgcaagcctccccctggatatgcctccaggtaatctgtgtacccatctctctgggactgtcatgtctgtacctccacttaaggagcagatttctccatacgtgcataaagaatgt

SEQ ID NO: 92086 - DNA, 600 bp, Chicken  19866894404578_3
aacatctgtttggaagaaacattaaagatggtgtatcactcataaaccttagtggtgcgtcctgcagatgctgtcagtgcaggacagcttctttggccaaacaagccacctgccatggaacagttcgtggaaagccatgtgacatctttgctactgctcacagcagtcaaaggaagagggtcccatgtgagaggcagctaaccatgctgctccatcacacacacacctctacatgcttcagtgtatggctgaggaccrcagactggcagacccaaccccaccattaggcacwctcctgtytgcaatctgctatttttctaaagcatgtgcttgtttcaggtgtctccacaggtgatgcctcaaggctgctgctgatgtccagggaaactatgcagattcagcactcctaatgtggaaaaacaaccacgtgttacaaattgcatcgcgccaaaaaagatagcagcaacatttttaccttgcaagcctccccctggatatgcctccaggtaatctgtgtacccatctctctgggactgtcatgtctgtacctccacttaaggagcagatttctccatacgtgcataaagaatgtgagttgtt

SEQ ID NO: 92087 - DNA, 600 bp, Chicken  19866894404587_1
ccatgtacaggtaggtcttgtggttatggataagacttggacccatgatatgcttgcacatgctgagacccctggctctggagagaggagggatgggtgctggggggtccctagctctgagagtggttgccctgtgagggcaaacatatacacacacagacaatttagggagtctctgcttctcaccccacaggtccagcccaaccagcaccaccggtgccaacgctctctgcactatgggaccgggggggacactgtgtggcccctgtgctgcgggcactgctgtgggaggtgcggggrctgcgggggcagctgcgggccctggcccgcaaccagcgtcggggagctcagcgtctggaggccatygcccgccgcctgggcaggctgactgccctggggcagcacatccttggaggagcccccccggctgtatgggggtgtgggcatccggagaggggtcttgcacaggaggcaagggaaataaagctggaatggttcaccaatcttgagtgttgaagagggagagggagggggaaggggaggggaaggagaaggagagggagaggaagaaggagagggtgaaagagagggaggaggtga

SEQ ID NO: 92088 - DNA, 600 bp, Chicken  19866894404587_2
gacccctggctctggagagaggagggatgggtgctggggggtccctagctctgagagtggttgccctgtgagggcaaacatatacacacacagacaatttagggagtctctgcttctcaccccacaggtccagcccaaccagcaccaccggtgccaacgctctctgcactatgggaccgggggggacactgtgtggcccctgtgctgcgggcactgctgtgggaggtgcggggrctgcgggggcagctgcgggccctggcccgcaaccagcgtcggggagctcagcgtctggaggccatygcccgccgcctgggcaggctgactgccctggggcagcacatccttggaggagcccccccggctgtatgggggtgtgggcatccggagaggggtcttgcacaggaggcaagggaaataaagctggaatggttcaccaatcttgagtgttgaagagggagagggagggggaaggggaggggaaggagaaggagagggagaggaagaaggagagggtgaaagagagggaggaggtgagggagggggagagaaggactcatcccattctggcgcctgcttggctgctgcagcattccccttcct

SEQ ID NO: 92089 - DNA, 600 bp, Chicken  19866894404590_1
aacactgctcaaaccaacagtaccacaaaaggcttttaatgccttagttttgagagacagctgtataaatgagaaactgccatacagaacttgcagttctctgtgttgctattattttaaaagtacttccttctccattttatttgcaccttagtaccttcaagcatgcctattaaatcattttggttttcagttaactagagagatcttctggaagagcagctggtagaaggtttgaataacaatgaacagtttcaactgtgcttcccagagctggtgagataacagacaccggaaagyacacccctcctagccacccaggagtcatttcccacaccaagcccagcaatgggtacttacagttcagaggaaccagctgtggttgaaccctgagttcccttgccaacctggtccttcttcttgcccttcttccgtccacgatagtacgaacgttctcgcattggaagccaccgctcaggatcaggagttaccttggggtcatagttcttgggcaactttcctacagaacagttagtgccaggcaatgagattggagtcaacacactaaaggagaatcaacagaaagtacacagagcccag

SEQ ID NO: 92090 - DNA, 600 bp, Chicken  19866894404590_2
gaaccagctgtggttgaaccctgagttcccttgccaacctggtccttcttcttgcccttcttccgtccacgatagtacgaacgttctcgcattggaagccaccgctcaggatcaggagttaccttggggtcatagttcttgggcaactttcctacagaacagttagtgccaggcaatgagattggagtcaacacactaaaggagaatcaacagaaagtacacagagcccagcaacacataacacatttcgttgtgggtctcctatcaagctgctcttctcacttctgtggagaaatgccscctacaaaagatgcaatcacgaagacctgagttaagtgagacccagacttggcaaagggctccagctgccagggagctcaaggctggctatcagaagaaacaatctggccagctctctggatctgtcaaaagctgggaaacacaacttacctttcttctttttcttcttcttcttcacctccccttgtctgaaaagcaaggcaggaaacagtcactgtgacacagcagacaagtcaaacaaatgctatctctagaagaagccgaaccattcccatctttcttaaagcttagtctgttgct

SEQ ID NO: 92091 - DNA, 600 bp, Chicken  19866894404592_1
gaaggataacaatatgcaaaacctcattaaaaacttggtgagtgttaaatatagaaagtgaatttaataaatacttcaggaggattgtgtctgaactagactttaacttgtactttgaaacatcaaaggaaattgtctgcttttcagggatttatttatgcatatttttaacgttaggatttctcaaggtagtatgcagagcagcttttaagccctgaatacctctactcgcagcagaagcccttagtctgacctcaagaccccgcactacgatttatgacgatgtatgatgcagctacrttaactgcactcctcagtaacgtggaaatccactatcgttaaatgcaagcttaaaacgcagaaccttcagcattcgagattttgagaaaggtgaaatatactattccaccttttaatccacattatcgtgttatttaaatcagctccgttcccatgaagcactaggaaaaagaaagcatctttctattcacaattcaatacagctgcatacgactggctggggcccgaggccacaagccaggaacttctgagttcaagtctggctccaccactgccttgctgtgtggccttcagagagcc

SEQ ID NO: 92092 - DNA, 600 bp, Chicken  19866894404593_1
gaatctggtcagagattgtctaggcaagcccataaatccatggtccccaatgggatgcacccatgtgtgctgagatagcttgcagaagcaattgctgaaccactatcatctttgaaaggtcacagagaacaggagaggtatccgaaagactggaggatagccaatatactccagtcgtcaaaaagggcaagaaggaggagctgggaatctacaggctagtcagcctcacctctgtccctgggaaggtattctggatgtcatctccaagcaagtagaagagattatcaggagtagttaacktggattcaccaaggggaaatcatgtttaacaaatctggtagcctatgatgtcatgaccagckgggtagatgagggaagaggcagaaagacctgggaaagtccagcctggagaggactgagagaggatcttatcagtgcttataaatatctaaatggtgggtgtcaagtggatggggccaggttcttgtcagcagtgtccagcaatagaacaaggggcaatgggcacaaactggaacacagaaagttccatttgtacttgaggaaaatattctttactttgggggtgacagagcacaggaa

SEQ ID NO: 92093 - DNA, 600 bp, Chicken  19866894404593_2
atgtgtgctgagatagcttgcagaagcaattgctgaaccactatcatctttgaaaggtcacagagaacaggagaggtatccgaaagactggaggatagccaatatactccagtcgtcaaaaagggcaagaaggaggagctgggaatctacaggctagtcagcctcacctctgtccctgggaaggtattctggatgtcatctccaagcaagtagaagagattatcaggagtagttaacktggattcaccaaggggaaatcatgtttaacaaatctggtagcctatgatgtcatgaccagckgggtagatgagggaagaggcagaaagacctgggaaagtccagcctggagaggactgagagaggatcttatcagtgcttataaatatctaaatggtgggtgtcaagtggatggggccaggttcttgtcagcagtgtccagcaatagaacaaggggcaatgggcacaaactggaacacagaaagttccatttgtacttgaggaaaatattctttactttgggggtgacagagcacaggaacaagctgcccagagaggttgtggggtctccttctctggagatattcaaaacctgcttggatg

SEQ ID NO: 92094 - DNA, 600 bp, Chicken  19866894404593_3
ttaagggcttagaaagtattaggtgtttattctataaccacaggctatatgatttcaccagcccttctctggctgaaaagttagtgagtaaagaagcaatcaggccacagaagagggagataggcaatacactttatcatcccagctgtgatagctggaagaaaagcagacagtttctaagggacatgagagaggtcttcagcaggtcacgctttcgaacgctgacccaccccaactcattcacccacatccctttttaatctactccagaagtgaactgcttcccctgataaaaatttycatcattttcttaacgtgaactttagtgacttcagtgttcagcagttgattcttgcatgcttttgtctgttaaattaaagagtacctggtatgaaatggcttgtactagtatagctctctgtagcctgcagtcaagcatccttcttaacctctttccaaaggtaggagagacttgctgtcttccattctttatatccccatctctcctttttgtgctatttggcttctcagtctcattagttcttcctacaccattttgcaaagttgtttgccttacttgtctcaaagcaggaagactga

SEQ ID NO: 92095 - DNA, 600 bp, Chicken  19866894404593_4
agtagtgaggaggtttttttacaacacatttggaaaaaaaaaattctaccctgagaatagttaggctctcaagctgtcttatttctaggagaaactcaaaatagaactagtggaaaatcaaggctgttttattttaagatatacatacgtaacagagctgttcactagtagattacagacatactccaccattatataaactaatcagtgggagcaaaatcaggagatatttcaaagaggagctgtctctacgatccagtgctggtacaggttggtctggatgatttccaaaggctcctyctccaactagcatttcttttctctctctctctctctcttttttttttttttttttttttttaattattatttttgttgtattaatgcagcaaggcttctaaacatagccacaagggattaataaatattaatgactgacttttgggaaggtagcatcagctatcaaggcaagacttttttttgccatgatacaggcgcaccactttcagtaytgtgggagaggggagaatcatctctgggtttaaaatccaggcagaaaatccattctgcctgtcgtgccactggtcagcgctatgtgtt

SEQ ID NO: 92096 - DNA, 599 bp, Chicken  19866894404593_5
agcaaaatcaggagatatttcaaagaggagctgtctctacgatccagtgctggtacaggttggtctggatgatttccaaaggctcctyctccaactagcatttcttttctctctctctctctctcttttttttttttttttttttttttaattattatttttgttgtattaatgcagcaaggcttctaaacatagccacaagggattaataaatattaatgactgacttttgggaaggtagcatcagctatcaaggcaagacttttttttgccatgatacaggcgcaccactttcagtaytgtgggagaggggagaatcatctctgggtttaaaatccaggcagaaaatccattctgcctgtcgtgccactggtcagcgctatgtgttagcaaaatgaaggtgacttggcagtgggctgcttggctttcaaaataaactgctctgaaatcataggaattagagaaaatggaaatcagactaacgaagtaagagatatgaggggctgccaggaatgtggaagaagacagagtgcaagaaataacacctttccactggtccaagtgtattcaaggaggactgcgataagcagaaagcacaa

SEQ ID NO: 92097 - DNA, 600 bp, Chicken  19866894404595_1
gcatgtgtctggatacagtgaaaattctctttattgcaaaaagcaatgttgaattgtttcctttatagctatttttccttccttcccttttattctccttcaaatttcaatacgcatataacgtgcctaacaaataccacgtatttcatgcgacaaagcagcaagtttactcatacaaactcctctaccctctctgtccccagcagtaccatctcgcttccttctcaagttaattgcacacatctctttgcagactgactcacaagcagtaatatttggacctgaccagatcccttaaaygcaaactgcagcagctaacctaattcctaattcaacacttcacctaaaacaacmaaaccaagcaaataatcaccaacaaaaacacccacacaatagcactacagcgctttcaaatcagctttcagacttgcttttaatagggcctttgctaacaaggaatgttcaatgtgtcccttgcatctctttatagctttgtaagaaaaggtgtcccttactgtcatatcaataccttcaccgctcctcagaagctcaggaagaaggacatcagagatgaacagctgctgaatttcccaacataca

SEQ ID NO: 92098 - DNA, 600 bp, Chicken  19866894404595_2
tgtttcctttatagctatttttccttccttcccttttattctccttcaaatttcaatacgcatataacgtgcctaacaaataccacgtatttcatgcgacaaagcagcaagtttactcatacaaactcctctaccctctctgtccccagcagtaccatctcgcttccttctcaagttaattgcacacatctctttgcagactgactcacaagcagtaatatttggacctgaccagatcccttaaaygcaaactgcagcagctaacctaattcctaattcaacacttcacctaaaacaacmaaaccaagcaaataatcaccaacaaaaacacccacacaatagcactacagcgctttcaaatcagctttcagacttgcttttaatagggcctttgctaacaaggaatgttcaatgtgtcccttgcatctctttatagctttgtaagaaaaggtgtcccttactgtcatatcaataccttcaccgctcctcagaagctcaggaagaaggacatcagagatgaacagctgctgaatttcccaacatacaggacaacgctgcttgttaaaatctcatcctgcttttgaggacaggtcatccatt

SEQ ID NO: 92099 - DNA, 599 bp, Chicken  19866894404599_1
  misc_feature (1)..(66): n is any nucleotide
nnnnnnnnnnnnnnnnnnnnnnnnnnnnnnnnnnnnnnnnnnnnnnnnnnnnnnnnnnnnnnnnnngagaggtggggtggagtggggggggggacgacacacacacaattcctccttgtgtagagaacgagctgaaagcgctgctgggtgctgctctgcgggttgggatttttgcagagccgttcctgcgaggtgttctccagaagcgataataataagaatagatgaaaggaggaattactgttagtattatttccttctagctgtataaatagcctttattttttttttgctgtgggygctctcaggtccacccttagcgtcaggtggtggttgggatctgaaaaagccgaaccaggggaagatggagcagggaaggctctccctgcagagctgagggtgctttggggtgaactctgctcacccttcagctctgcagcacccgatgtctttgtggtcctgcagtggatgctcgagggggggctcacctggagctgcacccttgcagcccccatggatccggagggctgcagtgctgtagggtgtgcagagtgggagcagggcagggtggggggcgtatggcggctgctgtcttgccc

SEQ ID NO: 92100 - DNA, 600 bp, Chicken  19866894404602_1
atcaggcaatggctaaatgaaatgcagcgattttaaaagaaagtggttggaatccatctagaagtttctcctgccttaaaatcaattattgttaattgctcgctgtgctgtgctgctcctgcatttatgcaggactgtgttggtctattctgtgttaaaacgtttaacattgtatgttaaaacattggcatcagttgtgatgtcaatacatactcatgtgcactcaactctgctgtttctaccacgtttgctcactggacgtgtgtcctttcccatgcaagcaatagccaaaaagagtarctgcttcttcaatctttgcaaaagaaaaatatgtataatttttcatagctttccactgtcactgcaaacagaattctcaaagatgagcctttctcgtgttttccaggtcataactggacttcttcgcagagcagatgaggtgaggaagttcattttctagaaaaggtgtcttgtgaatccactgtgatctcttggtccatcctgtcttctgcagatgttgttgcttactgataccaagccagtttgctgcagaatgagtcagccatgctagcgtcctgcagtacttcccattgttcttca

SEQ ID NO: 92101 - DNA, 600 bp, Chicken  19866894404622_1
actaccctttaaactgaacagaaaaatattttagttctaaatgtgaataaatttgaatctgttataagaaattttattttaccaacttacttatttgaaaaaagaaaatatactttttctttttctcctctaagatattacaatcaatgtgaatacttcagtcattctacatcaatgtccataaaaaatgatcatggaaacaggactcctattttacgtcttctacttataccctatggctatgattgtttaaacaggttttggtgtgaatcaaagtcatctttcaggaggccctgaaaratacatcaggttgactctaattaaattaccttggaatcttattcctctttttattttccygaattacaatgactgctccaaaagtaatgcttcttattttattatgttggtccatgatrtcagaggtggatgctggyggtatggaagtaaaagttgaaccttaccaacagtattccattaaattctgctgctgtgtgatacatagcagcagaggggcagtctgacaaaatggcatctggcatggaagcgtgcaggaagcaaaagtgtgtctttgaattcctccattcagaaaaaaaaatg

SEQ ID NO: 92102 - DNA, 600 bp, Chicken  19866894404622_2
gttataagaaattttattttaccaacttacttatttgaaaaaagaaaatatactttttctttttctcctctaagatattacaatcaatgtgaatacttcagtcattctacatcaatgtccataaaaaatgatcatggaaacaggactcctattttacgtcttctacttataccctatggctatgattgtttaaacaggttttggtgtgaatcaaagtcatctttcaggaggccctgaaaratacatcaggttgactctaattaaattaccttggaatcttattcctctttttattttccygaattacaatgactgctccaaaagtaatgcttcttattttattatgttggtccatgatrtcagaggtggatgctggyggtatggaagtaaaagttgaaccttaccaacagtattccattaaattctgctgctgtgtgatacatagcagcagaggggcagtctgacaaaatggcatctggcatggaagcgtgcaggaagcaaaagtgtgtctttgaattcctccattcagaaaaaaaaatggcactcactgacactgtttcagcagtggtaacagcaatatgaaagacaagccatgttctg

SEQ ID NO: 92103 - DNA, 600 bp, Chicken  19866894404622_3
tttttctcctctaagatattacaatcaatgtgaatacttcagtcattctacatcaatgtccataaaaaatgatcatggaaacaggactcctattttacgtcttctacttataccctatggctatgattgtttaaacaggttttggtgtgaatcaaagtcatctttcaggaggccctgaaaratacatcaggttgactctaattaaattaccttggaatcttattcctctttttattttccygaattacaatgactgctccaaaagtaatgcttcttattttattatgttggtccatgatrtcagaggtggatgctggyggtatggaagtaaaagttgaaccttaccaacagtattccattaaattctgctgctgtgtgatacatagcagcagaggggcagtctgacaaaatggcatctggcatggaagcgtgcaggaagcaaaagtgtgtctttgaattcctccattcagaaaaaaaaatggcactcactgacactgtttcagcagtggtaacagcaatatgaaagacaagccatgttctgaacatccatgcaaatttttacaagcatggcatgcaggttcttgttcattattggcaaaa

SEQ ID NO: 92104 - DNA, 600 bp, Chicken  19866894404622_4
ttacaatcaatgtgaatacttcagtcattctacatcaatgtccataaaaaatgatcatggaaacaggactcctattttacgtcttctacttataccctatggctatgattgtttaaacaggttttggtgtgaatcaaagtcatctttcaggaggccctgaaaratacatcaggttgactctaattaaattaccttggaatcttattcctctttttattttccygaattacaatgactgctccaaaagtaatgcttcttattttattatgttggtccatgatrtcagaggtggatgctggyggtatggaagtaaaagttgaaccttaccaacagtattccattaaattctgctgctgtgtgatacatagcagcagaggggcagtctgacaaaatggcatctggcatggaagcgtgcaggaagcaaaagtgtgtctttgaattcctccattcagaaaaaaaaatggcactcactgacactgtttcagcagtggtaacagcaatatgaaagacaagccatgttctgaacatccatgcaaatttttacaagcatggcatgcaggttcttgttcattattggcaaaaatgatgctaatgatggtg

SEQ ID NO: 92105 - DNA, 600 bp, Chicken  19866894404623_1
tccttcctgaaagttcaaggctttttttctttcctacaaatcttcatgtatcgaagcccttttgaacctctattacgtggtgcttggcacttcatcctctgcttctccttttgttagactgaatgactgagaaggaggaacaaagaacaccaaatccaggaaaagaatgggattgcatctccccaacatgctgatgttacatctaggtttataagtcatctttctccctgctctcacgctcctacacacgaacatttcataataactttataatgataaggatgttgcattttgtcagcrttaggtccagtccacttctgcttcttctcctgaggaccttccagtatgctttttcttcccgtgtcacgggarctcccttgaatctgggcagtgctcttttctgagtctggaatgctcctttctctctccacgctgtctctctgtctacattcaaatctgctgctttccaggttttgagctgtcctgtattctgacttctgtgctgtgctagagtgcagctaacgcctctaaggagtcctttgtggaaaagaaggggaggagtcagagaaatgagtgtatcgttatggtgtatggcacttt

SEQ ID NO: 92106 - DNA, 600 bp, Chicken  19866894404623_2
ttacgtggtgcttggcacttcatcctctgcttctccttttgttagactgaatgactgagaaggaggaacaaagaacaccaaatccaggaaaagaatgggattgcatctccccaacatgctgatgttacatctaggtttataagtcatctttctccctgctctcacgctcctacacacgaacatttcataataactttataatgataaggatgttgcattttgtcagcrttaggtccagtccacttctgcttcttctcctgaggaccttccagtatgctttttcttcccgtgtcacgggarctcccttgaatctgggcagtgctcttttctgagtctggaatgctcctttctctctccacgctgtctctctgtctacattcaaatctgctgctttccaggttttgagctgtcctgtattctgacttctgtgctgtgctagagtgcagctaacgcctctaaggagtcctttgtggaaaagaaggggaggagtcagagaaatgagtgtatcgttatggtgtatggcacttttctctgaaggacttgggaaatagatcttggcccactggcagggagggatcaccagctttttggctacttttt

SEQ ID NO: 92107 - DNA, 600 bp, Chicken  19866894404625_1
ttccatctccaatttctatagtgcaaagtacttatgaaagataccagactgacagcattggaacctgaaaaggaaacattgacaatctacaaatagcagatccactctctcaccagagagttttaacagctagtagtggcttaactccaaatttcagtttatatcccaaaagtccccaaattcttctgttacctccatgagaaactggcttgtatccaagaaaagaaaacttgccatttgtcactgaatagagaaatctgttccctgaagatgggcaatgtggctcaccttacctgcaargttcattaaaagcagcgggaaggaatgttcaactcttcacctataaaaagccttcaaaaagggatggtatctataaaaccaatggtggaggaaacctttcctattttagcccttgaagtggcctataagaggtgtccttcggggtcaaattcagaatgagaattgccttctggttgaatgcaaaataagttccagaaattgattgcttgtaacctggccaactcttttaaggcttatgccagtcagcatgttagagaagatggtctacacagcagtatgaatgttattcacctcaattct

SEQ ID NO: 92108 - DNA, 599 bp, Chicken  19866894404637_1
  misc_feature (1)..(25): n is any nucleotide
nnnnnnnnnnnnnnnnnnnnnnnnnttgtggttggacttgatgatctttaaggtcttttccacctcagctattcttggcacgtgcatggcatccaggggatcaggcccagccagcatgggttcataaaaggttgtgcttgaccaacctcattgcctttgacaactgggtaaccagaatgatacatgagggaaaggctgttgatgtagtctacctagacttcagcaaagcctttgacacagtctctcacagtattctcctagggaaactggctgcccgtggcctcgacaggtatacctttmtttgggtaaggaactggctagaggaccgkgcccagcaggtagtggttaatggagttaagtacagatggccacccattacaagtggtgtccccaaggggttggtaacggggcccatcttgtttaatatctttactgattacctagattagggcattgagtgtrccctcagtaagtctacagatgacaccaagctgggaggtggtgtcgatctacctgagggtagggaggcccttcagagggatctagataaactggatcgctgggctgaggtgagtgggatgaggttcaacaaggctaag

SEQ ID NO: 92109 - DNA, 600 bp, Chicken  19866894404637_2
ggttggacttgatgatctttaaggtcttttccacctcagctattcttggcacgtgcatggcatccaggggatcaggcccagccagcatgggttcataaaaggttgtgcttgaccaacctcattgcctttgacaactgggtaaccagaatgatacatgagggaaaggctgttgatgtagtctacctagacttcagcaaagcctttgacacagtctctcacagtattctcctagggaaactggctgcccgtggcctcgacaggtatacctttmtttgggtaaggaactggctagaggaccgkgcccagcaggtagtggttaatggagttaagtacagatggccacccattacaagtggtgtccccaaggggttggtaacggggcccatcttgtttaatatctttactgattacctagattagggcattgagtgtrccctcagtaagtctacagatgacaccaagctgggaggtggtgtcgatctacctgagggtagggaggcccttcagagggatctagataaactggatcgctgggctgaggtgagtgggatgaggttcaacaaggctaagtgccaggtcctgcactttggtcacaataac

SEQ ID NO: 92110 - DNA, 478 bp, Chicken  19866894404637_3
actgggtaaccagaatgatacatgagggaaaggctgttgatgtagtctacctagacttcagcaaagcctttgacacagtctctcacagtattctcctagggaaactggctgcccgtggcctcgacaggtatacctttmtttgggtaaggaactggctagaggaccgkgcccagcaggtagtggttaatggagttaagtacagatggccacccattacaagtggtgtccccaaggggttggtaacggggcccatcttgtttaatatctttactgattacctagattagggcattgagtgtrccctcagtaagtctacagatgacaccaagctgggaggtggtgtcgatctacctgagggtagggaggcccttcagagggatctagataaactggatcgctgggctgaggtgagtgggatgaggttcaacaaggctaagtgccaggtcctgcactttggtcacaataaccccatgcagtg

SEQ ID NO: 92111 - DNA, 600 bp, Chicken  19866894404643_1
tttgctttttctcttttatcctttgactgtctaatattccttagattcacttatcatatatgctgtcaaacaactaattttttctggcaactgacatttttaaggaaagtatatcatgaaaaagagagtctcattggtttctataaactcacatgggcaataaactatcaggacagttgtaaaacacatcatttgcaatagccataagcccaaactaaatcacaatttctttacaggatgtctttgggataaggtaaatatggatgtttgcataattatatcatcagctgtttcctaacwtaaaacatcagttacagtgtttgtgtttctttgtgaaaagtagtgtagaatgatatactatactcctttttaaaacattgaaagtattatatgtaacaacagtgcattaacaaaatccaagttacactaagcaaccatggttacagtttcataagmgatacataaagtattatcagatgaattttagatgcttctacctactgtaagtaaacaaatatactgctttagattgccagaataatcaatagtctgagttaatgatggcaagaaaaaaaaattaaccagcacactcatttgtca

SEQ ID NO: 92112 - DNA, 600 bp, Chicken  19866894404643_2
gcaataaactatcaggacagttgtaaaacacatcatttgcaatagccataagcccaaactaaatcacaatttctttacaggatgtctttgggataaggtaaatatggatgtttgcataattatatcatcagctgtttcctaacwtaaaacatcagttacagtgtttgtgtttctttgtgaaaagtagtgtagaatgatatactatactcctttttaaaacattgaaagtattatatgtaacaacagtgcattaacaaaatccaagttacactaagcaaccatggttacagtttcataagmgatacataaagtattatcagatgaattttagatgcttctacctactgtaagtaaacaaatatactgctttagattgccagaataatcaatagtctgagttaatgatggcaagaaaaaaaaattaaccagcacactcatttgtcaggatgcctagtagacaagttctgtacaataayagcaatgtaaagagaagtaaaaagccataaagttggcttgcactgcatggaagcttgcagatggtggatgaattcatgtctatcacatttttataatacaatgacttttacatattgctgccag

SEQ ID NO: 92113 - DNA, 600 bp, Chicken  19866894404643_3
gtgaaaagtagtgtagaatgatatactatactcctttttaaaacattgaaagtattatatgtaacaacagtgcattaacaaaatccaagttacactaagcaaccatggttacagtttcataagmgatacataaagtattatcagatgaattttagatgcttctacctactgtaagtaaacaaatatactgctttagattgccagaataatcaatagtctgagttaatgatggcaagaaaaaaaaattaaccagcacactcatttgtcaggatgcctagtagacaagttctgtacaataayagcaatgtaaagagaagtaaaaagccataaagttggcttgcactgcatggaagcttgcagatggtggatgaattcatgtctatcacatttttataatacaatgacttttacatattgctgccagatggaacatagttttgcatcttgaataaaaatctgcaagaaatacaacttccttcaatatgttccctgtatttgaaaccaaagcaaatctagttagatttgggaggctaaaacagatttaaggaaatatgaaagaatataaattaaatcctcaagggcttccttgttctaaattac

SEQ ID NO: 92114 - DNA, 600 bp, Chicken  19866894404644_1
actctcaatttttattttatatatatatatacatatataaactaccttgggaaaatggcccatattatgttttgaaaattttctgtaaggtggccactctcatatgagacagtcatatctggcatcagtacatttgtttggttgactttttgattggacgcttgccatcagccctgccaaaaaatctgtctgtggccaaagatgcagtctctattatggccaaatggaacattacaaagctcatccaggcccttcctctttagaagacactgtgcgcaaacccaaaatgactacgtgccstgttttgcagcccctgtcctttcatctccagtgttgcaggtttattttgtttgaacaaagtccctgggtcaatttcctatttgcctctgtgtacgtgttatttgtggcagacactgtacctggtcagcagctctagaactggaggccctggacactatatgctgggcttcagtggaaagagagatctgcttaattttgtcccaggtgaaggagtccggcggttcctagcctggactactggaaggttcccacatcctctttgtcacattagttgagatgacttgcagtaaaaagtgtcca

SEQ ID NO: 92115 - DNA, 600 bp, Chicken  19866894404649_1
atgaagcaatacaacttgaagcatattatattcttggtattattttcatgtttaccatctttatgtattggtgtattggaatctcagttttaccgcttctccttcaaaataattttatcttctcttgaggaagaaattattttaactaagacttttatcttgaaagtgtgtgatatttttgtcacagggtgtcatatgcatgaagattctgagccattctgctgagtcattcccacagctgcaccatgtggggtttattagttctgattcaaaaaattatactactaataaagaacaacrgaaaaatagcacattccactgaggcagagtacactgggagttaaaacacgggatggaattcctcaacatggtcatactgtgttgggagatacataacttgcataatttggggacaattgatgatattaaattgagaatagctgttgatccccttgatggtagaaagggcttgcagagatcctgacaagttggatagctgagcaatcaccagccttgtggagtttaatgggagatggacttgctgatccttgtgggtctcttctaactcaggatattccatgatgctatgatttaagtttg

SEQ ID NO: 92116 - DNA, 600 bp, Chicken  19866894404649_2
aatacctgactgccactttcatgtgccagcataatataatatgtatgaatcctatgtatacaaatgtaatagtcagggaaattagctgcaatctcttaagctagtcactatagcacatgcaaaatgaatcttaaattttctaagtgataaggttcatttttggacccccttccatgctggcttttagatgcttaaaagacaaaggctgaaaaagacttaatttgcaggctgaaaactgcagctccatgtatttgcctctgaaaattcagaatacatttcggcagatctaagtaaaaaatkttaacaaagtgagctgtgttttttgaaatctctttgaatatctcttaaactcttttcacttacaaagaatcatagaatcatagaatggcctgggttgaaaaggactgtgatgatcatctagtttcaactcccctgccatgggcagggtcaccaaccactagaccaggctgcccagagccagattaagtagactccttaaaagtcttgtgtagcccaagaaatagggaaggaattctaagtgcttacaactataactgacataagccctaatacagttattatgctaaaaataatgtcatc

SEQ ID NO: 92117 - DNA, 600 bp, Chicken  19866894404649_3
tgttttttgaaatctctttgaatatctcttaaactcttttcacttacaaagaatcatagaatcatagaatggcctgggttgaaaaggactgtgatgatcatctagtttcaactcccctgccatgggcagggtcaccaaccactagaccaggctgcccagagccagattaagtagactccttaaaagtcttgtgtagcccaagaaatagggaaggaattctaagtgcttacaactataactgacataagccctaatacagttattatgctaaaaataatgtcatctgtgctatctcagagsgaaccctggaaccctcatgtatataacccccctgtggcaggagggttggaacctgatgatccttggggtcccttccaacccaagcattctatgattctatgatataagagccttttatgtctgtgagcctgtatatataaatgccttcaaggtttactaaacttaagaagcaaacagaaagtggcaagcccttcaaggcagcctggacattagatggactttagtgaagagagaatctgtttcagttctgtgagtatcacgcagaggctggaggtgctgctggagctattcctcctgcag

SEQ ID NO: 92118 - DNA, 599 bp, Chicken  19866894404652_1
  misc_feature (1)..(145): n is any nucleotide
nnnnnnnnnnnnnnnnnnnnnnnnnnnnnnnnnnnnnnnnnnnnnnnnnnnnnnnnnnnnnnnnnnnnnnnnnnnnnnnnnnnnnnnnnnnnnnnnnnnnnnnnnnnnnnnnnnnnnnnnnnnnnnnnnnnnnnnnnnnnnnnnnaatatgagttgtaaaacaagtgtttactctgtaaataaaaaccatatttgaacgtttcacggaactctcctatatctgatctgatagttaattcacatacctagtacatactatcatgcacttaactaacttcaggggcatgtaataggaatttyataagctgttctattactgtatttctcacattttatactgtatcatagactgcttcctcatcataaaatggtttgggttggaagggacctttcagatcmtaagttccaactccctactataggcaggggcatctctcactggaccaggctgctcaaagccccatccagcctggccttgaaagcttccagtgaggaagcttccttcttcctgggaggaagcattcttgatcacatgcctgctgtccctgtattgtaacatatcatccattttttttttagggctggggaagagagcagta

SEQ ID NO: 92119 - DNA, 599 bp, Chicken  19866894404652_2
  misc_feature (1)..(46): n is any nucleotide
nnnnnnnnnnnnnnnnnnnnnnnnnnnnnnnnnnnnnnnnnnnnnnaatatgagttgtaaaacaagtgtttactctgtaaataaaaaccatatttgaacgtttcacggaactctcctatatctgatctgatagttaattcacatacctagtacatactatcatgcacttaactaacttcaggggcatgtaataggaatttyataagctgttctattactgtatttctcacattttatactgtatcatagactgcttcctcatcataaaatggtttgggttggaagggacctttcagatcmtaagttccaactccctactataggcaggggcatctctcactggaccaggctgctcaaagccccatccagcctggccttgaaagcttccagtgaggaagcttccttcttcctgggaggaagcattcttgatcacatgcctgctgtccctgtattgtaacatatcatccattttttttttagggctggggaagagagcagtaccatcaactcaggaaagcatcccatcccttgctcagctgtgtgagaaatagcagtgcctgaaccactcctcttgcctttcctagcccgtattcctctgc

SEQ ID NO: 92120 - DNA, 600 bp, Chicken  19866894404654_1
tcacctttcttctgtgttggatctgaagaagctcaggctcattgacagcaaggtgggagcagatgtatctccttgatggtgtcccatctgcaggcaggatgtctctggctgcctcactgcatgtgtctcgccataggtttgagaatggaaagaccaaaccaggtgttaaaccccactcccatcctccaagcagctgctaagtcatgccatgggtgtgccctgtggcactgtggggcagagagaggagccatggagaaagggtttgttgctgggttgtaattctgggagtagtccccatcytctccagccatgctgttccagagcagagtctctstgctgctgacaaagccatttctccctgctctgctgcagtcacttttcccaactccttccatttccttgctgggatgctgagggttaattcaatccatgtaatgcctccaagcacttcagttgggattcttggagagctgacttaagcaatattaattgcaaatatttatctgcctgtaaaaaagttaattagagaacaaatgaaggcctggcacacactgctccacttctgtgacgttgcagaggggtccagaggagcttcataat

SEQ ID NO: 92121 - DNA, 600 bp, Chicken  19866894404654_2
aggctcattgacagcaaggtgggagcagatgtatctccttgatggtgtcccatctgcaggcaggatgtctctggctgcctcactgcatgtgtctcgccataggtttgagaatggaaagaccaaaccaggtgttaaaccccactcccatcctccaagcagctgctaagtcatgccatgggtgtgccctgtggcactgtggggcagagagaggagccatggagaaagggtttgttgctgggttgtaattctgggagtagtccccatcytctccagccatgctgttccagagcagagtctctstgctgctgacaaagccatttctccctgctctgctgcagtcacttttcccaactccttccatttccttgctgggatgctgagggttaattcaatccatgtaatgcctccaagcacttcagttgggattcttggagagctgacttaagcaatattaattgcaaatatttatctgcctgtaaaaaagttaattagagaacaaatgaaggcctggcacacactgctccacttctgtgacgttgcagaggggtccagaggagcttcataatggattttgtccctgggtctgcctgttctgggagc

SEQ ID NO: 92122 - DNA, 599 bp, Chicken  19866894404656_1
  misc_feature (1)..(55): n is any nucleotide
nnnnnnnnnnnnnnnnnnnnnnnnnnnnnnnnnnnnnnnnnnnnnnnnnnnnnnnttgctggcggtgtcacacatcgcctgtttaagcctttttaattgcaacctttgtcttccaaaaaaagagtccagaatagttgctgggaccttttgttttaatacttgaatgatatgtccatcaaggataagagtgcgacagcagttcttcttcctccttccaattttccttaaatggagaaacaaaatgttatgaaacataaatgtgataaaggatataatttcctctttgcactgcaactttawgtgacctttttgtgaaatgcttgccctttcaacaactaagacagtagtagatgtttcatggagaagcagtgattcagagttcctgggtgtttgctcttctcagataacttataccggtgtttgtctcttagttacatcagcagaggccacccaggtgtaggggcccttgatgatgttggtttgcacagctataccttgtcatcagtgtcaccttttaaatgaagaaatatatagggattacatatatagcaattatatataggcagaaacttcctataattcctttcttgtacaaaatt

SEQ ID NO: 92123 - DNA, 600 bp, Chicken  19866894404656_2
tttttgtgaaatgcttgccctttcaacaactaagacagtagtagatgtttcatggagaagcagtgattcagagttcctgggtgtttgctcttctcagataacttataccggtgtttgtctcttagttacatcagcagaggccacccaggtgtaggggcccttgatgatgttggtttgcacagctataccttgtcatcagtgtcaccttttaaatgaagaaatatatagggattacatatatagcaattatatataggcagaaacttcctataattcctttcttgtacaaaattctgcacrttagagacagtggacatttctgctctcrtttcttgaagcagctttggaaaactttcaagctttcaaagttaagggctctctatttacaaatgactttagtagtagacttcagtgtctaatcagatagggtattcttaaaatttctaatgggatccttgaaaatctgccaagggatgacataggttttctaatgaattgttttaatggagctctggcttgctatttggttaacagtcttcagggtagcttcaggctgcttactttccaattttcttgtgttatctggagataaatgtccac

SEQ ID NO: 92124 - DNA, 600 bp, Chicken  19866894404656_3
actaagacagtagtagatgtttcatggagaagcagtgattcagagttcctgggtgtttgctcttctcagataacttataccggtgtttgtctcttagttacatcagcagaggccacccaggtgtaggggcccttgatgatgttggtttgcacagctataccttgtcatcagtgtcaccttttaaatgaagaaatatatagggattacatatatagcaattatatataggcagaaacttcctataattcctttcttgtacaaaattctgcacrttagagacagtggacatttctgctctcrtttcttgaagcagctttggaaaactttcaagctttcaaagttaagggctctctatttacaaatgactttagtagtagacttcagtgtctaatcagatagggtattcttaaaatttctaatgggatccttgaaaatctgccaagggatgacataggttttctaatgaattgttttaatggagctctggcttgctatttggttaacagtcttcagggtagcttcaggctgcttactttccaattttcttgtgttatctggagataaatgtccaccttatcggagcttaatagccaattagct

SEQ ID NO: 92125 - DNA, 600 bp, Chicken  19866894404662_1
tggagttctctttttttctagtcaacacttatcaaaccccaatactgcaagccatgatctgaaacacttcgcttccttactaaaatacttgccagctctcacatatacgagggacacttcaaactttcctaacttggaacatttccagttttcacagccaacattcaaagtaatgacatgaaattaggtgaagagaaaaaccatggccttaggatcaggaaaacctaacgttcttacctagcagactgtgggaggaaatggaaatctcatttaaaactggactgaacaacgctatggagmgtatttaatgctatagggagccatattttatgggctgaaggaatggatgacattacttagatttctctatttcttcactttccatgatatccagatccagcagttggactgttaacgtgtccctctccttgtaacctcaagattacaasgagacctccttgtaacctcaagattacaaggagacctccttgtaacctctcaaaagcactatccacagtcttccatgacagtgaggagattgcaaaggtgagacttgtgacttagacatgataatcacccatgttaacacctacatatgaa

SEQ ID NO: 92126 - DNA, 521 bp, Chicken  19866894404662_2
tttcacagccaacattcaaagtaatgacatgaaattaggtgaagagaaaaaccatggccttaggatcaggaaaacctaacgttcttacctagcagactgtgggaggaaatggaaatctcatttaaaactggactgaacaacgctatggagmgtatttaatgctatagggagccatattttatgggctgaaggaatggatgacattacttagatttctctatttcttcactttccatgatatccagatccagcagttggactgttaacgtgtccctctccttgtaacctcaagattacaasgagacctccttgtaacctcaagattacaaggagacctccttgtaacctctcaaaagcactatccacagtcttccatgacagtgaggagattgcaaaggtgagacttgtgacttagacatgataatcacccatgttaacacctacatatgaaggccataggtctcatttgctccagagtgaggagagagagaaaacctgcttggcaagaaagatgccagatt

SEQ ID NO: 92127 - DNA, 600 bp, Chicken  19866894404668_1
gagggatgaaaatattgagtgcagctctcttgagaaagacctggggttacctgtgaatgggaagctggaccagccatgtgccctcacagtccagaaagccaaccatatcctgggctgcatcaaaagaagcatgaccagcaggttgagggaagtgatcctgcccctctactctgtactggtgaggcctcactgcatccagatgtggagtcctcagtacaggagagacacaaatctattagagtgcctctagaggaggaccacaagaatgattcacagaatggaacacctttcctatgaggrtaggctgaaaggactgggattgttcagtctaaaaaaagagaaggctgcaaggtgacctamtagcagcctttccgtgtctaaaggggagctacaggaatgaagaggacagactcttyagcagagtctgttgtgacagagcatggggaatggtttcaagattgaagagggtagatttaggttggaagtaaggaaaaaagtcttttgcagtgtgggtggtgagacactggaacaggttacccagagatgtagtaggtgtcctgtccctggagatttacaagggaggcgggatcaggccctggg

SEQ ID NO: 92128 - DNA, 600 bp, Chicken  19866894404668_2
gaagctggaccagccatgtgccctcacagtccagaaagccaaccatatcctgggctgcatcaaaagaagcatgaccagcaggttgagggaagtgatcctgcccctctactctgtactggtgaggcctcactgcatccagatgtggagtcctcagtacaggagagacacaaatctattagagtgcctctagaggaggaccacaagaatgattcacagaatggaacacctttcctatgaggrtaggctgaaaggactgggattgttcagtctaaaaaaagagaaggctgcaaggtgacctamtagcagcctttccgtgtctaaaggggagctacaggaatgaagaggacagactcttyagcagagtctgttgtgacagagcatggggaatggtttcaagattgaagagggtagatttaggttggaagtaaggaaaaaagtcttttgcagtgtgggtggtgagacactggaacaggttacccagagatgtagtaggtgtcctgtccctggagatttacaagggaggcgggatcaggccctgggcagcctgatctagctctggatatccctgttcactgcaggggagttggactagctgacctt

SEQ ID NO: 92129 - DNA, 600 bp, Chicken  19866894404668_3
gcatcaaaagaagcatgaccagcaggttgagggaagtgatcctgcccctctactctgtactggtgaggcctcactgcatccagatgtggagtcctcagtacaggagagacacaaatctattagagtgcctctagaggaggaccacaagaatgattcacagaatggaacacctttcctatgaggrtaggctgaaaggactgggattgttcagtctaaaaaaagagaaggctgcaaggtgacctamtagcagcctttccgtgtctaaaggggagctacaggaatgaagaggacagactcttyagcagagtctgttgtgacagagcatggggaatggtttcaagattgaagagggtagatttaggttggaagtaaggaaaaaagtcttttgcagtgtgggtggtgagacactggaacaggttacccagagatgtagtaggtgtcctgtccctggagatttacaagggaggcgggatcaggccctgggcagcctgatctagctctggatatccctgttcactgcaggggagttggactagctgacctttaaaggtcccttccaactctaaggattctatgactgtaagttcacatcctgcaaat

SEQ ID NO: 92130 - DNA, 600 bp, Chicken  19866894404673_1
gaagactcatcagagccaaattctgcatgctttctcacccaaaattaggagaattggaaaaaaacatcaagttgcagcacaaaataccatgctatcaaagcagcttttccaggagactgggagagggctacgggaagagatcccaatgatgacaacaagactttcttagcccgaataccagagcgtgttttacagcacagatatagcacttgaggtgtaagaggaaagcctacccatgcaggccaactctgcacgccagtttgtaaaaatccttattaaaaccccgctgagcctaatcgygaaagatagcttttaattaaaaagtgcaacattcagccaagttttacagggagattgctatgaccccgggagatgccaaccagcaatagaccaaactccttccggagggagggatttttcccatcccttgctgttagctggcagggagcatctccgactgttttaaatgggcaacttcrcgagtttcctgagtgtggtttcttccattaggaaatgggaatcctttaacagctcacccaggcagcaaaattcctccactccatctattgcattaggagccyggagtccatgctgctcaac

SEQ ID NO: 92131 - DNA, 600 bp, Chicken  19866894404673_2
agagcgtgttttacagcacagatatagcacttgaggtgtaagaggaaagcctacccatgcaggccaactctgcacgccagtttgtaaaaatccttattaaaaccccgctgagcctaatcgygaaagatagcttttaattaaaaagtgcaacattcagccaagttttacagggagattgctatgaccccgggagatgccaaccagcaatagaccaaactccttccggagggagggatttttcccatcccttgctgttagctggcagggagcatctccgactgttttaaatgggcaacttcrcgagtttcctgagtgtggtttcttccattaggaaatgggaatcctttaacagctcacccaggcagcaaaattcctccactccatctattgcattaggagccyggagtccatgctgctcaactcggtggagcagggagagagagcaagagaaaagaaaatccagatggggcaaagtgtagcttgactttttaatgctaaattatttacagtaagtaaaatcgtgtgtgtcaattgtgaaaagagtccaatttgtttgatttacattgcaggggggtgccctagggtagggggtgtttaact

SEQ ID NO: 92132 - DNA, 600 bp, Chicken  19866894404673_3
ccccgctgagcctaatcgygaaagatagcttttaattaaaaagtgcaacattcagccaagttttacagggagattgctatgaccccgggagatgccaaccagcaatagaccaaactccttccggagggagggatttttcccatcccttgctgttagctggcagggagcatctccgactgttttaaatgggcaacttcrcgagtttcctgagtgtggtttcttccattaggaaatgggaatcctttaacagctcacccaggcagcaaaattcctccactccatctattgcattaggagccyggagtccatgctgctcaactcggtggagcagggagagagagcaagagaaaagaaaatccagatggggcaaagtgtagcttgactttttaatgctaaattatttacagtaagtaaaatcgtgtgtgtcaattgtgaaaagagtccaatttgtttgatttacattgcaggggggtgccctagggtagggggtgtttaactatctcctctaatgtaattgcctatggcagcccgttaaatatttgataggctgcctgagcatagtaaggaactttgtctgatacgctcctgcaaccctttcag

SEQ ID NO: 92133 - DNA, 600 bp, Chicken  19866894404679_1
agctgggcctctctcctcacccctaatcctattattgctcccccaggcccacctctagcaggcctggttttatccccttcccccctcatgtctagtttaaagacctctctactagtcctgccagctcctgggcaaggatccgtttccccctttgagacaggtgatacccatctgcagacctcatgccaggtgccgagtagaccgccccatgatcaaagaacccgagattcttgcgcttgcaccagcctctcagccatgtgtttatgcaatgtgttttcctggttattgcattatctttcyctgccactgtaggaatacctgcaaatactacttgtatgcctgcattgccaactaacctccccagccccctaaaatcattttttatagccctcaggcttctgccagcaatctcatcgctgccagcctgaactatcaataacagatagtaatcagaggggtggatcagaccagaaagtttcctggaaatatccctgacccgggccccagggaggcaggacacctcgctggggtagggtcaggccgacagagccctctgttccactcaggagggagtcacctacaaatttcttcatcattcag

SEQ ID NO: 92134 - DNA, 600 bp, Chicken  19866894404684_1
tatactcttacagaaaatactggtctctctgcactgagctttcattagcttttttgtgttattttactgttgggtgagtattgaaagggatccatcagtgactgacatgcaagtacttacatgttcagtctgcagggaagtaggctgagctccccattactcagtctcctcttcctcctgcatttgccactactttgattgcactcagaattagacttcacaaaaataagatggatatccaagctactgattcagatgctgtaccattttttggttagcttgtttgattctttatttccytctcctgactggttggwctctgctgtctkctatagtgaggcagagcaggagtttgaggagayggcrcaaagaaaagtgcgtgcactgatgtggcctggaagtgctgcgtggcagttgctgtgctgtagaaatggagaccagaaaagctaaaataagtgaattggctgaccacagagtgcagtcaaaatggggaaacttcagtttggatggtgtgatcttctgagtgggttatgggatttgtaggctgtatttccacctgtttagtttagattttgttgtttgtggttttttcccctcgtg

SEQ ID NO: 92135 - DNA, 600 bp, Chicken  19866894404684_2
tactggtctctctgcactgagctttcattagcttttttgtgttattttactgttgggtgagtattgaaagggatccatcagtgactgacatgcaagtacttacatgttcagtctgcagggaagtaggctgagctccccattactcagtctcctcttcctcctgcatttgccactactttgattgcactcagaattagacttcacaaaaataagatggatatccaagctactgattcagatgctgtaccattttttggttagcttgtttgattctttatttccytctcctgactggttggwctctgctgtctkctatagtgaggcagagcaggagtttgaggagayggcrcaaagaaaagtgcgtgcactgatgtggcctggaagtgctgcgtggcagttgctgtgctgtagaaatggagaccagaaaagctaaaataagtgaattggctgaccacagagtgcagtcaaaatggggaaacttcagtttggatggtgtgatcttctgagtgggttatgggatttgtaggctgtatttccacctgtttagtttagattttgttgtttgtggttttttcccctcgtgttagttctttaagacct

SEQ ID NO: 92136 - DNA, 600 bp, Chicken  19866894404684_3
tgcactgagctttcattagcttttttgtgttattttactgttgggtgagtattgaaagggatccatcagtgactgacatgcaagtacttacatgttcagtctgcagggaagtaggctgagctccccattactcagtctcctcttcctcctgcatttgccactactttgattgcactcagaattagacttcacaaaaataagatggatatccaagctactgattcagatgctgtaccattttttggttagcttgtttgattctttatttccytctcctgactggttggwctctgctgtctkctatagtgaggcagagcaggagtttgaggagayggcrcaaagaaaagtgcgtgcactgatgtggcctggaagtgctgcgtggcagttgctgtgctgtagaaatggagaccagaaaagctaaaataagtgaattggctgaccacagagtgcagtcaaaatggggaaacttcagtttggatggtgtgatcttctgagtgggttatgggatttgtaggctgtatttccacctgtttagtttagattttgttgtttgtggttttttcccctcgtgttagttctttaagacctctttttctctgt

SEQ ID NO: 92137 - DNA, 600 bp, Chicken  19866894404684_4
tttactgttgggtgagtattgaaagggatccatcagtgactgacatgcaagtacttacatgttcagtctgcagggaagtaggctgagctccccattactcagtctcctcttcctcctgcatttgccactactttgattgcactcagaattagacttcacaaaaataagatggatatccaagctactgattcagatgctgtaccattttttggttagcttgtttgattctttatttccytctcctgactggttggwctctgctgtctkctatagtgaggcagagcaggagtttgaggagayggcrcaaagaaaagtgcgtgcactgatgtggcctggaagtgctgcgtggcagttgctgtgctgtagaaatggagaccagaaaagctaaaataagtgaattggctgaccacagagtgcagtcaaaatggggaaacttcagtttggatggtgtgatcttctgagtgggttatgggatttgtaggctgtatttccacctgtttagtttagattttgttgtttgtggttttttcccctcgtgttagttctttaagacctctttttctctgttgtgtatgatgtgaatgttgcatctgcgaggct

SEQ ID NO: 92138 - DNA, 600 bp, Chicken  19866894404684_5
ctgttgggtgagtattgaaagggatccatcagtgactgacatgcaagtacttacatgttcagtctgcagggaagtaggctgagctccccattactcagtctcctcttcctcctgcatttgccactactttgattgcactcagaattagacttcacaaaaataagatggatatccaagctactgattcagatgctgtaccattttttggttagcttgtttgattctttatttccytctcctgactggttggwctctgctgtctkctatagtgaggcagagcaggagtttgaggagayggcrcaaagaaaagtgcgtgcactgatgtggcctggaagtgctgcgtggcagttgctgtgctgtagaaatggagaccagaaaagctaaaataagtgaattggctgaccacagagtgcagtcaaaatggggaaacttcagtttggatggtgtgatcttctgagtgggttatgggatttgtaggctgtatttccacctgtttagtttagattttgttgtttgtggttttttcccctcgtgttagttctttaagacctctttttctctgttgtgtatgatgtgaatgttgcatctgcgaggctcaag

SEQ ID NO: 92139 - DNA, 600 bp, Chicken  19866894404687_1
gattctcttccagaactgtagaaatccttccgtgtaattatttcattttatctttcatgctcgtatggctccttaaacccattttgtttcagagccttacaactcctggaggtatagtattcatcactactggtagagatggattatggtggattcattaagctgtaaccaacgcagagacttggatgcaatgtttttacacactatataaccctaaccggcacggctggcacatttgaaatgatccaggagatccaaacatttttggtatcagtttttcatggggttggtcatctcccrctgattcacttggaagcatctcagccaagtgatggtgctgcctgttgaagggccatacatgaaggcctttcactaaggctgagcacattttccttccataccgcacatttggcaacaaggctggctgagaaagtgcattcctcttctcccttatatatgtcgcttctgtatgatgtgctgccctgtgactctggggctgccctrgcaaccgggagatggaaatgctctycattaacaggaattgtgccttaagaatctcaggtattgcttcaaggcagtaagagtctatctcataaatgc

SEQ ID NO: 92140 - DNA, 529 bp, Chicken  19866894404687_2
tatataaccctaaccggcacggctggcacatttgaaatgatccaggagatccaaacatttttggtatcagtttttcatggggttggtcatctcccrctgattcacttggaagcatctcagccaagtgatggtgctgcctgttgaagggccatacatgaaggcctttcactaaggctgagcacattttccttccataccgcacatttggcaacaaggctggctgagaaagtgcattcctcttctcccttatatatgtcgcttctgtatgatgtgctgccctgtgactctggggctgccctrgcaaccgggagatggaaatgctctycattaacaggaattgtgccttaagaatctcaggtattgcttcaaggcagtaagagtctatctcataaatgcattttgtttacttgtgaatgaatatgctctgatgtgagaacagcgccatggaagataaactttcagaatatgttactgattacttatatcagtacagagtgctgtcaatggctgcatctacagtaatttacta

SEQ ID NO: 92141 - DNA, 504 bp, Chicken  19866894404687_3
gcacatttgaaatgatccaggagatccaaacatttttggtatcagtttttcatggggttggtcatctcccrctgattcacttggaagcatctcagccaagtgatggtgctgcctgttgaagggccatacatgaaggcctttcactaaggctgagcacattttccttccataccgcacatttggcaacaaggctggctgagaaagtgcattcctcttctcccttatatatgtcgcttctgtatgatgtgctgccctgtgactctggggctgccctrgcaaccgggagatggaaatgctctycattaacaggaattgtgccttaagaatctcaggtattgcttcaaggcagtaagagtctatctcataaatgcattttgtttacttgtgaatgaatatgctctgatgtgagaacagcgccatggaagataaactttcagaatatgttactgattacttatatcagtacagagtgctgtcaatggctgcatctacagtaatttacta

SEQ ID NO: 92142 - DNA, 553 bp, Chicken  19866894404691_1
cattaagatcacaacacaaccaacagggttagaggtatgttagtataccatcccagacttctacatttggagtctgagggtttgctgtgtgtttggagggatggtgcttgttagctttttttactcaatagctctgggacagcatcccatcatccctctccatcttgccagtgcttcaggaacaaggtggctttctttcctgtagttggtagcggagcagaacagccagtagtgcccaggtaagccaaatgtcttgctttgggtttggttggttggagttgcaataattactgtaaaaawgggtcttgcacgactatgagaaagctgctgtctttcagggcctctcctaaaagtagatttttcatctccaatgaactgaggtgaagcaaaatggaatgaatataaaatacaagtatgttccttcagtatcccagtggtagcacaaaggagacaccaggaaatgtcttttcaaagcttcagtctcacggagcagcactggagtaactgcagtgaatagaagagcatctgaaatcattgtactcctttttagggt

SEQ ID NO: 92143 - DNA, 600 bp, Chicken  19866894404704_1
aagaggacacttaagagcactgattccggctacttcagtaactgcacacaaacatacacgagttcatgactgcataaatcactcaatcttgtatctttaggatcttcctatactcactcatattgcctaagcagctttgtcttaatagcgtcttattactaagttggtgctgaagcacaactctctgtaggaagatttttatttctaaagttagcatcaactttcatgtgcataccaccctaaagtgagttctgattgtggcaaatgagtgaccagtttgtactcaagctacctaaacasagacttaggaaaaagctgacattaactagcacaactatcttcccctggtttcaaaaaaccagtaagtgagttactgcagtaggttcccttcctctggaagacaatataacccaaattcagtgttatctcaaaacaataagacaacgtttctgtaacattcaatcacaggatgatgtgaatggaaacaatctccaaactcgtgggagcattagagccattcacaccaactgtttagacttcagtagctagctgatgctgagacaagacagtggtacttacaaccctctgtttattaggaaa

SEQ ID NO: 92144 - DNA, 600 bp, Chicken  19866894404709_1
taataagggaaaaaaagtgggagaataaaagcagctaagctcttaaatgggctgcaactacaaccatagtctctctggggatgtaacccttcactatctccacatacaacttcaatgtgattaaccatgctagctcagatgtctgtcagtttagtttaaactagaaacttgtctgcaagtgtacatgaacaaacaggacaagcacatggtattctcctgaatgtttttccaacctccaattacattttgtttgagaacttcctgtgcaatttaccatgtctgtgactgatggatcccaakgtagctgattcatcacattcttagyttctgtgttcaattttgctttattttattaagttgttttgaagattagatgatcaatacctagtaktaatagtaataccatgttcttttccttactgcgtcagaggtatgcattactaatttagaatgaaccaatgacacgtattgtgtaataagaataaaaacgcacctgggagtctctcacacaagaaacaagaggaagaaaccaaggttcagaacctgaggaggcatatcatgtgtcagacacatggcacacaaggacaaaggctgtttgag

SEQ ID NO: 92145 - DNA, 600 bp, Chicken  19866894404709_2
taaaagcagctaagctcttaaatgggctgcaactacaaccatagtctctctggggatgtaacccttcactatctccacatacaacttcaatgtgattaaccatgctagctcagatgtctgtcagtttagtttaaactagaaacttgtctgcaagtgtacatgaacaaacaggacaagcacatggtattctcctgaatgtttttccaacctccaattacattttgtttgagaacttcctgtgcaatttaccatgtctgtgactgatggatcccaakgtagctgattcatcacattcttagyttctgtgttcaattttgctttattttattaagttgttttgaagattagatgatcaatacctagtaktaatagtaataccatgttcttttccttactgcgtcagaggtatgcattactaatttagaatgaaccaatgacacgtattgtgtaataagaataaaaacgcacctgggagtctctcacacaagaaacaagaggaagaaaccaaggttcagaacctgaggaggcatatcatgtgtcagacacatggcacacaaggacaaaggctgtttgaggtgtgctgaggtttctgaaagccac

SEQ ID NO: 92146 - DNA, 600 bp, Chicken  19866894404709_3
cactatctccacatacaacttcaatgtgattaaccatgctagctcagatgtctgtcagtttagtttaaactagaaacttgtctgcaagtgtacatgaacaaacaggacaagcacatggtattctcctgaatgtttttccaacctccaattacattttgtttgagaacttcctgtgcaatttaccatgtctgtgactgatggatcccaakgtagctgattcatcacattcttagyttctgtgttcaattttgctttattttattaagttgttttgaagattagatgatcaatacctagtaktaatagtaataccatgttcttttccttactgcgtcagaggtatgcattactaatttagaatgaaccaatgacacgtattgtgtaataagaataaaaacgcacctgggagtctctcacacaagaaacaagaggaagaaaccaaggttcagaacctgaggaggcatatcatgtgtcagacacatggcacacaaggacaaaggctgtttgaggtgtgctgaggtttctgaaagccacatccagcttcaaagatccatgagctgcagatgtttggagatcatgggaaaactagaaagagctggc

SEQ ID NO: 92147 - DNA, 585 bp, Chicken  19866894404711_1
gaacatcacatttgtttcttgctacacaagagaagtaggaagaatcttacagagggtggaaaacaccacatagagctttctgtttcagaagacaaatctcttgagctgttcacaactgcaatggcttctttcaaagcagctctgggtcactaatgctgctatgcaacacagtgcttctcaaattccaaacacaaatacttcacaccaaatgtcactgacaaaatgaatgcacttggaccaagtaactgcaccctggaatttcacaggcaatacacttctagcacaaataaacacgacccrctcaatccaccccgaaggctgcagggctgcaatgatgaccacagtgccctttgggctgatgaggactgcctgataccacagggcatacctggagacttctgcagccccagggggcccggatttgccttttgctctgcttttatggcagcaagcactgctggttcctaacacatgagcagcgctcactgcaggtaaaaaaagcagataacaacaataattacaagccagtgtcctgattccaaggccagagctgtatctagcacactttactgcctctagatcaca

SEQ ID NO: 92148 - DNA, 558 bp, Chicken  19866894404715_1
agtctgtctaattgctccttgaatctgcataaccttggggcagtgtgttccaccctctaaatacgtgtttggtgagcacacagccagcctcatgatgactctcagccagcctccttgcagccccatcggcagctcttgttctctgggaggctgtgacagctctggactcgcttttgggttgacttcatagtcctctgcactgtgaaggacaccgtgcaggtttatgatagcagcttagagcaagggaattgagccaggctacatttcagtagcatagtttgggtctttctttaagtcacscttccttgggtctccttctggcactgccccatcacctgcatcaccttcagccctaggacctctgcttcagcctattctctggctgtgaggccaccccaraagacagctgctgggcttgggccatgctgggagagctgagagctgcaaggggaaggctcatcctgggagctgggatttaggagcccttcagcagcttttgtccctgcctcatcctatgttatgccttcagcactggcttcttctccaaggcaggaatgg

SEQ ID NO: 92149 - DNA, 459 bp, Chicken  19866894404715_2
tctcagccagcctccttgcagccccatcggcagctcttgttctctgggaggctgtgacagctctggactcgcttttgggttgacttcatagtcctctgcactgtgaaggacaccgtgcaggtttatgatagcagcttagagcaagggaattgagccaggctacatttcagtagcatagtttgggtctttctttaagtcacscttccttgggtctccttctggcactgccccatcacctgcatcaccttcagccctaggacctctgcttcagcctattctctggctgtgaggccaccccaraagacagctgctgggcttgggccatgctgggagagctgagagctgcaaggggaaggctcatcctgggagctgggatttaggagcccttcagcagcttttgtccctgcctcatcctatgttatgccttcagcactggcttcttctccaaggcaggaatgg

SEQ ID NO: 92150 - DNA, 600 bp, Chicken  19866894404717_1
ctacacgctcatgaacagatgcagaagatacagaagaaacctccatgaagtgcttgcctacctgggagaagcagatgaagtatcataaaactttcatgattacccatacaccagaagaacattttgcaaaagacaagggcttcacccaaagtaatgcctcttattttattatgttggcccacgtgatcagaattggatggtggtggtatggcagcagaggttgaaccttcacaccaatattctgttccacaaatggcagcagaggggcagtctgactgaatggtgtctgacatagaagtrtgtatggagcagtagtgtagaactaaattccctgaaaaaaaatgacacccattgacattcatcaatgcttattgaacatttgtggagatcaactggaggatatgagtacagtgaggtgatgggtgatgcatttcagcagtagtgacaatggtagttggtcacctccactggtgcagatttttatgagcatggcatgcaggctcttgttccatcgctgstaaaaatgtatagctaatcgtggcgactatactgaaaaacaggtttttgtagctgagaattttctccgtgaaacagtgttat

SEQ ID NO: 92151 - DNA, 600 bp, Chicken  19866894404717_2
ggttgaaccttcacaccaatattctgttccacaaatggcagcagaggggcagtctgactgaatggtgtctgacatagaagtrtgtatggagcagtagtgtagaactaaattccctgaaaaaaaatgacacccattgacattcatcaatgcttattgaacatttgtggagatcaactggaggatatgagtacagtgaggtgatgggtgatgcatttcagcagtagtgacaatggtagttggtcacctccactggtgcagatttttatgagcatggcatgcaggctcttgttccatcgctgstaaaaatgtatagctaatcgtggcgactatactgaaaaacaggtttttgtagctgagaattttctccgtgaaacagtgttattgcgctctttgtatctgttatagcttccatggaaagaaatgggaggcattactttcagagcaacctatacatattcatagaactacatcacattctcctttggtcatttttctttcagycagatgaattaaatgttaatttcctgttacctattaaaggtatttattttgttttgttccagctatcaaatgtagaaatagaaaaaaaactgtatcaag

SEQ ID NO: 92152 - DNA, 600 bp, Chicken  19866894404717_3
tgggtgatgcatttcagcagtagtgacaatggtagttggtcacctccactggtgcagatttttatgagcatggcatgcaggctcttgttccatcgctgstaaaaatgtatagctaatcgtggcgactatactgaaaaacaggtttttgtagctgagaattttctccgtgaaacagtgttattgcgctctttgtatctgttatagcttccatggaaagaaatgggaggcattactttcagagcaacctatacatattcatagaactacatcacattctcctttggtcatttttctttcagycagatgaattaaatgttaatttcctgttacctattaaaggtatttattttgttttgttccagctatcaaatgtagaaatagaaaaaaaactgtatcaagcaaagcatatattctgatccatttaaaacattttcacattttccaaacaaaattaaagggcttaacagacataaaggctaccttgcagaattaacaagctttgaaaacaattaaatgaaaccttgatttattttatatccttcttctgaatttgtgtgtaaaggaaatattccatgtaaatgacaggaaagcactgaaata

SEQ ID NO: 92153 - DNA, 600 bp, Chicken  19866894404727_1
aagaaatctctctgagaatgtgcagattaaaatccccttacccccttgcagagggtgacatttgctgattttgtggtaagttgcaagagaatggcttggctgaaattctggttccagaatattgttagagtctgtcagagaaagtttgctgggacgttgagcgctggcagaatagtttttccaagaaggagttttaaggaaatggttagactgctttagctgaggtgttgaaccaaaacgaacagaagagcccaacttgaaggtacagtcttggcattgaaaagttcagcccgatgacaygacagtaagaccttccttgcagttctttttatctgtgkgaataatcaagctgtcttaatctatagatgctcttccagtaagtcagtataaaagaaacaagctgtaaggaataggactccattttcatttatggtcaaacacaaaacgtgggcttcgggagaagcaaatcagcattctcttctctctcgtcagcctgctgtctgcctataaacctttttattggtgatgcagtgctgctgcagtgaatcaggtgtaggcatttctcaagttccctgagccctgcggtagttccttttgaag

SEQ ID NO: 92154 - DNA, 600 bp, Chicken  19866894404727_2
tacccccttgcagagggtgacatttgctgattttgtggtaagttgcaagagaatggcttggctgaaattctggttccagaatattgttagagtctgtcagagaaagtttgctgggacgttgagcgctggcagaatagtttttccaagaaggagttttaaggaaatggttagactgctttagctgaggtgttgaaccaaaacgaacagaagagcccaacttgaaggtacagtcttggcattgaaaagttcagcccgatgacaygacagtaagaccttccttgcagttctttttatctgtgkgaataatcaagctgtcttaatctatagatgctcttccagtaagtcagtataaaagaaacaagctgtaaggaataggactccattttcatttatggtcaaacacaaaacgtgggcttcgggagaagcaaatcagcattctcttctctctcgtcagcctgctgtctgcctataaacctttttattggtgatgcagtgctgctgcagtgaatcaggtgtaggcatttctcaagttccctgagccctgcggtagttccttttgaagtcagcggccccactatgaaagatgcagccacctttatg

SEQ ID NO: 92155 - DNA, 600 bp, Chicken  19866894404728_1
ttttgtgtgttgtgtataaacagtacaaaatgaaatacgcttttaccatatcctgcagatgtggtacagtaaaggaagttgataggaatcagtgttagtcatttttacatgcaaatatttaaaattttgcttttttgatgatctatgtgacactattggtaactatttcgctaaattacacaatttcttgtcaatttagtctttgtagtaaaattgcattgtattattctcctcactgcatttttcctgctcctctatttaaatatgttcctaatatgcaatactattcacctgccttckgaacaggtcaattacgctaaaaagttcycacattcttgtcatgttttcctttttttttttctcttctttttttcccaaaaagtaataagatggagttttccgaatttggcctttgcagatgataaataatatccaggtaatgggatcatctgaatctcttaccatcagttattattacttttgttctaatttgtgtttctcaccatttaaaatttgtctagaaaagtaagaactattaagggaaaaaaattgttctctaaatgacgttataataaactcattcagttatttccaatcact

SEQ ID NO: 92156 - DNA, 600 bp, Chicken  19866894404728_2
aatgaaatacgcttttaccatatcctgcagatgtggtacagtaaaggaagttgataggaatcagtgttagtcatttttacatgcaaatatttaaaattttgcttttttgatgatctatgtgacactattggtaactatttcgctaaattacacaatttcttgtcaatttagtctttgtagtaaaattgcattgtattattctcctcactgcatttttcctgctcctctatttaaatatgttcctaatatgcaatactattcacctgccttckgaacaggtcaattacgctaaaaagttcycacattcttgtcatgttttcctttttttttttctcttctttttttcccaaaaagtaataagatggagttttccgaatttggcctttgcagatgataaataatatccaggtaatgggatcatctgaatctcttaccatcagttattattacttttgttctaatttgtgtttctcaccatttaaaatttgtctagaaaagtaagaactattaagggaaaaaaattgttctctaaatgacgttataataaactcattcagttatttccaatcactctctgtctggcacatgcagacaatacaa

SEQ ID NO: 92157 - DNA, 600 bp, Chicken  19866894404731_1
aggctgctgtaatggcccatctgagtctctaccacctgtcagctgttgtagttttaattctagctcagaaaccaatgtaaaacgtagtcaagtcttgttacctataatccatccactcttgtgatgcactgaggaaccagggaaggttcggcttggatgttatgaaaattttcttctcagaaagagtggtaatgcattggaaaaggctgcccagggaggtggtagagtcaccatccttggaggtgttcaagaacaatgcggatgtagcactgagggacatgattaatgggcatggggggsaggggttgacagttggactagatgatgtgagtggtctttaccgatcataatggttctatgatttcatgattctaggaaagtatcacttttctccccgcttagacaaagccctgagtcctccattggaggtatggcaatacacctccatgcagcattggttcagataaaagggagagtttcatgcatgaaattggacaagtagaggctgtgtgggctctgcctttgtctccaaccttgccagcatcctgtgcacagtctcaaataattccaaaacattctggaggcagcgctcacggttga

SEQ ID NO: 92158 - DNA, 599 bp, Chicken  19866894404743_1
  misc_feature (1)..(39): n is any nucleotide
nnnnnnnnnnnnnnnnnnnnnnnnnnnnnnnnnnnnnnngctcctgcagccccacagcacagagcttttgtaccaactcaccgcaagagggaaccaacataccccacatggcagccaccctgtccccgtcccagcgagaggaggcagagctggtcagagcacagtgtatctggggacatgctgcagaagcaaccaaggcccagcctgaagactgactgagagtcagctaagccatcatgtctgccaagccaagttaagagtgcaagcacagagcctgctgagatgtcccatagccaccakggcccaacacctggccacaggtccgcgctgcagcaccatcctaccagcagagctctccccagcagagccaagtgctggctttcccctgcactgttttaaaatcacctcagaaagagagctggcagcaagtcaggacrtgccacygcctccttcctggctgaaataagaggtgccctatcacctgyccccaaatctgtccaggacagaggtggctcaaaatgcgtagaagatatggcaccaaagggcagcttcttcttgccaccacatccccatcacacagccagactccaacagacccc

SEQ ID NO: 92159 - DNA, 600 bp, Chicken  19866894404743_2
gaggaggcagagctggtcagagcacagtgtatctggggacatgctgcagaagcaaccaaggcccagcctgaagactgactgagagtcagctaagccatcatgtctgccaagccaagttaagagtgcaagcacagagcctgctgagatgtcccatagccaccakggcccaacacctggccacaggtccgcgctgcagcaccatcctaccagcagagctctccccagcagagccaagtgctggctttcccctgcactgttttaaaatcacctcagaaagagagctggcagcaagtcaggacrtgccacygcctccttcctggctgaaataagaggtgccctatcacctgyccccaaatctgtccaggacagaggtggctcaaaatgcgtagaagatatggcaccaaagggcagcttcttcttgccaccacatccccatcacacagccagactccaacagaccccctcttgcctacgcagtgctgtgctagaaaagcagcagtttggtcttataccttggtgatgaggtgaggatacttgagacaggctaactgtagaactgactccttcatcttgcttggattgagggagagctgagcaaga

SEQ ID NO: 92160 - DNA, 600 bp, Chicken  19866894404743_3
cagagctggtcagagcacagtgtatctggggacatgctgcagaagcaaccaaggcccagcctgaagactgactgagagtcagctaagccatcatgtctgccaagccaagttaagagtgcaagcacagagcctgctgagatgtcccatagccaccakggcccaacacctggccacaggtccgcgctgcagcaccatcctaccagcagagctctccccagcagagccaagtgctggctttcccctgcactgttttaaaatcacctcagaaagagagctggcagcaagtcaggacrtgccacygcctccttcctggctgaaataagaggtgccctatcacctgyccccaaatctgtccaggacagaggtggctcaaaatgcgtagaagatatggcaccaaagggcagcttcttcttgccaccacatccccatcacacagccagactccaacagaccccctcttgcctacgcagtgctgtgctagaaaagcagcagtttggtcttataccttggtgatgaggtgaggatacttgagacaggctaactgtagaactgactccttcatcttgcttggattgagggagagctgagcaagatcggatt

SEQ ID NO: 92161 - DNA, 600 bp, Chicken  19866894404743_4
gaagcaaccaaggcccagcctgaagactgactgagagtcagctaagccatcatgtctgccaagccaagttaagagtgcaagcacagagcctgctgagatgtcccatagccaccakggcccaacacctggccacaggtccgcgctgcagcaccatcctaccagcagagctctccccagcagagccaagtgctggctttcccctgcactgttttaaaatcacctcagaaagagagctggcagcaagtcaggacrtgccacygcctccttcctggctgaaataagaggtgccctatcacctgyccccaaatctgtccaggacagaggtggctcaaaatgcgtagaagatatggcaccaaagggcagcttcttcttgccaccacatccccatcacacagccagactccaacagaccccctcttgcctacgcagtgctgtgctagaaaagcagcagtttggtcttataccttggtgatgaggtgaggatacttgagacaggctaactgtagaactgactccttcatcttgcttggattgagggagagctgagcaagatcggattcctcttccacaaaatgcagcagattctccacctcccgtcgg

SEQ ID NO: 92162 - DNA, 600 bp, Chicken  19866894404743_5
accaaagggcagcttcttcttgccaccacatccccatcacacagccagactccaacagaccccctcttgcctacgcagtgctgtgctagaaaagcagcagtttggtcttataccttggtgatgaggtgaggatacttgagacaggctaactgtagaactgactccttcatcttgcttggattgagggagagctgagcaagatcggattcctcttccacaaaatgcagcagattctccacctcccgtcgggtgaagttcagcactgggttcaggtcatccaccacccgatctggaagaggsagggaacagcgtgagctgagaaggraagagatggacactgctcccctttctacactcctgtcctaacagagctccctctttgcaacctgaatgttcctcagaagccttgtgtaaatgttaaggcatcgtgttgggagatgagcctgtttgaccaagtcagactgacaaatgtcttatcctctaaattgcacagcaatgcaatgcaggcacgcaggaacatgaagctaaatataaatggtgtcccatctcacaacctccacaccccaaggctgaaaacagacaaggtcagggacataaagg

SEQ ID NO: 92163 - DNA, 600 bp, Chicken  19866894404743_6
ccacatccccatcacacagccagactccaacagaccccctcttgcctacgcagtgctgtgctagaaaagcagcagtttggtcttataccttggtgatgaggtgaggatacttgagacaggctaactgtagaactgactccttcatcttgcttggattgagggagagctgagcaagatcggattcctcttccacaaaatgcagcagattctccacctcccgtcgggtgaagttcagcactgggttcaggtcatccaccacccgatctggaagaggsagggaacagcgtgagctgagaaggraagagatggacactgctcccctttctacactcctgtcctaacagagctccctctttgcaacctgaatgttcctcagaagccttgtgtaaatgttaaggcatcgtgttgggagatgagcctgtttgaccaagtcagactgacaaatgtcttatcctctaaattgcacagcaatgcaatgcaggcacgcaggaacatgaagctaaatataaatggtgtcccatctcacaacctccacaccccaaggctgaaaacagacaaggtcagggacataaaggtggcaaagtcaacacctggctcccc

SEQ ID NO: 92164 - DNA, 600 bp, Chicken  19866894404753_1
gagtgagattcccgtatctccttatcatttcctagaagctgatttaaaaaaatccccttctttaaaaatcctctaaaaaaaaatgttttatatgaatacttacagttttagacatgttaacaaataataagcattttaaataccttagcactataaacatataagagactacacagaaaacatccatgaaggacacgaaccactaataacgagatgagcaagggtttggagaaaacaaggtcagatttttctttttcactgatctgtattttagaaactatagctgtgttcatatctgcrttaaaggtgagacctagaaggccaatgattctaaaaacaaatctgtcatgctattggattgatatcaatgaccggaattttgagtgggttttaaagttatagtatgataaaaaaaaaaagtatatccgtagagaacagacaacaaaatggaagagtttaataacatcttgatctgatctcaagctgtagaagtagagaagaaaagtcaggacattttttagctgtatgcgcttagtataagtaaagaactgctatatgcctgggacattatattcaagcataaggacgggagccaagtag

SEQ ID NO: 92165 - DNA, 600 bp, Chicken  19866894404754_1
atctaacctaaacctcccctgtctcagtttaagaccattctcccttgtcctatcactatgcaccctccaaaagagcctttccccctcctgtttatactcccttttcaagtactgaaaggccgcagtgaggtctctctggagccttctcttctccaagctaaacaagcccagttccctcaacctttcctcataggagaggtgctccagccctctgatcatcttagtggccctcctctgaatccattagaagagctccacatctttcttgtgctgggggccccatgcctggacgcagtactmcagatggggcctcacaagagctgagtagaaggggataatcacctycctctccctgctggccactactcttttaatgcagcccaggttatagttggccttccagggcacctgtgtctccaggtgtgagtgaagagagagctgcacagccagaaagcaaaagagtctatgtgcaaaggaaaacatggtgctaagcataaatggaaaaagagctagggagtcttcccccttgtttctcrggtcataaaaaagactgatcccttctgcagcagggcacatctgcaaatgtagaacggaagagct

SEQ ID NO: 92166 - DNA, 600 bp, Chicken  19866894404754_2
tgtcctatcactatgcaccctccaaaagagcctttccccctcctgtttatactcccttttcaagtactgaaaggccgcagtgaggtctctctggagccttctcttctccaagctaaacaagcccagttccctcaacctttcctcataggagaggtgctccagccctctgatcatcttagtggccctcctctgaatccattagaagagctccacatctttcttgtgctgggggccccatgcctggacgcagtactmcagatggggcctcacaagagctgagtagaaggggataatcacctycctctccctgctggccactactcttttaatgcagcccaggttatagttggccttccagggcacctgtgtctccaggtgtgagtgaagagagagctgcacagccagaaagcaaaagagtctatgtgcaaaggaaaacatggtgctaagcataaatggaaaaagagctagggagtcttcccccttgtttctcrggtcataaaaaagactgatcccttctgcagcagggcacatctgcaaatgtagaacggaagagctggtgaagatccctctttcaggaaagggagagatacaaactgtgaa

SEQ ID NO: 92167 - DNA, 457 bp, Chicken  19866894404754_3
gaatccattagaagagctccacatctttcttgtgctgggggccccatgcctggacgcagtactmcagatggggcctcacaagagctgagtagaaggggataatcacctycctctccctgctggccactactcttttaatgcagcccaggttatagttggccttccagggcacctgtgtctccaggtgtgagtgaagagagagctgcacagccagaaagcaaaagagtctatgtgcaaaggaaaacatggtgctaagcataaatggaaaaagagctagggagtcttcccccttgtttctcrggtcataaaaaagactgatcccttctgcagcagggcacatctgcaaatgtagaacggaagagctggtgaagatccctctttcaggaaagggagagatacaaactgtgaatgctgtgtaaaaattggtattccagtacagtctctaacattggccttc

SEQ ID NO: 92168 - DNA, 600 bp, Chicken  19866894404755_1
aggaccctgtagctgttccaaaggaacataggagctcacaattacaggagtcaactctgtgaatacagaaaatcagatcatggaggatgaggataagagataaaaaaaaagttacagcccatcacactcctttgttgcccatgcctgatcctatttatttttttcttctttgacataccctgtaagcataaaggaaagagccaggtcctgtttgataccctgccataaggtttaactttgtgaaaccaacaatgtaacttgttcattttactgcaattaactcttctaaagtggctgctwcttccaaagtcctgacatgagtaacatcactgtcacaaagcaratctgtgacttgttggagctggctgatggtttgggagattgtgactatggtcattattgcacgaagagcaaatataaatcccatgaaagatgttttaagattggactgtttcgttttgcctttctgtatgtatactacccacagctggtttaaaccaccagaatgaaagttgagaaaggacataaccaatctatataaacaaaacaagggagtaaacacagggaggcccaaccgtgacagagggagacaagctcgta

SEQ ID NO: 92169 - DNA, 600 bp, Chicken  19866894404755_2
acaggagtcaactctgtgaatacagaaaatcagatcatggaggatgaggataagagataaaaaaaaagttacagcccatcacactcctttgttgcccatgcctgatcctatttatttttttcttctttgacataccctgtaagcataaaggaaagagccaggtcctgtttgataccctgccataaggtttaactttgtgaaaccaacaatgtaacttgttcattttactgcaattaactcttctaaagtggctgctwcttccaaagtcctgacatgagtaacatcactgtcacaaagcaratctgtgacttgttggagctggctgatggtttgggagattgtgactatggtcattattgcacgaagagcaaatataaatcccatgaaagatgttttaagattggactgtttcgttttgcctttctgtatgtatactacccacagctggtttaaaccaccagaatgaaagttgagaaaggacataaccaatctatataaacaaaacaagggagtaaacacagggaggcccaaccgtgacagagggagacaagctcgtaaaactaactgaagaagttgtggcaggacaaatgctttaactgg

SEQ ID NO: 92170 - DNA, 600 bp, Chicken  19866894404757_1
tggaaactatatggtggacaagaaggtgcttgggagcagccagcatggattcaaacagaggaggtcacgaccaacttcatacagttctgtggtgattagcttggtaggtgaggacagagcagtatattgaccacctggtctttagtaaggctttcaaccccgtctcccacgagatccttttagacaagctgttgatgtatgggctggataggcagacagtgaagcgaacggaaagcccagagggcaatgatcagtggcaaaaatctaattggaggccagcaacaggggatgagactgggyctggtcggtaccttcactaatggtctgggtgatggggaagcgtgacagcactgggagtggtggtgtgcccccatacaggggaacttagggaggctgcagaaatgaagttcagcaagtgcaaactcctgcccctggggaggagcaaccccaagtaccagcacatgccggggtctggctgctgggcagagaaagactggggtgtcccsgtgggaaccaagctgaacaggagccagcactgcgccctggctgcaaggaacgctaacgctaccctggccttctgtatgcaaagcactggcagcg

SEQ ID NO: 92171 - DNA, 462 bp, Chicken  19866894404757_2
gataggcagacagtgaagcgaacggaaagcccagagggcaatgatcagtggcaaaaatctaattggaggccagcaacaggggatgagactgggyctggtcggtaccttcactaatggtctgggtgatggggaagcgtgacagcactgggagtggtggtgtgcccccatacaggggaacttagggaggctgcagaaatgaagttcagcaagtgcaaactcctgcccctggggaggagcaaccccaagtaccagcacatgccggggtctggctgctgggcagagaaagactggggtgtcccsgtgggaaccaagctgaacaggagccagcactgcgccctggctgcaaggaacgctaacgctaccctggccttctgtatgcaaagcactggcagcggccggagggaggcgaaccgcctcctccctcccaggccctctattgcacatgaccctctccagccaggc

SEQ ID NO: 92172 - DNA, 599 bp, Chicken  19866894404761_1
  misc_feature (1)..(66): n is any nucleotide
nnnnnnnnnnnnnnnnnnnnnnnnnnnnnnnnnnnnnnnnnnnnnnnnnnnnnnnnnnnnnnnnnntgcagcgtgagatgcattcaggaacccactgcttcagaaagaagactactatggagattgctctgcaaggcttttccggcagtagcatcggggccactttcattttttaatgacatctgtgaaagttgggcagaacacgtttaataaataagagctttcagtaggaaaaaaaaggggcattttgagtctttaggataagtgacactggcaacacaaaaaaaagtttggtagaayrgcttcctattaaagaatgcttatggaacgtcagttttacctgagtaaaaatctaatctgtaaattagttcactactaggtgagtagtgtgctattgcatccaggttttagattcattatgacatggtagagagttgctgcattaacatgtactatagaaagtattatataaatatagtgcagtgtataccaactgttaatgtatagtatagaaagaagtccaaaataattgtcagttctctgctacaaacatcagtttatatggaaaacactggattaatcctgttgcaggattgaaa

SEQ ID NO: 92173 - DNA, 599 bp, Chicken  19866894404761_2
  misc_feature (1)..(65): n is any nucleotide
nnnnnnnnnnnnnnnnnnnnnnnnnnnnnnnnnnnnnnnnnnnnnnnnnnnnnnnnnnnnnnnnntgcagcgtgagatgcattcaggaacccactgcttcagaaagaagactactatggagattgctctgcaaggcttttccggcagtagcatcggggccactttcattttttaatgacatctgtgaaagttgggcagaacacgtttaataaataagagctttcagtaggaaaaaaaaggggcattttgagtctttaggataagtgacactggcaacacaaaaaaaagtttggtagaayrgcttcctattaaagaatgcttatggaacgtcagttttacctgagtaaaaatctaatctgtaaattagttcactactaggtgagtagtgtgctattgcatccaggttttagattcattatgacatggtagagagttgctgcattaacatgtactatagaaagtattatataaatatagtgcagtgtataccaactgttaatgtatagtatagaaagaagtccaaaataattgtcagttctctgctacaaacatcagtttatatggaaaacactggattaatcctgttgcaggattgaaat

SEQ ID NO: 92174 - DNA, 600 bp, Chicken  19866894404761_3
aagaatgcttatggaacgtcagttttacctgagtaaaaatctaatctgtaaattagttcactactaggtgagtagtgtgctattgcatccaggttttagattcattatgacatggtagagagttgctgcattaacatgtactatagaaagtattatataaatatagtgcagtgtataccaactgttaatgtatagtatagaaagaagtccaaaataattgtcagttctctgctacaaacatcagtttatatggaaaacactggattaatcctgttgcaggattgaaatatacttattaargatattttgcatgatatgcctttaaatcaggagaaattactcttgttttgctagatttctctactgtatatttaagttctaagaagtttgcagtctagaagtataatggacatttaagtatacttatttcccactcctcatgttttctaaggatgttgtggtgatgacgggagccttatggaagtagatggatctcatccaggcagaactttgggtctcaccactgcagagttaaaacatctactgcagagcaaagaggaaaccccagaaaacctactgcttgatctggaaaaacatgtg

SEQ ID NO: 92175 - DNA, 600 bp, Chicken  19866894404775_1
ctactgaggtttgtttttctcccttaaatgggcaccactttctaacatccacaaatacagtttttctgtaaagaaaatatgacaatgcttctttctaagattttgcagcacttttttacgagccttgcacttctcatttagttgaagcgtcagacacaattttagtttaccagccagactttttcattttaacttttaaaaaatatatatatattttagaaaggaaataaatgagatttgatcacaaaatataacagatttaattaaattacatgatgaacatatgtatttatctcaaamtgttgtaattttttttagtttgcactatactaatgagttagtattatactaatcagagtaatttaagtgtgaaatgatttatgtaacagcatctttgattctacttgagaagatttcaagtatacttattgttgtggaaccttcctatcaggaaatcagtagcaagttctatcatctcagtgaatgcacatagatagaaacaacctgctttagcagggatatattatattttatctgaaaacaaaaattaactattggaggtactggtcatgatttcctagaaagcttattttatttttg

SEQ ID NO: 92176 - DNA, 600 bp, Chicken  19866894404775_2
tcatcgtgttgttttgcagactaacactagttataagcatatgttaataaatgtcagaatggagtccaatgagaaaatatggatctctcattttcctggtaaatctctgtgcagtatggaaaggaaagtcaatctccagccatgacctgatactctgtgaacaagaatgttaatttattaaaagggtaaaaaaatacacactgtgtggtgcacatgtgacagtacaatacattaaggaatatgttcaaaatttcccaaaagttgatctgttctatatgaaaaatgtgagaatatgttggytggattctctaggaaaagtaagtacaggttttaacttcaattcagaggcccgctctctgcaaaggaaggtatgtatatgacacatagtcatagtgtcataaagtctttacagtttatttattcctggaatattggttgagttatcaccatttggcacatttagaaaacttagttttctccaagtgctgattctgttctgtcccttccttttcactaacacaaatgaggatatgtactgactgcttgtgatacattgtgatgttaagagctgtcacacccactgtactgtaatgtcttaca

SEQ ID NO: 92177 - DNA, 599 bp, Chicken  19866894404776_1
  misc_feature (1)..(125): n is any nucleotide
nnnnnnnnnnnnnnnnnnnnnnnnnnnnnnnnnnnnnnnnnnnnnnnnnnnnnnnnnnnnnnnnnnnnnnnnnnnnnnnnnnnnnnnnnnnnnnnnnnnnnnnnnnnnnnnnnnnnnnnnnnnnntagtgatgaagcagtggaggaatgttgcaagaatacatgcagtggtaaattgtgaaaggagaaaggaagtatacatactaatgaagacagagccagcaggaaagcatcccaatttcagccacactacagcagtaaaactacagatggactttcttatcaaggctgctggaaaaakacacaatttttctctctgwttttttgttgggtgaggawgtcttcagtctgtccattaacttcaactactccttccagctcccttcaacragatgtcagaatctacagagattccacaattctgagaaataattctagttccatgtkagttatacagggtggtatcatctgaaaaaatgcactgactataacatctgcaatggtggagcatcagttacagaagtgattcactcagattttcccaccctcagccaatccttcatgtcatcttattccacctgctgtctaagccggaagtgc

SEQ ID NO: 92178 - DNA, 599 bp, Chicken  19866894404776_2
  misc_feature (1)..(106): n is any nucleotide
nnnnnnnnnnnnnnnnnnnnnnnnnnnnnnnnnnnnnnnnnnnnnnnnnnnnnnnnnnnnnnnnnnnnnnnnnnnnnnnnnnnnnnnnnnnnnnnnnnnnnnnnnntagtgatgaagcagtggaggaatgttgcaagaatacatgcagtggtaaattgtgaaaggagaaaggaagtatacatactaatgaagacagagccagcaggaaagcatcccaatttcagccacactacagcagtaaaactacagatggactttcttatcaaggctgctggaaaaakacacaatttttctctctgwttttttgttgggtgaggawgtcttcagtctgtccattaacttcaactactccttccagctcccttcaacragatgtcagaatctacagagattccacaattctgagaaataattctagttccatgtkagttatacagggtggtatcatctgaaaaaatgcactgactataacatctgcaatggtggagcatcagttacagaagtgattcactcagattttcccaccctcagccaatccttcatgtcatcttattccacctgctgtctaagccggaagtgctgctgctgtgcacaggcaa

SEQ ID NO: 92179 - DNA, 599 bp, Chicken  19866894404776_3
  misc_feature (1)..(87): n is any nucleotide
nnnnnnnnnnnnnnnnnnnnnnnnnnnnnnnnnnnnnnnnnnnnnnnnnnnnnnnnnnnnnnnnnnnnnnnnnnnnnnnnnnnnnnntagtgatgaagcagtggaggaatgttgcaagaatacatgcagtggtaaattgtgaaaggagaaaggaagtatacatactaatgaagacagagccagcaggaaagcatcccaatttcagccacactacagcagtaaaactacagatggactttcttatcaaggctgctggaaaaakacacaatttttctctctgwttttttgttgggtgaggawgtcttcagtctgtccattaacttcaactactccttccagctcccttcaacragatgtcagaatctacagagattccacaattctgagaaataattctagttccatgtkagttatacagggtggtatcatctgaaaaaatgcactgactataacatctgcaatggtggagcatcagttacagaagtgattcactcagattttcccaccctcagccaatccttcatgtcatcttattccacctgctgtctaagccggaagtgctgctgctgtgcacaggcaaggccagcaaaagtaggaat

SEQ ID NO: 92180 - DNA, 599 bp, Chicken  19866894404776_4
  misc_feature (1)..(36): n is any nucleotide
nnnnnnnnnnnnnnnnnnnnnnnnnnnnnnnnnnnntagtgatgaagcagtggaggaatgttgcaagaatacatgcagtggtaaattgtgaaaggagaaaggaagtatacatactaatgaagacagagccagcaggaaagcatcccaatttcagccacactacagcagtaaaactacagatggactttcttatcaaggctgctggaaaaakacacaatttttctctctgwttttttgttgggtgaggawgtcttcagtctgtccattaacttcaactactccttccagctcccttcaacragatgtcagaatctacagagattccacaattctgagaaataattctagttccatgtkagttatacagggtggtatcatctgaaaaaatgcactgactataacatctgcaatggtggagcatcagttacagaagtgattcactcagattttcccaccctcagccaatccttcatgtcatcttattccacctgctgtctaagccggaagtgctgctgctgtgcacaggcaaggccagcaaaagtaggaattttaaacagatcttagagattattcacaaaaaacagagtattaaaatgtgt

SEQ ID NO: 92181 - DNA, 600 bp, Chicken  19866894404776_5
atgttgcaagaatacatgcagtggtaaattgtgaaaggagaaaggaagtatacatactaatgaagacagagccagcaggaaagcatcccaatttcagccacactacagcagtaaaactacagatggactttcttatcaaggctgctggaaaaakacacaatttttctctctgwttttttgttgggtgaggawgtcttcagtctgtccattaacttcaactactccttccagctcccttcaacragatgtcagaatctacagagattccacaattctgagaaataattctagttccatgtkagttatacagggtggtatcatctgaaaaaatgcactgactataacatctgcaatggtggagcatcagttacagaagtgattcactcagattttcccaccctcagccaatccttcatgtcatcttattccacctgctgtctaagccggaagtgctgctgctgtgcacaggcaaggccagcaaaagtaggaattttaaacagatcttagagattattcacaaaaaacagagtattaaaatgtgtaacatacagtgccagaaagctaaattattctaagttacatatataaattaatgcaaca

SEQ ID NO: 92182 - DNA, 599 bp, Chicken  19866894404778_1
  misc_feature (1)..(55): n is any nucleotide
nnnnnnnnnnnnnnnnnnnnnnnnnnnnnnnnnnnnnnnnnnnnnnnnnnnnnnntaacctacctgttacaattatttcttctgaaaagatggggaaatacgttcagagtcagaaaccacttaaactctgggagtccataaactacaaagcctactgtgcagagatgtgctaaatactgtcagaccagtactaatctctgtttaaagttctggttgttgcagtagtgtgcgttttcacctactgataaaaacaatattactttaggagcctttccgataaatacaatgctgaagttattyggtgcaacataaacatttagctctgcagtttagtctgtaaacgtttaaaaggttggaatgtttatccaaaatggccagacttccaaaagtgcaaaactgtttgcagtgctaacaaggagtagaaaatgatgagggttacacatttgaaagagaagaagacaaaatctgttttccataaactgttatcttcaggttttatttcacttctgagcttccttggaaatggtttgcctgctttgagttgatttcagaaagaattggtggggattaggattgctcctggaatcttaatgtaaacc

SEQ ID NO: 92183 - DNA, 600 bp, Chicken  19866894404783_1
aggaacacactgatgctggagccagctttttgcaattctgcacgaaagataatatctatacagatacagagtatgtagagagccttggaacgcctcacctgctacaccaggtaagcagtgactgaacacacatacagtatacttttaaagaattctcaaactatgcatttatgatataggacgggactccagcaaacctttgcacttaacttatccccctcaacaccatccctgaaccattaataccaacagtgagatgctgaaggacaaaagcacgcaatttacctccagtcaggctgstgcaaatctggagcaactcagctgaggccaacgtaactgacatcagaatttggtccaggctcaacaaacggagccaaattaccacgctttccctacatgcctgcaatattaaaaaagcacatttttggttttgttgttttgatggttttaattcttgagcgcacatttcagccggtctaaaagtacattctgtaattgtgacaaaaatgccaactgacgtaaagaagttccacagatttcataatattttgcttggaaaggggtgcagaaacacatgcattttcagtgtgcctcgactct

SEQ ID NO: 92184 - DNA, 599 bp, Chicken  19866894404785_1
  misc_feature (1)..(178): n is any nucleotide
nnnnnnnnnnnnnnnnnnnnnnnnnnnnnnnnnnnnnnnnnnnnnnnnnnnnnnnnnnnnnnnnnnnnnnnnnnnnnnnnnnnnnnnnnnnnnnnnnnnnnnnnnnnnnnnnnnnnnnnnnnnnnnnnnnnnnnnnnnnnnnnnnnnnnnnnnnnnnnnnnnnnnnnnnnnnnnnnnntatggaagttggctcccgttcctggcagactgctgcaccgactgatctgagcctctgccaagtgcaaacacaaggagggctctctgaaacaaagtgataatatccctgcagctcatcacccrgagggaccctggcgctcccaaggctctgtgctcggctgcgtgctgtggttcggaggatgagcccggcataacttgcaacgcgctcagaccttcccctcagatggccacgatgagacaccttgytgsctcacggcaagctggggctttgctccctctgctccccatactgctcacacggagtgtcatgctacatcccacagtgtgggtttcccgagcacggagcccactgcaaagctgctctggttggtacacagagctcatccccagcaccaccgagaggggcttggaaagcagagaga

SEQ ID NO: 92185 - DNA, 599 bp, Chicken  19866894404785_2
  misc_feature (1)..(55): n is any nucleotide
nnnnnnnnnnnnnnnnnnnnnnnnnnnnnnnnnnnnnnnnnnnnnnnnnnnnnnntatggaagttggctcccgttcctggcagactgctgcaccgactgatctgagcctctgccaagtgcaaacacaaggagggctctctgaaacaaagtgataatatccctgcagctcatcacccrgagggaccctggcgctcccaaggctctgtgctcggctgcgtgctgtggttcggaggatgagcccggcataacttgcaacgcgctcagaccttcccctcagatggccacgatgagacaccttgytgsctcacggcaagctggggctttgctccctctgctccccatactgctcacacggagtgtcatgctacatcccacagtgtgggtttcccgagcacggagcccactgcaaagctgctctggttggtacacagagctcatccccagcaccaccgagaggggcttggaaagcagagagagcagaagaagccatttgctgagaatatgcaggcaaacgaactccatccatcatcactggcaccattgatttagtcaatctggttgactcgttagcaggcacaatgccagccaaacacatggcc

SEQ ID NO: 92186 - DNA, 599 bp, Chicken  19866894404785_3
  misc_feature (1)..(52): n is any nucleotide
nnnnnnnnnnnnnnnnnnnnnnnnnnnnnnnnnnnnnnnnnnnnnnnnnnnntatggaagttggctcccgttcctggcagactgctgcaccgactgatctgagcctctgccaagtgcaaacacaaggagggctctctgaaacaaagtgataatatccctgcagctcatcacccrgagggaccctggcgctcccaaggctctgtgctcggctgcgtgctgtggttcggaggatgagcccggcataacttgcaacgcgctcagaccttcccctcagatggccacgatgagacaccttgytgsctcacggcaagctggggctttgctccctctgctccccatactgctcacacggagtgtcatgctacatcccacagtgtgggtttcccgagcacggagcccactgcaaagctgctctggttggtacacagagctcatccccagcaccaccgagaggggcttggaaagcagagagagcagaagaagccatttgctgagaatatgcaggcaaacgaactccatccatcatcactggcaccattgatttagtcaatctggttgactcgttagcaggcacaatgccagccaaacacatggcctgg

SEQ ID NO: 92187 - DNA, 599 bp, Chicken  19866894404791_1
  misc_feature (1)..(60): n is any nucleotide
nnnnnnnnnnnnnnnnnnnnnnnnnnnnnnnnnnnnnnnnnnnnnnnnnnnnnnnnnnnngaggtaacgtgaccctttctgacatatgacatgacatgagtaaatgaggtttacttttccgcattttctttggtgagaaaagcaaatcagggggactgacttatttcgaaccagtgtttcatgagctttatgtgttgaggagtttgtttgtatttaataggtaattttacgatggcaacaaggtctgtaatgttccctggccctttggggagcttcaacagcctcagaattatttttttkggaattctgctcagacaaggtctctccttatcacaaaagtggtacaccaggggaggaaagttggcaacaacaatctgcatggctgcaggagcctgtaagcagccttctgcatatcctcagtcctgagccataaagcactrcagcagtaagggctgaaagagtgcaaaaaaagaccagctggtctcctggtagcgctgcacgctccatgcctggttgcagttttgatgctttccatctaagaagtatccaggacatgaagtaagggatcttcagtaagatgggaggttagaactacatga

SEQ ID NO: 92188 - DNA, 600 bp, Chicken  19866894404791_2
agcaaatcagggggactgacttatttcgaaccagtgtttcatgagctttatgtgttgaggagtttgtttgtatttaataggtaattttacgatggcaacaaggtctgtaatgttccctggccctttggggagcttcaacagcctcagaattatttttttkggaattctgctcagacaaggtctctccttatcacaaaagtggtacaccaggggaggaaagttggcaacaacaatctgcatggctgcaggagcctgtaagcagccttctgcatatcctcagtcctgagccataaagcactrcagcagtaagggctgaaagagtgcaaaaaaagaccagctggtctcctggtagcgctgcacgctccatgcctggttgcagttttgatgctttccatctaagaagtatccaggacatgaagtaagggatcttcagtaagatgggaggttagaactacatgatcttttgtggtcccttccaacttaagccattctatgattctaagcactcaactcacactccacggtaggctgcagtctcccatccacctaaaagagaaaggaacatggaattgaaacaaatacccagagcagtgagaaacg

SEQ ID NO: 92189 - DNA, 600 bp, Chicken  19866894404798_1
tcactttttaagacttcctctcccagtttctgagcaatgcttgtacctcatggtctatcaaagaatcatagtatcaccaaggttggaaaagacctctaagatcatctagtccaaccatgcatctaccaaaagtatttcccactaaaccatgatcctcagtataacatctaaacatttcttaatctgttgtctactccctgacagttgtccatagacaattcaaatgtttaataaaatgctttagaagtgtgatcactaagagtgtaaaagcagacattaaactgttaagagatgagcagyscatgtgcatcatgcaatacctacaatccctgttgtacatttgctcctatgttctttgcctgaaaagatgaatatgtagctaggaaaatgtgttggctttgtaggactttctgaagccaaaatccccattyttttcttattcagaatgtaatataataaatagagatgaaagcgtgagagtggtatgaggtttaaatgaaaaactttgaagttcatttctttgtgtccacctagactaaccttcagctatactgacctttcaaaaagtggtggccttttcccactagagcagagaccctc

SEQ ID NO: 92190 - DNA, 600 bp, Chicken  19866894404798_2
cactttttaagacttcctctcccagtttctgagcaatgcttgtacctcatggtctatcaaagaatcatagtatcaccaaggttggaaaagacctctaagatcatctagtccaaccatgcatctaccaaaagtatttcccactaaaccatgatcctcagtataacatctaaacatttcttaatctgttgtctactccctgacagttgtccatagacaattcaaatgtttaataaaatgctttagaagtgtgatcactaagagtgtaaaagcagacattaaactgttaagagatgagcagyscatgtgcatcatgcaatacctacaatccctgttgtacatttgctcctatgttctttgcctgaaaagatgaatatgtagctaggaaaatgtgttggctttgtaggactttctgaagccaaaatccccattyttttcttattcagaatgtaatataataaatagagatgaaagcgtgagagtggtatgaggtttaaatgaaaaactttgaagttcatttctttgtgtccacctagactaaccttcagctatactgacctttcaaaaagtggtggccttttcccactagagcagagaccctca

SEQ ID NO: 92191 - DNA, 600 bp, Chicken  19866894404798_3
gtatttcccactaaaccatgatcctcagtataacatctaaacatttcttaatctgttgtctactccctgacagttgtccatagacaattcaaatgtttaataaaatgctttagaagtgtgatcactaagagtgtaaaagcagacattaaactgttaagagatgagcagyscatgtgcatcatgcaatacctacaatccctgttgtacatttgctcctatgttctttgcctgaaaagatgaatatgtagctaggaaaatgtgttggctttgtaggactttctgaagccaaaatccccattyttttcttattcagaatgtaatataataaatagagatgaaagcgtgagagtggtatgaggtttaaatgaaaaactttgaagttcatttctttgtgtccacctagactaaccttcagctatactgacctttcaaaaagtggtggccttttcccactagagcagagaccctcacatgaggcctcttagcagctccagagtgggatgggctctgcactgattccttgcatggcaagagcttgatgctattcttctcatgggtcagcctgctgccaaaaggccttayggtctcctgccttgctca

SEQ ID NO: 92192 - DNA, 600 bp, Chicken  19866894404798_4
aagccaaaatccccattyttttcttattcagaatgtaatataataaatagagatgaaagcgtgagagtggtatgaggtttaaatgaaaaactttgaagttcatttctttgtgtccacctagactaaccttcagctatactgacctttcaaaaagtggtggccttttcccactagagcagagaccctcacatgaggcctcttagcagctccagagtgggatgggctctgcactgattccttgcatggcaagagcttgatgctattcttctcatgggtcagcctgctgccaaaaggccttayggtctcctgccttgctcatgtactcctattgcacccctccaaggattagtgccccacatgccccctctggagccaccatgttttttggcacttgcaggagtgggaaagagttgtactgcagcaagacaggagcagcccaggtttgtcacaatgccccatgtttaatggagctgagagggcactgagtttcaaaagcaaaaatttcatgtgaagtggtaaagcagtgtgaaatactgctatgggaacagctggtttctgtttgtttaatttactacaacataaccagaaacaacttgcaaa

SEQ ID NO: 92193 - DNA, 600 bp, Chicken  19866894404799_1
tatggcaagggaagggggtttttctcttctgtacagcacttttctgatcacatctaattactgcatccagttttaaacctaccagtacaaggcactgatcagctggcttgagatcagcaatggtcagctgctgaagcctcttccctatgagaagaggaagcttggcttcttcagcttgcagaaatgtaagattttggagacctaatagaatctttcccatagcttattgaaatgctggcagcaggtattttatggtgatgcattgtatgagaataagagatagtggatgggaaagcaggmgaggttcagacttgagataaggaaaaactatgtcatgatgaggctggtcaagcactggaagaggcctcccagtaagactgtgcagccttcatccttgtaggttttcaaggtacaagtggttaaactcctgagcaacctgatctgatctcaaggctgactctgctttgtgcagtgcatttgacaaaattacttctaagctctttgtgatcccataatttgggtgtagagagtgaaaataaaatgcttggccgcacttaacaaatttattctttataatgcaagtggaaacagttacagtca

SEQ ID NO: 92194 - DNA, 599 bp, Chicken  19866894404803_1
  misc_feature (1)..(114): n is any nucleotide
nnnnnnnnnnnnnnnnnnnnnnnnnnnnnnnnnnnnnnnnnnnnnnnnnnnnnnnnnnnnnnnnnnnnnnnnnnnnnnnnnnnnnnnnnnnnnnnnnnnnnnnnnnnnnnnnnnacgaaatataatttattttcagactcacggagaatctagattctacacggcaatgtagattactgctgaaagcgtacattgaactgctttaacacacttagaaaatgcctttacgggtcttgccagattgctttccacatttctgttgctacataagagactcagactttctcacccacattttaygtaaaaatattttatatttttatttttatgtaaaacatattttatgtttctactgattgacattgagcctctgtcttgatctgtgagctcttgtactagttccacttggcaaaaaggaccttgggtaaagacacagggttgctgtgcagctagaaatagtccatcaggttgggccctccctcaaaggagctatgttggaaggtacacattccctactgcagcaatacactcatttctttccatcccaaaactaaacccatggacaaaaagagttgagccgtctcctttctcactgctgg

SEQ ID NO: 92195 - DNA, 600 bp, Chicken  19866894404803_2
ttatatttttatttttatgtaaaacatattttatgtttctactgattgacattgagcctctgtcttgatctgtgagctcttgtactagttccacttggcaaaaaggaccttgggtaaagacacagggttgctgtgcagctagaaatagtccatcaggttgggccctccctcaaaggagctatgttggaaggtacacattccctactgcagcaatacactcatttctttccatcccaaaactaaacccatggacaaaaagagttgagccgtctcctttctcactgctggagcgcaaagggrcaacagcaggatgaggaacaaacatgacaaacacatttaattacactcacaacaccacccatgtccttatttctttcccaacctttgcttctaggatcattttgctgtgacctaaatatgratgctctagattcatattgcaatttctggcacactgcatttcaaccacttcttttccctgcaacacactgggcatctcagtttacttctaatgcttaaactcagtagaatacttgtcagcaagtgtagctgtcatagcttatagtagatctgtcaatagaaaatgaaatccttttacta

SEQ ID NO: 92196 - DNA, 600 bp, Chicken  19866894404803_3
acagggttgctgtgcagctagaaatagtccatcaggttgggccctccctcaaaggagctatgttggaaggtacacattccctactgcagcaatacactcatttctttccatcccaaaactaaacccatggacaaaaagagttgagccgtctcctttctcactgctggagcgcaaagggrcaacagcaggatgaggaacaaacatgacaaacacatttaattacactcacaacaccacccatgtccttatttctttcccaacctttgcttctaggatcattttgctgtgacctaaatatgratgctctagattcatattgcaatttctggcacactgcatttcaaccacttcttttccctgcaacacactgggcatctcagtttacttctaatgcttaaactcagtagaatacttgtcagcaagtgtagctgtcatagcttatagtagatctgtcaatagaaaatgaaatccttttactatttctgccaaattaggaaaactcttctttatttaggtagtaaagaactatgactgcaaataaaggcaccagaagtcctcattccaaaataaatgtatgttattagggtgaatggcacattg

SEQ ID NO: 92197 - DNA, 582 bp, Chicken  19866894404807_1
ctgtgaaaatgcatcacatcaaggcaacttacagacacctaaagcttgtgatgaattgtgatgactggtggcgcctttgaatttaccagaaatgtagtgatgaaagtaaattaggtagcagctgtaagaaaggaaagtaagactacagagaggatctgtagacctaagaatgtattttgtttccttccaaaaccacacatcctagtgagtgaagtaaagagaacatcttctagggcatctttcagacattcagtaaaacagcaataagacgattcccaagattcaccacagtaataaaaytgtacagtgatttattttaaatctagaaatattttacatttttacattagtgtgcagttcatgatgtctcaaaacacagagtgcagatacacatataaaagtacaatgtggggctaaccacaggtctgagcaaagttaccttgttaaggcattaaacccccaccttacattttaagaagtcacatgtaattacattcaaaacttttacgcaattcaactaatgtttacttttaattaaatctggactgataaaaacgcagattaccttcattttggtctgat

SEQ ID NO: 92198 - DNA, 562 bp, Chicken  19866894404812_1
gccctctgatcatcttagtggccctccgctggactcagaattccaagggctccatgattttcttgtattcggggccccacgcctggacacagtactccacctgggtcctcacaagagctaagtagatggggacaatcacctctctctctctctcctggccacccctcttttaacgtagcccaggacatacttggccttctgggctgccagcacacactgctggccttcttgaacctcattgtccacttctccagcctgcccaggtccctctgaatggcttcccttccctccagtgtattractgcaccgctcagcttggtgtcacctgcaaacttgctgagggtgcactggattccattgtctatgtcattgatgaaggtgttgaagagcatcggtcccaagaccaagccctgggggacgcccgcttgtggctggcctccaccctgacgcagaaccattgatcacagccctttggcacagtgattaacttcttcagttaactacactacgtctgtacactgggttatgttttgtgctatttgcatcttgcatttaaaagcta

SEQ ID NO: 92199 - DNA, 600 bp, Chicken  19866894404813_1
atttttacaagcgaggcatgcaggctcgtgttcatggctggtgaaaatgcatagctaatggtggtgactatgttgaaaaatagcgttttgtaactgagaagttccttaaacacctgttattgtgctctttatacctgttgcagtttccatggaaataaataggagacatgattatcagagcaacctatataacttgcatacaacccaggtactcaagtactcaggtttatgagggggatccgtttttttttttaacaatgcggtatgtgtttatagtgccttgcacataagagaaagaastaagaattagctgtggtctggaacttgctattgaacaatgtcaaggttagtttcaaggcattttattttcaaaatagttttcttttcaatcctcttagaattttgaattcccgaagtatatgaagccagtaatatctgcacaatccagatccttcatacgacacttttcatttacttctcatttaccttttttctgtagatgtccattaataattgtttttaatagcactaacacagagcaagcacttaccttgtttgttattgtttttgatagaattggcatcctcttttgttccataa

SEQ ID NO: 92200 - DNA, 599 bp, Chicken  19866894404821_1
  misc_feature (1)..(19): n is any nucleotide
nnnnnnnnnnnnnnnnnnntgcagtgcttctatgggcgtcttccagagcagagctcacacggagcgctgccctcaggtgcaggcagctccacggagaggcacgcaaggtctgctccggtgccagaagcacacagacacgttcaggtgtgtggcactccagacagagctctccgttttggtacgctgacatctctcggagctgtttcagctttggctgcatccaagctcgttaacaagaaacgttaaatacccaagaaaaatggcacgcagggagagctgggcagatgctgcagggttcgkcaggctgggctccatgggatagggggggccaaagggacacagcccagcgatgcagagatggagcactggggtcactgctctgacatgggctgtgctccatgggcaccgccgctgtgtgggactgcactgccaaagagttacagcacaataaatgctcagcaccacgagcgctctgaaccccacatctgtcatcatagcaacgctgtaactctgctgttcagatatgcagtctctttgagcgctggataaggttcttctattcggtatcctccatcctctccgtaactcagcacccgcgg

SEQ ID NO: 92201 - DNA, 599 bp, Chicken  19866894404822_1
  misc_feature (1)..(129): n is any nucleotide
nnnnnnnnnnnnnnnnnnnnnnnnnnnnnnnnnnnnnnnnnnnnnnnnnnnnnnnnnnnnnnnnnnnnnnnnnnnnnnnnnnnnnnnnnnnnnnnnnnnnnnnnnnnnnnnnnnnnnnnnnnnnnnnnnttaatatgagatttcatgaaaatgagtacagttaagattttcaccggcattcccagatgtatcgttatttatggaataattatgctgctggtagaaaaaaagatttgctgtaagtggtcagtatcctaagaaaggctgagctaaactatttccgttttgtaccctaaaaawgtttttctcctgtgtgaatgcatgcaaataataagcattcagattgctgtcgttcctgcgttccgtgcttgacaggcagggaaaaacgtgtctgctccaagctgtcgatttcctaacttttttccagaacaattacatcatcgtgtttattactaactttttcttttgttgcacttaaaaggctgttagccacattgcatgtaaaatgagtgagacctggaatctctcaggattagtcgttctctttattctttgctccatattgaaaatcgttcctgtcagctgatgccctgcgagct

SEQ ID NO: 92202 - DNA, 599 bp, Chicken  19866894404837_1
  misc_feature (1)..(79): n is any nucleotide
nnnnnnnnnnnnnnnnnnnnnnnnnnnnnnnnnnnnnnnnnnnnnnnnnnnnnnnnnnnnnnnnnnnnnnnnnnnnnnnaacgcagcatcatttcggcctttgctgttacctgaaagcttaaatggcacaacttatttccttccccaaaacacataagagacctcagagctgcccatttccgagacagaacagcgaggctgaccgacttctgatccatgccctatggttaacagtgccaaaacagagttacttctattaatgccaaaagaaatctctagaaatgctctatgaagtgttaytattttgtgttaatgtgcttttttaatagaaggaaagcatcgccctgaagtttttaattgcaaaaagaattttttttttcagttttttttacagcaatttcaacttctctcaaaatacttatttgaattcctgaaaccactctgaatgtggaagtcatggaaataccacttcattaaaccaagaacaaccactgtatgtatgtagcagggataaatgttttgcagctgtactttcatttgtccaatgattatccatcatttgttgtaatttttttacttcaccgagtttgtattttttg

SEQ ID NO: 92203 - DNA, 600 bp, Chicken  19866894404842_1
acaagcagtacatcgctttgtgaattagctatattttcaggtcttttcagagcttaaaaaagtaattgagtaacatccacattaataaaaaaaaagcttatatcaaatatgctttggggtatgtggatttctgttttgattgcttgtcttgggagcttaaaagaaaaaccagctagagtgtgttcagcaggcataccattcagtgtttgcatgagatattttataaaggtgaaagcataaggaaactttatctgaatttgtacttcagaacttaaatggctgaaaatctggaagtaaatrgtagatctgtggttcaaagcagaaaaacattgttttgtgagaagtaaatctcatcttagaagactccaacagtatttgttcccagaatcattttaataccatgcagaacatgcttcagtatgtaattatctttgatagatgaaaagaaacactttctcctgaggcttagtacatctgctggtttacagattatatgggactgtgttgtctcctttcgtgtattgtcactgattgtagatgtaccagaaaatagagctggaataggatatcaagagattgtactgattgctgttagccttc

SEQ ID NO: 92204 - DNA, 599 bp, Chicken  19866894404851_1
  misc_feature (1)..(80): n is any nucleotide
nnnnnnnnnnnnnnnnnnnnnnnnnnnnnnnnnnnnnnnnnnnnnnnnnnnnnnnnnnnnnnnnnnnnnnnnnnnnnnnnttctgaatctcaggcagtggcaagtgacttctgcctgaaaaaaaagcacaaaaaacttctaatggacaattaagaaaagctgtcattgaaaagtttcctcttggcttgcattagtaagagttcagtttattctctaaagcatgagaagtttacatgctctcccaatagtgcattttaaaattccttattaagcccattacaagatcattattgatcaacrtatattttaattacataaggatgacattaggctttgcagaattatttgttgtggaaagatgttttttcccttaatatctttccacagcccctcgaagaatttgttgagcaacccttgagattagaggctgttctggacttgrtcctagaaaacaggccaagtatgataaataaaataaaacatctggaggtctaggcatcagaatatcatcagatatccactggttctaagggaatgttatgtatgaaaggtaataatctgaagtattgggcttttcataaaacataactctctgaaag

SEQ ID NO: 92205 - DNA, 600 bp, Chicken  19866894404851_2
tggacaattaagaaaagctgtcattgaaaagtttcctcttggcttgcattagtaagagttcagtttattctctaaagcatgagaagtttacatgctctcccaatagtgcattttaaaattccttattaagcccattacaagatcattattgatcaacrtatattttaattacataaggatgacattaggctttgcagaattatttgttgtggaaagatgttttttcccttaatatctttccacagcccctcgaagaatttgttgagcaacccttgagattagaggctgttctggacttgrtcctagaaaacaggccaagtatgataaataaaataaaacatctggaggtctaggcatcagaatatcatcagatatccactggttctaagggaatgttatgtatgaaaggtaataatctgaagtattgggcttttcataaaacataactctctgaaagaatgtagaacgagacagaaagtaatgttgatcagagtcgattgtctagaaaatttactatggaaaatcatgaggactgtaatgaacagttggatcgctttaacaagtgcctgtgccaataaaatctaaacatatatttaaaaa

SEQ ID NO: 92206 - DNA, 600 bp, Chicken  19866894404851_3
actggttctaagggaatgttatgtatgaaaggtaataatctgaagtattgggcttttcataaaacataactctctgaaagaatgtagaacgagacagaaagtaatgttgatcagagtcgattgtctagaaaatttactatggaaaatcatgaggactgtaatgaacagttggatcgctttaacaagtgcctgtgccaataaaatctaaacatatatttaaaaaacaaagataacagaagtcaatcttgctaagcagagatgcaaggaacaatgtgaaggataaacactgtttaaaagggraaaaaaatggcaaataaggttctaattagtgggagggactgcaaagattacacaaagaagataaaagcaaggaaacctaattggaaacacagcaatgtagtatcaaacaatccaaagtattttatctagcacaaatgagttttcagctcttttcataggcaarttgtgagtaaaaaggttgatactcttgaggytaagagayaggaagaaagaaaagaaaaaaatagtagttacaactaaaatgcctgtttcccaaatcaagtaaaagtcatgtgcaatctatccaccatggtgaagact

SEQ ID NO: 92207 - DNA, 560 bp, Chicken  19866894404851_4
aacagttggatcgctttaacaagtgcctgtgccaataaaatctaaacatatatttaaaaaacaaagataacagaagtcaatcttgctaagcagagatgcaaggaacaatgtgaaggataaacactgtttaaaagggaaaaaaaatggcaaataaggttctaattagtgggagggactgcaaagattacacaaagaagataaaagcaaggaaacctaattggaaacacagcaatgtagtatcaaacaatccaaagtattttatctagcacaaatgagttttcagctcttttcataggcaarttgtgagtaaaaaggttgatactcttgaggytaagagayaggaagaaagaaaagaaaaaaatagtagttacaactaaaatgcctgtttcccaaatcaagtaaaagtcatgtgcaatctatccaccatggtgaagactgagtttcactctcagctctcacggaaatacacaaacactcactgatgttaaatgtttgtgttcaccaaattcctgctgtctcttcatgtgtttcagggccagggaagcagagatttaagttca

SEQ ID NO: 92208 - DNA, 529 bp, Chicken  19866894404851_5
ccaataaaatctaaacatatatttaaaaaacaaagataacagaagtcaatcttgctaagcagagatgcaaggaacaatgtgaaggataaacactgtttaaaagggaaaaaaaatggcaaataaggttctaattagtgggagggactgcaaagattacacaaagaagataaaagcaaggaaacctaattggaaacacagcaatgtagtatcaaacaatccaaagtattttatctagcacaaatgagttttcagctcttttcataggcaarttgtgagtaaaaaggttgatactcttgaggytaagagayaggaagaaagaaaagaaaaaaatagtagttacaactaaaatgcctgtttcccaaatcaagtaaaagtcatgtgcaatctatccaccatggtgaagactgagtttcactctcagctctcacggaaatacacaaacactcactgatgttaaatgtttgtgttcaccaaattcctgctgtctcttcatgtgtttcagggccagggaagcagagatttaagttca

SEQ ID NO: 92209 - DNA, 521 bp, Chicken  19866894404851_6
atctaaacatatatttaaaaaacaaagataacagaagtcaatcttgctaagcagagatgcaaggaacaatgtgaaggataaacactgtttaaaagggaaaaaaaatggcaaataaggttctaattagtgggagggactgcaaagattacacaaagaagataaaagcaaggaaacctaattggaaacacagcaatgtagtatcaaacaatccaaagtattttatctagcacaaatgagttttcagctcttttcataggcaarttgtgagtaaaaaggttgatactcttgaggytaagagayaggaagaaagaaaagaaaaaaatagtagttacaactaaaatgcctgtttcccaaatcaagtaaaagtcatgtgcaatctatccaccatggtgaagactgagtttcactctcagctctcacggaaatacacaaacactcactgatgttaaatgtttgtgttcaccaaattcctgctgtctcttcatgtgtttcagggccagggaagcagagatttaagttca

SEQ ID NO: 92210 - DNA, 600 bp, Chicken  19866894404853_1
ggttcagtttggatattaagaaaaaccttttctcagaaagagcaaagaagcatgagaacaagctgcccggggagatggcagagtcaacatgcctagaggtgttcaaaaaccatagagatgtggcacttagggacatggtttagtgggcaatactggtggtacgcaatattggtggtaggtggatggctggactggatgatcttagcagctgctggtccttggaagcagtaaaatgcttctgctaagttctttgagataccaggcaaagcattgttaggaacatcaataatcatatatagraaaaagttggctacagaacactccctctcaggaagcagccttcatcaagaagatgttctcytcccagaggctagcccttagatgagcccagggagagactacccctttcagtcacatgggaggcacgggtgaattgcttgcacctgtgcttcytggtccagccacccccttcacctcaatcatcagtcaattcaagccctgacatagaagtttccttacagaggtcttttccttaatgcttctctgattttttcacttsaaattcttaaagatttgagtttgtgagatgtctctgtgtaa

SEQ ID NO: 92211 - DNA, 600 bp, Chicken  19866894404853_2
gctgcccggggagatggcagagtcaacatgcctagaggtgttcaaaaaccatagagatgtggcacttagggacatggtttagtgggcaatactggtggtacgcaatattggtggtaggtggatggctggactggatgatcttagcagctgctggtccttggaagcagtaaaatgcttctgctaagttctttgagataccaggcaaagcattgttaggaacatcaataatcatatatagraaaaagttggctacagaacactccctctcaggaagcagccttcatcaagaagatgttctcytcccagaggctagcccttagatgagcccagggagagactacccctttcagtcacatgggaggcacgggtgaattgcttgcacctgtgcttcytggtccagccacccccttcacctcaatcatcagtcaattcaagccctgacatagaagtttccttacagaggtcttttccttaatgcttctctgattttttcacttsaaattcttaaagatttgagtttgtgagatgtctctgtgtaacaccaaactacgttttgtgtagaagattcaaatstttgccttcagcactgacacgcttgat

SEQ ID NO: 92212 - DNA, 600 bp, Chicken  19866894404853_3
tggtggtacgcaatattggtggtaggtggatggctggactggatgatcttagcagctgctggtccttggaagcagtaaaatgcttctgctaagttctttgagataccaggcaaagcattgttaggaacatcaataatcatatatagraaaaagttggctacagaacactccctctcaggaagcagccttcatcaagaagatgttctcytcccagaggctagcccttagatgagcccagggagagactacccctttcagtcacatgggaggcacgggtgaattgcttgcacctgtgcttcytggtccagccacccccttcacctcaatcatcagtcaattcaagccctgacatagaagtttccttacagaggtcttttccttaatgcttctctgattttttcacttsaaattcttaaagatttgagtttgtgagatgtctctgtgtaacaccaaactacgttttgtgtagaagattcaaatstttgccttcagcactgacacgcttgatgtcttgagaagtctggatgtggctctgaaactcctggttgaaatgccattagctaccaccaagtagtccaaaacaaagacagaaactgcaat

SEQ ID NO: 92213 - DNA, 600 bp, Chicken  19866894404853_4
caggcaaagcattgttaggaacatcaataatcatatatagraaaaagttggctacagaacactccctctcaggaagcagccttcatcaagaagatgttctcytcccagaggctagcccttagatgagcccagggagagactacccctttcagtcacatgggaggcacgggtgaattgcttgcacctgtgcttcytggtccagccacccccttcacctcaatcatcagtcaattcaagccctgacatagaagtttccttacagaggtcttttccttaatgcttctctgattttttcacttsaaattcttaaagatttgagtttgtgagatgtctctgtgtaacaccaaactacgttttgtgtagaagattcaaatstttgccttcagcactgacacgcttgatgtcttgagaagtctggatgtggctctgaaactcctggttgaaatgccattagctaccaccaagtagtccaaaacaaagacagaaactgcaattaaatgtgggcttcctttcatatacctcccaactgtgaaacagcactttccagcaacatcttccaaataacatctcattccaggagccgctttttgcacaagtcac

SEQ ID NO: 92214 - DNA, 541 bp, Chicken  19866894404853_5
gcagccttcatcaagaagatgttctcytcccagaggctagcccttagatgagcccagggagagactacccctttcagtcacatgggaggcacgggtgaattgcttgcacctgtgcttcytggtccagccacccccttcacctcaatcatcagtcaattcaagccctgacatagaagtttccttacagaggtcttttccttaatgcttctctgattttttcacttsaaattcttaaagatttgagtttgtgagatgtctctgtgtaacaccaaactacgttttgtgtagaagattcaaatstttgccttcagcactgacacgcttgatgtcttgagaagtctggatgtggctctgaaactcctggttgaaatgccattagctaccaccaagtagtccaaaacaaagacagaaactgcaattaaatgtgggcttcctttcatatacctcccaactgtgaaacagcactttccagcaacatcttccaaataacatctcattccaggagccgctttttgcacaagtcaccaaaagaccacaagaa

SEQ ID NO: 92215 - DNA, 600 bp, Chicken  19866894404870_1
tggtcactgttgctccttgtttgtgtaaaattctatatagctgcaaaatgcagggcacccaaacttgtcccctaacagtcatacatctgaagcttgacaaacccataatcaggcagtaagcttctgacatcattcatttagcaaaatttcagcctttttctttcatcgttccaagaagacattttattgagaaatctttctaagcagaagtagtagaaagaaaatctgttcttcagcagcatttttacttcctgaatttggagactgatgctatgctgtagtatatagtgatgcattacrcacagtaactcatgagttcttcaggaattatttcgtgactgacagttctcagaccacattttgcatgcatgacctcttcagaaaataaagcaaaaaaatttcacatctgtctgccatgtgttttgcaagacaatgtagaaataatttgttcatttttgaacatcatgacatttaacaagatttcttttatgtcaccacatggtgtatttgtgtaaaacctatgcacagactgtgtgatattcctaccagcactgtatttactgtgcatgaacaatgttgatccacgcatacattaggaag

SEQ ID NO: 92216 - DNA, 600 bp, Chicken  19866894404873_1
ttgattacttttgcatttggaataattccacaagcaacccaaccagaatcaacagtttcagtgctgagaagtacagtaacctagacactccccatttcagctgaactgattgttttctgtctagacatgcaagcctggctcatacaccggtcaaatgaatgtttgatttgtacttattctgtatctgcacgaatcagaaagatacactgtatagctactgcttcattagtagatcagcaatacacagcagcatgctctaaagatgaaacttaattgagataaagcacaaaaattatgaakgacttgacaggttaattgacagcttgtgatcatgaactgaaatccttgtttatctacaataagtacagtatgctgctgatgacttaggcatacagaaatagtcagaaaagttacagctcctgwtacttccctcactcttgcaggtttgctgccaggctgggattactcctactaaaatgtaygtaaaagatggaaaaaaaaatagcacccacaacaatagagcaaaaagcagcacatgaatcaaagatttccttctgaactgtctttgctgaatctgaaccagactaccaagttatatga

SEQ ID NO: 92217 - DNA, 600 bp, Chicken  19866894404873_2
gacatgcaagcctggctcatacaccggtcaaatgaatgtttgatttgtacttattctgtatctgcacgaatcagaaagatacactgtatagctactgcttcattagtagatcagcaatacacagcagcatgctctaaagatgaaacttaattgagataaagcacaaaaattatgaakgacttgacaggttaattgacagcttgtgatcatgaactgaaatccttgtttatctacaataagtacagtatgctgctgatgacttaggcatacagaaatagtcagaaaagttacagctcctgwtacttccctcactcttgcaggtttgctgccaggctgggattactcctactaaaatgtaygtaaaagatggaaaaaaaaatagcacccacaacaatagagcaaaaagcagcacatgaatcaaagatttccttctgaactgtctttgctgaatctgaaccagactaccaagttatatgactcaaggaattaataacactaaaaagttattgccacttccaatgtacagtgcttatcttgtgttcacacagcatttagtatgatactgctcttaatagcaatgctccaaattcaagctatgct

SEQ ID NO: 92218 - DNA, 591 bp, Chicken  19866894404873_3
atctgcacgaatcagaaagatacactgtatagctactgcttcattagtagatcagcaatacacagcagcatgctctaaagatgaaacttaattgagataaagcacaaaaattatgaakgacttgacaggttaattgacagcttgtgatcatgaactgaaatccttgtttatctacaataagtacagtatgctgctgatgacttaggcatacagaaatagtcagaaaagttacagctcctgwtacttccctcactcttgcaggtttgctgccaggctgggattactcctactaaaatgtaygtaaaagatggaaaaaaaaatagcacccacaacaatagagcaaaaagcagcacatgaatcaaagatttccttctgaactgtctttgctgaatctgaaccagactaccaagttatatgactcaaggaattaataacactaaaaagttattgccacttccaatgtacagtgcttatcttgtgttcacacagcatttagtatgatactgctcttaatagcaatgctccaaattcaagctatgcttcagacagttcagaggacatattcagactcatgtagatgctctctcctct

SEQ ID NO: 92219 - DNA, 599 bp, Chicken  19866894404875_1
  misc_feature (1)..(27): n is any nucleotide
nnnnnnnnnnnnnnnnnnnnnnnnnnnctttggcctgctgaacaaggaacccttgagtaatcccaagcctgtttaaaggagaaacaagcaaattaaagccaaacaataatctaaaaaggaaaaacaaagcaaatagattggagttggagtaagaatccaacgtggggtttttttgctgtttctcctgcagtgaccagaacagaagtcgctttaaaaagcactaaaaggtaaagaaggttggaaattaagccgttatcaatcaaagcccaggagggcaaagtggggtcaccaagcagaacracaagtttgtctgtcatatgggaaagagagagcctatctgagtgcaataaaacgagcattgtcaggaagaaattaatgcaccactgatgtattcaatacagtacaaacasaaaacatttaagtacagatactccaacacaaacagaatgaaaacgagatacttccctctctggcaaaggagaagaatgtttccatacagaaattctaaactcgagaggggtttttgttttgttttgaaataaaaacaagcccaaagtccactaatagaattaaccgagaccttcctttaaaccagagaa

SEQ ID NO: 92220 - DNA, 600 bp, Chicken  19866894404875_2
ctaaaaaggaaaaacaaagcaaatagattggagttggagtaagaatccaacgtggggtttttttgctgtttctcctgcagtgaccagaacagaagtcgctttaaaaagcactaaaaggtaaagaaggttggaaattaagccgttatcaatcaaagcccaggagggcaaagtggggtcaccaagcagaacracaagtttgtctgtcatatgggaaagagagagcctatctgagtgcaataaaacgagcattgtcaggaagaaattaatgcaccactgatgtattcaatacagtacaaacasaaaacatttaagtacagatactccaacacaaacagaatgaaaacgagatacttccctctctggcaaaggagaagaatgtttccatacagaaattctaaactcgagaggggtttttgttttgttttgaaataaaaacaagcccaaagtccactaatagaattaaccgagaccttcctttaaaccagagaaaaaaaaatcgtgcctccctcctttcacttcgaagctctttctcaggaacattagaagagactttaaggaactcataggattacggaaataaaatactgagtaacagctttt

SEQ ID NO: 92221 - DNA, 567 bp, Chicken  19866894404878_1
tttttaattaagatgtttatctataattggcattacattagcactgtattgtacgttaaccagggtagcatccacacttgttctacttaaaaccacagctaccaaaatatccactcagctgcaaactggcaagaaccctgaaataaatgcattcttgagcacttcataaggctctagcttagttatttagaattatttgtctgtttatagggtttaaaatattttaaaagctgaccagggcattttacagacatcatgataagcacagaaaaaattatttgtgcttggacgtgacaaagraaaataggacaagaacgaaccaggcagtttgttggcttatggagggcaaaaacacacaggatctgagttcttcaagttttgtatcacaatgacactccaggcagtgtctgatccacctgagcatggcgggcatagggcagcagagagcatcagctgagctgcataggtcccttactttgctgaaaggaaagcattcagttggctggctttacttttcctaacaagagcacagtcctgggtcagctctacaggacatcaggcttatcc

SEQ ID NO: 92222 - DNA, 600 bp, Chicken  19866894404879_1
tagcgctgtttgctacaatccaggtgcaagaacattgcatttggctttgccaaacctcataaggtgttcacaggggcccacttctcaacctgtcttggtctctctgaatgacatcttgtccctgactttacattcaactagctttacagtggattttttctcctacaaagcttgtctgaagctatatcattacctcttccagttgtgcagttcctagactgctacttagaaccctagaatcactaagactagataagaccactaagaacatctagcgcaaccatcagcccaacctcaacrtgccccctaaccatgtccctcagtgccatatctacacagttcttaaacacattcaagggacagtgactacactcccccccaggcatactgttccaatgcattaccactctttctgtgaagaattttttcctagtatccaaaccaatcctagttactggttacttcattatagcacatttttttccagatacacaactacctcctttttcattctaaaaaataacccctagaattagaacatggataagtaaaaaaaaaatttcatcaccactagcactagcagatattgtaaccttctct

SEQ ID NO: 92223 - DNA, 495 bp, Chicken  19866894404880_1
tcctaagtgcggcatttcccagtacttcagctaagtactcttggcttccttaggacaggtattccatatgcagtgctatatattttgtctgagggggaggtgaaggaagggggagggaaaggagctgaattctctaaagtccaacgctgaattaagcccctgaatgctaagtactgctgcattaaccagctcattttcactgtagaaagatccacagctcctgatttgactccagcgccttatcctttaacatatgcagaaaagagatgaggtcgttctcctcttcagcatattaccttsctcatgccagattattataagcaatgaaaacttacttcttcctccccatgcttcccactccccaaaatcaaaatggtcttttctctcctagccctacaaggacattagcaaggatttcccgtaccaataggacttttctcgaatgaagtcagaatgccacagggatgaaatagcctatcagcaatctgacatggt

SEQ ID NO: 92224 - DNA, 600 bp, Chicken  19866894404881_1
tatgtctaaataaatgtatgcagaatagaattatagaatagcttcatttggaaggtacctttgagattatctagttccaagcctcctgccatgggcaggtttgccaaacaataaatcaggaactagatcaggttatgcaggatgacatccaacctggcatccataacttctctgggcaacctgttccaatgcctcaccactctgagtaaaacatttacccctaacatctaacctaaaactcccctcttttagtttacaatctttcccctttgtcctatcactatcagattatgtaaaaartctgtctacctcctgattataagcttcttttaagcactggaagtcttcagtgaggtcttcccaaagccttcttttcttctccagattgaacaagccctgctctctcaacctttcttcataggaaaggtgttccagacctctggtcatcttcatggccctcctctgaacccacaccaaggtctctgtctttctaagctggggtccccaggcctggatgcattactcagatagggcctcacaagggcagagaagagaagggcaatcacatccctctccttgctgatcatctcttgatgcagc

SEQ ID NO: 92225 - DNA, 600 bp, Chicken  19866894404882_1
tttactcgttagattagcggatttactgcagagcaaagaaaaaaatgcctgaagcgtgtaattgaagcctttgcacttctgaagtacaccagcttgtattacttttgaaacttgtcccattattgttaatggaacctgttcgtaaaatctgtttccccaaatgcttaccagaatgaaagcatcacatcaaaatttggtcttatagagagatgtctcttttctctttgtacttcttattttgtatgtactttattatatagaaacatatggaggggaataaatagaaaaaacatgtgatcrraggaaggtagagaaattgggagacatagccaaaggagaacaaatgtgttgccrtgtatgacatttccatcactacaatatatcaagttagtttataatctgcctccatgtttatcacagtcttggacagaagatgacagcctgaagcagggacactcgaactggtagcatgagcrtgtgcctcacaccagtgagctccctgccagggctgagatactccagctggcttcttgggtcatgtcccaaatgtartggagcagtccatggttttaacaacaaggttgttgttttaacaatata

SEQ ID NO: 92226 - DNA, 600 bp, Chicken  19866894404882_2
ttactcgttagattagcggatttactgcagagcaaagaaaaaaatgcctgaagcgtgtaattgaagcctttgcacttctgaagtacaccagcttgtattacttttgaaacttgtcccattattgttaatggaacctgttcgtaaaatctgtttccccaaatgcttaccagaatgaaagcatcacatcaaaatttggtcttatagagagatgtctcttttctctttgtacttcttattttgtatgtactttattatatagaaacatatggaggggaataaatagaaaaaacatgtgatcrraggaaggtagagaaattgggagacatagccaaaggagaacaaatgtgttgccrtgtatgacatttccatcactacaatatatcaagttagtttataatctgcctccatgtttatcacagtcttggacagaagatgacagcctgaagcagggacactcgaactggtagcatgagcrtgtgcctcacaccagtgagctccctgccagggctgagatactccagctggcttcttgggtcatgtcccaaatgtartggagcagtccatggttttaacaacaaggttgttgttttaacaatatac

SEQ ID NO: 92227 - DNA, 600 bp, Chicken  19866894404882_3
cgtgtaattgaagcctttgcacttctgaagtacaccagcttgtattacttttgaaacttgtcccattattgttaatggaacctgttcgtaaaatctgtttccccaaatgcttaccagaatgaaagcatcacatcaaaatttggtcttatagagagatgtctcttttctctttgtacttcttattttgtatgtactttattatatagaaacatatggaggggaataaatagaaaaaacatgtgatcrraggaaggtagagaaattgggagacatagccaaaggagaacaaatgtgttgccrtgtatgacatttccatcactacaatatatcaagttagtttataatctgcctccatgtttatcacagtcttggacagaagatgacagcctgaagcagggacactcgaactggtagcatgagcrtgtgcctcacaccagtgagctccctgccagggctgagatactccagctggcttcttgggtcatgtcccaaatgtartggagcagtccatggttttaacaacaaggttgttgttttaacaatatacaggaggttttatcctttttccagtgagatattccagartctttgaggcttcca

SEQ ID NO: 92228 - DNA, 600 bp, Chicken  19866894404882_4
aagcatcacatcaaaatttggtcttatagagagatgtctcttttctctttgtacttcttattttgtatgtactttattatatagaaacatatggaggggaataaatagaaaaaacatgtgatcrraggaaggtagagaaattgggagacatagccaaaggagaacaaatgtgttgccrtgtatgacatttccatcactacaatatatcaagttagtttataatctgcctccatgtttatcacagtcttggacagaagatgacagcctgaagcagggacactcgaactggtagcatgagcrtgtgcctcacaccagtgagctccctgccagggctgagatactccagctggcttcttgggtcatgtcccaaatgtartggagcagtccatggttttaacaacaaggttgttgttttaacaatatacaggaggttttatcctttttccagtgagatattccagartctttgaggcttccaatctgaccatcagcccaagtttgctttctgaaggctttgcagattgagaatgaaggctgaaagaaatgtgagaagaaagatgaggtatttttgtagccaagagtgaaagcaccttcccagta

SEQ ID NO: 92229 - DNA, 600 bp, Chicken  19866894404882_5
ttatatagaaacatatggaggggaataaatagaaaaaacatgtgatcrraggaaggtagagaaattgggagacatagccaaaggagaacaaatgtgttgccrtgtatgacatttccatcactacaatatatcaagttagtttataatctgcctccatgtttatcacagtcttggacagaagatgacagcctgaagcagggacactcgaactggtagcatgagcrtgtgcctcacaccagtgagctccctgccagggctgagatactccagctggcttcttgggtcatgtcccaaatgtartggagcagtccatggttttaacaacaaggttgttgttttaacaatatacaggaggttttatcctttttccagtgagatattccagartctttgaggcttccaatctgaccatcagcccaagtttgctttctgaaggctttgcagattgagaatgaaggctgaaagaaatgtgagaagaaagatgaggtatttttgtagccaagagtgaaagcaccttcccagtactgagttttcctggcaagccaggcctggtcagtccaagaatctgggaaattaaaatacctcctcctgactgacatg

SEQ ID NO: 92230 - DNA, 600 bp, Chicken  19866894404882_6
acaaatgtgttgccrtgtatgacatttccatcactacaatatatcaagttagtttataatctgcctccatgtttatcacagtcttggacagaagatgacagcctgaagcagggacactcgaactggtagcatgagcrtgtgcctcacaccagtgagctccctgccagggctgagatactccagctggcttcttgggtcatgtcccaaatgtartggagcagtccatggttttaacaacaaggttgttgttttaacaatatacaggaggttttatcctttttccagtgagatattccagartctttgaggcttccaatctgaccatcagcccaagtttgctttctgaaggctttgcagattgagaatgaaggctgaaagaaatgtgagaagaaagatgaggtatttttgtagccaagagtgaaagcaccttcccagtactgagttttcctggcaagccaggcctggtcagtccaagaatctgggaaattaaaatacctcctcctgactgacatggattcatagctctccttcagttctgttttagcttataaataattatcttataaaaaaaaccttgctaagatacttacttcgcacaaa

SEQ ID NO: 92231 - DNA, 600 bp, Chicken  19866894404882_7
agtttaagtggtagaaatgccccttatgaaaatttatgaatgctctttggaaatatctcattggttttcaggacttagctgcaggcttattgttatcattgattataatttaaaatgagtcatctgcagtcgtgtatgttaaggcatgagatctcttcacgctgtatgtggatccacttctcagcttgcagttgctgaaatatgtaccctttgccttacaaataagaagaccacacaaaatactgaggattacctgcaaaaaaagaaaaaggcttctgtgctgttatggtcaggattggstttgtagaaaattgtttcttttccctgcagttttgctgtgttacaaagagaaaagatcgtggcccattgagccatagcagggcagtttgttaaaaaaactctgcctctgatcagcataaatgcatatttgagtgctccttctctctgcccaattgatagagacgcttcaggttccagtggtatgtgtccttttgagtcgtggtgtgacctgatagagatcctttcagttctaacgagtgagtggatcttaccaattagcaacctgtaaaatggcagtgataattattacctagccaggag

SEQ ID NO: 92232 - DNA, 508 bp, Chicken  19866894404882_8
tcttgagtagaaacgtttccaagagagaaaatgttttctgtgcttctgacaagctgagatgattctgtctgatgtgtctttagtgtgttttggtttctttctttgtttttataaaatgtttatttatttatttattcaagtttgtctctttgacagtatttcagcagtccctgagtaaattagacttagcacagcaagtctcccagtatacttcctggacccaatagacttcttcttcttaatggattaatccttgtatatattctcattaaagtactgaagtatggggattcttctttsaaaaaaaaaaaaaaaaagcaacaacaacaattcaagcccaaatactacagttttttttccttataggtaagcatctctcagtctgcttttcctggggaagctaggaggagaagttctgtggatccagctgttctgtactgtatactgagtgctgctgtaagcttccttcctaaggaggattcttcctccctgccttctcctctctgtc

SEQ ID NO: 92233 - DNA, 600 bp, Chicken  19866894404891_1
atctagtggtttgggtttgtctctttgctagcttggtggattgtaacaagcctacttgttaaactgaggttagctagctggaaacatgctctgaactctctaccaccaacttgtgctaaactagacgtagtatgtgtcttgagttggtaagtattttacttatgtggatatggatgcatgctgtgcaaaggaatgcagtaagatttgattttgctgacataacatgtagtatggattctgtttttaatttgaaatagcaatttttatggacaattttgtcagagggtccatctttaaaaycactgtgtttagacacttttttttgcattaatggaaaaaaaaataataaaaaaaatccaaagcacttgtttgaaactctgggtgcaattaaatttacttttggtttttacagttctcaataagtttctgcacttacatgaaactagcattcagtttaatttaccatgcacagtacacgtatgtgttactaattttaaaatctggggcttaatgttaaagttagaatttgaatgagattagtaggcaaacagttttttttttttgtatatgcttagcttttcgctctctatgatgctgatg

SEQ ID NO: 92234 - DNA, 600 bp, Chicken  19866894404906_1
gagcagtatagcatgtatcccaagtgaactgtattttttttcagactgtttttcatattcattctgtatgcttgcagtctctccccggttgctggcagttgcatatttcataagcacagcaagtagcacctgtctgggacagattatggcagaacccagttagacaggtgcttaatctttcactgagaatcactgaagattgcaatgtaaccccttccaaaagggcttatctcatccaatagcagtttcatctagaggacgcttcttcctgagtatgttgtttgagataatggccaaagyattactgaagccaaratgtgattcttactgctgtttttcatgcaacaggccagttacctttcacagaaggcaattagattgtcttgatggaatttgttcccaattaatctatgttgtttgtaataactttaggttcttctatgttcttatgtattatttgcttggaagtgtttcagtatattcccaagaagttaaattaagagggatgatttataacttctcagctgcagtttcactttttcttcaagtaggaactgtgtttctttatttttttggtatgcttgtctgccagctttttaa

SEQ ID NO: 92235 - DNA, 600 bp, Chicken  19866894404906_2
tatcccaagtgaactgtattttttttcagactgtttttcatattcattctgtatgcttgcagtctctccccggttgctggcagttgcatatttcataagcacagcaagtagcacctgtctgggacagattatggcagaacccagttagacaggtgcttaatctttcactgagaatcactgaagattgcaatgtaaccccttccaaaagggcttatctcatccaatagcagtttcatctagaggacgcttcttcctgagtatgttgtttgagataatggccaaagyattactgaagccaaratgtgattcttactgctgtttttcatgcaacaggccagttacctttcacagaaggcaattagattgtcttgatggaatttgttcccaattaatctatgttgtttgtaataactttaggttcttctatgttcttatgtattatttgcttggaagtgtttcagtatattcccaagaagttaaattaagagggatgatttataacttctcagctgcagtttcactttttcttcaagtaggaactgtgtttctttatttttttggtatgcttgtctgccagctttttaaagtgaaccattatac

SEQ ID NO: 92236 - DNA, 599 bp, Chicken  19866894404908_1
  misc_feature (1)..(14): n is any nucleotide
nnnnnnnnnnnnnnacagtgagttggggacaggggagcatccccttaatccctgcagtgagatgggagaagggcatcccagcagctggccccaaagcctgctgcagggatggatctacatggggcatcagggctgggaggatgaactgccaacagggtgctcctagggaagaggttcctgggcagggaggtgaggatgcagcgttggtacccccacaggactgggtgccaccccccagccaggcagataggaccacattcaggcagcgatactgatgctcccccaccagcaccaaacagrgaaaaggcagaggcatctaccagctccaagtgaataatcagcttattacagattcagatagaaaatcataatatttgctaatcacaatattaatttcttgctaattggctgcctgatggcacaggcagagcaagggggcaccagctggagcagtgcctcatgtggctgcaacacggcaaagctgggtgctcccatcggggtccccatgccttggggacagtggcatctggcagcatttccctgcagaactgagtcctggcagagggacccctcttggcagagagaacctcaccacctcc

SEQ ID NO: 92237 - DNA, 600 bp, Chicken  19866894404948_1
gcaccttttttccttggccaaaatcccttcactgcaatcacctttgtcatattataccagagaagctacatttttactctcctctaatgccataagcctctaattgcttctaacaagctgcctccttatctggagaattgaattaattcgttaagctgaatcaatctttcttgaataaggatgattagatgtgtgccaagttccagattatgttttagtgaaatattttcctactatctgtgtctgcttgccagggatgaaggctaaaagataatgaataggtgcaatgctgatggaaargaagagagcacagaaggargatgtgcttaatagtaagcgcgagcagactggcatggccctgggggactgttcytgatgcctgaaaacagcagcaaggaatggtcacaggggcaaagtgaatcaccctaatgggtagccaccactacccccaccataaaacctgtattacaccagcaatacggtgctggcatcaattaaccacagacattcctagcacattycattaacagccaatcaagatactggcattggtgtgagttccgtgacactgatgtaggacatgctagccaagaaagtcaa

SEQ ID NO: 92238 - DNA, 600 bp, Chicken  19866894404948_2
aaaatcccttcactgcaatcacctttgtcatattataccagagaagctacatttttactctcctctaatgccataagcctctaattgcttctaacaagctgcctccttatctggagaattgaattaattcgttaagctgaatcaatctttcttgaataaggatgattagatgtgtgccaagttccagattatgttttagtgaaatattttcctactatctgtgtctgcttgccagggatgaaggctaaaagataatgaataggtgcaatgctgatggaaargaagagagcacagaaggargatgtgcttaatagtaagcgcgagcagactggcatggccctgggggactgttcytgatgcctgaaaacagcagcaaggaatggtcacaggggcaaagtgaatcaccctaatgggtagccaccactacccccaccataaaacctgtattacaccagcaatacggtgctggcatcaattaaccacagacattcctagcacattycattaacagccaatcaagatactggcattggtgtgagttccgtgacactgatgtaggacatgctagccaagaaagtcaactgatccaatatttgagga

SEQ ID NO: 92239 - DNA, 600 bp, Chicken  19866894404948_3
ttactctcctctaatgccataagcctctaattgcttctaacaagctgcctccttatctggagaattgaattaattcgttaagctgaatcaatctttcttgaataaggatgattagatgtgtgccaagttccagattatgttttagtgaaatattttcctactatctgtgtctgcttgccagggatgaaggctaaaagataatgaataggtgcaatgctgatggaaargaagagagcacagaaggargatgtgcttaatagtaagcgcgagcagactggcatggccctgggggactgttcytgatgcctgaaaacagcagcaaggaatggtcacaggggcaaagtgaatcaccctaatgggtagccaccactacccccaccataaaacctgtattacaccagcaatacggtgctggcatcaattaaccacagacattcctagcacattycattaacagccaatcaagatactggcattggtgtgagttccgtgacactgatgtaggacatgctagccaagaaagtcaactgatccaatatttgaggaggtgtctttcttcagaaagtgtgattgaatcctrgcccctcaagcccagtgrga

SEQ ID NO: 92240 - DNA, 600 bp, Chicken  19866894404948_4
aatattttcctactatctgtgtctgcttgccagggatgaaggctaaaagataatgaataggtgcaatgctgatggaaargaagagagcacagaaggargatgtgcttaatagtaagcgcgagcagactggcatggccctgggggactgttcytgatgcctgaaaacagcagcaaggaatggtcacaggggcaaagtgaatcaccctaatgggtagccaccactacccccaccataaaacctgtattacaccagcaatacggtgctggcatcaattaaccacagacattcctagcacattycattaacagccaatcaagatactggcattggtgtgagttccgtgacactgatgtaggacatgctagccaagaaagtcaactgatccaatatttgaggaggtgtctttcttcagaaagtgtgattgaatcctrgcccctcaagcccagtgrgaatgctggataagtacataagcaagttactctgtattttctcccccttgagtccaggagagctttcttaggaagacggagcctgtgggatgaggagcacagagacagayttgctgtgagctgaagaccttcgttctgaaaccactgttc

SEQ ID NO: 92241 - DNA, 600 bp, Chicken  19866894404948_5
tggccctgggggactgttcytgatgcctgaaaacagcagcaaggaatggtcacaggggcaaagtgaatcaccctaatgggtagccaccactacccccaccataaaacctgtattacaccagcaatacggtgctggcatcaattaaccacagacattcctagcacattycattaacagccaatcaagatactggcattggtgtgagttccgtgacactgatgtaggacatgctagccaagaaagtcaactgatccaatatttgaggaggtgtctttcttcagaaagtgtgattgaatcctrgcccctcaagcccagtgrgaatgctggataagtacataagcaagttactctgtattttctcccccttgagtccaggagagctttcttaggaagacggagcctgtgggatgaggagcacagagacagayttgctgtgagctgaagaccttcgttctgaaaccactgttctgaagctgccttaagcagacagctggggcctggctcactcaaagctccaagatgggcatcttcagtggcacgggcaggatttaagcagttgccatgagaaagaggaatcacaacataactgagggtgtggaa

SEQ ID NO: 92242 - DNA, 600 bp, Chicken  19866894404948_6
cytgatgcctgaaaacagcagcaaggaatggtcacaggggcaaagtgaatcaccctaatgggtagccaccactacccccaccataaaacctgtattacaccagcaatacggtgctggcatcaattaaccacagacattcctagcacattycattaacagccaatcaagatactggcattggtgtgagttccgtgacactgatgtaggacatgctagccaagaaagtcaactgatccaatatttgaggaggtgtctttcttcagaaagtgtgattgaatcctrgcccctcaagcccagtgrgaatgctggataagtacataagcaagttactctgtattttctcccccttgagtccaggagagctttcttaggaagacggagcctgtgggatgaggagcacagagacagayttgctgtgagctgaagaccttcgttctgaaaccactgttctgaagctgccttaagcagacagctggggcctggctcactcaaagctccaagatgggcatcttcagtggcacgggcaggatttaagcagttgccatgagaaagaggaatcacaacataactgagggtgtggaagtgcagagggtaagggtt

SEQ ID NO: 92243 - DNA, 600 bp, Chicken  19866894404948_7
gtgctggcatcaattaaccacagacattcctagcacattycattaacagccaatcaagatactggcattggtgtgagttccgtgacactgatgtaggacatgctagccaagaaagtcaactgatccaatatttgaggaggtgtctttcttcagaaagtgtgattgaatcctrgcccctcaagcccagtgrgaatgctggataagtacataagcaagttactctgtattttctcccccttgagtccaggagagctttcttaggaagacggagcctgtgggatgaggagcacagagacagayttgctgtgagctgaagaccttcgttctgaaaccactgttctgaagctgccttaagcagacagctggggcctggctcactcaaagctccaagatgggcatcttcagtggcacgggcaggatttaagcagttgccatgagaaagaggaatcacaacataactgagggtgtggaagtgcagagggtaagggtttttacacagcctagatgatggtaagatgaatgtaagatgtaaatacagactccatgacagtgcagttcaattgaacttccagcctgtttttattctcagtgtcaaggtct

SEQ ID NO: 92244 - DNA, 600 bp, Chicken  19866894404950_1
ctagtgagaacagtctttcggtggtacttccttatcattagggtgctaattttgtaagaaattatataacatttattaaaatttacttgcagagcagcattccaataggtaacatattattttaaggagtatgttttatttaattatgttggtcactctgaaattaatgcctcctacttatttccatggaaactacaacagatacaaagagaacaacaatgctttttgatagagcaaattctcagctacagaacactacttttcaacagtcaccaccattagtcagattgcacagatgarctgattgagacaccctgcagttcttggtgtgacagctgtacatggctgtctgcaaggtggcttgtctttcatgtcaccactgctgaaacgcaccacccactgccctcagtatgctcccatccactgttgggtctccataaccattcagcaaacatcattgaatgccgataggtgccactgtttctgcacggaggaattcaattccacaccattgcttcatgtgtacttccatgtcagatgccattttgtcaaaccacccctctgctgccatctgtcacatggcaacaacacaaaacggag

SEQ ID NO: 92245 - DNA, 600 bp, Chicken  19866894404953_1
ttcaggcgcttgatgagacgtgagttgttccggcctggtggccgctcggtgctgggctctgcactggctgctcctggtggctgcgtgccctcctcaagccctgtcagtgattcataggagggcagtgagacgctgatcctgcggttccgctccgggtcgcggggctccgagtagcctgcattcatcacctcctcgtagctggggacgtagtagcgggaggacacgtcttcatcctcttcttggctgcaggagacaaagagagaacatcagcctcacatcacttcgactgcagtggggcayggggacagagagaggcgatgaaaacacaacctgaaataaaggacagaatatcggcccttctacgttatgtagcagttcaaacagactgcaacgccacctatgttcaggcatctttctactgccttcacagagccataagggaaagaaatgatgtctcagatcaccaggtccaaccccaaccccacccccactgtgctcactgaccacgtccctcagtgccacatctccacactcaacacctccagggatggtgaccccaccacctccctgtgcagcccatgccagcgcatcaccgctcct

SEQ ID NO: 92246 - DNA, 600 bp, Chicken  19866894404964_1
attaatttcctcacttatgaaaagactgtagcatgaacttctattcatggacactgatgattatatagcccctcatacctatttgtcggcagagttttagtttgaactcaccctcctgcagatacagggatgcttactcttaaggtataaaaccctaaaagctaggtcttcttatttccactgttcattgaattacttgtgtcatactaatatataccaaatgctatgttatgttgaatatttttaaccagaattaacatactttgctactcataacagggcaagaggtatgaacccggractgtggcatattaatttgtgaggaatcacaaaacaaaacaattttcccaaaatgagtacatctgatgaaagatatatggtgaagtgccagtacagacaaattgcaggctgacaagcaacatattcacttctttttcttgctttgtggcctctaggcaatatatgaatgtaacatcaccagtcaagagagcaaaatctgctgattacagactgtggcaacataaggcattcaaagatttcagcatctgctcagtttctgtatggttgctgagagtgatgcattaggctgcatctccccct

SEQ ID NO: 92247 - DNA, 600 bp, Chicken  19866894404973_1
agttggggctgctgtaatcctgctttgttgagcactgggaggaaatgttctgccatttgctgcttttgcttctgattccccactcatacagaggggggacagcagagcttgtctgggtgttggtgtagtttctccttgtgcacaaatcaaggctgctgcagggagagatgtgtctccaaaatggggttttgcgtttgcaaactcatgccaatgtcagatggtggggcacagctcagccctgcttcgtgctgtaacagctttaagaaatgcaatgggagctttcttacagtgctttttttsctcgtagctggcagaggtttagcagtttcagaatgtaatacagaaataggccaaattgagtccttgtggagggagctctcattgcagagcactgcctgcagcatctcgagctgcgagggctgggatgtgggggctgtgtcctgggcagtcagacaccgggctttgctgttgggctgcaggatgcatgcagtgaggaatacgtggcgtggagagctctcctttgtactgtggtttgtactgaaatagagtcttggcagaagagctgaggtccacctcatgaaataactcacgttctccatt

SEQ ID NO: 92248 - DNA, 600 bp, Chicken  19866894404979_1
cccatcctctctgcaaactcggtgaagttgggtggcatgaaggacttccacgaccgccggttcacgttctccttcctctcggggttcggccgcctgcggggtggaggcggcgccggcttggagacatcgctgctgagcttcagcgcgtcgaagatgactcgctcgtccagcttctttgcctctggcgccctcgactcaaagacgttggcggctcccaaggtcccattgctggagatggtgctgccgtcccccttgccgagggtgctcttcgaaagctggttaagcttcgatccctgatcratctgctcattgattctcatcgtgtcgtatatggagcgctggggcacgtagcagtcctctatgtagccgtcctcctcctcgcccttccccaggcaagtgcggttctgccgtagacagtctggcctgctcagtggtttgcccatgctctcgcccttacggatgacagaagctccccgtcaaccycgcgcccggcgccgcagggaccattacaccgcggcaggacccggcgaggcggagctatggggctgtggggttacagggccgacgtgcagccccaccgcgggtctcgggcagtggaac

SEQ ID NO: 92249 - DNA, 483 bp, Chicken  19866894404979_2
ggcgccctcgactcaaagacgttggcggctcccaaggtcccattgctggagatggtgctgccgtcccccttgccgagggtgctcttcgaaagctggttaagcttcgatccctgatcratctgctcattgattctcatcgtgtcgtatatggagcgctggggcacgtagcagtcctctatgtagccgtcctcctcctcgcccttccccaggcaagtgcggttctgccgtagacagtctggcctgctcagtggtttgcccatgctctcgcccttacggatgacagaagctccccgtcaaccycgcgcccggcgccgcagggaccattacaccgcggcaggacccggcgaggcggagctatggggctgtggggttacagggccgacgtgcagccccaccgcgggtctcgggcagtggaacggcacctctcatccccaaaaagccacctgtcagcagaacccgtgagaatacaacagctccaataag

SEQ ID NO: 92250 - DNA, 599 bp, Chicken  19866894404981_1
  misc_feature (1)..(168): n is any nucleotide
nnnnnnnnnnnnnnnnnnnnnnnnnnnnnnnnnnnnnnnnnnnnnnnnnnnnnnnnnnnnnnnnnnnnnnnnnnnnnnnnnnnnnnnnnnnnnnnnnnnnnnnnnnnnnnnnnnnnnnnnnnnnnnnnnnnnnnnnnnnnnnnnnnnnnnnnnnnnnnnnnnnnnnnnctgaaggagggaacggctctgtaatacccatttttatttaattgtaacgcccctgtcccactaactgtgccagatgctctaatggttcctagctctgggctctaaaacatgctgttcttttcaccctggtcyccgcccttcaagtacaaacaatggttttgctggtttttgagccttttgtgtgccaacgggatgtggggagagaatcccctccatgccaaattcagttgataataagaaacaggaaaggagctggatgccagcttagcaagagccgagcagcactgggctgctcactgcggcatgaggacgtcgccattgcccagcagcgggttgggatgtgggggagagagggaagagggctggggtatgccggggggcttcagccccagattgcttgagcattgtgaggctgcagcaatgctcctcac

SEQ ID NO: 92251 - DNA, 348 bp, Chicken  19866894404981_2
ctgaaggagggaacggctctgtaatacccatttttatttaattgtaacgcccctgtcccactaactgtgccagatgctctaatggttcctagctctgggctctaaaacatgctgttcttttcaccctggtcyccgcccttcaagtacaaacaatggttttgctggtttttgagccttttgtgtgccaacgggatgtggggagagaatcccctccatgccaaattcagttgataataagaaacaggaaaggagctggatgccagcttagcaagagccgagcagcactgggctgctcactgkcgatgggaagaggaccacagtagaccggtgtgggcagggtgcagtgtt

SEQ ID NO: 92252 - DNA, 600 bp, Chicken  19866894404984_1
aaaacattgaagacaataataataaaagccacacatactttggaaacttgttctaaacaataactgttattattaacatgtgccgtaagcatgagctagaataaaaaccttaatagcatggataaaaattccacgatccgatcatgactttatgaaaaattccaatttgtttgagacgttccatgcttgctgatgagccaaaagcaatttttagcttggttacatttgaaaaggaatccctgctgccttggccagctctgctcccctctccgctgagctgcattaaagcaagcaggcacrcagaagggccgagcgccgtcctcatgccacgctccccacggctgctggctctgtggtgccracatgcacggctgggcaccggtcacaggtgtctcttctccaacttgctggcaagggatgagtgataaggaatgccagcagagtccaaatactgcagtagcagctaacgcaggacacgaggaggcatctgagtttaccacagtgttggtatgagcaaatctcctaaccaaagcagattgaaagttgaaatgtctttccagcaagtcacgtgtgtacatattggataaataatgtagatgg

SEQ ID NO: 92253 - DNA, 600 bp, Chicken  19866894404984_2
aactgttattattaacatgtgccgtaagcatgagctagaataaaaaccttaatagcatggataaaaattccacgatccgatcatgactttatgaaaaattccaatttgtttgagacgttccatgcttgctgatgagccaaaagcaatttttagcttggttacatttgaaaaggaatccctgctgccttggccagctctgctcccctctccgctgagctgcattaaagcaagcaggcacrcagaagggccgagcgccgtcctcatgccacgctccccacggctgctggctctgtggtgccracatgcacggctgggcaccggtcacaggtgtctcttctccaacttgctggcaagggatgagtgataaggaatgccagcagagtccaaatactgcagtagcagctaacgcaggacacgaggaggcatctgagtttaccacagtgttggtatgagcaaatctcctaaccaaagcagattgaaagttgaaatgtctttccagcaagtcacgtgtgtacatattggataaataatgtagatggctaagaacaagagcagtactttcttttattcagtctcagcagtgtgactgctgtggcttgt

SEQ ID NO: 92254 - DNA, 600 bp, Chicken  19866894404988_1
tctgggtgccccatccctggaggtgctcaaggccagtttggatggagccctgggcagcctgagctgatgtgtggcaaccctgctctcagcagggagttggaactagacaatgttgaaggttcttcccaacccaagccactctatgattctatgaactcaagagcagtaaagaaaacaacatccatgttatactcaatgtgggaacagttggggaaaactgcaggctaagtcccatagcctaacactcacaagcagccgaatagcactaaaaggttcagcttcattcaacaggaagtcatyttctgtgttttgaggctgctgtgtgaaataactcaaagtttagcaagtgctgatgataaggagcatcagaattctatcactaaaagaaactaaaaagcttcygtacatgtagccttggtattcaaataatggccacaagctggaattacaaaattataactatattttctgccctcagctgctaatttaacaagttcatattttcagaaaaaataatcataacaatctcaggacctcctttctgaatggtaaaaggacatttatagcccattaatatatgtatggccagagtaattcata

SEQ ID NO: 92255 - DNA, 600 bp, Chicken  19866894404988_2
ctagacaatgttgaaggttcttcccaacccaagccactctatgattctatgaactcaagagcagtaaagaaaacaacatccatgttatactcaatgtgggaacagttggggaaaactgcaggctaagtcccatagcctaacactcacaagcagccgaatagcactaaaaggttcagcttcattcaacaggaagtcatyttctgtgttttgaggctgctgtgtgaaataactcaaagtttagcaagtgctgatgataaggagcatcagaattctatcactaaaagaaactaaaaagcttcygtacatgtagccttggtattcaaataatggccacaagctggaattacaaaattataactatattttctgccctcagctgctaatttaacaagttcatattttcagaaaaaataatcataacaatctcaggacctcctttctgaatggtaaaaggacatttatagcccattaatatatgtatggccagagtaattcatactgtgggcgtagactttcatttccctgcactaaatttcacaacaactttctattgcccagttcctgagggagatataactgcagtcttccctgatacctctt

SEQ ID NO: 92256 - DNA, 600 bp, Chicken  19866894404988_3
atagcccattaatatatgtatggccagagtaattcatactgtgggcgtagactttcatttccctgcactaaatttcacaacaactttctattgcccagttcctgagggagatataactgcagtcttccctgatacctcttcatttacatggattattatgaataaatttgtgccacttttgctctatactttattcatctctttactatataatttaaggaaatgacaagcacgggttttagtatagatcattgtgacaacccaggagactttctatgcggtgtaaaaatttactttttyacatccccactcttccttatgatttaataaggtattaaggtatgacagacgtttttaaatttatttttaatctttttcctacctcttgtttcaaaccagttaagtttcacttagaaccttgcagtccctaggtttatygctcctttgtttgtttcttctacctctgaaaacggttagcaagttttcaaagaaaatgcatctccacaaaaaatgagtggctccttcctgctacagctctaataattttactatgtgctacagtttctactatcccctaaacacagaataggagtcagactt

SEQ ID NO: 92257 - DNA, 600 bp, Chicken  19866894404988_4
ttcatttacatggattattatgaataaatttgtgccacttttgctctatactttattcatctctttactatataatttaaggaaatgacaagcacgggttttagtatagatcattgtgacaacccaggagactttctatgcggtgtaaaaatttactttttyacatccccactcttccttatgatttaataaggtattaaggtatgacagacgtttttaaatttatttttaatctttttcctacctcttgtttcaaaccagttaagtttcacttagaaccttgcagtccctaggtttatygctcctttgtttgtttcttctacctctgaaaacggttagcaagttttcaaagaaaatgcatctccacaaaaaatgagtggctccttcctgctacagctctaataattttactatgtgctacagtttctactatcccctaaacacagaataggagtcagacttttgggtacatttcttaagaattagaaatcactttccattctcactggtctctttagcaagagcttataaaccatagcaaagtccagaaatctcaaaagcaaagcgtgtttatctttgccattgctaatgttcaactat

SEQ ID NO: 92258 - DNA, 600 bp, Chicken  19866894404990_1
tggaagaaatagagacagtgaccttattttaccagactactaactgattagtgtggtgttgctggcataagctatgcggaagaaaatttacacctctaaggtggttccgtaagctcaggtgaggaggaacctgaggaactattccaaatatactggcagtttggaacatttttacggactggaacacatttgcactctgtgctgtggctccatattcttcaaagataaataaataaaattagttaaatttgtagctcttaacttgtgaacctttagctccgacttagcttcttcagaccytggagtatgaaatccagttctccaaaccacaatacttcaaaagctggaactgacagagccgtggtcaaaatccctttcatataccactcagtaccttaacccatacgtcttataacaccatgaacatgaatcaggattgctattctcattctacagaaaagaaaaaaaagacgaaatatctccatattctacctactgcatgcattaaaatcaacagtaaaattaacacacatgctaatctatgctcttactactgcattttcttaggtttacacaagaagcacttcaatcatgttataa

SEQ ID NO: 92259 - DNA, 600 bp, Chicken  19866894405001_1
gctatttgttgcattcatcccaatccctgtgaatgaagactcagaatgcaatcaaggcgttgatccagcacgagcatgcttttattcactaaaagccaggagggcgtgagaggtcccgggtaaagatgggactcatcctctcgtgtcatggagagagtggctcagagctcatgctgctgcccggtgcctgggactggagctccgattctaagtccccctccacgaggctcggcttctcctcactgaggctgacctgatcccgcatgaaggtactgctgtcagggcacacgggctgtgctygggtggggctgcactgcaatgatgccgggtcacaatccaggctggtgactgttatttctggcaggatcaggtcagcgtcttcagcacaacgrggagaaatgagagcttgaacttggatgagcttcttctgcccatcactgttgtcatcaaggcggtcactggaactgcagcgatttgtgcttcctaggagctctccattgatggaagcacacagtgcatcatcacaacttgctgtggctcttctgggtggacaagggctcgattcacctaggaaggatacacaggcgttagtggcaaact

SEQ ID NO: 92260 - DNA, 600 bp, Chicken  19866894405001_2
aagccaggagggcgtgagaggtcccgggtaaagatgggactcatcctctcgtgtcatggagagagtggctcagagctcatgctgctgcccggtgcctgggactggagctccgattctaagtccccctccacgaggctcggcttctcctcactgaggctgacctgatcccgcatgaaggtactgctgtcagggcacacgggctgtgctygggtggggctgcactgcaatgatgccgggtcacaatccaggctggtgactgttatttctggcaggatcaggtcagcgtcttcagcacaacgrggagaaatgagagcttgaacttggatgagcttcttctgcccatcactgttgtcatcaaggcggtcactggaactgcagcgatttgtgcttcctaggagctctccattgatggaagcacacagtgcatcatcacaacttgctgtggctcttctgggtggacaagggctcgattcacctaggaaggatacacaggcgttagtggcaaactttcacaagctgaatgatgagggtggttcttgaggtttggttatgtagtggcagcaggacaaagcaaataggcttctagcatcagtagtacca

SEQ ID NO: 92261 - DNA, 600 bp, Chicken  19866894405004_1
tcataaggtaaagaacagcaattctgcctggtgcacactatgaaagcctcagcatcttaataaaagacacaagcgtcgagataatgtaattatgcacagatagattctccatccacctgcgtatttcaagcaagtattttaaacttctcctgatcagcaataaggagtggcaaggctttaaatcttgcatactgtgctactaagcttttcaaagaatagactaggaaaataaagagcaattgcactaatccaaaaaaggtttaaattgttgggcttttcttaatttttttttacttacaraatactggcaattaattgaaaggcagcagataactgataaaataggcattttctaacttaaaagtatataaacagcttcatcagaaaccaatcttttaggtacataaacagcttcatcggaagctgttctgctagttacataaagaatcctattatgccaaattaattcaatctaactaattagagagcagggaagttctttcaattatttttatgtgctgtctgagaaacacacttgaatacgagagcagatttcattaattgcgggtcattattctccagattagttactaaacttgc

SEQ ID NO: 92262 - DNA, 600 bp, Chicken  19866894405010_1
aggtattaaaaaaataatgtagtttttgagtttgaattgtaaaaaaccaattccatctgaaaatgagaccgattttaggttcctcatttcaaatacagcactgggcaagcaaaaatgtggggcaagattattgatgtattttaccttgttaacgtattgcagcagctgggttatctgagcgattaattattttgcagctgcataaggaatagaactctcaaactatgctgaatgtcactgtaaggccttcatccttctgaaggctggcataagtctgccagctgatcaaaaatcaaaccygaggcccaggtttgaatggtattcaatatcaagagaactgctgtcaccaagtatgctcacctggcagttgggagccatttcaaaaggtattcgtcagtatgaaaatcagaatctgaccccggttacaaccaaaaaaaggtcagaaagtactgagaaaccttatctgtttgagggtatcttgcaatgtgagtaattattggaggaggcaaataaattaagttttgtaaccatttgataaatgcatataagatatatgcattgtgtgagatgtgctgtgagatgctcttatgccattgtgtc

SEQ ID NO: 92263 - DNA, 600 bp, Chicken  19866894405012_1
gcggcagtgcttcaggatttgatattcacaaaggaacggcaacacctgagcaacacagaggaaggtagcaggaataaaagggcaaagcaaggcaaaacctcggggaaagaaagggaaaggtgagaggaaaatgtcacacagcctgcaaggtgccctaaagagccataacaaagtctggcagcactgccacactgtgcaatgggaaagattagtatatgtacatggtccttacctgttcaggcaaccagtcacctaagatgggttcgggggaattataggacatgcagctttccattcctsagcagcatatggacaagcaaggagaaggaaataaaggatggcagagcaccatcaacacagacagtgcatgtccatgcggactcgcaaacccacagcttcctgggttgtttctgcttttgtagcatttgcgtgctgcagatgaggaaaatgctctgctgtatgagtcttcttctgcaagagccacctacaggtaaatggcagctaacctgcagaccgagcagtactgcctggcgttggtcagggggagctcctcctgccgctgctggatgctgatgctgacagggctggagatgctctgca

SEQ ID NO: 92264 - DNA, 599 bp, Chicken  19866894405014_1
  misc_feature (1)..(107): n is any nucleotide
nnnnnnnnnnnnnnnnnnnnnnnnnnnnnnnnnnnnnnnnnnnnnnnnnnnnnnnnnnnnnnnnnnnnnnnnnnnnnnnnnnnnnnnnnnnnnnnnnnnnnnnnnnnatgctgttctccaatcccaaccccaaacccgctgccatccagagccactgccatgctgctctcgtaaggctctgctccccagcgggatgcctggtaaactgcagagctgcctccattttccccctctggatgaaaaaggcttagttaaatgactgcaaaaacgcagggtgggaagaacatcctggagcagcayggaaaccaagagtggaggatggaaaggagaacagcaggtgatgtggttgctgcrgatcctaccttcacacgaccacgcagacgaggatgcattaacagtggtagrcaactgtaaatccagcacgtccttatctggaaacacagggtttctccagatacccctgaaagaggaaaaaaccagaggagatcactgaaagaattcccttaggacctgaagaagagatccgtacacctcccacacataagcatgcagcacatggaggaggtggcactgctgcagttggtgcccggctctgctgc

SEQ ID NO: 92265 - DNA, 599 bp, Chicken  19866894405014_2
  misc_feature (1)..(53): n is any nucleotide
nnnnnnnnnnnnnnnnnnnnnnnnnnnnnnnnnnnnnnnnnnnnnnnnnnnnnatgctgttctccaatcccaaccccaaacccgctgccatccagagccactgccatgctgctctcgtaaggctctgctccccagcgggatgcctggtaaactgcagagctgcctccattttccccctctggatgaaaaaggcttagttaaatgactgcaaaaacgcagggtgggaagaacatcctggagcagcayggaaaccaagagtggaggatggaaaggagaacagcaggtgatgtggttgctgcrgatcctaccttcacacgaccacgcagacgaggatgcattaacagtggtagrcaactgtaaatccagcacgtccttatctggaaacacagggtttctccagatacccctgaaagaggaaaaaaccagaggagatcactgaaagaattcccttaggacctgaagaagagatccgtacacctcccacacataagcatgcagcacatggaggaggtggcactgctgcagttggtgcccggctctgctgcaccaktcccaaaccaccagcaggaacaactgggttggtaaaggcagccattcgg

SEQ ID NO: 92266 - DNA, 599 bp, Chicken  19866894405014_3
  misc_feature (1)..(2): n is any nucleotide
nnatgctgttctccaatcccaaccccaaacccgctgccatccagagccactgccatgctgctctcgtaaggctctgctccccagcgggatgcctggtaaactgcagagctgcctccattttccccctctggatgaaaaaggcttagttaaatgactgcaaaaacgcagggtgggaagaacatcctggagcagcayggaaaccaagagtggaggatggaaaggagaacagcaggtgatgtggttgctgcrgatcctaccttcacacgaccacgcagacgaggatgcattaacagtggtagrcaactgtaaatccagcacgtccttatctggaaacacagggtttctccagatacccctgaaagaggaaaaaaccagaggagatcactgaaagaattcccttaggacctgaagaagagatccgtacacctcccacacataagcatgcagcacatggaggaggtggcactgctgcagttggtgcccggctctgctgcaccaktcccaaaccaccagcaggaacaactgggttggtaaaggcagccattcggmagcatctcctctgggttaaaggaagaggtcggcatcctgcccaaacttgg

SEQ ID NO: 92267 - DNA, 600 bp, Chicken  19866894405014_4
accaagagtggaggatggaaaggagaacagcaggtgatgtggttgctgcrgatcctaccttcacacgaccacgcagacgaggatgcattaacagtggtagrcaactgtaaatccagcacgtccttatctggaaacacagggtttctccagatacccctgaaagaggaaaaaaccagaggagatcactgaaagaattcccttaggacctgaagaagagatccgtacacctcccacacataagcatgcagcacatggaggaggtggcactgctgcagttggtgcccggctctgctgcaccaktcccaaaccaccagcaggaacaactgggttggtaaaggcagccattcggmagcatctcctctgggttaaaggaagaggtcggcatcctgcccaaacttgggagttatgggtgtaatataggacccctttcagcgctgtgtgtgtgcgcacggtgtgagcgcatgcatccacatccatataggatgcagaacaaagcccctgccattccagtccgacttccaggcagataataatagttcagccacgttcagctccagccccactcagcagcaggtctcaccaggctttacaaagggacag

SEQ ID NO: 92268 - DNA, 595 bp, Chicken  19866894405014_5
gatcctaccttcacacgaccacgcagacgaggatgcattaacagtggtagrcaactgtaaatccagcacgtccttatctggaaacacagggtttctccagatacccctgaaagaggaaaaaaccagaggagatcactgaaagaattcccttaggacctgaagaagagatccgtacacctcccacacataagcatgcagcacatggaggaggtggcactgctgcagttggtgcccggctctgctgcaccaktcccaaaccaccagcaggaacaactgggttggtaaaggcagccattcggmagcatctcctctgggttaaaggaagaggtcggcatcctgcccaaacttgggagttatgggtgtaatataggacccctttcagcgctgtgtgtgtgcgcacggtgtgagcgcatgcatccacatccatataggatgcagaacaaagcccctgccattccagtccgacttccaggcagataataatagttcagccacgttcagctccagccccactcagcagcaggtctcaccaggctttacaaagggacagccacgtgcctttgagccgtgctcggatagagcctatttttgggct

SEQ ID NO: 92269 - DNA, 599 bp, Chicken  19866894405016_1
  misc_feature (1)..(78): n is any nucleotide
nnnnnnnnnnnnnnnnnnnnnnnnnnnnnnnnnnnnnnnnnnnnnnnnnnnnnnnnnnnnnnnnnnnnnnnnnnnnnnttgtgagattaatgaaagagatgataactccaagcgaactggaagaaatgagaaataaaggatccacaaatttctcctctttaaacatggggaaagacacgaaatttgccactaccaaaagtacagagggctcaggttgaagctaagccagcacagtttcgatgagagagatgaagcactctgaaaaggtggatatgagagagagtctcacagtatattatragtgctaactcatatctaatgccaaaaattggttattatgttttttggtgacatgtaaacatcatccttaaaatgatatcatttcccagatgtccctttactgcagatttgtagcagtggtggcactgcaaaagggtactaccgtcagccaaccatcagcccacaccagcagagagaattccaaaaaaggttttagactcctcaagayaagtgactgcattcacttccaartgataggcagagctttacatgcaatatatacagtcactgaatatacataatggtaaaatataacttca

SEQ ID NO: 92270 - DNA, 600 bp, Chicken  19866894405016_2
ctcaggttgaagctaagccagcacagtttcgatgagagagatgaagcactctgaaaaggtggatatgagagagagtctcacagtatattatragtgctaactcatatctaatgccaaaaattggttattatgttttttggtgacatgtaaacatcatccttaaaatgatatcatttcccagatgtccctttactgcagatttgtagcagtggtggcactgcaaaagggtactaccgtcagccaaccatcagcccacaccagcagagagaattccaaaaaaggttttagactcctcaagayaagtgactgcattcacttccaartgataggcagagctttacatgcaatatatacagtcactgaatatacataatggtaaaatataacttcagtagaaagcgttctctacgtgtacagctatatgcatttttcagaagtcatgctgttaatatccagcctggtttccttgagcaggctattattgattttaaggataaataaagaacctactcacaacacttaatggatacagtgtgtgtacaagaggacaaatgcttttcagaaactatcttataaacagacaataggccacaaacatgt

SEQ ID NO: 92271 - DNA, 600 bp, Chicken  19866894405016_3
cagtttcgatgagagagatgaagcactctgaaaaggtggatatgagagagagtctcacagtatattatragtgctaactcatatctaatgccaaaaattggttattatgttttttggtgacatgtaaacatcatccttaaaatgatatcatttcccagatgtccctttactgcagatttgtagcagtggtggcactgcaaaagggtactaccgtcagccaaccatcagcccacaccagcagagagaattccaaaaaaggttttagactcctcaagayaagtgactgcattcacttccaartgataggcagagctttacatgcaatatatacagtcactgaatatacataatggtaaaatataacttcagtagaaagcgttctctacgtgtacagctatatgcatttttcagaagtcatgctgttaatatccagcctggtttccttgagcaggctattattgattttaaggataaataaagaacctactcacaacacttaatggatacagtgtgtgtacaagaggacaaatgcttttcagaaactatcttataaacagacaataggccacaaacatgtcaaatacacataaatcttacatg

SEQ ID NO: 92272 - DNA, 600 bp, Chicken  19866894405021_1
cgaggttcaattttcacgtattgcttgcaaacttgggccctcttgccttataagtattactggtgtgatactttatattgcagttcatatgttcatttatttttatgtataaatacctatgcatgtgtgtacatatgcataatggacctgctgaaatattggggtgttataacagcaggtgcatcgagacttaggcaaacaaattttgaatgtaatatgtcaatttccatatatatatgtatatgtaaaatatctatacattattttttgtatattttatgcccatattgtagtttatamcttgtggctgaagcatttgggaacgcagagtactgtatttctaaggacctaagaaaaatatgtctgtaaggcagagctgctgcagaacttgtcagaggtgacgcatgctgtgtcctcaaacagaaatgtcactgttgttcattcttatatcattgtttccattattatgaaaggctgaaagcatgtgggaaaaataatataaatattattgccatatatgcagaagggggtaattttccaccctagactgttgaaagaaaccttgtagtgcctctgtgtaatataatacgttggggaaat

SEQ ID NO: 92273 - DNA, 600 bp, Chicken  19866894405021_2
ttattgccatatatgcagaagggggtaattttccaccctagactgttgaaagaaaccttgtagtgcctctgtgtaatataatacgttggggaaattggctttcatctgaagttttcacatgttttataaatgtttgttaaaaaaatgctgattgagttgttaaatcctgtaactgcgtcgctttgcagggaaacaaaggctttttggtggtaaggcgaattacttgtgattgctctggaatgcagtgtcagagatgagaataaatagtggactatgtgtgcgaactgctggacaaattcmggttcctcaaagtgcaatatttacctttcctggagcccgtgctctcactgagcagtatctcactttccatactgtcagttttaccggtgagggcagtactgctgtagaaaccactctgaggagtggtgtgcgtgggataaactactgcttattgctgatcttcgtattaatatctgtgtcaggataatgtgctagtggtgcattgcttgttctcactgcattacctttcctgaaatgcttccctggcactttctgtattgaacctgagcagtgtttgacccttttcttctccttgccctc

SEQ ID NO: 92274 - DNA, 600 bp, Chicken  19866894405031_1
ggttattgctcacttagtgctcatgatgtcaaataatttgctttgaagatttttttctcttaagaacaacctatcatgtagttccacattaagtcttcatgcaactgaagttgttgaggttgtatataatgaaatggatatatactcacaccatatgaaaataagactgccattaaagtgatgagaaaatgatactttgtttgatagcaaagccctttcacaatatggcaaacaaatgtcggtatgataaatacaaaattttagtgtcatttgatgactttttgaaaacaccatgtcacktyttccctacaatatcactttcattgctccaattagaaatgtgagcagtattaaaagtgaaaattgtaaaaataaaggggaatatgctctcaatttcttttccctcattttgatattattctgatgatccctttctctttctttctgtttacaatcttgccaattttcaaaagtaattttttagttctactttttcagtgcttcgtgtgaaacaccttttatgaagcttttcataggatcgcagaatgtcctgggttggaagcgacctcaaggatcatccaactcccctgctgcaggcag

SEQ ID NO: 92275 - DNA, 600 bp, Chicken  19866894405031_2
ttattgctcacttagtgctcatgatgtcaaataatttgctttgaagatttttttctcttaagaacaacctatcatgtagttccacattaagtcttcatgcaactgaagttgttgaggttgtatataatgaaatggatatatactcacaccatatgaaaataagactgccattaaagtgatgagaaaatgatactttgtttgatagcaaagccctttcacaatatggcaaacaaatgtcggtatgataaatacaaaattttagtgtcatttgatgactttttgaaaacaccatgtcacktyttccctacaatatcactttcattgctccaattagaaatgtgagcagtattaaaagtgaaaattgtaaaaataaaggggaatatgctctcaatttcttttccctcattttgatattattctgatgatccctttctctttctttctgtttacaatcttgccaattttcaaaagtaattttttagttctactttttcagtgcttcgtgtgaaacaccttttatgaagcttttcataggatcgcagaatgtcctgggttggaagcgacctcaaggatcatccaactcccctgctgcaggcagag

SEQ ID NO: 92276 - DNA, 600 bp, Chicken  19866894405033_1
tgttatcaaagccttttcaaaatgataccagctagatgtacacagcatatcacagttccagcagtcccagagattaaactgaagagcagtatttgccaataacacatgtgtttagcaggtgggaggcagaaagtttttatctagctggtcacaaagtggaagctggtgttggaacccttgcagaacgagggaatatctaatagggcagtattaaagttgctcgtacaaacacataaatgctttattttatttcagttaaatacccacatgctctcctgtgcaatggtcattaatatgcarataaagaaaagaattatttacaattacagtacaagamaactgctcaaggcagccacaacaggaaaacaagagaagatatgmaacaagccctgctcccaccttacccctgcttaccagaaccraggagactcctgtcattttttacttgcagagkagctgcaatctgaaaacagtcatactgacagccttgctgatattagacaggcaaatattctgatttccacaaaatgtactctgaacaagagagcaaaaatgttaacagcaagtagaaaaaagttaacaactgaaaattggaagagg

SEQ ID NO: 92277 - DNA, 600 bp, Chicken  19866894405033_2
gtacacagcatatcacagttccagcagtcccagagattaaactgaagagcagtatttgccaataacacatgtgtttagcaggtgggaggcagaaagtttttatctagctggtcacaaagtggaagctggtgttggaacccttgcagaacgagggaatatctaatagggcagtattaaagttgctcgtacaaacacataaatgctttattttatttcagttaaatacccacatgctctcctgtgcaatggtcattaatatgcarataaagaaaagaattatttacaattacagtacaagamaactgctcaaggcagccacaacaggaaaacaagagaagatatgmaacaagccctgctcccaccttacccctgcttaccagaaccraggagactcctgtcattttttacttgcagagkagctgcaatctgaaaacagtcatactgacagccttgctgatattagacaggcaaatattctgatttccacaaaatgtactctgaacaagagagcaaaaatgttaacagcaagtagaaaaaagttaacaactgaaaattggaagaggaaagaacaatttgttttggctgtagcctaatccctct

SEQ ID NO: 92278 - DNA, 600 bp, Chicken  19866894405033_3
aagagcagtatttgccaataacacatgtgtttagcaggtgggaggcagaaagtttttatctagctggtcacaaagtggaagctggtgttggaacccttgcagaacgagggaatatctaatagggcagtattaaagttgctcgtacaaacacataaatgctttattttatttcagttaaatacccacatgctctcctgtgcaatggtcattaatatgcarataaagaaaagaattatttacaattacagtacaagamaactgctcaaggcagccacaacaggaaaacaagagaagatatgmaacaagccctgctcccaccttacccctgcttaccagaaccraggagactcctgtcattttttacttgcagagkagctgcaatctgaaaacagtcatactgacagccttgctgatattagacaggcaaatattctgatttccacaaaatgtactctgaacaagagagcaaaaatgttaacagcaagtagaaaaaagttaacaactgaaaattggaagaggaaagaacaatttgttttggctgtagcctaatccctctaataacgtatggctgcttgccatttctttcataggacttggata

SEQ ID NO: 92279 - DNA, 600 bp, Chicken  19866894405033_4
gaggcagaaagtttttatctagctggtcacaaagtggaagctggtgttggaacccttgcagaacgagggaatatctaatagggcagtattaaagttgctcgtacaaacacataaatgctttattttatttcagttaaatacccacatgctctcctgtgcaatggtcattaatatgcarataaagaaaagaattatttacaattacagtacaagamaactgctcaaggcagccacaacaggaaaacaagagaagatatgmaacaagccctgctcccaccttacccctgcttaccagaaccraggagactcctgtcattttttacttgcagagkagctgcaatctgaaaacagtcatactgacagccttgctgatattagacaggcaaatattctgatttccacaaaatgtactctgaacaagagagcaaaaatgttaacagcaagtagaaaaaagttaacaactgaaaattggaagaggaaagaacaatttgttttggctgtagcctaatccctctaataacgtatggctgcttgccatttctttcataggacttggatattagtagcagcgcctaggaacgtgaatctctatacctgcta

SEQ ID NO: 92280 - DNA, 600 bp, Chicken  19866894405033_5
agtggaagctggtgttggaacccttgcagaacgagggaatatctaatagggcagtattaaagttgctcgtacaaacacataaatgctttattttatttcagttaaatacccacatgctctcctgtgcaatggtcattaatatgcarataaagaaaagaattatttacaattacagtacaagamaactgctcaaggcagccacaacaggaaaacaagagaagatatgmaacaagccctgctcccaccttacccctgcttaccagaaccraggagactcctgtcattttttacttgcagagkagctgcaatctgaaaacagtcatactgacagccttgctgatattagacaggcaaatattctgatttccacaaaatgtactctgaacaagagagcaaaaatgttaacagcaagtagaaaaaagttaacaactgaaaattggaagaggaaagaacaatttgttttggctgtagcctaatccctctaataacgtatggctgcttgccatttctttcataggacttggatattagtagcagcgcctaggaacgtgaatctctatacctgctatggtacacagtcattaggataggtggtttcaa

SEQ ID NO: 92281 - DNA, 600 bp, Chicken  19866894405050_1
gtgcaggagatgggcgttgctgttccaagaagaaaacatcctatcaacatacttgctgtttaagctgaaggccatacagtggagttagtggagcaatatgtccaccagagtcccacggagcgtcagcactcagacactgcctgactctgtaagtgaaaactaaaatgatctgagaaagggaatgcgtgtgataccaggtatattgagctgggataggatgggagtatccactgcagacctttttttaatcgaaacacatgaatggtagatctctgtgcaagacagtagtgcaagactgtmaatatttggtgggttatttacctggaccctatgttttaggatctcagctktaggactgcgtcctctgagccttactgtctcccctgtgcttatccaccagagctcttggtgtgcttsgtgcttagtaattctgcctcttctttttcttcctggggaaaggaactgtttgatacacctacctacgtaggtaggtatcagaggtctatcagaggatgcaacttccacaaatccttctctcacccccagacacatctttgtgaagtggactctggggggttagatgcattccacatctccagt

SEQ ID NO: 92282 - DNA, 600 bp, Chicken  19866894405050_2
acttgctgtttaagctgaaggccatacagtggagttagtggagcaatatgtccaccagagtcccacggagcgtcagcactcagacactgcctgactctgtaagtgaaaactaaaatgatctgagaaagggaatgcgtgtgataccaggtatattgagctgggataggatgggagtatccactgcagacctttttttaatcgaaacacatgaatggtagatctctgtgcaagacagtagtgcaagactgtmaatatttggtgggttatttacctggaccctatgttttaggatctcagctktaggactgcgtcctctgagccttactgtctcccctgtgcttatccaccagagctcttggtgtgcttsgtgcttagtaattctgcctcttctttttcttcctggggaaaggaactgtttgatacacctacctacgtaggtaggtatcagaggtctatcagaggatgcaacttccacaaatccttctctcacccccagacacatctttgtgaagtggactctggggggttagatgcattccacatctccagtgagaagtgactgcatgcagcacacagctcacacagtcatttgggacctca

SEQ ID NO: 92283 - DNA, 600 bp, Chicken  19866894405050_3
gagcgtcagcactcagacactgcctgactctgtaagtgaaaactaaaatgatctgagaaagggaatgcgtgtgataccaggtatattgagctgggataggatgggagtatccactgcagacctttttttaatcgaaacacatgaatggtagatctctgtgcaagacagtagtgcaagactgtmaatatttggtgggttatttacctggaccctatgttttaggatctcagctktaggactgcgtcctctgagccttactgtctcccctgtgcttatccaccagagctcttggtgtgcttsgtgcttagtaattctgcctcttctttttcttcctggggaaaggaactgtttgatacacctacctacgtaggtaggtatcagaggtctatcagaggatgcaacttccacaaatccttctctcacccccagacacatctttgtgaagtggactctggggggttagatgcattccacatctccagtgagaagtgactgcatgcagcacacagctcacacagtcatttgggacctcagtatgctggttctgcctgttttctccagcaccatccttcactcagcctcttcattactcctcttttg

SEQ ID NO: 92284 - DNA, 572 bp, Chicken  19866894405050_4
aggtaggtatcagaggtctatcagaggatgcaacttccacaaatccttctctcacccccagacacatctttgtgaagtggactctggggggttagatgcattccacatctccagtgagaagtgactgcatgcagcacacagctcacacagtcatttgggacctcagtatgctggttctgcctgttttctccagcaccatccttcactcagcctcttcattactcctcttttgcccaccactgagctgtgatctcctgttctgttcctcagcccatcacgtgctgtttgctgctgtactcytccctgcccatgtctgcttgggttacttaaaggaaatgtcctgaacagtctgttcttgtttgcagacacgcactgaaaggcagtcccatctggtggggctcatgcagaggcactccccagtcaatatgattaatactgcaacacagtatggaggcagcatggacaacgctgtgtatttcttgggggccacaggagagcatccttacaggaaggggtcttgtttgagcaaaactgcagaagcccatgaacacaacatggtttgctgcagtcca

SEQ ID NO: 92285 - DNA, 599 bp, Chicken  19866894405051_1
  misc_feature (1)..(112): n is any nucleotide
nnnnnnnnnnnnnnnnnnnnnnnnnnnnnnnnnnnnnnnnnnnnnnnnnnnnnnnnnnnnnnnnnnnnnnnnnnnnnnnnnnnnnnnnnnnnnnnnnnnnnnnnnnnnnnnntaattcattttgctagataagcatggtaatttttttgctagtgagatttgaaatgtgtacttggcacattgtcactcagttcccatagttacaaatattttccaaaatgggtcgattacactttttgtctttgaacttgtgtaggtattttctgcatagtacttctatgctgatttctctttccttcrgggtaaactgccagtgcattttatatgggtttaactgttggtcagaaactgccttgtcagtttggattaaaaaaaaaaaaaaagcatctgctgaaaagtgttgttgtgtggctctgggacctttttaggtctgctcgtcggatattattatctgcttcgtgttacatttttcagtcttgtcaatttaccagtgttgatacgggttttattgtcatttgttgcatctgagtataaaaagaaataagaaacaaatggcaggatgttactaaagacttcaaaccccaaagacattcctatga

SEQ ID NO: 92286 - DNA, 600 bp, Chicken  19866894405061_1
gaaggaaaagaaaggagggacacacaaaaaagtcaatacagagttctgagttttctagatacatccttcctttattcttctcaggcaggtcatctgaggcagcacaactgtttggttggttactccagattcttaaagacaagattggacatgcttgttttgaccagaggacagtctcttctggtgtcatgctgtaagagacatcatgatcagaaggtgattctcccaggttagaggtgcatcttgcactccacgtgtactgatctctgtaacagcaagctctggagtagtttgtcatgragggtccttcatccctgtgcccctggggcatctcagcactgaccagtacagaatcttttgaagaaacagccttattccaaatgaatggggctgctatctgtctgctgggctgggcagtgaaaggctattaatgggagaaattcagcaggaaataatgaagtatttcctccctttgccaggtgaggaaagaggaaacagctccttcaggggaagaggcaaggaagaaaggaaacagaaggaagaaacgaaaaggaaggaagaaaacacaagggaaggatgggagagagggagggaggaagg

SEQ ID NO: 92287 - DNA, 600 bp, Chicken  19866894405062_1
ttatggcacgtataacgagactgatgtcccaggtgtataaactgttcctccttctaataagaatggtacaggagttgatatttggactacataaattgtcattctgagttttttggggggattatttatgttagttattgtctttctagttttacaggagtaatgctcagtgctaacagcatcatgagcaagacgtagatctacacgtttgctgtctgtgctgtctatggtaatgcatgttttccaagctggtcctcatctctgtcaacgggaagaatatgaacaaatttataccacttygtaggctgattcttcctgcaaggaacacttagaaatgggtacctrctgttgatgttgttacstttagcggtaggacagataagcatttcatgtgggatgtctatccaaatggtaggcatcttttgaaagcaatgaaattcatgacaaataactgcctttttgacatagttttgtggcaatccctttatattttctttctttaatggatctctagcccgtatccagcctgcatttttttccccctctttacttgctacttgccctgtacttgtgggcaatattacactgcagaattctctg

SEQ ID NO: 92288 - DNA, 600 bp, Chicken  19866894405062_2
tcctccttctaataagaatggtacaggagttgatatttggactacataaattgtcattctgagttttttggggggattatttatgttagttattgtctttctagttttacaggagtaatgctcagtgctaacagcatcatgagcaagacgtagatctacacgtttgctgtctgtgctgtctatggtaatgcatgttttccaagctggtcctcatctctgtcaacgggaagaatatgaacaaatttataccacttygtaggctgattcttcctgcaaggaacacttagaaatgggtacctrctgttgatgttgttacstttagcggtaggacagataagcatttcatgtgggatgtctatccaaatggtaggcatcttttgaaagcaatgaaattcatgacaaataactgcctttttgacatagttttgtggcaatccctttatattttctttctttaatggatctctagcccgtatccagcctgcatttttttccccctctttacttgctacttgccctgtacttgtgggcaatattacactgcagaattctctgtgtacggcaaggcagtctctgtttttgccagtgaacttcccctca

SEQ ID NO: 92289 - DNA, 600 bp, Chicken  19866894405062_3
atggtacaggagttgatatttggactacataaattgtcattctgagttttttggggggattatttatgttagttattgtctttctagttttacaggagtaatgctcagtgctaacagcatcatgagcaagacgtagatctacacgtttgctgtctgtgctgtctatggtaatgcatgttttccaagctggtcctcatctctgtcaacgggaagaatatgaacaaatttataccacttygtaggctgattcttcctgcaaggaacacttagaaatgggtacctrctgttgatgttgttacstttagcggtaggacagataagcatttcatgtgggatgtctatccaaatggtaggcatcttttgaaagcaatgaaattcatgacaaataactgcctttttgacatagttttgtggcaatccctttatattttctttctttaatggatctctagcccgtatccagcctgcatttttttccccctctttacttgctacttgccctgtacttgtgggcaatattacactgcagaattctctgtgtacggcaaggcagtctctgtttttgccagtgaacttcccctcagaagtactcttggatgt

SEQ ID NO: 92290 - DNA, 600 bp, Chicken  19866894405064_1
acaagctgtatcctcctgaggtttactggtgctgagccctgacagaaatgcataccctgaagtctgtgctcagtcttccgtgaggaagcagccaaccgctctgtgcagcagcaaatctgccagctggccatagaggggcaatggcatcagctgcagcctattccctttgctagctacatgacatatctggtctggtaggattaaaaaccagggcagcgcagagcaaattgctgcagggagatggctttgggggcaggggagagcattcatgcaagggttcttttgaacatttctgtcttsatcccaagctacctgctaygtgggatggggttgggggaggacagcaaaggggaagtctgactttcaggaaagaccatggagaagcgtaactcacattaatggtgagattaaaggattacattcaattcacaccgcagtcaaaatgaaatctcagcctctgctttttgtgtactgtgcagtgacagagctgtgatggtgggtggttacagtgctatgcatcctccacagtgcacaggggggacagtctggttccggatttttgtttgccattctcagtacaagtgtttccctccacattaa

SEQ ID NO: 92291 - DNA, 600 bp, Chicken  19866894405064_2
ggtttactggtgctgagccctgacagaaatgcataccctgaagtctgtgctcagtcttccgtgaggaagcagccaaccgctctgtgcagcagcaaatctgccagctggccatagaggggcaatggcatcagctgcagcctattccctttgctagctacatgacatatctggtctggtaggattaaaaaccagggcagcgcagagcaaattgctgcagggagatggctttgggggcaggggagagcattcatgcaagggttcttttgaacatttctgtcttsatcccaagctacctgctaygtgggatggggttgggggaggacagcaaaggggaagtctgactttcaggaaagaccatggagaagcgtaactcacattaatggtgagattaaaggattacattcaattcacaccgcagtcaaaatgaaatctcagcctctgctttttgtgtactgtgcagtgacagagctgtgatggtgggtggttacagtgctatgcatcctccacagtgcacaggggggacagtctggttccggatttttgtttgccattctcagtacaagtgtttccctccacattaaatacatgctgctacttgac

SEQ ID NO: 92292 - DNA, 600 bp, Chicken  19866894405065_1
ctgcagcacacatgtctggcactctgaaacaacaatgctattaaggctgtgtctttgaagggtactgggctgacttcagacactcacaactgaagtatgcaattctggctggaagtcttacagtgctttccatatactgcatctcttctgtggctattttcagcctgcttacaaattgattgcatgcagcagctcacctattcagcaggtgtcagcttagagtgaggatcatttgttttagtgcaatctaaattaatctgcagcagtattaactgagagagggaatataagcgaggaatytctgcttgttatatattagtcttgtcaaacaatgacaaagaattttaaacatctatttaaaaaaatcactggaaaagagaagatacagtattttgcccaagggatatggctcagatctctgacgccatctttagataaaatgcaagaaagttacagagatccagcctgaaacaatgaaattttcagtttgaggaatttccactgcatggcagctagcttttcccttctctgctactcccagtcaggtgtatatataaaatttctcagggatcaattatttctctctctctcttttttggt

SEQ ID NO: 92293 - DNA, 600 bp, Chicken  19866894405067_1
atggatgaatgcaagaaggaatgaactgatatagatgattttccatgaagcaaattaaagcagattcacataaatctgctccatcagcagatctgaagagggaaagctggtatactctgggtagacaggttagtgcaatacatctggggtcttacacttgcaaaactacatgagaagaggacacttcctgctttcttaagtcatgaaacaacctgtgtgtccagggctggttaaagcagaagtggtgaaagtgtctctcagtgtgtatgcatgctgtgcaaagtgcttagccctcatctsaaccatgaagtactatggaagtacaaatcctggagataagaaaagctcatatcatgagtgaaagtggcagaatctaatcaaaggtcagagagtggaaaccatccagaattagaagtgattatttttagcaggcagctccattcttgacagttgctctatttggattgctatagcactggagccatcctccaaaacacataaagtgatggtttcttctcgaagaattggggtggtgagggattagccaatactcacagcaaacataccgtgatgaagaagagacaaaagaattgtccargc

SEQ ID NO: 92294 - DNA, 600 bp, Chicken  19866894405067_2
tsaaccatgaagtactatggaagtacaaatcctggagataagaaaagctcatatcatgagtgaaagtggcagaatctaatcaaaggtcagagagtggaaaccatccagaattagaagtgattatttttagcaggcagctccattcttgacagttgctctatttggattgctatagcactggagccatcctccaaaacacataaagtgatggtttcttctcgaagaattggggtggtgagggattagccaatactcacagcaaacataccgtgatgaagaagagacaaaagaattgtccargctttgaagcagctaaaaattggcagcagtaaccaaaaatcctttaactgatgggcaaatatggaaagcaaatgtatttgctctgctgagcagagacaaatatgtctggataaactaaaagatttcacttttgcctaatcttcatggcatttccagcccacagatttctgggaatctagtggaggccaaatcacatgacatttctagacagatttgctgaccaaggcctttgggatcagttctgaactttggacgattagttaaaatgaaatgctttgggcttagctgttaacagtgtct

SEQ ID NO: 92295 - DNA, 600 bp, Chicken  19866894405074_1
gtatgaaacgccttcttaggcttcacactattcctagtgggaacttggctgcatcccaattactgctaattggctccctcgttgttagctacagcaaggaactaagaaccatgtagaatcactgatcagagggttggaaggagcatgcagtgatccaccaagctagtggtgtttctggttcagccagccactttaactaaaacattccctatagacaacagtataccctgtgtttagaagcctggagtgaaggcagctcaacagaattccttcagtgtttcagatctcctgtccttacascttttttccctctcctaaattaccaaaaccatcttgttcaaaaaattcagggatttctttttgtcattctagagggaatcaacccatcaaagaaagttatcagattccatggccttttattctactgtattctttcctctatactctttccaacttgccctcacattttttgaagtataatgaccaaaatgaaaaatgatgctctagtcaaggtcttaacaatgctaactatagcagaattattatttccattgtcatacattagtacttgtccaacatggttcagatcaagatttgctt

SEQ ID NO: 92296 - DNA, 599 bp, Chicken  19866894405078_1
  misc_feature (1)..(26): n is any nucleotide
nnnnnnnnnnnnnnnnnnnnnnnnnncatgcgaggatggcttttggcagttgtcaaatcagagcagaagcagcaaatgtgcaaaacaagaaaaccacagttgttgaaatgccgtcgtttaggctgtttctcagaggtacacggcaaaattggaaggctgtttttgtgctgttaaggtgggatgggaaagatcgtcttcctctgggtgtttgtagcatgtcactgttcagacacgggtttgaacgctgtttgatatattactagtgcttgcttgcatgtggggagccagaggccacctcaratctgctttctgtgactattaagttttgaaatcccacagcatcatcatcttaaaggtgaactcaaaaaacattcttttttcttctggctgtgtrtatttgttctctctccctcacgatctctgctgcctgattttcctccctgctgtttgactcctgtcaccttcccctctttcctcagggcattccttctccttcccataacagttccagcaggatgggagatgcagctaaccagatgtgccagctatttgaagccaagatcgtagtggtcagatgtcagttggttcctagtccagag

SEQ ID NO: 92297 - DNA, 600 bp, Chicken  19866894405078_2
cacagttgttgaaatgccgtcgtttaggctgtttctcagaggtacacggcaaaattggaaggctgtttttgtgctgttaaggtgggatgggaaagatcgtcttcctctgggtgtttgtagcatgtcactgttcagacacgggtttgaacgctgtttgatatattactagtgcttgcttgcatgtggggagccagaggccacctcaratctgctttctgtgactattaagttttgaaatcccacagcatcatcatcttaaaggtgaactcaaaaaacattcttttttcttctggctgtgtrtatttgttctctctccctcacgatctctgctgcctgattttcctccctgctgtttgactcctgtcaccttcccctctttcctcagggcattccttctccttcccataacagttccagcaggatgggagatgcagctaaccagatgtgccagctatttgaagccaagatcgtagtggtcagatgtcagttggttcctagtccagaggcaatttttctactttggaaaaaccccacaaaatacagacctgggaaggactacccaatcactggatcatgactcctcaccagcagagaggtttt

SEQ ID NO: 92298 - DNA, 563 bp, Chicken  19866894405080_1
aatgaatatgaatcacgctgataattatttttttcactccatgcaaaaggtctaaagatactcacaaccctttctcagtaaaattttagagtgggaatttcggtctgtggtaacagatcatgaacagttgttgaacaaagaagcaaatcacataatcatatcaacacttacacctgtgatagttgttttataatggtgaaaattaggtcaagacattccatatagcagggatagaaaagcatagaatgccttcctaaaatcttatgttcacagtgatacttaagcttaattcatcactgyagagagaactgtagaatatcagtacctgttacacatctttacactttcagctcctccattatgaatttgtgtctttatactcagtttttcaacattttcatctttatctgctaatcagacattaagtgaaaacagtaaaaggtcatagtcaatgggaaactattgatgtaattgaaaaaaaaaacagggattatttgaaagaaaaatgttagaaaaagatacatatgatggaatgaagaaaaaaatgcgggggtgaaaaagca

SEQ ID NO: 92299 - DNA, 599 bp, Chicken  19866894405081_1
  misc_feature (1)..(168): n is any nucleotide
nnnnnnnnnnnnnnnnnnnnnnnnnnnnnnnnnnnnnnnnnnnnnnnnnnnnnnnnnnnnnnnnnnnnnnnnnnnnnnnnnnnnnnnnnnnnnnnnnnnnnnnnnnnnnnnnnnnnnnnnnnnnnnnnnnnnnnnnnnnnnnnnnnnnnnnnnnnnnnnnnnnnnnnncccggggccgcacccccatccgcccgcccgctcacgggacccgccgcgcccccgttccgcccgtcgacgcggtccgacctccctccctctctcccccccctcccggctccggctgtgccgtcccggtgctgrcatcccgccctcgcgggtcgcaggagccgcttctgaagccgtgtgggcgcgtagggcgggtcgcggccggctgcggccggatcagcgcgggacagccgccggcccggcgctccctccccacacgcagcgcagtcagcgaccacgcgtcgagcccggcgtgtctttccaagagatcggttttatttagtactgtacatacagggacatctgtacaaaatccaacactttcatactatgtaatgctctactgaaaataaagtacaccatatgtacatatgaactgtaagcagcttaatact

SEQ ID NO: 92300 - DNA, 600 bp, Chicken  19866894405087_1
caatgaatattaccatcattgagacattttttctgcaaaatgtatttcctgaataataaatgaaaataaaatgaaacatccagcttggcacaggtttcttcagttttcacctaccgtcatttttcagggcaagatattttcagaagcaatgcaacgaaggggacagtatgttagtgtggctgtcaggatgcccaaatgtatttgggatctgccattcatgtgccatatgtcttttccaaacacagtgatgaacggacattgtgccaaatagtgcccatgttgacattgtgcttttgtgcwacaccccatcatccctttcgcagccaataagcttgacactgccttattcaggcaatgtcgtttggtccaaccttatgtttactgacttattgttccttcttcctcaaagcaaaacaaaaaaagcaaagcaaaacaacaacttgacaactcgagcatttctcagctatcagcatttcatgtacaaaatataaaattactaggagttgaaaattaactggagtggatagctgtgatttacacgtggcagccatgggcagcacccatatgattttgttccatcatagaacagattttctgtta

SEQ ID NO: 92301 - DNA, 600 bp, Chicken  19866894405098_1
tccacagcatttatgttcttccacaaattcaggaaagtgctatcttctatctgggaggctgtaccatcagggcctgatgggatggatgccaactcctgccactgtttcaaaaatcagtgtggaggttacacctcccctccccggttttaattgctgtgggcccctgtgggctaccaaagtacttccagatgtctgagcatcaggtgagtgggctgagtcctggcctcagctgcaagccacattacaacacataccaccagaaggacagcagagcaaggaaggactgtgcagccaaaaggmggctgaacaggctctgctggaccactgctgagcagcccacgcttttcctgctctgttccctcctctgagatgctggctgagagctctcccaacagtaggattcagaagaagagcggctgcccagagggacagatccagcacagctcctaacccgtacatacgccctgctgctcatctgcacagccagaggggcctcttccaaggcatggacacagtttgtacactgggtagccgtgcccagctgaggcccttatcagagaagctgccactgtcatgggcagaggatgagggcttgtggga

SEQ ID NO: 92302 - DNA, 600 bp, Chicken  19866894405107_1
atttcagtcccactttgcaatatggcataagcgacaagagcaaaccaaaataaaacagaagaggtggctgttattttcaaccccaattcatagcagtgattgtcagagaaggttatacatggcctgtccatttcaagtcaggctttggtgccttttgcgatggaaggggaatttcaattgcccaccacgtgttgtatttgtattgtataaatgtggttatagctacagcacatcagctgtccagactggtgagcgtcaagtaggggaaataggatagactaagtgtgcatattctgcttwttaatgcagaggtcttaagccaaggataacagtccaattaaggcaacgttgctgaaatcgaggatgagattagaaaggatgtgggtaggcagtgtgtcagacagagaggggggaagagaacaaagcacagattcttactgcctgctgacatgggtgcaatcggcaggacaactgccatctgcaaggaaaagagaaggcataaaaagcaagagaaagaggagaatccactyagttgagaccaaaggaaagaagagtccagcccagttgtgggggaccaggtgagaagaaatcctgcatggg

SEQ ID NO: 92303 - DNA, 600 bp, Chicken  19866894405107_2
catcagctgtccagactggtgagcgtcaagtaggggaaataggatagactaagtgtgcatattctgcttwttaatgcagaggtcttaagccaaggataacagtccaattaaggcaacgttgctgaaatcgaggatgagattagaaaggatgtgggtaggcagtgtgtcagacagagaggggggaagagaacaaagcacagattcttactgcctgctgacatgggtgcaatcggcaggacaactgccatctgcaaggaaaagagaaggcataaaaagcaagagaaagaggagaatccactyagttgagaccaaaggaaagaagagtccagcccagttgtgggggaccaggtgagaagaaatcctgcatgggatgtggaatgaaagcagtagggcaacgtgggtcatccatctcccatttacaactaatccatctctgcaaacgctcactgctattcactaccaatgctacatacagaaatggcagaaactacccagaagaggagggcgatttgtttactgtcgttatagaaatagtggtatttgaagtttgctctccttttcatccggatatttatctagttacaaagtgtctgatccaaa

SEQ ID NO: 92304 - DNA, 600 bp, Chicken  19866894405107_3
actcttctgcttggcctgtgagaaattgctcactattaacctggctgggcaagcagtgctggggccgggctccacggactcagagctcagagggccgcctcctggtctggaatgaaccagcagcaggttctctagccgcagatcacagtgtgtgatgtggtagggcttcaggtgctccaggcccaaacacagctgtaaaaggagaagacagacctgcctctcatataaatccgggcttttggcatggcgaggagcggactctcgcacaaaatcagccactgttaagtatggcacctctcktgtgatgactacaacacggctgcgtggcttgctgatggtcccctggttacttgagctgtccttctgcgaagcctctgtactggaaggggtgcctccgttcttttgctcaggttcttgctcttcttcttgctcttcttccacctctggtgcatcggcatcctcccatgggaggaggcgaactggcacttcagcaaggaaatgaccacagtcctgctggatgttaaagttgatggccagactctgccggatagacaggctgtgataatactgctgggactccttagctttgctcttacaaat

SEQ ID NO: 92305 - DNA, 600 bp, Chicken  19866894405111_1
aagctatgctaatagtggagtttcttgccatggtccagcatttccctaggtagatgtgtcagcctcctcagagcttgttctgagctcttgcatactctgctctgtagtataaacaatcctgcaagtctcttgtggatccactgaatttgaaataagacaatttaggttgctgtggttgtatcttcttttaatttctttacatgtaaatgtaacccagtttctcttcagaaaggatgttgttcttgctctttcagatctgctagcatacacaattggtgtccttgcccattgcttgcagcwtatgctgagttagattaaccagaggcctgataatatctctctcagagattgatagccaggaggagctgagacaggacatctatctagctgacttggtaagcgctggaagatatttctgaggcttcaggtacttggtttgcataggaagggtgatgtatctatctttatcctcatagtaattttggaattgtatgatagttatcgttttctactgttttttgattctaatggttacagatgtgatgaaattgccagtgatttgctttgtgctggatatgtacgtaagtgattgttgtaaga

SEQ ID NO: 92306 - DNA, 599 bp, Chicken  19866894405116_1
  misc_feature (1)..(90): n is any nucleotide
nnnnnnnnnnnnnnnnnnnnnnnnnnnnnnnnnnnnnnnnnnnnnnnnnnnnnnnnnnnnnnnnnnnnnnnnnnnnnnnnnnnnnnnnnnatgaagtagaatcgtgcagtttacacatctgaactgtgatatggtctcatattggtattctagcagtgaaacgactgacttcagtggatttgtccctacttaataccactactgagtgaaatacagcagagacaagtggcagtactgcagcctacactgatttggcatataaactcacttcagacagcaaatatagtggactcattcccrttattatcattaagatttgttaccaccaacacatgytraaacttcaccatgagttgtatgtccttatggctgaaatcatgcagagggtcactgttagggttggtactgaaactggaaagttcttaactctcatttcaggatatgttcagcctggcagaactccacattgtgccaactgtttaagctcctccttcacccacatgaggttttgtctctgtgttgtatacacattgcctgcagtcccacagtcacttcatcagcttcttcctagcagcagccagtgtggttatccacacygc

SEQ ID NO: 92307 - DNA, 599 bp, Chicken  19866894405116_2
  misc_feature (1)..(54): n is any nucleotide
nnnnnnnnnnnnnnnnnnnnnnnnnnnnnnnnnnnnnnnnnnnnnnnnnnnnnnatgaagtagaatcgtgcagtttacacatctgaactgtgatatggtctcatattggtattctagcagtgaaacgactgacttcagtggatttgtccctacttaataccactactgagtgaaatacagcagagacaagtggcagtactgcagcctacactgatttggcatataaactcacttcagacagcaaatatagtggactcattcccrttattatcattaagatttgttaccaccaacacatgytraaacttcaccatgagttgtatgtccttatggctgaaatcatgcagagggtcactgttagggttggtactgaaactggaaagttcttaactctcatttcaggatatgttcagcctggcagaactccacattgtgccaactgtttaagctcctccttcacccacatgaggttttgtctctgtgttgtatacacattgcctgcagtcccacagtcacttcatcagcttcttcctagcagcagccagtgtggttatccacacygccacaaacatcagcaggggaagggctctctgacagtg

SEQ ID NO: 92308 - DNA, 599 bp, Chicken  19866894405116_3
  misc_feature (1)..(52): n is any nucleotide
nnnnnnnnnnnnnnnnnnnnnnnnnnnnnnnnnnnnnnnnnnnnnnnnnnnnatgaagtagaatcgtgcagtttacacatctgaactgtgatatggtctcatattggtattctagcagtgaaacgactgacttcagtggatttgtccctacttaataccactactgagtgaaatacagcagagacaagtggcagtactgcagcctacactgatttggcatataaactcacttcagacagcaaatatagtggactcattcccrttattatcattaagatttgttaccaccaacacatgytraaacttcaccatgagttgtatgtccttatggctgaaatcatgcagagggtcactgttagggttggtactgaaactggaaagttcttaactctcatttcaggatatgttcagcctggcagaactccacattgtgccaactgtttaagctcctccttcacccacatgaggttttgtctctgtgttgtatacacattgcctgcagtcccacagtcacttcatcagcttcttcctagcagcagccagtgtggttatccacacygccacaaacatcagcaggggaagggctctctgacagtgaa

SEQ ID NO: 92309 - DNA, 600 bp, Chicken  19866894405116_4
ccrttattatcattaagatttgttaccaccaacacatgytraaacttcaccatgagttgtatgtccttatggctgaaatcatgcagagggtcactgttagggttggtactgaaactggaaagttcttaactctcatttcaggatatgttcagcctggcagaactccacattgtgccaactgtttaagctcctccttcacccacatgaggttttgtctctgtgttgtatacacattgcctgcagtcccacagtcacttcatcagcttcttcctagcagcagccagtgtggttatccacacygccacaaacatcagcaggggaagggctctctgacagtgaactctacctattcttctttcttataactctgaaagaagttccttggtgccttggctccttggactccccttgggagggttgggcatttctagggcctcttctacattttcctctctcacaatcttgttttggttctggaaccccatgcctgaccttgtttttgcatctgttaccatctaaaattataggggcagtttggctatgtggcctccccgtctcagactagtaggatggaggtcttttgtctggactagacctaag

SEQ ID NO: 92310 - DNA, 600 bp, Chicken  19866894405117_1
tcttctacagtatgccttagaaatggggaggctacaaagaccaaaacctttgaagacacctgagcagtctctagagtggcatggagaagttccttccttgtgcatggatccacaggacatagctcctcagaaatcactgcagagtttgtgttgatggctcagcatcgcagattggcactgctttccctgcattaccaggtgcaaatactgagaatgttagtgtagccgtcagagcttttagtcaggaacaattccagcttttctgtcttcagactgctgatcattctgggactgcttccyctttgtgttgtatggaaacaaaggcacttctttgaaaattaatgttgagattttgtacaatactgagttgaagcaggggctttcatggcaagagtagagataaaaattgcaagaactggcaaaactttgtccccggtaagctttgtgtgtatcagcaaatagtgcatctattgtatttaaacagatgcagagacagacagtttctctatgagttgcagatctgtcctttaacaagcaaaatttgatcaagtagaaccaccttcagcacgcagcagccatctcttatatcagagtaccctt

SEQ ID NO: 92311 - DNA, 599 bp, Chicken  19866894405119_1
  misc_feature (1)..(1): n is any nucleotide
nttctgaccctcagcacgtgctctgcttctaatgtttgctccatcagccaaaatatcacgctctaaagtaacgctagcacaggacagatctccacagcatatcatggaaggtgaatcaaacctcaggcagtggcttctaccacattaccgatgagagcccagtgcttccatctagacaagtcactacagccagctccgtttatacttcagacggtgttacaaaacctccagtcaatgtgacatcgggctacagcagcatctgctgaggaaacagcagagcaaagccacggcagggcaccrcaggggtgacggggtagggctggggaagtgaccaggcctcatctccaacatctgacactgcattcacatcttttcatttaatttatcaaagagttactcactcaggcacaaaacaaacaattaaaaaaaattaaaatgatttctaattactctccaattatacctagttcgcacctccatttcatttgtgctgttaatgctctcacagtctccaccgctgccttcttttagccctacagccattgcaggccttgataaacagtgtaagagggaggaaataaaatcagctgtgataaagg

SEQ ID NO: 92312 - DNA, 600 bp, Chicken  19866894405119_2
tttctaattactctccaattatacctagttcgcacctccatttcatttgtgctgttaatgctctcacagtctccaccgctgccttcttttagccctacagccattgcaggccttgataaacagtgtaagagggaggaaataaaatcagctgtgataaaggaacaccgatatggcaatcaaaaaattgcctttggacacactgatattgagacagatcacctctttctacatgcagtacataatattttaagagaacagcctgttgctcatttacagacagcggcagccagaagcctgtakaaagcacagcttaggcctgtgaaaaataaaccctaccaggtagtgtgcagatataccgatggaaaattcagcaaaaataaaaaaaagaaatttacaaacaggctgtggctgcaaattcaacccggtactataacgtgattaatagatatcaagtgactcaacagtggaaaagattgaaaagaaccctctagttgttcaaacaaccagtgcctcatgcaaaaccctctcgacacaactgcttaaaagaaagcattgagtcatttgcctgcgtggaaggaggcagagcgagttctgaacaaa

SEQ ID NO: 92313 - DNA, 600 bp, Chicken  19866894405119_3
aggtagtgtgcagatataccgatggaaaattcagcaaaaataaaaaaaagaaatttacaaacaggctgtggctgcaaattcaacccggtactataacgtgattaatagatatcaagtgactcaacagtggaaaagattgaaaagaaccctctagttgttcaaacaaccagtgcctcatgcaaaaccctctcgacacaactgcttaaaagaaagcattgagtcatttgcctgcgtggaaggaggcagagcgagttctgaacaaataacaataactcgacggtttttagctcgggctaaaaktaactaaagtcaggaatcagggggtaaaggaaaaataaaaagccgtacctcaacacatgtaattttattttcactaagcccagcgtcctcatgcaggcagcgagctctgcaggctgcaggaaagctgctcgaacccgagcggcaggcacgcctcaagcgtacgcaccgcagcggcttcactccctgcagccacacgcctcctcgtgtgagtacaaacgcacgtggggggacaccagggctgaagcaaagcttctgagctctgatcgtggaggtgccccgtgaaataaacgtgcctgatgt

SEQ ID NO: 92314 - DNA, 487 bp, Chicken  19866894405121_1
tccttggaataaattcccatggaacacaggtggctctgctcaagcagaagctttaaaatcctagaaggaggataccaggaaattcaatatggaataatttgcctgcaaattcccaatgtgactgaagcatgtgcaaactgtcctgcgcacagaagaaagtgacaaatcttcatcaaatctaaaatctagctgcaagctctccagagttcagtcacttgcttgtggataaaaaggaatatgcttctggaaaattatccatttctgaaatactgaaatctaaatttttcagagacaaccacrtactcaattgataattcacgacatgctatttcactagtgcaaattacacagatatttctgtgattttccagagtcatgagataagcagagttgaaacacagaatcaaatgcatttcaatctcttctaggccttatatgcaaagaggtgcgtaaagctttttcacgcatgcaatatgccatataatat

SEQ ID NO: 92315 - DNA, 592 bp, Chicken  19866894409106_1
atttagctgcaactggccttctcaactgagtacttttgtgttctggaaatttccacaatttcaactgaaaaacagactacctgaagttttaaggagctaatccatgagtatagctaaagacaaagtatgtgagatactgcttttacaagttgatggcaaatctgggcatttattgaggtagcaggcttggacaaaaaggatgcttaataaggtttttaaaatagtaaaagccgtgaagataaagctatcaattttcagcatttggaagaaataggctatttcatagttggcatatctcastatgtaaatgttttatttcccttaattttcagatgactttcttctgagtaatccatttggtactattttaataactcttcaaactggctagtgtctctggcaatatgtatgttgtatctatggatcagtgcttcataaatgtgttttccaggtaccttagtaaataaagaaggaatactggctcagaattttccccagatctctattgtgaaacagctacatgtcagtaacaaatgagacctaccttaaagaacggatatgatgccacaaatggtcttatagggggaaaaaa

SEQ ID NO: 92316 - DNA, 600 bp, Chicken  19866894409110_1
taacttctcaaacacataaataagcattaggctcatggaggagacaggtatgctgttggactagcaataacagattaaaggtcagcggttaaatctgaaacgattgcaaccttgttctttcaatcttgttcctcagcactctgctctattactaacaggtcaagtgcaaaataagaagcaggagagtctgctgaattctcccattcctgctttaatttaatggcagcatttcccaaatattctgtccccagactatttaatgacatcaatacatatgcagtgggtagctatggatttccyttgctaggtcagattctgtacagttattgatatcacaagagcaaagacggagaaaatttgattcacaagctttccgtgaagcagagacaatgtagcaaccaattatcaattctatgttatcttgttgttatttgtatataaaaaataatgaatgctatgcatttctggataaaagatgctgaaaataactagaactgcttagcttccagaagttaatagaggtgtaggaaagggagccagtgggaataagatgctcttagttgtccctcatcaaaacacaaggacaagaaggcatccaac

SEQ ID NO: 92317 - DNA, 600 bp, Chicken  19866894409113_1
ttctccagctaaacaaacccacatcccttaacctttcttcacaggagaggtgccagccctctgatcaccttcatggccgtcctctggacccactttaacaggtccataaccttatgttctcgaagccccagtactccagatgagaatttacaagggcagagaagagggggacaatcccctccctctccctgctggccacctgtctggctttagttggccttccaggctgcaagcagccactgctggctcatgtccagctcatcgtctatcaagactcctaactccttatccttgcacaartccaagtasattacatcagttgtcctttctytgtccaccgatgctgtcactccaagaagtccaagatggttatagattgcacccttgaattcatcatttcaaccaacatgatatttgaggaaacaaaaagctgttcaggaagttttattaactaacagtaattatgagctgtacaggttagtaattctttagatagcaaatcaaagaaggattagaaagatatgtgaaattttcaaagtaacagaaaaatgcaatttagataccatgaaaattcttccaaaatttgagtgcagaacatgg

SEQ ID NO: 92318 - DNA, 600 bp, Chicken  19866894409113_2
taaacaaacccacatcccttaacctttcttcacaggagaggtgccagccctctgatcaccttcatggccgtcctctggacccactttaacaggtccataaccttatgttctcgaagccccagtactccagatgagaatttacaagggcagagaagagggggacaatcccctccctctccctgctggccacctgtctggctttagttggccttccaggctgcaagcagccactgctggctcatgtccagctcatcgtctatcaagactcctaactccttatccttgcacaartccaagtasattacatcagttgtcctttctytgtccaccgatgctgtcactccaagaagtccaagatggttatagattgcacccttgaattcatcatttcaaccaacatgatatttgaggaaacaaaaagctgttcaggaagttttattaactaacagtaattatgagctgtacaggttagtaattctttagatagcaaatcaaagaaggattagaaagatatgtgaaattttcaaagtaacagaaaaatgcaatttagataccatgaaaattcttccaaaatttgagtgcagaacatgggaaagtagg

SEQ ID NO: 92319 - DNA, 600 bp, Chicken  19866894409113_3
cctttcttcacaggagaggtgccagccctctgatcaccttcatggccgtcctctggacccactttaacaggtccataaccttatgttctcgaagccccagtactccagatgagaatttacaagggcagagaagagggggacaatcccctccctctccctgctggccacctgtctggctttagttggccttccaggctgcaagcagccactgctggctcatgtccagctcatcgtctatcaagactcctaactccttatccttgcacaartccaagtasattacatcagttgtcctttctytgtccaccgatgctgtcactccaagaagtccaagatggttatagattgcacccttgaattcatcatttcaaccaacatgatatttgaggaaacaaaaagctgttcaggaagttttattaactaacagtaattatgagctgtacaggttagtaattctttagatagcaaatcaaagaaggattagaaagatatgtgaaattttcaaagtaacagaaaaatgcaatttagataccatgaaaattcttccaaaatttgagtgcagaacatgggaaagtaggctattttgagaaatttgtgata

SEQ ID NO: 92320 - DNA, 600 bp, Chicken  19866894409116_1
tgtgaccagaaggggtggaacctggctgcgcctctcttagaactcatttaagggctgactgccactggggaaggatctctccccgtagatccctctttagtgaagctttcccctgcaaacctggaatcttctggtgcgggtgagcaaactttttcccttccattatagcatctctctattgtgccagtccttttgtcgttacacctttgttgtaatgcctttctcattgtattgatctacccaattgctacaccagcttagcacaaatgattttactgttgtataagtgcctatgggagmctctcgcaaacacattaagtggtgttttaggggtgcaggacgggcagtagcaatgttcttgccctttttaggagaatacgcagcccccttgaggaaaatgagcatttttgcagtggttttctgtcagtactgggctaattcttgaacctccaaatgttgctttcattctcgtttttgtgtgtagttgtctttatttttttattttttatttttgcaaagttggggggaaaaaaaatcactctttggaccgcaaaataccacataaatggacagaaaagtttagaaaataatcatagcttc

SEQ ID NO: 92321 - DNA, 600 bp, Chicken  19866894409117_1
tgaaggcagatgggctactatggtttttaaacaactgcagcagtcagcaccaagacatctctaatgcaccagtgagagctttcatgtattacccacctcagcgccttaaatcaaacacaacagcagcagatgaatgcgaatttctaggacctgcatcacattttgctgtatcttaacactacaagctctagagtcttttgggacattggttcctagcaaaagccaaggaacacccttacatagaatgttggcagcacccaacagataccactcggtccagcagtgaggaggaataaaggyggtttggggcatctcttgtaacactgactaggtgagcactggctggcagcccttggggcaacctctggttctgcctctgatcacagagcatctctgaggtgacagactgcagccacttattgctctgaggtcatgacggaaagctgaaggcagttttgctagcatgacaaacaaaagggaacctgcaaaaatgtgtttcttagctatatccaggagaaacctatcccaagaacaagccatgtgagtttaataaacacatccttaaagcagttaacccttttactgaaaatctccccatga

SEQ ID NO: 92322 - DNA, 600 bp, Chicken  19866894409117_2
ctcttgtaacactgactaggtgagcactggctggcagcccttggggcaacctctggttctgcctctgatcacagagcatctctgaggtgacagactgcagccacttattgctctgaggtcatgacggaaagctgaaggcagttttgctagcatgacaaacaaaagggaacctgcaaaaatgtgtttcttagctatatccaggagaaacctatcccaagaacaagccatgtgagtttaataaacacatccttaaagcagttaacccttttactgaaaatctccccatgatccaagccccartagaagtctcactgggggcacacctacagctgtcagatttgacatataaaatcaagttaatctccttcaaattaaatttgaagagaaataagctaaaaattaaaacacaattggtttagaatgaaacggctactttgtagttcttgacccttttatttatagtaaatatttggcttgccttggagttttttgggtttttttttttggatgtctgtaattaatgacatggtccattagttacagggaagctaatgtggctctgcaatacagtagttcacataattgtgggagayaactcat

SEQ ID NO: 92323 - DNA, 600 bp, Chicken  19866894409117_3
gccccartagaagtctcactgggggcacacctacagctgtcagatttgacatataaaatcaagttaatctccttcaaattaaatttgaagagaaataagctaaaaattaaaacacaattggtttagaatgaaacggctactttgtagttcttgacccttttatttatagtaaatatttggcttgccttggagttttttgggtttttttttttggatgtctgtaattaatgacatggtccattagttacagggaagctaatgtggctctgcaatacagtagttcacataattgtgggagayaactcattccacatgctcaaacattgtaatttcaaaatattttcctaatagttctcaaacagaaatatttctaagtgtacattgaaaactgcctatatccaagtaacgttaacagaatatggtttaaggataacatgccaagaagtattatttttggctgcaacataattggtatcacatgctgttgctattttatatactcttttccttttcgccttaacttttactactttatatgggcataggcattacctgagggtgactttgcataacaagatataggtgtatactaggtagtgg

SEQ ID NO: 92324 - DNA, 600 bp, Chicken  19866894409118_1
tctgatcgctgctgtctgcaatcactgtctgatccacgggggccgtaaacacatcttcactgattgttcctgctctggatgtgctaacacgtcttcccctttctctccacagcagaagatctagctgcactccctgcctccactcaatttggttgataatatattttatatattataaatatatataactcttcgtggtggaatggaccgaatttttttcaacctgctttttttttttgctggactgtttgtgccaactagccagccaaatgactgggcctggtcccacaggaggcagcmcaggccgctctgcctcctctcggtggctgcacctccctgttctgggacaactatcaataactcttcctccctgtcctccaccacttcccttccttcaaagaggaggccctcctgcctgactgcctgcgccaactggcaaggatgctgcaaaacaattccagacctctgccttgaccaggaactgccttctgcctcgccttccttctgcttggagtctactgcggggacagggaccgagaccttacttgccaccttcctttgttgcctataggatatttttctgtgtgtgagatcactctt

SEQ ID NO: 92325 - DNA, 600 bp, Chicken  19866894409119_1
aactgctacagtgggagtcttgtttactctttggatgactcctctctctgtaacttgtaattgctaagtggtgggatgcttcgctttaacacaagagaagaacaaacagggcaaaagtactagtggtgggagcagacacattctgtttgttgtactttcatcttgcaaagtaacatgatttaagttttgaaatatcctaaactgaggaaaaactggacagggttttgatcttcttagcattatataaaagagcttattttttggtatcttgcttagctctacagaaaaactaacgtggayttgggcctgatgaaagaagaaaaagaccagattgctagaacagtactagagataaatggaatagtagtaaataatttccagagggcatttatttgaaaactgtgggcccagaattggatgagatgaaggtaaggtgacatactaattaaagggtaagatgattatgatgatataattattaagatcaaaagttactgtgaaatttacatccaagcattcagaacagagaaatgacagccagcagctatagttcttccctgatgtaatgtcatgttaaacttctgttaaacttagaatcat

SEQ ID NO: 92326 - DNA, 599 bp, Chicken  19866894409120_1
  misc_feature (1)..(103): n is any nucleotide
nnnnnnnnnnnnnnnnnnnnnnnnnnnnnnnnnnnnnnnnnnnnnnnnnnnnnnnnnnnnnnnnnnnnnnnnnnnnnnnnnnnnnnnnnnnnnnnnnnnnnnntttttaacgctagtctatcatactggaacttctcttaatttacacataaacacttatagcagctctgctgtacatatagcacaccttgagaagggtctgtaatattgatcaaggtaattaatttgtgatgtaacaattagatcatgtcacatttgatgcatacaacagtcacagagatacatatttgctcaaaatgrgcaaatctaaacagataatcacaactaaccaacctaaaccagarcagttgatttaaaagaaaagtcagtattttccaacataaataaaatatgacaaggtctttaaactgatattcagtttagaatacatcatttttttattaattgagactctccaggcagcagtggtacaagataaaataaaatgaatggcatagaatctaccattgcctgaagcacctcaattaactttccacaaaatatccagctacacacttaaagacagcattttatgattttaatgacaatattctacattt

SEQ ID NO: 92327 - DNA, 599 bp, Chicken  19866894409120_2
  misc_feature (1)..(59): n is any nucleotide
nnnnnnnnnnnnnnnnnnnnnnnnnnnnnnnnnnnnnnnnnnnnnnnnnnnnnnnnnnntttttaacgctagtctatcatactggaacttctcttaatttacacataaacacttatagcagctctgctgtacatatagcacaccttgagaagggtctgtaatattgatcaaggtaattaatttgtgatgtaacaattagatcatgtcacatttgatgcatacaacagtcacagagatacatatttgctcaaaatgrgcaaatctaaacagataatcacaactaaccaacctaaaccagarcagttgatttaaaagaaaagtcagtattttccaacataaataaaatatgacaaggtctttaaactgatattcagtttagaatacatcatttttttattaattgagactctccaggcagcagtggtacaagataaaataaaatgaatggcatagaatctaccattgcctgaagcacctcaattaactttccacaaaatatccagctacacacttaaagacagcattttatgattttaatgacaatattctacatttctgatggggataaattagtttaaagacaacttatttcaataaga

SEQ ID NO: 92328 - DNA, 425 bp, Chicken  19866894409130_1
gttttagatgaactaccagtactgggggaagtgaccacaagtctaactttttggtagcttgctgatgttctttacagtttggacaatacctacaagaaaaaaaaataccaattttaaaaaaactgctgtctgtatacatactaaaatacgtcgccatagggaaagccagtaacaagggaagaactgaattagcaaaagtttacacacacatttcatcttcgaatacaagtgccactgatatctcttctagtttaaaacataaggtgctactggaagcaggttcacagtggagttcaaccrtattttaaacacatcagtagcagctccttctctctcttcaccatatagtaatctctgtagtcttttctcacagttttctcacattttgtaaagaataaagatcaggaaaactgagtataagaaag

SEQ ID NO: 92329 - DNA, 600 bp, Chicken  19866894409143_1
tttgctgatcatctactatggtcgtcgcatttctcccgccaattcctacagagggggacaatcacctctctctccctgctagccaccacttttcttaatgcagcccaggatatagttggccttccaggctgcaagtgcacactgctggctcatgtccagcttctcatccaccaggacccccaaaatattcataaacctttatgtgatcccccccttagacctcttttccccaagctgaacagacccatgtttctcagcctttcgtagaaccatagaatcacagaatggattgggttggargggtccccaaggatcatcaagttccaaccactctggagggacaccaacttccagatctggtactagaccaggttgcccagggtcccatccaaacctgtctggaactcctccaagggacggagcatccacagtctttctaggcagcctgttccagcaccgcaccactctttctataaaggacttccccctggcatccaatctaaaccttcactccttgagcttaaaaccatgcttccttgccttatcactgactagccttgtaaaaagtttattttcctcctttttataatcccctttgta

SEQ ID NO: 92330 - DNA, 600 bp, Chicken  19866894409143_2
ggatggcctacttctacctgtgggccacactctttttcatgcaccccaggagaccattggccttcttggccacgagggcaaactgctggctcataaccaatccattgtccaccaaaacacccagatccctctctgcagagcttatctccatcaggtcatcccgtaacctgtactgatgcatgtggttattccttctcaggctcaagactctacttgctcttgtcacatctcgtcaggttcctatctgcccagctctccagtctgtccaggtactgttgaatggtagcaaagccttccacygtgttagccactcctcccagctgtgtatcctccgcaaacttgctgagagtggactctatcccttcatctaggtcattgatgaagatgttgaacaagaccagatcctgtacaaacgactcgggaacatcagtggttacaggcctctaaccagactgcgccactgatgaccacctcctgagctctgccagtcaaccagttgtcaatccacttcaccatccactcatctatccccacagttctaagtttcaaaacaaggatggtgtggaatacggtatcaaatgccttgctgaagtcaaggca

SEQ ID NO: 92331 - DNA, 600 bp, Chicken  19866894409149_1
taatcttgttattcttttgctgaatttttgaatgcagaatttgatcctacatgtaaaatagactgtgcaagtgcaacatggtagcatttttaaaaaagtggccaccaagaagcaaattaaggtagaggaaaactgtttggaagtgtttggtaatgcttctcagcaggcagggcatgcacagtttctatatacagtagcctagcatttccaaagggcagagagagatgaaggataaaggataatcttttgtagcttcaaggcatgtgagctttatggatgctcatttgcagttggggtgcycaagcaatgctatctttcagtcagtttttgctttactgagagttttctttaaagtgtcatgacagaaaattgacaaggttaggaacatacctattatgtgcttcttttaaaagaaataaattaaaatstcatttcatatcaagatttttgcaacactgtttatgactttgtcaaataatgcagtgatttgaaacatgcccaaaacatgtttaagagctgcactgctatagattagtgcatttgtaacatattttatttggatttatctctgctcatatggaatgatgtatttttccccaa

SEQ ID NO: 92332 - DNA, 600 bp, Chicken  19866894409149_2
aaaactgtttggaagtgtttggtaatgcttctcagcaggcagggcatgcacagtttctatatacagtagcctagcatttccaaagggcagagagagatgaaggataaaggataatcttttgtagcttcaaggcatgtgagctttatggatgctcatttgcagttggggtgcycaagcaatgctatctttcagtcagtttttgctttactgagagttttctttaaagtgtcatgacagaaaattgacaaggttaggaacatacctattatgtgcttcttttaaaagaaataaattaaaatstcatttcatatcaagatttttgcaacactgtttatgactttgtcaaataatgcagtgatttgaaacatgcccaaaacatgtttaagagctgcactgctatagattagtgcatttgtaacatattttatttggatttatctctgctcatatggaatgatgtatttttccccaagaacaatacagataaaggctgaagattacagtttgtgttagagtgggtaagagcagataagggtatttctctttgtggaagatgaaacaactagaagaagagctgaagaacaacaaagacgctctttc

SEQ ID NO: 92333 - DNA, 599 bp, Chicken  19866894409160_1
  misc_feature (1)..(18): n is any nucleotide
nnnnnnnnnnnnnnnnnncccagacagcaggctttaactgttcaaacaatagacctttataaactccttaaactagaaggcagtttgacatccaaaataccttgttatagtttcctacaacccttacaaaaagcatctaatatgcttcagtgtttttaatctgtcagtaatcctctttacaaaagttgtattctttctctgattgataaattatcaattatgtacaagcagtgaattagctggaataagaaacttttaatatttgccttaagcccttcttaaatgacagacgtggaagcrctgtagaattaaattaagcatgtaaatgctaaacaaagggaagaaatacttgtgaccatttaatctcgtttgttaaagtcgatgattttaatgggagaaatgaaaaggtcatatctaggtttaccatgaaacatgtttaatattaacaaagaaaatgagctcttcaggaaaagatgctgaaagaagcgagatactgtagataagactaataasaatcwgagaagagaaaatttcacatgaaataaaaaaaggaaagagcgagaatgacttagctgaaaatcagtgagtagaagatagga

SEQ ID NO: 92334 - DNA, 600 bp, Chicken  19866894409160_2
tcaattatgtacaagcagtgaattagctggaataagaaacttttaatatttgccttaagcccttcttaaatgacagacgtggaagcrctgtagaattaaattaagcatgtaaatgctaaacaaagggaagaaatacttgtgaccatttaatctcgtttgttaaagtcgatgattttaatgggagaaatgaaaaggtcatatctaggtttaccatgaaacatgtttaatattaacaaagaaaatgagctcttcaggaaaagatgctgaaagaagcgagatactgtagataagactaataasaatcwgagaagagaaaatttcacatgaaataaaaaaaggaaagagcgagaatgacttagctgaaaatcagtgagtagaagataggaccaaaaggattaagtaatgggataactcttgcaaatgttaacttatttactaatgaaaatggccaaataaaactataactggatgtttaatatcctcaaataaccatgactttacattatgttagtgatttcagtaggttttttaaaatttatagtcggtgtcacagtctgccctatttttttcttgactgatgatcttttacagagatgtctt

SEQ ID NO: 92335 - DNA, 600 bp, Chicken  19866894409160_3
tatgtacaagcagtgaattagctggaataagaaacttttaatatttgccttaagcccttcttaaatgacagacgtggaagcrctgtagaattaaattaagcatgtaaatgctaaacaaagggaagaaatacttgtgaccatttaatctcgtttgttaaagtcgatgattttaatgggagaaatgaaaaggtcatatctaggtttaccatgaaacatgtttaatattaacaaagaaaatgagctcttcaggaaaagatgctgaaagaagcgagatactgtagataagactaataasaatcwgagaagagaaaatttcacatgaaataaaaaaaggaaagagcgagaatgacttagctgaaaatcagtgagtagaagataggaccaaaaggattaagtaatgggataactcttgcaaatgttaacttatttactaatgaaaatggccaaataaaactataactggatgtttaatatcctcaaataaccatgactttacattatgttagtgatttcagtaggttttttaaaatttatagtcggtgtcacagtctgccctatttttttcttgactgatgatcttttacagagatgtctttttct

SEQ ID NO: 92336 - DNA, 600 bp, Chicken  19866894409160_4
tagctgtattaaaaggtcataaaggataccacttgctttcctgtggaattcactgaggggaattagttttcatcagctcctggaaaacatgttaataaatttttgtggcaaacaacatgtccgagaaaaaaaaagactaggcaggcctctcaacagtgtagggtgaacaagcacatcagggattagcataactgcagctcccctgggtttcaggaaaaatacagagctcatcttaggaagaagccagttcattcagcaactaaatgcactgcagacaattactgcctgttaaaatttcaraaactttatagcagccatcacaactgttctgggactcaggtatttttcttccttttcagattcttttcccctctatttctgaaacttgcatttcaacatcttttacacacacamamacaaaaaaaataggaataagacaaaaaataaatcccaatttccatatgcagtgctgtaatctgtgtattcatttatgttccatagcaaaaacactgctgctgtttttgtgaatttgtgaagcatttcaaartgatgccaaccatcagaatcagattttcttgattctgatatgagaatctgatg

SEQ ID NO: 92337 - DNA, 600 bp, Chicken  19866894409160_5
acatgtccgagaaaaaaaaagactaggcaggcctctcaacagtgtagggtgaacaagcacatcagggattagcataactgcagctcccctgggtttcaggaaaaatacagagctcatcttaggaagaagccagttcattcagcaactaaatgcactgcagacaattactgcctgttaaaatttcaraaactttatagcagccatcacaactgttctgggactcaggtatttttcttccttttcagattcttttcccctctatttctgaaacttgcatttcaacatcttttacacacacamamacaaaaaaaataggaataagacaaaaaataaatcccaatttccatatgcagtgctgtaatctgtgtattcatttatgttccatagcaaaaacactgctgctgtttttgtgaatttgtgaagcatttcaaartgatgccaaccatcagaatcagattttcttgattctgatatgagaatctgatgatggtaaattgagatactgcctgcaaccaacaaaagaattatttgagagactaaatgggactacatctccttcccatcattaacactgtgcagcaagcgtagccttgtgttatg

SEQ ID NO: 92338 - DNA, 600 bp, Chicken  19866894409160_6
atgtccgagaaaaaaaaagactaggcaggcctctcaacagtgtagggtgaacaagcacatcagggattagcataactgcagctcccctgggtttcaggaaaaatacagagctcatcttaggaagaagccagttcattcagcaactaaatgcactgcagacaattactgcctgttaaaatttcaraaactttatagcagccatcacaactgttctgggactcaggtatttttcttccttttcagattcttttcccctctatttctgaaacttgcatttcaacatcttttacacacacamamacaaaaaaaataggaataagacaaaaaataaatcccaatttccatatgcagtgctgtaatctgtgtattcatttatgttccatagcaaaaacactgctgctgtttttgtgaatttgtgaagcatttcaaartgatgccaaccatcagaatcagattttcttgattctgatatgagaatctgatgatggtaaattgagatactgcctgcaaccaacaaaagaattatttgagagactaaatgggactacatctccttcccatcattaacactgtgcagcaagcgtagccttgtgttatgct

SEQ ID NO: 92339 - DNA, 600 bp, Chicken  19866894409160_7
gtccgagaaaaaaaaagactaggcaggcctctcaacagtgtagggtgaacaagcacatcagggattagcataactgcagctcccctgggtttcaggaaaaatacagagctcatcttaggaagaagccagttcattcagcaactaaatgcactgcagacaattactgcctgttaaaatttcaraaactttatagcagccatcacaactgttctgggactcaggtatttttcttccttttcagattcttttcccctctatttctgaaacttgcatttcaacatcttttacacacacamamamaaaaaaaataggaataagacaaaaaataaatcccaatttccatatgcagtgctgtaatctgtgtattcatttatgttccatagcaaaaacactgctgctgtttttgtgaatttgtgaagcatttcaaartgatgccaaccatcagaatcagattttcttgattctgatatgagaatctgatgatggtaaattgagatactgcctgcaaccaacaaaagaattatttgagagactaaatgggactacatctccttcccatcattaacactgtgcagcaagcgtagccttgtgttatgctgc

SEQ ID NO: 92340 - DNA, 505 bp, Chicken  19866894409160_8
ttcattcagcaactaaatgcactgcagacaattactgcctgttaaaatttcaraaactttatagcagccatcacaactgttctgggactcaggtatttttcttccttttcagattcttttcccctctatttctgaaacttgcatttcaacatcttttacacacacamamacaaaaaaaataggaataagacaaaaaataaatcccaatttccatatgcagtgctgtaatctgtgtattcatttatgttccatagcaaaaacactgctgctgtttttgtgaatttgtgaagcatttcaaartgatgccaaccatcagaatcagattttcttgattctgatatgagaatctgatgatggtaaattgagatactgcctgcaaccaacaaaagaattatttgagagactaaatgggactacatctccttcccatcattaacactgtgcagcaagcgtagccttgtgttatgctgcaaaccagtagccatttcactgaggagcatcccag

SEQ ID NO: 92341 - DNA, 600 bp, Chicken  19866894409161_1
taccatatcaatatttgtgttcaagtatacctcaattcctttgctttcttatttaaccaagagtattaatgtaattcaaccaaatataaattatgttggcttttaaaaggagattgcctaagctcaatagtgagcatctgcttcattaatacataatactttctaaaaagaaagaaattcctaaagaaaagagtgacttgattaccttcccaccttattactatggatgcagctctacttggagttgaacaaagcaaaatgaagatagcagcttagtttagaatatcacactgaataggraaaaaaaaaagacagcattaaatttacctcatttttagctttttcttaagtgaaggtaaatagcttaagcatttttgagatgtgctctgcccacttctcagaaaaagaataaacagtatcaaaagattcatctttctgctcattgcattttaaggaataattaaaagctacattgaaatgaagcctctatatgttctgktttttttgttttttgttttyaagagcattcttatagttttctgtactgagctgtcgattccagataccatgagmgccagctaagcagttggatgtctggca

SEQ ID NO: 92342 - DNA, 537 bp, Chicken  19866894409161_2
gattaccttcccaccttattactatggatgcagctctacttggagttgaacaaagcaaaatgaagatagcagcttagtttagaatatcacactgaataggaaaaaaaaaaagacagcattaaatttacctcatttttagctttttcttaagtgaaggtaaatagcttaagcatttttgagatgtgctctgcccacttctcagaaaaagaataaacagtatcaaaagattcatctttctgctcattgcattttaaggaataattaaaagctacattgaaatgaagcctctatatgttctgktttttttgttttttgttttyaagagcattcttatagttttctgtactgagctgtcgattccagataccatgagmgccagctaagcagttggatgtctggcattgcgagaaataacccctgctctgagaacttttgagatcacgggacactgtaatcaaagcacacagttcttgcttcctgatgaacctggaatgtttttctaaaattgcatctaaaaggcctgacagtcttcattca

SEQ ID NO: 92343 - DNA, 517 bp, Chicken  19866894409161_3
actatggatgcagctctacttggagttgaacaaagcaaaatgaagatagcagcttagtttagaatatcacactgaataggaaaaaaaaaaagacagcattaaatttacctcatttttagctttttcttaagtgaaggtaaatagcttaagcatttttgagatgtgctctgcccacttctcagaaaaagaataaacagtatcaaaagattcatctttctgctcattgcattttaaggaataattaaaagctacattgaaatgaagcctctatatgttctgktttttttgttttttgttttyaagagcattcttatagttttctgtactgagctgtcgattccagataccatgagmgccagctaagcagttggatgtctggcattgcgagaaataacccctgctctgagaacttttgagatcacgggacactgtaatcaaagcacacagttcttgcttcctgatgaacctggaatgtttttctaaaattgcatctaaaaggcctgacagtcttcattca

SEQ ID NO: 92344 - DNA, 463 bp, Chicken  19866894409161_4
tagtttagaatatcacactgaataggaaaaaaaaaaagacagcattaaatttacctcatttttagctttttcttaagtgaaggtaaatagcttaagcatttttgagatgtgctctgcccacttctcagaaaaagaataaacagtatcaaaagattcatctttctgctcattgcattttaaggaataattaaaagctacattgaaatgaagcctctatatgttctgktttttttgttttttgttttyaagagcattcttatagttttctgtactgagctgtcgattccagataccatgagmgccagctaagcagttggatgtctggcattgcgagaaataacccctgctctgagaacttttgagatcacgggacactgtaatcaaagcacacagttcttgcttcctgatgaacctggaatgtttttctaaaattgcatctaaaaggcctgacagtcttcattca

SEQ ID NO: 92345 - DNA, 600 bp, Chicken  19866894409165_1
tgacatagaaccacaacaacaacttcagccaaatagcttggaaaatgtacacactgagtactgtgtgtccttgaaacaatatttactgtttgtttgttccttagccagaagagatgcagatacattttcttcttattaggagactgcaaaatcagaccaaatagctatccctgggcacagattttacacaaggtacttaggataccacttaggatgattagcatgactttgaattcgtatgagctctcttctctccacactattatttgatgagctactttggcttgctgaaccacgcamagacgacatgcaacttaggtctctgatcctacaagcyrttccacatgggagatgcctgacttcttgcccagmctcactgaggctgagaacatctccatagaaatttacatccatttatgtaggaccaaaatcagccaccgtgtatgactcctggcacgactcaaayataatgctgatctgcactgactgagttagcaggcaaggmacattacataaaataagctatgttaagtgatccttcgcctattcctcgtgctacagaaatacctttgtctcaataaaaagccatctccactctgt

SEQ ID NO: 92346 - DNA, 600 bp, Chicken  19866894409165_2
ttggaaaatgtacacactgagtactgtgtgtccttgaaacaatatttactgtttgtttgttccttagccagaagagatgcagatacattttcttcttattaggagactgcaaaatcagaccaaatagctatccctgggcacagattttacacaaggtacttaggataccacttaggatgattagcatgactttgaattcgtatgagctctcttctctccacactattatttgatgagctactttggcttgctgaaccacgcamagacgacatgcaacttaggtctctgatcctacaagcyrttccacatgggagatgcctgacttcttgcccagmctcactgaggctgagaacatctccatagaaatttacatccatttatgtaggaccaaaatcagccaccgtgtatgactcctggcacgactcaaayataatgctgatctgcactgactgagttagcaggcaaggmacattacataaaataagctatgttaagtgatccttcgcctattcctcgtgctacagaaatacctttgtctcaataaaaagccatctccactctgtccactgtcctctgtgcaaagggcagaacaaagcttat

SEQ ID NO: 92347 - DNA, 600 bp, Chicken  19866894409165_3
tggaaaatgtacacactgagtactgtgtgtccttgaaacaatatttactgtttgtttgttccttagccagaagagatgcagatacattttcttcttattaggagactgcaaaatcagaccaaatagctatccctgggcacagattttacacaaggtacttaggataccacttaggatgattagcatgactttgaattcgtatgagctctcttctctccacactattatttgatgagctactttggcttgctgaaccacgcamagacgacatgcaacttaggtctctgatcctacaagcyrttccacatgggagatgcctgacttcttgcccagmctcactgaggctgagaacatctccatagaaatttacatccatttatgtaggaccaaaatcagccaccgtgtatgactcctggcacgactcaaayataatgctgatctgcactgactgagttagcaggcaaggmacattacataaaataagctatgttaagtgatccttcgcctattcctcgtgctacagaaatacctttgtctcaataaaaagccatctccactctgtccactgtcctctgtgcaaagggcagaacaaagcttatt

SEQ ID NO: 92348 - DNA, 600 bp, Chicken  19866894409165_4
gaaacaatatttactgtttgtttgttccttagccagaagagatgcagatacattttcttcttattaggagactgcaaaatcagaccaaatagctatccctgggcacagattttacacaaggtacttaggataccacttaggatgattagcatgactttgaattcgtatgagctctcttctctccacactattatttgatgagctactttggcttgctgaaccacgcamagacgacatgcaacttaggtctctgatcctacaagcyrttccacatgggagatgcctgacttcttgcccagmctcactgaggctgagaacatctccatagaaatttacatccatttatgtaggaccaaaatcagccaccgtgtatgactcctggcacgactcaaayataatgctgatctgcactgactgagttagcaggcaaggmacattacataaaataagctatgttaagtgatccttcgcctattcctcgtgctacagaaatacctttgtctcaataaaaagccatctccactctgtccactgtcctctgtgcaaagggcagaacaaagcttattttcaggtgctctgcacttttagaatctaagggca

SEQ ID NO: 92349 - DNA, 600 bp, Chicken  19866894409165_5
atccctgggcacagattttacacaaggtacttaggataccacttaggatgattagcatgactttgaattcgtatgagctctcttctctccacactattatttgatgagctactttggcttgctgaaccacgcamagacgacatgcaacttaggtctctgatcctacaagcyrttccacatgggagatgcctgacttcttgcccagmctcactgaggctgagaacatctccatagaaatttacatccatttatgtaggaccaaaatcagccaccgtgtatgactcctggcacgactcaaayataatgctgatctgcactgactgagttagcaggcaaggmacattacataaaataagctatgttaagtgatccttcgcctattcctcgtgctacagaaatacctttgtctcaataaaaagccatctccactctgtccactgtcctctgtgcaaagggcagaacaaagcttattttcaggtgctctgcacttttagaatctaagggcacagaaaaacagatcatttactccaatctcctttatatcacaagcatttcacctttgcaacttgaagagaaatcagtagtttacttctgatttaa

SEQ ID NO: 92350 - DNA, 600 bp, Chicken  19866894409165_6
cacttaggatgattagcatgactttgaattcgtatgagctctcttctctccacactattatttgatgagctactttggcttgctgaaccacgcamagacgacatgcaacttaggtctctgatcctacaagcyrttccacatgggagatgcctgacttcttgcccagmctcactgaggctgagaacatctccatagaaatttacatccatttatgtaggaccaaaatcagccaccgtgtatgactcctggcacgactcaaayataatgctgatctgcactgactgagttagcaggcaaggmacattacataaaataagctatgttaagtgatccttcgcctattcctcgtgctacagaaatacctttgtctcaataaaaagccatctccactctgtccactgtcctctgtgcaaagggcagaacaaagcttattttcaggtgctctgcacttttagaatctaagggcacagaaaaacagatcatttactccaatctcctttatatcacaagcatttcacctttgcaacttgaagagaaatcagtagtttacttctgatttaagtagaatgtgtttagctgaaggttaacaacctttgcatc

SEQ ID NO: 92351 - DNA, 600 bp, Chicken  19866894409173_1
tcttaattgtccgtttagaatttctcgatagttccccatcttaactgaaaccctaacaaaactgctaatgatttataattcattacagttgtaatacatttatgtagcaacctcgaaaacaacgtttaaaacaaatcaggagaacaatttgaactcagtagatgaagagttttgtatgggataaatattctacttagctgcttgactaagagactgagaattcaaacctaaaagaatccctaacattaccttgctttctccttcagcaacaaggccctgtgcagggctgtatcctgtatkgaggtgattatgagttatgaaataactatccttgaggaaactgtgattagaagaaaaagaatattgaaaacactgcttctgtgtgagcaaactggaaaaagaaattgctgaaatgaatggtttaatggtttgtttgtttgttttgtgtcctayacstktagaggccagtgaatctgcagaggactcggacagtggaagttcttccctttcgtctgaggaagaaggagaaattcgggagagttcctgacagttctttgagagaagagggtgggatgagccttttatattttcttatttaat

SEQ ID NO: 92352 - DNA, 600 bp, Chicken  19866894409173_2
ctcagtagatgaagagttttgtatgggataaatattctacttagctgcttgactaagagactgagaattcaaacctaaaagaatccctaacattaccttgctttctccttcagcaacaaggccctgtgcagggctgtatcctgtatkgaggtgattatgagttatgaaataactatccttgaggaaactgtgattagaagaaaaagaatattgaaaacactgcttctgtgtgagcaaactggaaaaagaaattgctgaaatgaatggtttaatggtttgtttgtttgttttgtgtcctayacstktagaggccagtgaatctgcagaggactcggacagtggaagttcttccctttcgtctgaggaagaaggagaaattcgggagagttcctgacagttctttgagagaagagggtgggatgagccttttatattttcttatttaattaaatcttttttgcacaactaatttctctgaggttcagtttggtttgcttcacttaaggcagcacttccaaacwgcctccctgactttggatttagtatgcatatttaggtctgtaaataaagagattggaagtggctggttccagaaaaatc

SEQ ID NO: 92353 - DNA, 600 bp, Chicken  19866894409173_3
agtagatgaagagttttgtatgggataaatattctacttagctgcttgactaagagactgagaattcaaacctaaaagaatccctaacattaccttgctttctccttcagcaacaaggccctgtgcagggctgtatcctgtatkgaggtgattatgagttatgaaataactatccttgaggaaactgtgattagaagaaaaagaatattgaaaacactgcttctgtgtgagcaaactggaaaaagaaattgctgaaatgaatggtttaatggtttgtttgtttgttttgtgtcctayacstktagaggccagtgaatctgcagaggactcggacagtggaagttcttccctttcgtctgaggaagaaggagaaattcgggagagttcctgacagttctttgagagaagagggtgggatgagccttttatattttcttatttaattaaatcttttttgcacaactaatttctctgaggttcagtttggtttgcttcacttaaggcagcacttccaaacwgcctccctgactttggatttagtatgcatatttaggtctgtaaataaagagattggaagtggctggttccagaaaaatctgc

SEQ ID NO: 92354 - DNA, 600 bp, Chicken  19866894409173_4
tagatgaagagttttgtatgggataaatattctacttagctgcttgactaagagactgagaattcaaacctaaaagaatccctaacattaccttgctttctccttcagcaacaaggccctgtgcagggctgtatcctgtatkgaggtgattatgagttatgaaataactatccttgaggaaactgtgattagaagaaaaagaatattgaaaacactgcttctgtgtgagcaaactggaaaaagaaattgctgaaatgaatggtttaatggtttgtttgtttgttttgtgtcctayacstktagaggccagtgaatctgcagaggactcggacagtggaagttcttccctttcgtctgaggaagaaggagaaattcgggagagttcctgacagttctttgagagaagagggtgggatgagccttttatattttcttatttaattaaatcttttttgcacaactaatttctctgaggttcagtttggtttgcttcacttaaggcagcacttccaaacwgcctccctgactttggatttagtatgcatatttaggtctgtaaataaagagattggaagtggctggttccagaaaaatctgctg

SEQ ID NO: 92355 - DNA, 600 bp, Chicken  19866894409173_5
gcttctgtgtgagcaaactggaaaaagaaattgctgaaatgaatggtttaatggtttgtttgtttgttttgtgtcctayacstktagaggccagtgaatctgcagaggactcggacagtggaagttcttccctttcgtctgaggaagaaggagaaattcgggagagttcctgacagttctttgagagaagagggtgggatgagccttttatattttcttatttaattaaatcttttttgcacaactaatttctctgaggttcagtttggtttgcttcacttaaggcagcacttccaaacwgcctccctgactttggatttagtatgcatatttaggtctgtaaataaagagattggaagtggctggttccagaaaaatctgctgattttactgcatagcacccctttgtccatgtatctattaaatcaatagcccaaatgtaaagtttccaagctggtttcaacagtgtgtattttttccttttatcataacacctcagtgtcagatttctgtaagtataaataccacacattgtgtttatttgtggatttgagtcacagtgcttcaacttactgataaaatcttgtgtttcattaggtt

SEQ ID NO: 92356 - DNA, 466 bp, Chicken  19866894409181_1
atcatcagaggtggaagctctactggaattctctacagctgacacaggaaggcctagaaaggcaccagcagaccattcattttcatagaatcacgagttggaagggacccttaaaggtcatctggtccaaatcccctacaatggacagggacacctacagcctccatcaggttgctcagagcctggtccagcctgatcttgaacatcttgagggatggggcatccaccgcctctctgggccacctgtgcatgcacctcacctcccttatcgtaaaaaatttcttccttatatccaatctmaatctcccctgctttagttcaaaaccatttccccttgtcttatcatagcacatcctgctaaagggtctcccccttctttcttatggccccctgctagatactgaaagggtgctctcaagtatccctggagccttctcttctccaggctgaacagctccagctctct

SEQ ID NO: 92357 - DNA, 600 bp, Chicken  19866894409183_1
cacacaacttgctaactgagctgctgagcacagagcagcgctggctcagggctgaacacatcaatctggaaacccttttccctgcagagctcggcagtcgctgccaactgaagggcctccgccttgcgtgcaatttcctgttctgatttgtgcttgggttttcaagccctttaggctctcagtgctagaattgcctaaatgaacacacaacctcttgcacagacagcccaagctgccacctgctgtggcaggtgaagtcacctttttgaaagaagccttcctctaacttcaggcttgtgycctratgaataagggaataaattcttccctgaactcttgccttctcaataacacaatgccttttacatacttctaattccttctttaaaygatgctgataaaggagggcatyagtatgcaagcatgtgcctgcagatacgtggtgtgccctaatcgcttgatctggggaaggatgctggctttggctgcgtctcgcttgaattagtctggtaacctccagcagctgaatgcttaatttgctcacgagtctgtgaactgctgccctctattgcacaaatccaacacaacactgacaccgtc

SEQ ID NO: 92358 - DNA, 600 bp, Chicken  19866894409183_2
caacttgctaactgagctgctgagcacagagcagcgctggctcagggctgaacacatcaatctggaaacccttttccctgcagagctcggcagtcgctgccaactgaagggcctccgccttgcgtgcaatttcctgttctgatttgtgcttgggttttcaagccctttaggctctcagtgctagaattgcctaaatgaacacacaacctcttgcacagacagcccaagctgccacctgctgtggcaggtgaagtcacctttttgaaagaagccttcctctaacttcaggcttgtgycctratgaataagggaataaattcttccctgaactcttgccttctcaataacacaatgccttttacatacttctaattccttctttaaaygatgctgataaaggagggcatyagtatgcaagcatgtgcctgcagatacgtggtgtgccctaatcgcttgatctggggaaggatgctggctttggctgcgtctcgcttgaattagtctggtaacctccagcagctgaatgcttaatttgctcacgagtctgtgaactgctgccctctattgcacaaatccaacacaacactgacaccgtcccct

SEQ ID NO: 92359 - DNA, 600 bp, Chicken  19866894409183_3
tcggcagtcgctgccaactgaagggcctccgccttgcgtgcaatttcctgttctgatttgtgcttgggttttcaagccctttaggctctcagtgctagaattgcctaaatgaacacacaacctcttgcacagacagcccaagctgccacctgctgtggcaggtgaagtcacctttttgaaagaagccttcctctaacttcaggcttgtgycctratgaataagggaataaattcttccctgaactcttgccttctcaataacacaatgccttttacatacttctaattccttctttaaaygatgctgataaaggagggcatyagtatgcaagcatgtgcctgcagatacgtggtgtgccctaatcgcttgatctggggaaggatgctggctttggctgcgtctcgcttgaattagtctggtaacctccagcagctgaatgcttaatttgctcacgagtctgtgaactgctgccctctattgcacaaatccaacacaacactgacaccgtcccctggtagcagcaagaggaaaagggagtgtacagggtgagaacaaaagccagacagaaagtgccagtggtcctccttggaaaaactcgt

SEQ ID NO: 92360 - DNA, 600 bp, Chicken  19866894409183_4
gggcctccgccttgcgtgcaatttcctgttctgatttgtgcttgggttttcaagccctttaggctctcagtgctagaattgcctaaatgaacacacaacctcttgcacagacagcccaagctgccacctgctgtggcaggtgaagtcacctttttgaaagaagccttcctctaacttcaggcttgtgycctratgaataagggaataaattcttccctgaactcttgccttctcaataacacaatgccttttacatacttctaattccttctttaaaygatgctgataaaggagggcatyagtatgcaagcatgtgcctgcagatacgtggtgtgccctaatcgcttgatctggggaaggatgctggctttggctgcgtctcgcttgaattagtctggtaacctccagcagctgaatgcttaatttgctcacgagtctgtgaactgctgccctctattgcacaaatccaacacaacactgacaccgtcccctggtagcagcaagaggaaaagggagtgtacagggtgagaacaaaagccagacagaaagtgccagtggtcctccttggaaaaactcgtgagcaattatgttagctattat

SEQ ID NO: 92361 - DNA, 542 bp, Chicken  19866894409197_1
tatttatggctcttacttttttttagctacctttttatatatcggaatctgccaacattgtatttataaggtttatgtactagcagcgtttgttgggcagggatttgcattattttatgtttctttcctcctacacttaccattactgaatctatatacaaatgcttgtaaaggtttttttaaaaacacacaaaaagaagttctgtagaaatgggatgtttaaaaaatgaattctctagaagctgaatgtttgatgtgtttaatttcgggtattctcccagcaataatcccgaatgcccrtgcttatgacagagcctattctgaggctggccgtgttttccaaggtcttctctgttgaatcatagatcaggaagtgtttacacaccgagaaatccaaagttcctcctatggctatcaattccagtctctaaatatctctaattactgtgcaaagaacaactatgtcttcaagagttccttcctttttttcctcccttccttccttctgtccatctgtcttaaggcaacgctgctacaatggg

SEQ ID NO: 92362 - DNA, 599 bp, Chicken  19866894409198_1
  misc_feature (1)..(223): n is any nucleotide
nnnnnnnnnnnnnnnnnnnnnnnnnnnnnnnnnnnnnnnnnnnnnnnnnnnnnnnnnnnnnnnnnnnnnnnnnnnnnnnnnnnnnnnnnnnnnnnnnnnnnnnnnnnnnnnnnnnnnnnnnnnnnnnnnnnnnnnnnnnnnnnnnnnnnnnnnnnnnnnnnnnnnnnnnnnnnnnnnnnnnnnnnnnnnnnnnnnnnnnnnnnnnnnnnnnnnnnnnnnnnnncttttagggaatgttttcttgagtgtgtcttctggtgtgtattttcttgtttccctttgagctgctaggatgaggcraaggcacgtcccagtttaatgatgcacaggtagttgcttgctgtttgccacactgaaatataataattaacactcttccttgcattttcatatctgtagattttctgttaatgactcatcctaagaaacttcacataaattgactgctgtttcgtgtggacccagtgaaacccaccaaaactacttcaagcttggcagtgcttagctcatgagctccttgtgccttttggatctttgcaacatattgatggtgatttgaggatttgaaagaacctactcaactattttgtggcagtgca

SEQ ID NO: 92363 - DNA, 600 bp, Chicken  19866894409199_1
gctgctaagtatctattcagattttacttttatcacctagctgagtaagtggcgagtttgaactctatatgcagaaagcaaatgcctcttgaatttctcacagacatttaattatacaatcagagatcctttgggcagtaactgttcagatctgttctgtgaactgctatcctgtttttgtttgtttgcgttgtttttgtttttatttgtttgatattgtacaaaaatgatacctatttcctttcctctaagctcaggaaatgcttagtatgtactctttaatttgttcttttccctctyaccaaaacaaacaaacaagaaaacaaataatagagaataaaaatgtcttaaatactgttgaagggacttcttaccacaatattttgtcacatagttatagtggtttcttatggctgcatcttaatggtatggaatcttaatttatatggcaaattcaccttgttttctgcaatgggagtttggtaacatgttaaatttctccttccttgatatatacatatatatagatatatatgtttactggttatagcaaacttactgacttattttaacttacatctaatgctagttttactgaag

SEQ ID NO: 92364 - DNA, 600 bp, Chicken  19866894409201_1
ttggaagggacctcaaggatcatcaagcttcaacccccctgtggcatgcagagccaccaacctccatatttaatactagaccaggctgcccagggtctcatccaacctggccttgaacacctccaaggatggtgcatccacaacttctctgggcagcccgttccagcaccttaccactctctctgtaaagaacttccccctgatatccaatctaaatcttccctccctcaatttaaaaccatttctccttgtcctgccattatctacccttgtaaagaagcaactcccctcctgtttgtmggctccattaaggtactggaaggcttcattgaggtcaccctacagccttctcttctccaggctgaacaagcccagttccttcagcctgtcttcatagggaaggtacttcaggtctctgatcatctctgtggccctcctctggaccctctctaacagctctctgtctttcttgtaytgggggacccagacctggacacagtactccagatctccagactcatcagggcagagtagagagggacaatcacctccctgtccatgctggccacccctcttctgatggagcccaggataccattt

SEQ ID NO: 92365 - DNA, 600 bp, Chicken  19866894409201_2
actctctctgtaaagaacttccccctgatatccaatctaaatcttccctccctcaatttaaaaccatttctccttgtcctgccattatctacccttgtaaagaagcaactcccctcctgtttgtmggctccattaaggtactggaaggcttcattgaggtcaccctacagccttctcttctccaggctgaacaagcccagttccttcagcctgtcttcatagggaaggtacttcaggtctctgatcatctctgtggccctcctctggaccctctctaacagctctctgtctttcttgtaytgggggacccagacctggacacagtactccagatctccagactcatcagggcagagtagagagggacaatcacctccctgtccatgctggccacccctcttctgatggagcccaggataccatttgctttccaagctgcaagagcacactgctggctcaggttaagtttttcatccactaagacccccagatccttctctgcaaagctgctctcaaggactgctcctcccactctgtatatatgcctgggattcctcctgcccaagtgcatcattggagtaggaataaaaacacagtcaa

SEQ ID NO: 92366 - DNA, 600 bp, Chicken  19866894409209_1
tagaggactcacaccctgctcatttggagttaaagtttggggttgtatcattgttatatattaaaggaaaaaagggcttctttttaaatggtaattttggaaaaaaatactatttttatttgacattttcaaatataaataagatgatgtgtgcacatatgtatgatactatgtgtatatactgaagctgctccaaaagtaatgcctcttattttgttatgttgggccatgacatcagaggtggatgttggtggaaatggcagtcgagggtgaatgttcccaccagtatccaatattctrtcacatactgctgctgtgcaacagatggcagcagaagggtaatctgacaaaatarcatctgacatggaggtgtgtaattgaattcctccatgtggaaattaccacactcactgacattcactgacacttgctgaatgtttatagagaccagacagtggatgtgagcacagtgaggtggtgggtggtgcattttagtagtggcaacagtgacagtggttcgcctccactactgcacatttttacgagtgacagtatgcggactcttgttcattgctgtgaaaatgtatagcttaatggtgc

SEQ ID NO: 92367 - DNA, 600 bp, Chicken  19866894409209_2
atatattaaaggaaaaaagggcttctttttaaatggtaattttggaaaaaaatactatttttatttgacattttcaaatataaataagatgatgtgtgcacatatgtatgatactatgtgtatatactgaagctgctccaaaagtaatgcctcttattttgttatgttgggccatgacatcagaggtggatgttggtggaaatggcagtcgagggtgaatgttcccaccagtatccaatattctrtcacatactgctgctgtgcaacagatggcagcagaagggtaatctgacaaaatarcatctgacatggaggtgtgtaattgaattcctccatgtggaaattaccacactcactgacattcactgacacttgctgaatgtttatagagaccagacagtggatgtgagcacagtgaggtggtgggtggtgcattttagtagtggcaacagtgacagtggttcgcctccactactgcacatttttacgagtgacagtatgcggactcttgttcattgctgtgaaaatgtatagcttaatggtgctgcctatgtggaaaaaatagcattttgtagctgagagtttgctctatcaaattgc

SEQ ID NO: 92368 - DNA, 600 bp, Chicken  19866894409221_1
gtgctttgttgagaacagggaaagtgttttgaacagccttagaaagataaaaaatatacgtcttggaaatattactgcctatatagaataatgaggtctcccaaaagatactgcaacttgtttactaaattttttgctgtttgattcagatgttaatttcatgctgcattaaatgaacaacagatagaatctgttttatttaagcattcacatcagtttcagaaatcaaagtttgatacatttttggattaatcttacaaagaaatgaatttagatttgcaagccacagcgactcggaaygttaacagtactggtagtgggaatggagagcgagaaaggcctggagcaggcagaaggcatgcaataatctgtttgtgctgcatactgacagcaggaccttccgatcagatgatagctaggttcaccaccaatttgatttacgcataaatggacccaaagaacaatgactaattgtgtcacgattaattattctttaataattcttggaagtattctaatattctattgagcagattggggccagttcccccccccccccccacttcagaattgcctctattcctggtacacacacagtat

SEQ ID NO: 92369 - DNA, 600 bp, Chicken  19866894409234_1
gcttttttcctattgattaataaggtgcaaaccatatgccctgtgttcacgttgactctaagcaatcaccatatactgttgaaggaggagggattttctttgcaaacataggaaatctgggccaagcacgttaatcctcattcaggcacggcactctgcatttcaaggggagttctgccagagcagtgcttaacaggaggattccgctctgtttgtaagagcatgcagagacaaatgacaactgaacactgacagggtactctgaattatgagagtgaatctgcgctggagagattgtaytggacattccttagagacagycaaggatgaargcacctgagcaaatgggacagcatcacmctcctgtctggctggtgaggctctggggacacaggtggcagaggccagtcatgcaacgaagacaggggactcaagaactgtcattggtatccacagagcttgtctaaaggagctgctacttccacaaagtcagagctaacagagaaaagacagcaactgggatggagacttggcttgctttgctaacgctttaggaaagggggtggctcaccaacagaaagctatgagaggcactgagcg

SEQ ID NO: 92370 - DNA, 600 bp, Chicken  19866894409234_2
aaggtgcaaaccatatgccctgtgttcacgttgactctaagcaatcaccatatactgttgaaggaggagggattttctttgcaaacataggaaatctgggccaagcacgttaatcctcattcaggcacggcactctgcatttcaaggggagttctgccagagcagtgcttaacaggaggattccgctctgtttgtaagagcatgcagagacaaatgacaactgaacactgacagggtactctgaattatgagagtgaatctgcgctggagagattgtaytggacattccttagagacagycaaggatgaargcacctgagcaaatgggacagcatcacmctcctgtctggctggtgaggctctggggacacaggtggcagaggccagtcatgcaacgaagacaggggactcaagaactgtcattggtatccacagagcttgtctaaaggagctgctacttccacaaagtcagagctaacagagaaaagacagcaactgggatggagacttggcttgctttgctaacgctttaggaaagggggtggctcaccaacagaaagctatgagaggcactgagcgagctcctctttcccactcacc

SEQ ID NO: 92371 - DNA, 600 bp, Chicken  19866894409234_3
catatgccctgtgttcacgttgactctaagcaatcaccatatactgttgaaggaggagggattttctttgcaaacataggaaatctgggccaagcacgttaatcctcattcaggcacggcactctgcatttcaaggggagttctgccagagcagtgcttaacaggaggattccgctctgtttgtaagagcatgcagagacaaatgacaactgaacactgacagggtactctgaattatgagagtgaatctgcgctggagagattgtaytggacattccttagagacagycaaggatgaargcacctgagcaaatgggacagcatcacmctcctgtctggctggtgaggctctggggacacaggtggcagaggccagtcatgcaacgaagacaggggactcaagaactgtcattggtatccacagagcttgtctaaaggagctgctacttccacaaagtcagagctaacagagaaaagacagcaactgggatggagacttggcttgctttgctaacgctttaggaaagggggtggctcaccaacagaaagctatgagaggcactgagcgagctcctctttcccactcaccacagggctgtg

SEQ ID NO: 92372 - DNA, 600 bp, Chicken  19866894409234_4
agcaatcaccatatactgttgaaggaggagggattttctttgcaaacataggaaatctgggccaagcacgttaatcctcattcaggcacggcactctgcatttcaaggggagttctgccagagcagtgcttaacaggaggattccgctctgtttgtaagagcatgcagagacaaatgacaactgaacactgacagggtactctgaattatgagagtgaatctgcgctggagagattgtaytggacattccttagagacagycaaggatgaargcacctgagcaaatgggacagcatcacmctcctgtctggctggtgaggctctggggacacaggtggcagaggccagtcatgcaacgaagacaggggactcaagaactgtcattggtatccacagagcttgtctaaaggagctgctacttccacaaagtcagagctaacagagaaaagacagcaactgggatggagacttggcttgctttgctaacgctttaggaaagggggtggctcaccaacagaaagctatgagaggcactgagcgagctcctctttcccactcaccacagggctgtgcaggctttaccctccgtcatctcccccc

SEQ ID NO: 92373 - DNA, 599 bp, Chicken  19866894409237_1
  misc_feature (1)..(187): n is any nucleotide
nnnnnnnnnnnnnnnnnnnnnnnnnnnnnnnnnnnnnnnnnnnnnnnnnnnnnnnnnnnnnnnnnnnnnnnnnnnnnnnnnnnnnnnnnnnnnnnnnnnnnnnnnnnnnnnnnnnnnnnnnnnnnnnnnnnnnnnnnnnnnnnnnnnnnnnnnnnnnnnnnnnnnnnnnnnnnnnnnnnnnnnnnnntgtgctaataaagaactcggccgtgtcctgatccttcttcctccccttcttgtacgggccaacctccttcctggtacagccagacccgggcagccagccggggcaggtggcascgcagggtgacattgtcccccagggacaccccctggctggggtgcagtgacagggagggtcggggcactaggacgggggcagcagtcagccttgtcccttcacaccctcctgagcccctytgctctycccctccactcgcaccccttcctctgtccccattctccccctgtccccatactcacrttgctgtgccctgctcgctgccaccagccaccaacctgcaagggacatggtcctggtcccacactgggccaccaacccccgtggcaccacgtccccatggtcactcaccgagaat

SEQ ID NO: 92374 - DNA, 599 bp, Chicken  19866894409237_2
  misc_feature (1)..(67): n is any nucleotide
nnnnnnnnnnnnnnnnnnnnnnnnnnnnnnnnnnnnnnnnnnnnnnnnnnnnnnnnnnnnnnnnnnntgtgctaataaagaactcggccgtgtcctgatccttcttcctccccttcttgtacgggccaacctccttcctggtacagccagacccgggcagccagccggggcaggtggcascgcagggtgacattgtcccccagggacaccccctggctggggtgcagtgacagggagggtcggggcactaggacgggggcagcagtcagccttgtcccttcacaccctcctgagcccctytgctctycccctccactcgcaccccttcctctgtccccattctccccctgtccccatactcacrttgctgtgccctgctcgctgccaccagccaccaacctgcaagggacatggtcctggtcccacactgggccaccaacccccgtggcaccacgtccccatggtcactcaccgagaatgaggttcactgccattggtgccatgaggcaggagcagcttggggacagtgggactgcagaggggaaaggaagtggccagagtgctgctgtcagttcccctttcttattcaggatgatatg

SEQ ID NO: 92375 - DNA, 599 bp, Chicken  19866894409237_3
  misc_feature (1)..(60): n is any nucleotide
nnnnnnnnnnnnnnnnnnnnnnnnnnnnnnnnnnnnnnnnnnnnnnnnnnnnnnnnnnnntgtgctaataaagaactcggccgtgtcctgatccttcttcctccccttcttgtacgggccaacctccttcctggtacagccagacccgggcagccagccggggcaggtggcascgcagggtgacattgtcccccagggacaccccctggctggggtgcagtgacagggagggtcggggcactaggacgggggcagcagtcagccttgtcccttcacaccctcctgagcccctytgctctycccctccactcgcaccccttcctctgtccccattctccccctgtccccatactcacrttgctgtgccctgctcgctgccaccagccaccaacctgcaagggacatggtcctggtcccacactgggccaccaacccccgtggcaccacgtccccatggtcactcaccgagaatgaggttcactgccattggtgccatgaggcaggagcagcttggggacagtgggactgcagaggggaaaggaagtggccagagtgctgctgtcagttcccctttcttattcaggatgatatgatgtcac

SEQ ID NO: 92376 - DNA, 599 bp, Chicken  19866894409237_4
  misc_feature (1)..(3): n is any nucleotide
nnntgtgctaataaagaactcggccgtgtcctgatccttcttcctccccttcttgtacgggccaacctccttcctggtacagccagacccgggcagccagccggggcaggtggcascgcagggtgacattgtcccccagggacaccccctggctggggtgcagtgacagggagggtcggggcactaggacgggggcagcagtcagccttgtcccttcacaccctcctgagcccctytgctctycccctccactcgcaccccttcctctgtccccattctccccctgtccccatactcacrttgctgtgccctgctcgctgccaccagccaccaacctgcaagggacatggtcctggtcccacactgggccaccaacccccgtggcaccacgtccccatggtcactcaccgagaatgaggttcactgccattggtgccatgaggcaggagcagcttggggacagtgggactgcagaggggaaaggaagtggccagagtgctgctgtcagttcccctttcttattcaggatgatatgatgtcacctcctgatgtggacatwttagcacataggggtggttgcactgtggggcccctctggg

SEQ ID NO: 92377 - DNA, 600 bp, Chicken  19866894409237_5
ccttcctctgtccccattctccccctgtccccatactcacrttgctgtgccctgctcgctgccaccagccaccaacctgcaagggacatggtcctggtcccacactgggccaccaacccccgtggcaccacgtccccatggtcactcaccgagaatgaggttcactgccattggtgccatgaggcaggagcagcttggggacagtgggactgcagaggggaaaggaagtggccagagtgctgctgtcagttcccctttcttattcaggatgatatgatgtcacctcctgatgtggacatwttagcacataggggtggttgcactgtggggcccctctggggtgcgacaagtggagagatgcactctgcacactgcgcctgttgaggtgctccacacgctctcaaccctgggctgtcatggttcatggctgctgcaggagaagcgtaaaagatgactggggggaaaatgaggaaaagagaggaaaagaaaggagagaaattggagagaagcagagaaggaacataagagagagagatgccgggtgaaaagcaatcatggtccattttgaggagttgcagtgctggtgcagaaggggaaatg

SEQ ID NO: 92378 - DNA, 600 bp, Chicken  19866894409249_1
cagcaggtggacgcagctcaaaaggtgccttcaaagcctgactcctgaggaagcctaatggtctgggagatgtgaggatgaaagggggaattaagaaagctgaatgctctcctgtgccctcaggtaaataatttcctccctttcacctcccagcattgctttatttacattttcagctcctggaggccaagcccctcacttgatgtatgcttgcagtggggcagagctcaaagcccaggctggtaggtactcagctcaagcctggtaccaggttttggcatgctggatcactaccacatrcaatctgtgctgcacgtgagcctccaccagacagaagggaccctctaaacttccacacagcaggtctgcaacaaaaacctacctggccttgctatctagcccaggtttctttaggtatcatagagccccatcaaagggaaggcaaaggcagcctctatttctgtagcagacattgcaaacacacagcaaagcagacatagactgttttttcccccagccctactccaggcagtaacacagctttccctcttgccctgctgccaccctgcagtaaaccccacactacagcgaggtacccct

SEQ ID NO: 92379 - DNA, 599 bp, Chicken  19866894409252_1
  misc_feature (1)..(145): n is any nucleotide
nnnnnnnnnnnnnnnnnnnnnnnnnnnnnnnnnnnnnnnnnnnnnnnnnnnnnnnnnnnnnnnnnnnnnnnnnnnnnnnnnnnnnnnnnnnnnnnnnnnnnnnnnnnnnnnnnnnnnnnnnnnnnnnnnnnnnnnnnnnnnnnnnattgtatcttattttttgttctcttcatcccgcaggtattttgatctactggagctgacttttcattttggagacacaaacttgtgttcaaatctaaaagtggtatggtctttgttgtcaaaataattaccatttcagcattttttagaactaaytgaagctatgaatgtaagcctgttactggaatagtcgctcatgtacttactgaagttatactgtaagagctactattgctaagtgtggaagaagyggtgattgtcgtgacaaattgcctcccttagtgtataaatagcacactttttattatattaattgaagaaggatccaggaatagaaaatacagkttttattctataaatcagtttgacagactgtggcttacttgaaacatatccatcagtgacaagctaaaaattaattaatatcagagaaaggaaatgaaaaaggaagacat

SEQ ID NO: 92380 - DNA, 599 bp, Chicken  19866894409252_2
  misc_feature (1)..(50): n is any nucleotide
nnnnnnnnnnnnnnnnnnnnnnnnnnnnnnnnnnnnnnnnnnnnnnnnnnattgtatcttattttttgttctcttcatcccgcaggtattttgatctactggagctgacttttcattttggagacacaaacttgtgttcaaatctaaaagtggtatggtctttgttgtcaaaataattaccatttcagcattttttagaactaaytgaagctatgaatgtaagcctgttactggaatagtcgctcatgtacttactgaagttatactgtaagagctactattgctaagtgtggaagaagyggtgattgtcgtgacaaattgcctcccttagtgtataaatagcacactttttattatattaattgaagaaggatccaggaatagaaaatacagkttttattctataaatcagtttgacagactgtggcttacttgaaacatatccatcagtgacaagctaaaaattaattaatatcagagaaaggaaatgaaaaaggaagacatcctggaagatttttcagatttccaaaggaacttattaacagagaaacatttctgtggtcaaaatccctttttcagccatctttctccagggctta

SEQ ID NO: 92381 - DNA, 600 bp, Chicken  19866894409252_3
tctactggagctgacttttcattttggagacacaaacttgtgttcaaatctaaaagtggtatggtctttgttgtcaaaataattaccatttcagcattttttagaactaaytgaagctatgaatgtaagcctgttactggaatagtcgctcatgtacttactgaagttatactgtaagagctactattgctaagtgtggaagaagyggtgattgtcgtgacaaattgcctcccttagtgtataaatagcacactttttattatattaattgaagaaggatccaggaatagaaaatacagkttttattctataaatcagtttgacagactgtggcttacttgaaacatatccatcagtgacaagctaaaaattaattaatatcagagaaaggaaatgaaaaaggaagacatcctggaagatttttcagatttccaaaggaacttattaacagagaaacatttctgtggtcaaaatccctttttcagccatctttctccagggcttatacaaggtacctatgaatagagccacagctacttacaataaggctgaagacatgtagctaatctctcatctcagtagctccctaaattcactgtg

SEQ ID NO: 92382 - DNA, 600 bp, Chicken  19866894409253_1
tctattggtcagtcttcagaggctgcgttgaaatacctggacaatctaaaactatcttttgtaggacaaaattatgatgaatgtgtgttcaccaggccaaacccattcttacgcttgcattacatattcattcttgcacttttacctcgagcagtgattgttgatttgaattacagttgtgtttgtttcccttgggttaattttcagcttaaccaggacccaatatttcctttgttgaggtccaattcagataactacaactgcactgttaatatttttatcctatatgatgtatgtgtyggtgtgtacacttaagaaccacttcttaaaggatttcttcttgagggaaggaattttctctccttttgagcaagaagtgttgtatgtgaccactgattaaacaatccaaggaagatgttgctgtaggacataccatcacattgtccattgtccatcatattcttgttaaatctttaatttttactgccagataccaggattttaccaatttgtagatgcacagaataattagagaaggctagtaagtaatactgggagcctctatttatgctagtttaccccactgtgtgtcctggctta

SEQ ID NO: 92383 - DNA, 600 bp, Chicken  19866894409257_1
acagacatatacgattaagaaaacctttgacaagtcaggacaaactgctttctatgcactgccttccatttgtcatagcttccctgttcctgatctttcaagtattctaatactccgttatcataaacgttgttcagcatgggaccagcacatttactaatttaaattgttctgtctcgtctatatgaactctatcaagctggtcttacaaagcctggctaagtgtgcacatatacacccctgaaggtctggcagtctatgtttttgtactggggtagcaactactgagctggaagaagrcacaggattctagagtctgtactgttgacacctggcagagcacccacaccatcatcactgagcctgacctaagaggcaacagacagcaatggcacagggcctgctgctttcacagacttaagtcatagttgagctaccatcagggtgtcatatgacattttggaaatccagctgtacgtttgtggctttgtgggtggtttttttttttttttccctttatttgtttttaattaaaacttgaaaccttccagaagcaactacaggattttcagaataagtaaggtcaaggcaggggttggg

SEQ ID NO: 92384 - DNA, 600 bp, Chicken  19866894409258_1
taatctgatacagttggtatctcttagattctaactaagagtttttaatgtatttcttcatacgtgatgtaggatctgactgttgcttgcttatctaaaaagcggcttattgtataatctttccctgctgcactcattggtcagcatttgtatagaccaactctgtagtgtgaacacagtcttccatgtgattaattagaaaaactcagaaacaaaccattggaaggaaaagctattcagtgtaaaactgagatttctacagggatgtgtcacagtaacagtgcagttagtttgagtcasctgtgtgcattccagctcttaggtaaaggtttgcagtttgtcttttagattattttctgtatttaaaacgcatatattttatactagtttctttttccatgtcagggaaacagctgtatctatttcttgggaagatgtgaaatcaacatgtgcttgtctcctggtgaaagctgaagaggcagaaaaaggaggttactctgtctgtcaagctgaacgcataatcatggaggaatttgggaggtgtttatcccagatcctacatgtgctatcaaaatataaatgactgaaagttgaatgatg

SEQ ID NO: 92385 - DNA, 600 bp, Chicken  19866894409261_1
caggttggggagatcagagcctggcagaattgctgcagtgctcgctgcctgtttcatgtcctttctgaggactttaggaaccacagcatcgctgcagatctgtccttgctctgcactccctgcattgcctcaaactgggaaaaaggtagaagaaagtgcattttcagggccttcagcccctacctgttcttgctgagaagtgccaatcccaacttggatacccaattggcctcaatgggaaaattatttgcgacccttcctggcaacatagcagcagaagcaacaacaactgtctgcaamgagctgaaaagctgccaggcagattttgaagtgaaaagatggcaataaaaggaaattcaccatcacgcagccccctctgaatcaaaccgagcagctgcagcaaatcccggtgcttttgtttttatctctgcggagctctgcgcccatttcttgtatcttgagtccatcacctcccagttacccctccaacccgcagtgaggagcagcagctgggtcctttctctgtgctgggctccagcctatggctgggggtggccgtggggctgtgggtgccggagccacatggagcagctccttccg

SEQ ID NO: 92386 - DNA, 600 bp, Chicken  19866894409263_1
tagaataaccatttttgacatactcccatgtcaattccagaagctacggacactcaaatactcttgcatttcactctaggaccagacagcacgaagcaagacagagctgtccaacctgctcaaactctttggtcatcaaccaacttaatggtcaaactcagtctcagaagaccttcaagagaaactgaatttgcaagtaaggcactcgtgtattaagagactgcacagataaatagttgaaagaataaaatatttagttggtcatgatgacataaaccaatggcaaaagatcaaggaagyctcgtatacacaagaaggacagcattcccaccctgcttggccttctacctctatttacaagccaccaacaaaaagatgaagaacttggagacgtgaatagccttagtgtggcattcaggttcagcagaatttgggccagatggtattccattagaggacatggtgactcctgcaaaggggacagttttcagctttgtactgggccacgtacgtgggttaagaaatgcactttgcactctcacaaggagaaagcaactcccagatttttttttgctagactggccatcatcctcctatcat

SEQ ID NO: 92387 - DNA, 600 bp, Chicken  19866894409267_1
aattaatcacagtatttatgagtagatcatttactgcagcttgcatgcagggtgggtagctgcggccattgactcagtcaatcaaggcaagctgtacaggttagtggcacaagggcaaccatgctgttgttgggatttattaggcaaatttctcttttgatcttggacactgtaaacagaaagccgtagcatagaagagtgtttgttttccataatgttgtatttgaagctgagacaactgagcctactgcacagaaatacctcagcagtgactggtggcaaccctcctgccagctgttycttagaatcatagaataattaaggttggaaaagaccactaagaccatctagtcctaccatcaacccattctcaccatgtccactaacccatgtccgtcagtgccatgtctacctttttcttgaatgcctccaggaatggtgactccaccatctctttcttggcaaaaccacagtgtgctgaacagcacatgtctgaggctgcagtgagtaaatggaatgatttctgtaagatcttggtgtcattcagaaaaataacttcaatatgatagcattcactttccccatctgtacgtgcrcact

SEQ ID NO: 92388 - DNA, 600 bp, Chicken  19866894409267_2
gttycttagaatcatagaataattaaggttggaaaagaccactaagaccatctagtcctaccatcaacccattctcaccatgtccactaacccatgtccgtcagtgccatgtctacctttttcttgaatgcctccaggaatggtgactccaccatctctttcttggcaaaaccacagtgtgctgaacagcacatgtctgaggctgcagtgagtaaatggaatgatttctgtaagatcttggtgtcattcagaaaaataacttcaatatgatagcattcactttccccatctgtacgtgcrcacttttctcccatagcatcccacatccacttctccctctgatagctcccacaactgagttgggcacatagcacagaccacagtgagcttcgaaaatgaaaagcaactcccatgccacccgttgcttttttttattgttataagagcaccagttaattaaggagtagagaaacccaagaggaatactatgtgtgcaaaggactaaaagatgctaggaagtaaagtcttctgtgaccgatgagacatttttttccatgtgattttgtttgttttgactgagagagtgcaagtggatcattt

SEQ ID NO: 92389 - DNA, 599 bp, Chicken  19866894409271_1
  misc_feature (1)..(139): n is any nucleotide
nnnnnnnnnnnnnnnnnnnnnnnnnnnnnnnnnnnnnnnnnnnnnnnnnnnnnnnnnnnnnnnnnnnnnnnnnnnnnnnnnnnnnnnnnnnnnnnnnnnnnnnnnnnnnnnnnnnnnnnnnnnnnnnnnnnnnnnnnnngctgcagcaaatgagaacaagcccacatgcagcagccacagaaacaaagaaagaaaaactgcttaccttcagaagatctcacgtaagcagagatctctagcaagatactctcacttccactgccaaccctcaaatgaggtctgagaagaggtggaccctgkctctaccccttcttgtcactcaaatgcattgcatgcacctgagctcccctgggttggccctgccttcccaccaggtgctcaatcactgcttcaagctgtgacttagcatttctgttacagtgcctaatgacaaagatttttgtccagtttactaaaccaaaggataatcatttttcctttgtttatgtatagtaccttatggcactactaggagacaggcagattttaaagccgttttactatggctatataaaatgctccttcagtgaagkctaccacaagcagtacgtgttacagtt

SEQ ID NO: 92390 - DNA, 600 bp, Chicken  19866894409271_2
atgaggtctgagaagaggtggaccctgkctctaccccttcttgtcactcaaatgcattgcatgcacctgagctcccctgggttggccctgccttcccaccaggtgctcaatcactgcttcaagctgtgacttagcatttctgttacagtgcctaatgacaaagatttttgtccagtttactaaaccaaaggataatcatttttcctttgtttatgtatagtaccttatggcactactaggagacaggcagattttaaagccgttttactatggctatataaaatgctccttcagtgaagkctaccacaagcagtacgtgttacagttataacacgtataacataaatctttcaggtgaatcttaacagagcaagatgcctgttgacatacatgaagatgaaagtatatctgaaggtgctctttcttcaattgcgtatcctcacatccctgcgcattatgttatatttagctacataaatgtaactttgggggagctgtttttcaagtagtttggggcttctggattctgaaaaatcaggctttcagaaacgtgggactctttccacacatcctgctggaaagttcattgttcctaattta

SEQ ID NO: 92391 - DNA, 600 bp, Chicken  19866894409272_1
acaactcatctgtctcttcatcctggtttggcggtctataacagatgcccaccaggatgtctgccttgttggctcttccccctgatcttaacccataaggattcaaccttattttccccagtcataagttcagtaacctcaaatgcactctttaacatagagagccactcccacccaccccttcttccctgcctatccttcctgaagagtttgtagccatccattgcagcactccaatcatgggagtggtcccaccacgtttctgtaatggcaactaggtcatagtttgcctgctgcacwwtggcttctaactcttcttgtttgttgcccatgctgcgtgcattggtatagacacactttagctgggcctctctcctcacccctaatcctattatcgctcccccaggctcacctctagcaggcctggttttatccccttcccccctcatgtctagtttaaagacctctctactaaagctagtcctaacagctcctgggcaaggatccgtttccccctttgagacaggtgatacccatctgcagacctcaggccaggtgccaactagactgccccatgatcaaagaacctgagattcttgc

SEQ ID NO: 92392 - DNA, 600 bp, Chicken  19866894409272_2
caactcatctgtctcttcatcctggtttggcggtctataacagatgcccaccaggatgtctgccttgttggctcttccccctgatcttaacccataaggattcaaccttattttccccagtcataagttcagtaacctcaaatgcactctttaacatagagagccactcccacccaccccttcttccctgcctatccttcctgaagagtttgtagccatccattgcagcactccaatcatgggagtggtcccaccacgtttctgtaatggcaactaggtcatagtttgcctgctgcacwwtggcttctaactcttcttgtttgttgcccatgctgcgtgcattggtatagacacactttagctgggcctctctcctcacccctaatcctattatcgctcccccaggctcacctctagcaggcctggttttatccccttcccccctcatgtctagtttaaagacctctctactaaagctagtcctaacagctcctgggcaaggatccgtttccccctttgagacaggtgatacccatctgcagacctcaggccaggtgccaactagactgccccatgatcaaagaacctgagattcttgcg

SEQ ID NO: 92393 - DNA, 600 bp, Chicken  19866894409281_1
ttgacattctttttttatgggtttgatcttcacagtgaattaacgtgccaaataataattttcttttaaacttagtgattgccttaattctctgctattctattttaattcctatgtaagattttctagaatagtatctgagaataacagaattgtttctagaagcagagaaaatatctgtttgccatacttgttaaattttaaatattgcagaaaaaaatagatacaaaattagaacgtatgtccctaaactagaactgcttttgaaataacaaaattgtattcaaaaatatattcagycaaaaattaatctgtgtgttcatgtatgaatggtttgcactcaaatggtatttcttatccagatgaagtattgttttaaattccacaaattttatgaccaccagtctcccagtatgctcatgttttatagtttaaatattttttaacctgccactttcaaacccaaatgcctaaatatgtttatttttaatttaactacactgtaccaaatatggcataatttcaacatttaaatttgagtgtgcttcaaatttccagttataaaagttgtttttcttattcagtaatgagtctgtgttt

SEQ ID NO: 92394 - DNA, 600 bp, Chicken  19866894409281_2
ttcaaatttccagttataaaagttgtttttcttattcagtaatgagtctgtgtttgagccaagcagctgcatatgaaggctgccagagttcctcttcacacacttttcacttagctaactttaattactttaggtatggaaaaatctattttacttctttaaaaggagaggtcaaaataatggtcagccaatagacagattccttacatatgtagatactttttgatattttgtatttttaatatttatgtttttttgtttaatgtttactttgataagagcctaaacatatacaaattyaaaaatgtttctcagttcctatgaaagttatttctaatctctttacattttaaaatgaattctggtccaaataaagaactttgaagtacaaactccaaataatttcttagagctataaatttatcaagagctgtaaactagatgctatctttatacatgcacttytgagatggagacaaactcaaattctaaggcatgtgagttttgaagttatgtaggtaggtaagaatgcacctagacttttaggaagaccttcaagaacaactgtcaggcatggtgcataaacagccatgggtgctc

SEQ ID NO: 92395 - DNA, 600 bp, Chicken  19866894409281_3
gagaggtcaaaataatggtcagccaatagacagattccttacatatgtagatactttttgatattttgtatttttaatatttatgtttttttgtttaatgtttactttgataagagcctaaacatatacaaattyaaaaatgtttctcagttcctatgaaagttatttctaatctctttacattttaaaatgaattctggtccaaataaagaactttgaagtacaaactccaaataatttcttagagctataaatttatcaagagctgtaaactagatgctatctttatacatgcacttytgagatggagacaaactcaaattctaaggcatgtgagttttgaagttatgtaggtaggtaagaatgcacctagacttttaggaagaccttcaagaacaactgtcaggcatggtgcataaacagccatgggtgctctacagataaaaatggtaatgtcaaaaccaaaaccatgtaggaatagcctgcttacttcgttttacccatttgaatcttcagttgacgaaacacctatgaaatcctttacaaagagttgtattgctgacttggagctggatttatctgttgactaatgatgctcaa

SEQ ID NO: 92396 - DNA, 600 bp, Chicken  19866894409302_1
tgacttaggttttggcttttcagtgatgtttttgcaagccttagacacgttttcgaagcagactcattaacaggaaggactggaaaaggaatctggaggtttggaactcagtgcagtggggttttttttgcctgtagagtgaaggatttcagttcttgtacaaagcagcactccacttttttgcaaagttagcagtccaaagcctcacagtttccagaggcacttgtgctcccaaggcactaaggtattttctaaaatcctatgcaattgcactttgtagagagagaagcttgggaaagygtgagtagcaggatgcatctgaatgcagaatgaaagaataaaaccaatggggaaacgaggaataaaaaaaagsagccctccaatgttagtcacttgtaagtggagatgatttcacagagactctrtgctccttgacagaggggagcgggagagaaggcagctggtctgtagcagataacctccttcctgtgcatgaaaggaagcattcaattgccttgtggtgaaatgcttttggctctagactggggtggagygggctgtggagacacctacacccaggtgcctggggcttgctgtgca

SEQ ID NO: 92397 - DNA, 600 bp, Chicken  19866894409302_2
gaaggactggaaaaggaatctggaggtttggaactcagtgcagtggggttttttttgcctgtagagtgaaggatttcagttcttgtacaaagcagcactccacttttttgcaaagttagcagtccaaagcctcacagtttccagaggcacttgtgctcccaaggcactaaggtattttctaaaatcctatgcaattgcactttgtagagagagaagcttgggaaagygtgagtagcaggatgcatctgaatgcagaatgaaagaataaaaccaatggggaaacgaggaataaaaaaaagsagccctccaatgttagtcacttgtaagtggagatgatttcacagagactctrtgctccttgacagaggggagcgggagagaaggcagctggtctgtagcagataacctccttcctgtgcatgaaaggaagcattcaattgccttgtggtgaaatgcttttggctctagactggggtggagygggctgtggagacacctacacccaggtgcctggggcttgctgtgcacaagtgtagaacgataaggcacctcctgaatactggagtctggacactgccaggagcacgtgtgaacttccaa

SEQ ID NO: 92398 - DNA, 600 bp, Chicken  19866894409302_3
ttttgcctgtagagtgaaggatttcagttcttgtacaaagcagcactccacttttttgcaaagttagcagtccaaagcctcacagtttccagaggcacttgtgctcccaaggcactaaggtattttctaaaatcctatgcaattgcactttgtagagagagaagcttgggaaagygtgagtagcaggatgcatctgaatgcagaatgaaagaataaaaccaatggggaaacgaggaataaaaaaaagsagccctccaatgttagtcacttgtaagtggagatgatttcacagagactctrtgctccttgacagaggggagcgggagagaaggcagctggtctgtagcagataacctccttcctgtgcatgaaaggaagcattcaattgccttgtggtgaaatgcttttggctctagactggggtggagygggctgtggagacacctacacccaggtgcctggggcttgctgtgcacaagtgtagaacgataaggcacctcctgaatactggagtctggacactgccaggagcacgtgtgaacttccaaatccttctgtttggcatcactctccaccttgcagggtgtaaggaagggggct

SEQ ID NO: 92399 - DNA, 600 bp, Chicken  19866894409302_4
aaatcctatgcaattgcactttgtagagagagaagcttgggaaagygtgagtagcaggatgcatctgaatgcagaatgaaagaataaaaccaatggggaaacgaggaataaaaaaaagsagccctccaatgttagtcacttgtaagtggagatgatttcacagagactctrtgctccttgacagaggggagcgggagagaaggcagctggtctgtagcagataacctccttcctgtgcatgaaaggaagcattcaattgccttgtggtgaaatgcttttggctctagactggggtggagygggctgtggagacacctacacccaggtgcctggggcttgctgtgcacaagtgtagaacgataaggcacctcctgaatactggagtctggacactgccaggagcacgtgtgaacttccaaatccttctgtttggcatcactctccaccttgcagggtgtaaggaagggggctgctttgtcctcagaagatatccaaacagaatgagggctgaacacaaccaggactgatagctcttgctgatatccaagtgttaaagaattgaacttttcctgaacattttgggggcggtgtgtatggtgc

SEQ ID NO: 92400 - DNA, 600 bp, Chicken  19866894409320_1
atatatttcaggggatgagaatatcagaaatactgtattcaaagtaattgtaaatctttcagttcagtttttttgaagaaaattcatccattttgcccgaatatggactcagttgccaaaatgtcaagctttgatgacactctcactgaaatgcatcaaatttttgtactactcctgcattggagtgaaacttctctagcatctttgattttcctctcattaactgggtcttggacaccaccttgccctctgtatctcaaaaatcaaagttctgaggtgtcataggattcaggacagaamtagtggtgcacttagaccacttagcccactccccgtcatgagagatcaagctagcagagccaagagtgcaccaaaaactagaaaagaactgagctaatgtattctccaaaggagaagggaggagtaaagaaatacaattcctctattggctgttgtaaaagcagaataactgaacaccatcagccttgcaaaaggcttgccaaaagatacgctttaaaactgtataaacaatttggattaagaaacattaaacacattcacacctgctttcaagctttaaatctgtagctctgcaaaatg

SEQ ID NO: 92401 - DNA, 600 bp, Chicken  19866894409321_1
tgcacttcaccttggacacgcttctccttaagcaaagcttaaacctatcagaggccacattcaacacaccttgctgggtaatagactccaccttgcaacgtcggcacgtcttccaaagctcctttccctaagtgtctgtgcttctggaatctgactgctccaactactgccatgtgctagtagtgcagtcagggaatggtgggaaggttcagtgtcaggttactgcaaagccacacttcatgtaattaaccatatgatggcagacactacatgatttctttgatgctgctctatcaaacrcagtgcacsatcaacagcttgcraagaggtcagtatatcaagactgctccctcagctaaaaagcgtagcagacagcagaattgcctctgagaggcaagcaycatgcatcttgataatgatgacttatgcataacttctttycacaatctccttttttacctcacctcccctttcccacagttggtttcttttttctgatcttacggtgctgttcaccaaaggtccctctctaccctcaacatgcagcctcttagctcaggggctgtagactgtgatctcacaggtcctgggcttcactat

SEQ ID NO: 92402 - DNA, 600 bp, Chicken  19866894409321_2
ccttggacacgcttctccttaagcaaagcttaaacctatcagaggccacattcaacacaccttgctgggtaatagactccaccttgcaacgtcggcacgtcttccaaagctcctttccctaagtgtctgtgcttctggaatctgactgctccaactactgccatgtgctagtagtgcagtcagggaatggtgggaaggttcagtgtcaggttactgcaaagccacacttcatgtaattaaccatatgatggcagacactacatgatttctttgatgctgctctatcaaacrcagtgcacsatcaacagcttgcraagaggtcagtatatcaagactgctccctcagctaaaaagcgtagcagacagcagaattgcctctgagaggcaagcaycatgcatcttgataatgatgacttatgcataacttctttycacaatctccttttttacctcacctcccctttcccacagttggtttcttttttctgatcttacggtgctgttcaccaaaggtccctctctaccctcaacatgcagcctcttagctcaggggctgtagactgtgatctcacaggtcctgggcttcactattccatcagc

SEQ ID NO: 92403 - DNA, 600 bp, Chicken  19866894409321_3
ctccttaagcaaagcttaaacctatcagaggccacattcaacacaccttgctgggtaatagactccaccttgcaacgtcggcacgtcttccaaagctcctttccctaagtgtctgtgcttctggaatctgactgctccaactactgccatgtgctagtagtgcagtcagggaatggtgggaaggttcagtgtcaggttactgcaaagccacacttcatgtaattaaccatatgatggcagacactacatgatttctttgatgctgctctatcaaacrcagtgcacsatcaacagcttgcraagaggtcagtatatcaagactgctccctcagctaaaaagcgtagcagacagcagaattgcctctgagaggcaagcaycatgcatcttgataatgatgacttatgcataacttctttycacaatctccttttttacctcacctcccctttcccacagttggtttcttttttctgatcttacggtgctgttcaccaaaggtccctctctaccctcaacatgcagcctcttagctcaggggctgtagactgtgatctcacaggtcctgggcttcactattccatcagctaaggcatgtttca

SEQ ID NO: 92404 - DNA, 600 bp, Chicken  19866894409321_4
cggcacgtcttccaaagctcctttccctaagtgtctgtgcttctggaatctgactgctccaactactgccatgtgctagtagtgcagtcagggaatggtgggaaggttcagtgtcaggttactgcaaagccacacttcatgtaattaaccatatgatggcagacactacatgatttctttgatgctgctctatcaaacrcagtgcacsatcaacagcttgcraagaggtcagtatatcaagactgctccctcagctaaaaagcgtagcagacagcagaattgcctctgagaggcaagcaycatgcatcttgataatgatgacttatgcataacttctttycacaatctccttttttacctcacctcccctttcccacagttggtttcttttttctgatcttacggtgctgttcaccaaaggtccctctctaccctcaacatgcagcctcttagctcaggggctgtagactgtgatctcacaggtcctgggcttcactattccatcagctaaggcatgtttcaggagctgagcactgctctttcaatgcggtgagacagagcaagaggatcacaacccatctcagaggacaagtgtggtat

SEQ ID NO: 92405 - DNA, 600 bp, Chicken  19866894409321_5
ttctggaatctgactgctccaactactgccatgtgctagtagtgcagtcagggaatggtgggaaggttcagtgtcaggttactgcaaagccacacttcatgtaattaaccatatgatggcagacactacatgatttctttgatgctgctctatcaaacrcagtgcacsatcaacagcttgcraagaggtcagtatatcaagactgctccctcagctaaaaagcgtagcagacagcagaattgcctctgagaggcaagcaycatgcatcttgataatgatgacttatgcataacttctttycacaatctccttttttacctcacctcccctttcccacagttggtttcttttttctgatcttacggtgctgttcaccaaaggtccctctctaccctcaacatgcagcctcttagctcaggggctgtagactgtgatctcacaggtcctgggcttcactattccatcagctaaggcatgtttcaggagctgagcactgctctttcaatgcggtgagacagagcaagaggatcacaacccatctcagaggacaagtgtggtatttggcacacaaccctagtgggtgcacacctgggcttaata

SEQ ID NO: 92406 - DNA, 600 bp, Chicken  19866894409324_1
ttcctgaaaaggggtgatctttcaggttgccgagaatcaagctgttcggaattttataggttaaaagttagtatttatttaagcatcgtttggaaaccggtggtcattcagggtacattatggaacagtagagtcatgtgcttctcagcaggggatgctgcttaatgatggcactgcaatgtcctgtatttgggaggagcggagttgcagtgaaggaacggtctctttctacagtgtgaacagggaactgctttactcaggcttttacaaataaatgaatctctggaataagatccttcrctcactcacactttcctcttttttccctgyggtatcagaaatggacacttcaggatactttttacaagtctgctaacttgaaagagcaactatgtgtaaccacatatgaaattagagtgtttgaaaaggacaaaaatccttccaataaaaatcttggagaagtgttagctgtattgaaagcaaagcagaataactgctatagttatctgatgatattttttaaccgagtagataacgtacagatgtcagtgggttttcacttagtgatggtttgaaaccctcagtaagataatgcgtatt

SEQ ID NO: 92407 - DNA, 600 bp, Chicken  19866894409324_2
cgagaatcaagctgttcggaattttataggttaaaagttagtatttatttaagcatcgtttggaaaccggtggtcattcagggtacattatggaacagtagagtcatgtgcttctcagcaggggatgctgcttaatgatggcactgcaatgtcctgtatttgggaggagcggagttgcagtgaaggaacggtctctttctacagtgtgaacagggaactgctttactcaggcttttacaaataaatgaatctctggaataagatccttcrctcactcacactttcctcttttttccctgyggtatcagaaatggacacttcaggatactttttacaagtctgctaacttgaaagagcaactatgtgtaaccacatatgaaattagagtgtttgaaaaggacaaaaatccttccaataaaaatcttggagaagtgttagctgtattgaaagcaaagcagaataactgctatagttatctgatgatattttttaaccgagtagataacgtacagatgtcagtgggttttcacttagtgatggtttgaaaccctcagtaagataatgcgtattataatggtagatttataaaaaaaaaaatac

SEQ ID NO: 92408 - DNA, 600 bp, Chicken  19866894409327_1
caatgcggagtgctcggctaagggatggtggcacctggttggtccccaggcgctgtccttgccctgggtgcctggcttggggtcgaggtgaccaagagctatgggttcaggggacccagatgctcccgtcagctggtacagtgcttggcactgctggcacagggctgcaggtaccatcaggtgtctgctcttgccatgccgtgccatgcctgtggctcagcatggggacgcgttggtgacaaccgactgcgggatgttgtgtggggtgagggggacactgtgaccagagaaggacatgtrgtgatggcacaaaggtggcctgcacgtggcattgcagcagaaccagggttgctcttgtgggcaccttgcagggggtgcccagctgcatgtggagggcttggcagagtcgccaccagggctggcaccaaggggtgtcccatggttggtcccatggtcccaaccatgtcccaggttgcagtgtggggagccgagcgcccgccccgcacacgtgtgcccttcacgtgtgcgcccacagctgctgctgcccggaccgcagatggtctcctgaaagagcccgcccgtccccctgccttcagcaca

SEQ ID NO: 92409 - DNA, 537 bp, Chicken  19866894409327_2
aaggggtgtcccatggttggtcccatggtcccaaccatgtcccaggttgcagtgtggggagccgagcgcccgccccgcacacgtgtgcccttcacgtgtgcgcccacagctgctgctgcccggaccgcagatggtctcctgaaagagcccgcccgtccccctgccttcagcacaccatcacgccttgctgccgccttggctgtgctccccagccatggcgcagggctgtgagcagctgggacaccccgggcatcaccgtggggctccccacgagacgcggcaccctgctgagggtcccgrcccagcctgggcagtgtggggctgagggttgagcagtggggctgtggggtgcctgggtggtaggggggctcgtggtacagcccccttgccaggcagatggtccccccgcagggcggtgaccttgtgacgatggctgcggagaccccatgatgttggatgacgtccggatgaggtggcgtgggaccaggctggggctgtgccgccgggcaggcttgtcccagtgccccgtccccatgt

SEQ ID NO: 92410 - DNA, 600 bp, Chicken  19866894409328_1
cttgtttggctgtgttctgggcagcagtgctgttctgctgtcattgcagaaaaaggaatgcagtgcagaattggtatgtgagagcatcagagtggactgctgctggtataaagcagctaggttctggttagctgagagtcagatctggtagcacatcctgtcatgttaccagagaccacaagtgcagggaggacatggggcagaaaccctgctgtgtgagaagcactccacgctctgcaggcctcctgtgacttcactgctgttagtatttgctgcatcttaatccttgaccttttcctmtgtckagggattctgttttgtatatgttggtcagtgsattttagggctactgtcaagctgcagttcttwactggacagttctagtccttygtgctttttctttatggagatcagtggaagaaatgcaccggctgcttttacagctccttggaggactcatggcagaacggtgcttttcctaatgaaatggtttagtgtgcatttatcccttcctgatggtttaacccggggtgggttgtttttggaggcaattaatgagccagtacattagagcacgcttcctgtttttgccacatctat

SEQ ID NO: 92411 - DNA, 600 bp, Chicken  19866894409328_2
ttggctgtgttctgggcagcagtgctgttctgctgtcattgcagaaaaaggaatgcagtgcagaattggtatgtgagagcatcagagtggactgctgctggtataaagcagctaggttctggttagctgagagtcagatctggtagcacatcctgtcatgttaccagagaccacaagtgcagggaggacatggggcagaaaccctgctgtgtgagaagcactccacgctctgcaggcctcctgtgacttcactgctgttagtatttgctgcatcttaatccttgaccttttcctmtgtckagggattctgttttgtatatgttggtcagtgsattttagggctactgtcaagctgcagttcttwactggacagttctagtccttygtgctttttctttatggagatcagtggaagaaatgcaccggctgcttttacagctccttggaggactcatggcagaacggtgcttttcctaatgaaatggtttagtgtgcatttatcccttcctgatggtttaacccggggtgggttgtttttggaggcaattaatgagccagtacattagagcacgcttcctgtttttgccacatctataggag

SEQ ID NO: 92412 - DNA, 600 bp, Chicken  19866894409328_3
ctgtcattgcagaaaaaggaatgcagtgcagaattggtatgtgagagcatcagagtggactgctgctggtataaagcagctaggttctggttagctgagagtcagatctggtagcacatcctgtcatgttaccagagaccacaagtgcagggaggacatggggcagaaaccctgctgtgtgagaagcactccacgctctgcaggcctcctgtgacttcactgctgttagtatttgctgcatcttaatccttgaccttttcctmtgtckagggattctgttttgtatatgttggtcagtgsattttagggctactgtcaagctgcagttcttwactggacagttctagtccttygtgctttttctttatggagatcagtggaagaaatgcaccggctgcttttacagctccttggaggactcatggcagaacggtgcttttcctaatgaaatggtttagtgtgcatttatcccttcctgatggtttaacccggggtgggttgtttttggaggcaattaatgagccagtacattagagcacgcttcctgtttttgccacatctataggagagcagtagacataagttggtcccccccgtaat

SEQ ID NO: 92413 - DNA, 600 bp, Chicken  19866894409328_4
attggtatgtgagagcatcagagtggactgctgctggtataaagcagctaggttctggttagctgagagtcagatctggtagcacatcctgtcatgttaccagagaccacaagtgcagggaggacatggggcagaaaccctgctgtgtgagaagcactccacgctctgcaggcctcctgtgacttcactgctgttagtatttgctgcatcttaatccttgaccttttcctmtgtckagggattctgttttgtatatgttggtcagtgsattttagggctactgtcaagctgcagttcttwactggacagttctagtccttygtgctttttctttatggagatcagtggaagaaatgcaccggctgcttttacagctccttggaggactcatggcagaacggtgcttttcctaatgaaatggtttagtgtgcatttatcccttcctgatggtttaacccggggtgggttgtttttggaggcaattaatgagccagtacattagagcacgcttcctgtttttgccacatctataggagagcagtagacataagttggtcccccccgtaatgatgccactgaaatccttatctgcgttttcag

SEQ ID NO: 92414 - DNA, 600 bp, Chicken  19866894409328_5
agtggactgctgctggtataaagcagctaggttctggttagctgagagtcagatctggtagcacatcctgtcatgttaccagagaccacaagtgcagggaggacatggggcagaaaccctgctgtgtgagaagcactccacgctctgcaggcctcctgtgacttcactgctgttagtatttgctgcatcttaatccttgaccttttcctmtgtckagggattctgttttgtatatgttggtcagtgsattttagggctactgtcaagctgcagttcttwactggacagttctagtccttygtgctttttctttatggagatcagtggaagaaatgcaccggctgcttttacagctccttggaggactcatggcagaacggtgcttttcctaatgaaatggtttagtgtgcatttatcccttcctgatggtttaacccggggtgggttgtttttggaggcaattaatgagccagtacattagagcacgcttcctgtttttgccacatctataggagagcagtagacataagttggtcccccccgtaatgatgccactgaaatccttatctgcgttttcaggaggagacaccactcttcctt

SEQ ID NO: 92415 - DNA, 600 bp, Chicken  19866894409328_6
caatgagtataacgtagcgcacagccccaccgggcaccccggggccatgctgaactctgccctctccccagtcatttgtggcccaaatagatcctttctcaatctgaagcacgcttcgttaagcaagaagtcacgaaaaccgaatgccaaaggcatcatgcccacaaatctcaccaaagacgcgaagaggagaaggaagaagtccctcagtgagagcaaagggcagttttcagagagctcggtaaccctgtcaccagttgactccctggaatcgccccacgctttcgcatccgaaccgaygtcgtctcctgtgatgccatcaccaggggtgttgcactcatcacccagctcgctgctcaccgctccgtcggtgcaggctgcgcacagcatgtccttctccaacctccacgagatgcagcccttagggcgtgggtccagcaccgtgctcccatcggtcagccagctgctctcgcagcacagaaccacccctccaagcagcgggctgggcaggctccggccagccaatgtttccaccgagtggatgaaccgcatggagatgaacgaatcccagtacaacgagatgttcggcatggtgccgcc

SEQ ID NO: 92416 - DNA, 600 bp, Chicken  19866894409335_1
ttctggtaaatccattccaaacaatggacttaaatcagtctgtgataatatttttgttgtcttctctgtcctcagaaacttcaggttttgtagataagctttttgaaagtctgtacacaaagagttaccttccttctcacgaacccacgaaagtagaagcaaagcctgcaggtcaggaaaaagaagtcaccaaggaggaggtaaccatattcattctctgcctgcctctaattttgaacgtagccatcctgtaacagttatgagacaaaacacgatagcaaaatccactttgttgtgttrggactagtgatctttgttatctctgtgtatctgacggaaaatgaaagataattcaggcaaaaatattttaaaatccctttgtgaagtctccctttgatctaggttagtagcattcaggaatcctgttctgttgtccctggtactatgagctgacaatgatctgaaaggagttcagaggtgaggaagaagggaaaacattctattccttaaagaatatttwaaaaaaaaatgraacaggaaatgttctggaagttattttaaatgtgttctgtaatacttacagttaaattctctactgag

SEQ ID NO: 92417 - DNA, 600 bp, Chicken  19866894409335_2
cctgcctctaattttgaacgtagccatcctgtaacagttatgagacaaaacacgatagcaaaatccactttgttgtgttrggactagtgatctttgttatctctgtgtatctgacggaaaatgaaagataattcaggcaaaaatattttaaaatccctttgtgaagtctccctttgatctaggttagtagcattcaggaatcctgttctgttgtccctggtactatgagctgacaatgatctgaaaggagttcagaggtgaggaagaagggaaaacattctattccttaaagaatatttwaaaaaaaaatgraacaggaaatgttctggaagttattttaaatgtgttctgtaatacttacagttaaattctctactgaggattaattactgagaaaaggtaggtagcattcatttgccagcagttcttgtttttgtcttgtttttaacctttattgacaaaattgaaagcattcaagtttttgagaaagccaagtaatatttttgtaagtacccaaactttcaatttcaaatcatcctcacttgtgtttggtacttttctttttcctaccttggtaatactccaagggaagaactttgt

SEQ ID NO: 92418 - DNA, 600 bp, Chicken  19866894409335_3
taattttgaacgtagccatcctgtaacagttatgagacaaaacacgatagcaaaatccactttgttgtgttrggactagtgatctttgttatctctgtgtatctgacggaaaatgaaagataattcaggcaaaaatattttaaaatccctttgtgaagtctccctttgatctaggttagtagcattcaggaatcctgttctgttgtccctggtactatgagctgacaatgatctgaaaggagttcagaggtgaggaagaagggaaaacattctattccttaaagaatatttwaaaaaaawatgraacaggaaatgttctggaagttattttaaatgtgttctgtaatacttacagttaaattctctactgaggattaattactgagaaaaggtaggtagcattcatttgccagcagttcttgtttttgtcttgtttttaacctttattgacaaaattgaaagcattcaagtttttgagaaagccaagtaatatttttgtaagtacccaaactttcaatttcaaatcatcctcacttgtgtttggtacttttctttttcctaccttggtaatactccaagggaagaactttgtgtctgtgt

SEQ ID NO: 92419 - DNA, 600 bp, Chicken  19866894409335_4
aattttgaacgtagccatcctgtaacagttatgagacaaaacacgatagcaaaatccactttgttgtgttrggactagtgatctttgttatctctgtgtatctgacggaaaatgaaagataattcaggcaaaaatattttaaaatccctttgtgaagtctccctttgatctaggttagtagcattcaggaatcctgttctgttgtccctggtactatgagctgacaatgatctgaaaggagttcagaggtgaggaagaagggaaaacattctattccttaaagaatatttwaaaaaaaawtgraacaggaaatgttctggaagttattttaaatgtgttctgtaatacttacagttaaattctctactgaggattaattactgagaaaaggtaggtagcattcatttgccagcagttcttgtttttgtcttgtttttaacctttattgacaaaattgaaagcattcaagtttttgagaaagccaagtaatatttttgtaagtacccaaactttcaatttcaaatcatcctcacttgtgtttggtacttttctttttcctaccttggtaatactccaagggaagaactttgtgtctgtgtg

SEQ ID NO: 92420 - DNA, 600 bp, Chicken  19866894409335_5
tttgaacgtagccatcctgtaacagttatgagacaaaacacgatagcaaaatccactttgttgtgttrggactagtgatctttgttatctctgtgtatctgacggaaaatgaaagataattcaggcaaaaatattttaaaatccctttgtgaagtctccctttgatctaggttagtagcattcaggaatcctgttctgttgtccctggtactatgagctgacaatgatctgaaaggagttcagaggtgaggaagaagggaaaacattctattccttaaagaatatttwaaaaaaaaatgraacaggaaatgttctggaagttattttaaatgtgttctgtaatacttacagttaaattctctactgaggattaattactgagaaaaggtaggtagcattcatttgccagcagttcttgtttttgtcttgtttttaacctttattgacaaaattgaaagcattcaagtttttgagaaagccaagtaatatttttgtaagtacccaaactttcaatttcaaatcatcctcacttgtgtttggtacttttctttttcctaccttggtaatactccaagggaagaactttgtgtctgtgtgttt

SEQ ID NO: 92421 - DNA, 600 bp, Chicken  19866894409335_6
aaaggtaggtagcattcatttgccagcagttcttgtttttgtcttgtttttaacctttattgacaaaattgaaagcattcaagtttttgagaaagccaagtaatatttttgtaagtacccaaactttcaatttcaaatcatcctcacttgtgtttggtacttttctttttcctaccttggtaatactccaagggaagaactttgtgtctgtgtgtttctgtagcatcctaatgtatcacctttgagtgaaggctggggaaaattgctacagaagtaaattttctttatttcagtatactyctagcacagtttgcaagatattttaggctacatgcctgtttcccttgctatgggaaagattcaaataaagtcaaagcagatagaatattctggttctttctcttccatggatgcttatgtcaggaagtgctgagagcaaaaactgttgttctctcttacaaacgaaccttaagaagtgttgtttgatgcgagtattctgaattggtattcaaattcattcttgtatttgtgagcctaacttaagatgatgaaacaccttgctggaatgagttgttctgtcttcagtgtttgaactgctgg

SEQ ID NO: 92422 - DNA, 600 bp, Chicken  19866894409336_1
tcctcttcatcttcctgttcttccagcatttcatcttcctcctcattctcctcaaatagctctattccgagttctaatcttctttgcctttctgcaaaccactctctgacctgctcataccccatgtgagatttagctacaagttcatcaaggtcttgctcattaaggaatttgtgcttcatatagtagtccttcaggattgctgttccagttttgaattttatgacagacacacctcggtcccagcaatttaacctcttgcttccccgaggcctccctcgaggcctccctcttccccgyccctttggtcttcctctccctctcctccttgcaaagccttggccattcagactgtttgcattggcactctggtaataataataccacttcaatcccccatttttccaggcatagcgagtatctccaaaccaactcacaatttctgatcttgggagccccgtttcttctgccagcttgttgtattcttgtggagatggccactgagtacggacaaaggaacttttaagcatgtgcaactgctctggtgattttttgcctattttgcttgaaccagagccccctgattttgaccctgctgct

SEQ ID NO: 92423 - DNA, 599 bp, Chicken  19866894409340_1
  misc_feature (1)..(1): n is any nucleotide
ntgctctggggctactccccacccttgatgaaaatggcagatgcgtcaggcccacagaccgagcccatggctgatcttgctgctgagtgctgtagtattaaatgattgtcagtgttgcctacttggcaagcatagctgtcagtggagcgtgctgcatgggaactgggagcctgtgctgggaattcctcagtgtgctcctatagcctgggatgatacacttagataattctttgtgtttgctctcttacgtggaatagagaaacaaaatctgatcagaaatactagagatcttcctaaagmaaaccccaaagaccaagagccaatgcgactataaaggactcgaagcccttgaaaaggtccgataaggagaatactgctctcctcaccaggtcagagcagcgtaacaaagctttgatgaggttcacatttccttttaagatttcaaggcatccacttgggagtcttagaaatacatacaggaagcccggagagctgcattcagtctaacagcctacagcaggagctcttagatgctaatctctgtttgttaatctcttcagtctggggaaatgcaagacttctgagtgatactgaagaag

SEQ ID NO: 92424 - DNA, 600 bp, Chicken  19866894409344_1
tctccgggcacttcatagtacttgtggaaagaaaggatggtcaaactacatgatgccactcccagtgcaatgcaaggatttttcttgtgttcctcactgtagcttgatgtgcttgctctggtgatttggaattttgagctgtgcattggaaagagggaagttaagccatggaggtgatgaattggcttgtggctttggatcaagcctcagggagggctactcattttagcatctcttcacgcgacctgtcccagggtgatgtgcacatagtggtccttctcctggtagtcccttggcackgaggtcctgttcctcacaccttgacagcccagaccatagcttatctgctgtcccatgtcttggcgtgggactgtccagatgttgaagtggggaaggtgtgttgcagctggtggaagcccagtgctacygcccatctgttaccatgtgtcccaaagtgtggacacaactggcttgccaagacattgtcttagtagacaaaaaacggataaaacctgcrtggcatcgctaccccaccttcatcagggcagcctccagatgtgggaagtcatgttgaatgtcaagcagcaatcccttgagtct

SEQ ID NO: 92425 - DNA, 557 bp, Chicken  19866894409344_2
gaattttgagctgtgcattggaaagagggaagttaagccatggaggtgatgaattggcttgtggctttggatcaagcctcagggagggctactcattttagcatctcttcacgcgacctgtcccagggtgatgtgcacatagtggtccttctcctggtagtcccttggcackgaggtcctgttcctcacaccttgacagcccagaccatagcttatctgctgtcccatgtcttggcgtgggactgtccagatgttgaagtggggaaggtgtgttgcagctggtggaagcccagtgctacygcccatctgttaccatgtgtcccaaagtgtggacacaactggcttgccaagacattgtcttagtagacaaaaaacggataaaacctgcrtggcatcgctaccccaccttcatcagggcagcctccagatgtgggaagtcatgttgaatgtcaagcagcaatcccttgagtctaccacacaagaacagcttaaccaaagactcagggtcaaacacttcatagaatcattgaatcattgaattacagaattgcttgggt

SEQ ID NO: 92426 - DNA, 468 bp, Chicken  19866894409344_3
tactcattttagcatctcttcacgcgacctgtcccagggtgatgtgcacatagtggtccttctcctggtagtcccttggcackgaggtcctgttcctcacaccttgacagcccagaccatagcttatctgctgtcccatgtcttggcgtgggactgtccagatgttgaagtggggaaggtgtgttgcagctggtggaagcccagtgctacygcccatctgttaccatgtgtcccaaagtgtggacacaactggcttgccaagacattgtcttagtagacaaaaaacggataaaacctgcrtggcatcgctaccccaccttcatcagggcagcctccagatgtgggaagtcatgttgaatgtcaagcagcaatcccttgagtctaccacacaagaacagcttaaccaaagactcagggtcaaacacttcatagaatcattgaatcattgaattacagaattgcttgggt

SEQ ID NO: 92427 - DNA, 600 bp, Chicken  19866894409349_1
gacagtgattcagtcctttaacacttaaaggagccttaatgtgtgggataaaagatgtccaggagaagcaaacaggtacagagctctgttaggaattggttgagtgagacactgtgattaaaaaaaaaaaaaaaagaaagaaagaaggaaaaaaaaaaagctaaggcagaggtcactgagtgagtcagtcactgaaggaagagctcaatcttgagaataaaaggggttctgggaggctttagctccataggcactttcctgaggtgcagtcctctgaataaaaatgctgaagcctgcccrtgctccactatttatcagccctcacacaggcacaatacttccatcatgtttcctactatgacatgtataaaaacctaattaaaaagaaaaaaaaaagtagggcatgtgtaaaccatatcacttacatagaagtgttagataagcatatagtcctgatggacatgatcagtgggtctcaatgggatgcatctcagagtcctgaaggaattgactgatgcagtcgccaagccattctcaacatttgaagagttacagtggtcaggtaaagtccccattgtctggaaaaaaaggcagcactgc

SEQ ID NO: 92428 - DNA, 587 bp, Chicken  19866894409356_1
gttaaaaagaacacatactctttcaagattgtggatttaagtacacaaattctcggctacatgctaccctgttaggtcaacacataggtaagatatttgaagttagattcattttatccagttaaaatcattgtccaacccgcagttacaaaagaaaaaataattgcagtggtggggtgctttctgtctttgaataatcaagtcattattatacacagtctttggaatttttatcttattatgcatgcttccagtcagatcgtgctttgatggaaaaaatacccagacatcttcggaccygaaagaatctcctccagcagtaaacactaaaaagttatttcaaagcctcaagttgtccttacctataatttctttgcaaggattttcaggtgtgatgggaatcctgcaagctgggcactgattattattcttcaaccagacttcaatacaaatggaacagaagacatggttgttgacacagataactgggtgacggacctttgagcatcaacaaggaaaaggagaagaggaggaaaagacaaaaaaaaaaaaaaaaaagaacaaaaaaacaacacaacagaaagatg

SEQ ID NO: 92429 - DNA, 600 bp, Chicken  19866894409358_1
gcatattgtataacgcaaaaacacaagactgcaccatgattcctcagaatttgacttgtaattgccttggagtgctgaaagaactttcacctttatgctccagggaacatgcgtactgtacatttctggatttatatatcttcatcatgacagccctgtatttttttaaaatggaagacagctctctctgccacttgtccaccgaggttctaggccagacagagaaatcatggtgaaaccacactgtcaccaatttaccatggactacgtaaagcatctctgaatcaaactttcttaccrtgccccagcctaggattaagatagattaggtcacccttcggtgggtatgatgatttttaaaaagccttcaaactaatactgagaaaacagaaacagaattttttcaaagttcaaatcttaactgaaatcccctccaaaagaagaaccagacagaaagtcaactggctaaaatagctggcagcaataaaggttactgcattagctactacttctatcaactatggtaatctgtacagaattcactactaattacaacagaagcagtagcttctcaaacgaggagacaacaagagcaaagcc

SEQ ID NO: 92430 - DNA, 599 bp, Chicken  19866894409365_1
  misc_feature (1)..(18): n is any nucleotide
nnnnnnnnnnnnnnnnnntgtggatcattattactatttctgttagcacttccctaacctctcgtattcttttccaccttagcctatagtacacctgtgacaacgactagaactgtagtagttaggcctttctgcctagctgtacagtttgttccacagcagccccttacacagtgaacattttcttaaactaaaattccattaccgatcccctcataacaagaataaatgaatgggaaaatgggaaaggtagatgctttctggggtggcagtgatagagagacttgcgaattagaaccytggctcagcattctgctggattcagggggtggcgatggcraccagatgatttcctttcccattacagccagtaaccttagaacaggctcacacagtaatattggagcacagaaacacatacctcgctgttaaccttctcactgatactaggaaaagtagaaagcaatgccaaaaaggcaaggtaacaaccacagacgcttgtttttattcaccacgtttgaaggtaaaactagatgctgaggaaaaaaataaaygcaccaagaaataaaacttaacctttcatgtaatccttttctgct

SEQ ID NO: 92431 - DNA, 600 bp, Chicken  19866894409365_2
tgttagcacttccctaacctctcgtattcttttccaccttagcctatagtacacctgtgacaacgactagaactgtagtagttaggcctttctgcctagctgtacagtttgttccacagcagccccttacacagtgaacattttcttaaactaaaattccattaccgatcccctcataacaagaataaatgaatgggaaaatgggaaaggtagatgctttctggggtggcagtgatagagagacttgcgaattagaaccytggctcagcattctgctggattcagggggtggcgatggcraccagatgatttcctttcccattacagccagtaaccttagaacaggctcacacagtaatattggagcacagaaacacatacctcgctgttaaccttctcactgatactaggaaaagtagaaagcaatgccaaaaaggcaaggtaacaaccacagacgcttgtttttattcaccacgtttgaaggtaaaactagatgctgaggaaaaaaataaaygcaccaagaaataaaacttaacctttcatgtaatccttttctgctgcccagagatgagtgtctctttacaaaggatagattatgaa

SEQ ID NO: 92432 - DNA, 600 bp, Chicken  19866894409365_3
ggaaaggtagatgctttctggggtggcagtgatagagagacttgcgaattagaaccytggctcagcattctgctggattcagggggtggcgatggcraccagatgatttcctttcccattacagccagtaaccttagaacaggctcacacagtaatattggagcacagaaacacatacctcgctgttaaccttctcactgatactaggaaaagtagaaagcaatgccaaaaaggcaaggtaacaaccacagacgcttgtttttattcaccacgtttgaaggtaaaactagatgctgaggraaaaaataaaygcaccaagaaataaaacttaacctttcatgtaatccttttctgctgcccagagatgagtgtctctttacaaaggatagattatgaatctgatasacattgtggcagagatgatgatgcctaatttttattctttcctttttaatttatagctcagtggcaacaaccacctcaaacaaccaagccaaagaaggtgcggccctcaaccagccgatacgctgcactgtgtgaccaaggactagacatcaaagcagctttccagccagaggcaaatccagtccatctgacaat

SEQ ID NO: 92433 - DNA, 600 bp, Chicken  19866894409365_4
tgctttctggggtggcagtgatagagagacttgcgaattagaaccytggctcagcattctgctggattcagggggtggcgatggcraccagatgatttcctttcccattacagccagtaaccttagaacaggctcacacagtaatattggagcacagaaacacatacctcgctgttaaccttctcactgatactaggaaaagtagaaagcaatgccaaaaaggcaaggtaacaaccacagacgcttgtttttattcaccacgtttgaaggtaaaactagatgctgaggaaaaaaataaaygcaccaagaaataaaacttaacctttcatgtaatccttttctgctgcccagagatgagtgtctctttacaaaggatagattatgaatctgatasacattgtggcagagatgatgatgcctaatttttattctttcctttttaatttatagctcagtggcaacaaccacctcaaacaaccaagccaaagaaggtgcggccctcaaccagccgatacgctgcactgtgtgaccaaggactagacatcaaagcagctttccagccagaggcaaatccagtccatctgacaatgcagtctggtt

SEQ ID NO: 92434 - DNA, 600 bp, Chicken  19866894409365_5
atttcctttcccattacagccagtaaccttagaacaggctcacacagtaatattggagcacagaaacacatacctcgctgttaaccttctcactgatactaggaaaagtagaaagcaatgccaaaaaggcaaggtaacaaccacagacgcttgtttttattcaccacgtttgaaggtaaaactagatgctgaggaaaaaaataaaygcaccaagaaataaaacttaacctttcatgtaatccttttctgctgcccagagatgagtgtctctttacaaaggatagattatgaatctgatasacattgtggcagagatgatgatgcctaatttttattctttcctttttaatttatagctcagtggcaacaaccacctcaaacaaccaagccaaagaaggtgcggccctcaaccagccgatacgctgcactgtgtgaccaaggactagacatcaaagcagctttccagccagaggcaaatccagtccatctgacaatgcagtctggtttggtagagagcgatgacctgtagatccgagccaccacttccatcatcttctttcaaagcagaaacactgaaagccattgccttgaccaatgata

SEQ ID NO: 92435 - DNA, 600 bp, Chicken  19866894409369_1
ggacccctcccaaagagagggaccccccaacgcatgctgcagtcagggccaagcagatctcagcggtgtaaatacacacatatgtgtctacacgcgggcgcgcacaaacatttctcctctgcaaacactccccaagacaacaaaatgagctggcgctgcctcccctgcgctcactcccgcaccgacccgttcctctgacacagcaattagaggcagacattaatatttaaatatcaccagcacaggagaagggaaatcaaataaaaacgctgccacgcaccgtgccggcccatcaagccytctgtgctggagacaggagggcgccgggggaaacatggccctatgggtgcctggggacacaagtggccttggaaggtggtgcagagctgaggacacggaggctctggggctgcccacctgcttggacagggatcagagccaccaacccttccggagagaggaagaagaggaagcagggagcaaaagggtggtggtgagagagctgggggggggacgcttctgctttgaaccggatggcctcaaacttccccagcacacgggagggcaggggcacgaacctgctcctgcaccacagggggg

SEQ ID NO: 92436 - DNA, 599 bp, Chicken  19866894409370_1
  misc_feature (1)..(94): n is any nucleotide
nnnnnnnnnnnnnnnnnnnnnnnnnnnnnnnnnnnnnnnnnnnnnnnnnnnnnnnnnnnnnnnnnnnnnnnnnnnnnnnnnnnnnnnnnnnnnncacacccacgcactcccactgcccatatggcttttgcacacatacttctagctgaacttgcttaggaagcgtttcattcttcagaccgttgcaggaggatttattgctgcctatgatttttttgcctggcacattcccccccctcccccccgtcgttgtcttctccaactctgctggaaactgatctaaaataggttgcaaggaaytgccgtgcccccatcccccaggcatgaatggccacagcccctttctgctgcccagtatggaggatacctccaaccatccacgcagccctgcgggtaaaacacaccgggatgctaagaaatccccctctgykctcactgtgcccttccttgttgtcttattttgcaccatccgactcagtgccaccactggggtaagtgggctgcagtgccacatccgtgtgcatgggagggatccccgccctcagtcgcgtggtttgggaagagatcgaacctcgtcctcattttcttaaatagtataa

SEQ ID NO: 92437 - DNA, 600 bp, Chicken  19866894409370_2
cacacatacttctagctgaacttgcttaggaagcgtttcattcttcagaccgttgcaggaggatttattgctgcctatgatttttttgcctggcacattcccccccctcccccccgtcgttgtcttctccaactctgctggaaactgatctaaaataggttgcaaggaaytgccgtgcccccatcccccaggcatgaatggccacagcccctttctgctgcccagtatggaggatacctccaaccatccacgcagccctgcgggtaaaacacaccgggatgctaagaaatccccctctgykctcactgtgcccttccttgttgtcttattttgcaccatccgactcagtgccaccactggggtaagtgggctgcagtgccacatccgtgtgcatgggagggatccccgccctcagtcgcgtggtttgggaagagatcgaacctcgtcctcattttcttaaatagtataaatttccaaaggagagacatttcaaagcgaaatatcaaaatgtgacatttggaaaatgttaaaaaggggacggtgttgccttcattggaatactttgtttcaatttcgtttgaaattaaacttgatcaaaat

SEQ ID NO: 92438 - DNA, 600 bp, Chicken  19866894409370_3
acacatacttctagctgaacttgcttaggaagcgtttcattcttcagaccgttgcaggaggatttattgctgcctatgatttttttgcctggcacattcccccccctcccccccgtcgttgtcttctccaactctgctggaaactgatctaaaataggttgcaaggaaytgccgtgcccccatcccccaggcatgaatggccacagcccctttctgctgcccagtatggaggatacctccaaccatccacgcagccctgcgggtaaaacacaccgggatgctaagaaatccccctctgykctcactgtgcccttccttgttgtcttattttgcaccatccgactcagtgccaccactggggtaagtgggctgcagtgccacatccgtgtgcatgggagggatccccgccctcagtcgcgtggtttgggaagagatcgaacctcgtcctcattttcttaaatagtataaatttccaaaggagagacatttcaaagcgaaatatcaaaatgtgacatttggaaaatgttaaaaaggggacggtgttgccttcattggaatactttgtttcaatttcgtttgaaattaaacttgatcaaaatc

SEQ ID NO: 92439 - DNA, 599 bp, Chicken  19866894409371_1
  misc_feature (1)..(4): n is any nucleotide
nnnnctggtgttctttttgctgcttacattcaggtttcattttggacactagctgctggcaggcaaataaaaagaatcagacaagaattttttcatgctgtaatgagacaggagattggatggtttgatgtaaatgatgtgtgtgaactgaacacaaggattgttgagtaagtattaaatattagttaagtgctgagtatttaactactgcaaatcagttgtgatatctccttcaaaacaatgtgattttatcttatgaaacatctctgtaagccataccgtcatgtatgtagatcctgrgctcatttaggtggatcctgagaaacagagatgttggagaatgctgcttcatgctctctgtgcctgcagacttggagctatgttgaactgcaggtgttagaaacatgaagaaatactrtcagagtgtgctgtatccmgagaattcatttatatggtgtccacacttccttatttgtttgaatatcatttgttttttcagtgacatctccaagattaatgaaggaataggggaaaaaatagcgatgttctttcaggcagtggctacttttttcactggattcatagttggttttacaaaa

SEQ ID NO: 92440 - DNA, 600 bp, Chicken  19866894409371_2
gatggtttgatgtaaatgatgtgtgtgaactgaacacaaggattgttgagtaagtattaaatattagttaagtgctgagtatttaactactgcaaatcagttgtgatatctccttcaaaacaatgtgattttatcttatgaaacatctctgtaagccataccgtcatgtatgtagatcctgrgctcatttaggtggatcctgagaaacagagatgttggagaatgctgcttcatgctctctgtgcctgcagacttggagctatgttgaactgcaggtgttagaaacatgaagaaatactrtcagagtgtgctgtatccmgagaattcatttatatggtgtccacacttccttatttgtttgaatatcatttgttttttcagtgacatctccaagattaatgaaggaataggggaaaaaatagcgatgttctttcaggcagtggctacttttttcactggattcatagttggttttacaaaaggctggaaattaacactcgtgatcctggcactcagccctgtyctgggattctcctcagctctctgggcaaaggtaggcaaaaagtgggatttttcctaaaaacgtcaaggctgtaattc

SEQ ID NO: 92441 - DNA, 600 bp, Chicken  19866894409371_3
tgtgtgtgaactgaacacaaggattgttgagtaagtattaaatattagttaagtgctgagtatttaactactgcaaatcagttgtgatatctccttcaaaacaatgtgattttatcttatgaaacatctctgtaagccataccgtcatgtatgtagatcctgrgctcatttaggtggatcctgagaaacagagatgttggagaatgctgcttcatgctctctgtgcctgcagacttggagctatgttgaactgcaggtgttagaaacatgaagaaatactrtcagagtgtgctgtatccmgagaattcatttatatggtgtccacacttccttatttgtttgaatatcatttgttttttcagtgacatctccaagattaatgaaggaataggggaaaaaatagcgatgttctttcaggcagtggctacttttttcactggattcatagttggttttacaaaaggctggaaattaacactcgtgatcctggcactcagccctgtyctgggattctcctcagctctctgggcaaaggtaggcaaaaagtgggatttttcctaaaaacgtcaaggctgtaattcctatagccctgcttggaat

SEQ ID NO: 92442 - DNA, 600 bp, Chicken  19866894409371_4
tgctgcttcatgctctctgtgcctgcagacttggagctatgttgaactgcaggtgttagaaacatgaagaaatactrtcagagtgtgctgtatccmgagaattcatttatatggtgtccacacttccttatttgtttgaatatcatttgttttttcagtgacatctccaagattaatgaaggaataggggaaaaaatagcgatgttctttcaggcagtggctacttttttcactggattcatagttggttttacaaaaggctggaaattaacactcgtgatcctggcactcagccctgtyctgggattctcctcagctctctgggcaaaggtaggcaaaaagtgggatttttcctaaaaacgtcaaggctgtaattcctatagccctgcttggaatttgtaagaaaaaatgtaatctggctcctagtgaactgtgaccttgtctacatgcagaaagctgtagatatgggctcatggaatggtgtagcggaggaagcacagttcatctgccatggacactgatttgttgctgtaaaatttacataaacrtaatgtattctcatatgaaagggtaaataatctgtaccttcaccttcttcac

SEQ ID NO: 92443 - DNA, 436 bp, Chicken  19866894409371_5
ttttacaaaaggctggaaattaacactcgtgatcctggcactcagccctgtyctgggattctcctcagctctctgggcaaaggtaggcaaaaagtgggatttttcctaaaaacgtcaaggctgtaattcctatagccctgcttggaatttgtaagaaaaaatgtaatctggctcctagtgaactgtgaccttgtctacatgcagaaagctgtagatatgggctcatggaatggtgtagcggaggaagcacagttcatctgccatggacactgatttgttgctgtaaaatttacataaacrtaatgtattctcatatgaaagggtaaataatctgtaccttcaccttcttcactggatttccgtgacatctacgccaaaataacaaagtaatgaccgttaatataaataaatatacaaatgagataagattgcacaa

SEQ ID NO: 92444 - DNA, 600 bp, Chicken  19866894409372_1
cggccaggcttccctggagcagagcagcggggctgcacaaagctgctgggaagcgagggtttattgccagcttggtttcttttcccatctccccccatctctattcatctccccagggaggtggaggcagcagcggatattggagctggggctgtttcatatgtaaatggctgtgtgcaagtacagtcccctgacccccggcgcggtgccagcagcagtgccaagtcccagcgggctcccacccccctccccgtcccctatggccgcctgcgtggtgctgccagctcccagccctgcgcygggaacaaaggatgctgtcctgcagagtgctggggacatgactccccccggcccttggggtgctgcccccagctctgcttcccctgggtttggggtgctggggggagggcggtggggttctcctcagctgctgtggggctgtaggtcgttttgggagcagaggagataatgtaggtcgcccagccctccctggaagcttcctgtctcgggtttcccggggcagcagactgtcacggccctgaggtgacgagagccctgggctcggctcaggaagcccatttgattacaaatttattgccg

SEQ ID NO: 92445 - DNA, 600 bp, Chicken  19866894409379_1
tctcccgttgtgttcgctctttctctactttaacttttaatctcagccctgggtgaggtgcactgagcagtcatgatgaagctttcaggatgttagaaagtaaactgctggaagaggtcagtgagagcaaaaaccaataaagcacaagaaggaagtttgatacatacgaacaaagcaattggtaatgatgtgaaatagttgggtcaaccaagggctgtgcacaaatgaaaagattcacctccaaacacctgaaaagtttacctaacctgcttttccttgacaggagttagtctgttgccrtgaaccactgctaacagctttacaccctatgtttatttgcacatctccaggcacacatgagcatctggccatcagcagcagggtggattcttctttcaaaagaagctccttaaatcctataagcctcctggcttccttttcttttttcattcattgctgcttattacctgaaaagtgtgatttaaggctgggttttcaatatcctctcttcgcaccagaaaagctgttgaattcaaagggatggcctctgatgtatgggattgtttggtgcagaggtggcctgttgagctcctacttcat

SEQ ID NO: 92446 - DNA, 600 bp, Chicken  19866894409380_1
cctctaatcatgaggggcctttcctaatgcccaggatattttaaagatgatacaaagtagcttcactatggtgctggaccatcccccttccacccacagtctcagcctgttgagtccctggacttagatgggtggagtgctcttaagtaattactgacctggccgccttccactgctgttagtttttctcttctgtttataaatcctcatagaaataaaggtattttgacagaaaacagttttctgtcactggagagtggaggaatgaatgctgacatctttcttccctggattcctgcrattttgtcccatatatgactcaattctttattcaattcttagatcatctctgccttctaatttggagataagacagttggaagatgggactgaaggagtatttgctttgactcagctagtgaaacgtacccagtttggcccatttgaatccaagagagttgccaagcttgaaaaagaaacagtttttcccctaaaggtaagatgtggcatgkgaaaagcaataaaagggaatcagctttacccatgatggttttatgctgtctgccaccgtggaaaaaaatgagcgaagaatgttactgg

SEQ ID NO: 92447 - DNA, 565 bp, Chicken  19866894409380_2
aaataaaggtattttgacagaaaacagttttctgtcactggagagtggaggaatgaatgctgacatctttcttccctggattcctgcrattttgtcccatatatgactcaattctttattcaattcttagatcatctctgccttctaatttggagataagacagttggaagatgggactgaaggagtatttgctttgactcagctagtgaaacgtacccagtttggcccatttgaatccaagagagttgccaagcttgaaaaagaaacagtttttcccctaaaggtaagatgtggcatgkgaaaagcaataaaagggaatcagctttacccatgatggttttatgctgtctgccaccgtggaaaaaaatgagcgaagaatgttactgggatatcttttaggcgtacactataacagtttatctacagaagcattctgtgggcaggatgtagaacaactgatcgaggggcttgttctacatgattcaagttaatgtccttacaggagataagagctaggatataagcccatcgcacaattgctttgtctgtcacttgcatgtcata

SEQ ID NO: 92448 - DNA, 599 bp, Chicken  19866894409383_1
  misc_feature (1)..(28): n is any nucleotide
nnnnnnnnnnnnnnnnnnnnnnnnnnnnctttttccccaagccctgttttcaggaaatggtggagaatgagaaactaacacgcacgcacacacgcttgtacgaaagatggcttttattctcccttctgcaaccacacagaattcttcctgcgagcagagcctcttttcctaaaaccttacaatctcagccaggaggaaggcaatttccttgacttatttgtagggaaaaagaaagctccctcccccctcccatctgacccaaaccatctgaagtctgactgttctctctgcagaatgcakacccaccgcctcacagaaatctcctcgctgtcrtgaaggcttacatacaaattctgcacaaacgaacagaaagcggaacctgggaatgatggaaaggcaaattgaattcagatttgaattttgtatttgatgcctgtatacaatggggatgagtgcactgagaagcaatgcacagataggcagacggatctcctgcccgtgctcctattttaaagacccattcattttgcacctgaaggatgaattcttcctcccactctcctccttcctctcatcttctatgatttgcgtgatctttg

SEQ ID NO: 92449 - DNA, 600 bp, Chicken  19866894409383_2
tccccaagccctgttttcaggaaatggtggagaatgagaaactaacacgcacgcacacacgcttgtacgaaagatggcttttattctcccttctgcaaccacacagaattcttcctgcgagcagagcctcttttcctaaaaccttacaatctcagccaggaggaaggcaatttccttgacttatttgtagggaaaaagaaagctccctcccccctcccatctgacccaaaccatctgaagtctgactgttctctctgcagaatgcakacccaccgcctcacagaaatctcctcgctgtcrtgaaggcttacatacaaattctgcacaaacgaacagaaagcggaacctgggaatgatggaaaggcaaattgaattcagatttgaattttgtatttgatgcctgtatacaatggggatgagtgcactgagaagcaatgcacagataggcagacggatctcctgcccgtgctcctattttaaagacccattcattttgcacctgaaggatgaattcttcctcccactctcctccttcctctcatcttctatgatttgcgtgatctttgctgcataccttacaaaccactgttgaccttcgcc

SEQ ID NO: 92450 - DNA, 599 bp, Chicken  19866894409386_1
  misc_feature (1)..(192): n is any nucleotide
nnnnnnnnnnnnnnnnnnnnnnnnnnnnnnnnnnnnnnnnnnnnnnnnnnnnnnnnnnnnnnnnnnnnnnnnnnnnnnnnnnnnnnnnnnnnnnnnnnnnnnnnnnnnnnnnnnnnnnnnnnnnnnnnnnnnnnnnnnnnnnnnnnnnnnnnnnnnnnnnnnnnnnnnnnnnnnnnnnnnnnnnnnnnnnnnaaaaaaaacagcctatctgctcatgatgcttccttcatggaagcatttcctatttctgttgatttgcaccaaggatcgaagcaccaaacttaaggtagcttgagatgyctgtgcaggttcctcagcggtcacacacaaacttaaacacaaactgtgacttcacagacaagcaggtgggagagtatccaaaatctgatagctgggaaactcattttgattttcaacatacgtgttttctaacattcattcaacaagtcatccagtcatcctcctgtacgacaagctcttaatcaacaattacagatgaacttcagtttatgacctttcctctkctctaagaatctgccccagggaatttcttagcagctgctaccctcctgtctgccctarctaagagataaaagcca

SEQ ID NO: 92451 - DNA, 600 bp, Chicken  19866894409386_2
cttcatggaagcatttcctatttctgttgatttgcaccaaggatcgaagcaccaaacttaaggtagcttgagatgyctgtgcaggttcctcagcggtcacacacaaacttaaacacaaactgtgacttcacagacaagcaggtgggagagtatccaaaatctgatagctgggaaactcattttgattttcaacatacgtgttttctaacattcattcaacaagtcatccagtcatcctcctgtacgacaagctcttaatcaacaattacagatgaacttcagtttatgacctttcctctkctctaagaatctgccccagggaatttcttagcagctgctaccctcctgtctgccctarctaagagataaaagccaacatagcttcagttttagtctccaccyaaatccagactgtttgtgcccatcatctctgtagcctggatgaccctctaaatgttctagaattttaacttctctgtacacaagtagcaagaatcgtgtacaatatttgacatgaaatctccccagtgccttgtataataattctctcactgaagagatctcggtgaccaccacatctgcttttgttttgtgtccagc

SEQ ID NO: 92452 - DNA, 600 bp, Chicken  19866894409386_3
taaggtagcttgagatgyctgtgcaggttcctcagcggtcacacacaaacttaaacacaaactgtgacttcacagacaagcaggtgggagagtatccaaaatctgatagctgggaaactcattttgattttcaacatacgtgttttctaacattcattcaacaagtcatccagtcatcctcctgtacgacaagctcttaatcaacaattacagatgaacttcagtttatgacctttcctctkctctaagaatctgccccagggaatttcttagcagctgctaccctcctgtctgccctarctaagagataaaagccaacatagcttcagttttagtctccaccyaaatccagactgtttgtgcccatcatctctgtagcctggatgaccctctaaatgttctagaattttaacttctctgtacacaagtagcaagaatcgtgtacaatatttgacatgaaatctccccagtgccttgtataataattctctcactgaagagatctcggtgaccaccacatctgcttttgttttgtgtccagcatcagtcatccctgtttgactacagcatgcaggcctttccctgcagacctgttttaag

SEQ ID NO: 92453 - DNA, 600 bp, Chicken  19866894409386_4
acaaacttaaacacaaactgtgacttcacagacaagcaggtgggagagtatccaaaatctgatagctgggaaactcattttgattttcaacatacgtgttttctaacattcattcaacaagtcatccagtcatcctcctgtacgacaagctcttaatcaacaattacagatgaacttcagtttatgacctttcctctkctctaagaatctgccccagggaatttcttagcagctgctaccctcctgtctgccctarctaagagataaaagccaacatagcttcagttttagtctccaccyaaatccagactgtttgtgcccatcatctctgtagcctggatgaccctctaaatgttctagaattttaacttctctgtacacaagtagcaagaatcgtgtacaatatttgacatgaaatctccccagtgccttgtataataattctctcactgaagagatctcggtgaccaccacatctgcttttgttttgtgtccagcatcagtcatccctgtttgactacagcatgcaggcctttccctgcagacctgttttaagggatgacctcccagctgacagcagatgtgctgctaataatcact

SEQ ID NO: 92454 - DNA, 600 bp, Chicken  19866894409387_1
tgaatgcattcaagtagtaatgcttgggctagattgacttcagaagttctcctaattttactttttacttagataaaaatagttgttgtatgtgtagatgagtagaactttacccacgcgcttatttcaaaatggttattcaagaaggtttagttagatactagcacattagatagatactgagcattagatgcagccatatgcgaagcccacagggttattgttaacacccaagtgtgaacataacgtggcttgattgactcctggcattggcaagctgtgttgtgtgaaagcctccargaggtacatatcccgtagtcagtgcttccactcagtgcttgttgtgaccctttctcttatctgcagactggcctccttctgacctgkatgctgttatctttccttgttactggcttttgttggtagcattttacatcaagttccttcagctaaagcatcagaagctgtgtttgtaacggtggtgttcccagctttttgttagctgtgtctgacgcagttctttcacgtgtctttcctcaaccccaggcatcttttgaggtggatgaagaggtggtattaggagttcccaaaaactctttc

SEQ ID NO: 92455 - DNA, 600 bp, Chicken  19866894409387_2
gtatgtgtagatgagtagaactttacccacgcgcttatttcaaaatggttattcaagaaggtttagttagatactagcacattagatagatactgagcattagatgcagccatatgcgaagcccacagggttattgttaacacccaagtgtgaacataacgtggcttgattgactcctggcattggcaagctgtgttgtgtgaaagcctccargaggtacatatcccgtagtcagtgcttccactcagtgcttgttgtgaccctttctcttatctgcagactggcctccttctgacctgkatgctgttatctttccttgttactggcttttgttggtagcattttacatcaagttccttcagctaaagcatcagaagctgtgtttgtaacggtggtgttcccagctttttgttagctgtgtctgacgcagttctttcacgtgtctttcctcaaccccaggcatcttttgaggtggatgaagaggtggtattaggagttcccaaaaactctttccatgactggtgatgggttcaagtcatcaattttggaagagttttcttacatctgtgttttgtgtaaggactgaaaaatgttaatggt

SEQ ID NO: 92456 - DNA, 599 bp, Chicken  19866894409388_1
  misc_feature (1)..(100): n is any nucleotide
nnnnnnnnnnnnnnnnnnnnnnnnnnnnnnnnnnnnnnnnnnnnnnnnnnnnnnnnnnnnnnnnnnnnnnnnnnnnnnnnnnnnnnnnnnnnnnnnnnnnctgatgcagctgcaccattatagaaggccaccaggttagtgaggcaggacatgcccctggtgaagccattctggttctcccatattacatcatagaatcataggatcatagaatggcctggattgaaaaggaccacaatgatcatctagtttcaacattgcgctatgtgcagggtcaccaaccaactccctcttccataygcattagcatagcttccagggggatctgctccatgatcttccccagcacagaggtgaggctgagagctcagtaatttcctgggccatcctttctacctttcttaagaatgagtgtgacattgcctttcttgtagtcaccaggcactccacctaactgccatggttcttcaaataccacagagaatgtcttcatcaactatcttcgcttgatctggcagcctataatagaccccaatcacaaggatccttttcttgcctctgtctttaactctcacccacaggctgtcagcttgctcatg

SEQ ID NO: 92457 - DNA, 600 bp, Chicken  19866894409397_1
ttaatcttataaaacaaacaaacaaaaacagctgtcatttgctagcctctttctaggaaaggttcttgttgtctagagaggcgagtaagacaaaacgctgcagtcctgctaaaaattcattccatagaatcacagaatatcctgagttggaaggatcatcgattcttactcttagctccacacaggaccacccaagattcaaatcctatgtttgaaagcaatgtctgaatgcttcttgaactctggcagcttgaggccatgaccactgtcctggagagcctgttccatgttcaccacccrctggtaaagaacattctccctaccacccaccccgacccacccctgatgcagctccgtgtcgttccctcgggtcctgtcactgccaccagaaatcagaggtcagcaatgcccctccgcttcctgcaaggagctataggccaccacaatgcaaaccaagatgcctcagctgctcctcatatgtcttgccctccagacccctcaccatctgtatactctataatagttttgtgatctacataataaataacctaaggtatttttgaaaagtgattctgaaaaatctcctggtaaataataaaa

SEQ ID NO: 92458 - DNA, 600 bp, Chicken  19866894409418_1
gcgttaattgttgttacaagtacagttgacagagaagttggaccaatccccatatcaattactacaaaaagaaatcccaaatcaagcctcaaaaagggttgaagaaattggtcagtggtgatttctgttactgtttctatttctcacctgttcacacggtgaggacgcattccatggaacaaaacagaccaatcaaaaagaaataatcaaactctttttaagttcctctgttttgcaaagtagaaaagactgaaaggagtcttccactttgagcattcatatatcaccatgtcagaaatrcaatctgttatgttaaatagtaaattaatctagcagttgtataacccaaacgaagaagagaatgtccttgtatataagcagttccaaataatataaaagaaagctgataaacatacatacacctgctcttgccaacacacagatgcacattaatgcacatgcattcagatgtggccctgttaaatcagtagcttcaactcctgccatatcatcagcaagcagccaaaaaatcagtttttcttaataagaactgtcaacttccatgtggaaagcattatttcctactttcataatcgattt

SEQ ID NO: 92459 - DNA, 599 bp, Chicken  19866894409426_1
  misc_feature (1)..(3): n is any nucleotide
nnnaatattaactgagtaaatgtagcagaaatgctaagtcatggcctgaacccagtgattgagcacctggtgggaaggcaggactggtaggacgttaaaaaatttgagctgtcagaaagcaggcagaaattttaggtgtcgtaagcaggtaaataaattaataaatcaaatgtagcttaatgcaacaaactttcaaagcacaatatgacatcagtccagtgtcctcctttctctttgtctacaacagactcaccaggtttaatctaccgtcttgttcgggacttatcaaactggtctgtkgaactctgccttcctttggaggatgtcaagtctctttctttggaaartggcctggtttcacagaatacaaaatttggtggtgtccttgctcagatacctgagctgagccaagtgcctacctcacacttgttcctgcagtgttgctgtcccacagtggagcagcagaatgccacagctctctaaygctgtaagaactaataagctttatcattgagattgccccactagcatgatggaaagcaagaagatggggaaaagacagcgttacaggaataaatgcttytgtcgcctttcttcaa

SEQ ID NO: 92460 - DNA, 600 bp, Chicken  19866894409426_2
gaacccagtgattgagcacctggtgggaaggcaggactggtaggacgttaaaaaatttgagctgtcagaaagcaggcagaaattttaggtgtcgtaagcaggtaaataaattaataaatcaaatgtagcttaatgcaacaaactttcaaagcacaatatgacatcagtccagtgtcctcctttctctttgtctacaacagactcaccaggtttaatctaccgtcttgttcgggacttatcaaactggtctgtkgaactctgccttcctttggaggatgtcaagtctctttctttggaaartggcctggtttcacagaatacaaaatttggtggtgtccttgctcagatacctgagctgagccaagtgcctacctcacacttgttcctgcagtgttgctgtcccacagtggagcagcagaatgccacagctctctaaygctgtaagaactaataagctttatcattgagattgccccactagcatgatggaaagcaagaagatggggaaaagacagcgttacaggaataaatgcttytgtcgcctttcttcaaaatctgaagaaaaacagaaaaccttcctgttctcttcctggtcactct

SEQ ID NO: 92461 - DNA, 600 bp, Chicken  19866894409426_3
acaaactttcaaagcacaatatgacatcagtccagtgtcctcctttctctttgtctacaacagactcaccaggtttaatctaccgtcttgttcgggacttatcaaactggtctgtkgaactctgccttcctttggaggatgtcaagtctctttctttggaaartggcctggtttcacagaatacaaaatttggtggtgtccttgctcagatacctgagctgagccaagtgcctacctcacacttgttcctgcagtgttgctgtcccacagtggagcagcagaatgccacagctctctaaygctgtaagaactaataagctttatcattgagattgccccactagcatgatggaaagcaagaagatggggaaaagacagcgttacaggaataaatgcttytgtcgcctttcttcaaaatctgaagaaaaacagaaaaccttcctgttctcttcctggtcactcttgggcgtttgtgggattcctctgttgttttccaaatctactgcatggatgagaargagatcttcaaccaggaaggactaccaagcataaatattcattttgccgtttctggagcagtgaatttagggttctgtctct

SEQ ID NO: 92462 - DNA, 535 bp, Chicken  19866894409426_4
tatcaaactggtctgtkgaactctgccttcctttggaggatgtcaagtctctttctttggaaartggcctggtttcacagaatacaaaatttggtggtgtccttgctcagatacctgagctgagccaagtgcctacctcacacttgttcctgcagtgttgctgtcccacagtggagcagcagaatgccacagctctctaaygctgtaagaactaataagctttatcattgagattgccccactagcatgatggaaagcaagaagatggggaaaagacagcgttacaggaataaatgcttytgtcgcctttcttcaaaatctgaagaaaaacagaaaaccttcctgttctcttcctggtcactcttgggcgtttgtgggattcctctgttgttttccaaatctactgcatggatgagaargagatcttcaaccaggaaggactaccaagcataaatattcattttgccgtttctggagcagtgaatttagggttctgtctctcccctctaccaatactcatttgaattatgagcca

SEQ ID NO: 92463 - DNA, 416 bp, Chicken  19866894409426_5
ctgagccaagtgcctacctcacacttgttcctgcagtgttgctgtcccacagtggagcagcagaatgccacagctctctaaygctgtaagaactaataagctttatcattgagattgccccactagcatgatggaaagcaagaagatggggaaaagacagcgttacaggaataaatgcttytgtcgcctttcttcaaaatctgaagaaaaacagaaaaccttcctgttctcttcctggtcactcttgggcgtttgtgggattcctctgttgttttccaaatctactgcatggatgagaargagatcttcaaccaggaaggactaccaagcataaatattcattttgccgtttctggagcagtgaatttagggttctgtctctcccctctaccaatactcatttgaattatgagcca

SEQ ID NO: 92464 - DNA, 599 bp, Chicken  19866894409427_1
  misc_feature (1)..(122): n is any nucleotide
nnnnnnnnnnnnnnnnnnnnnnnnnnnnnnnnnnnnnnnnnnnnnnnnnnnnnnnnnnnnnnnnnnnnnnnnnnnnnnnnnnnnnnnnnnnnnnnnnnnnnnnnnnnnnnnnnnnnnnnnnnaagacgtagaccagccgcccaaagctgtgagggaaagcacctggagaggctatttacgtctgtgatgtgattcacaaggctgtgacagttaacctgcttttgccacatcttgatttagtggcccagaacttcctcatttccacagaagaatctgccagataaggaaggggtgcctgcmggagggccgctgccaccgctcctccccagggaggtgctgcagtgtgctgccctgcttctcggatagagcactccatggggcagcatggcaagctgcaggmcttcttgctccgggtgagctctggaaagatgcgagcayttgatttctcggaaggtgaaagtgatttcttctaacacgagtgcagaccgttcctgcgatctcactgagacggaaggtttctctttgccctgctttcttaattccctccttgtagatgtcttttctcctcctccgtctgacgcagggcctgggccacatct

SEQ ID NO: 92465 - DNA, 599 bp, Chicken  19866894409427_2
  misc_feature (1)..(22): n is any nucleotide
nnnnnnnnnnnnnnnnnnnnnnaagacgtagaccagccgcccaaagctgtgagggaaagcacctggagaggctatttacgtctgtgatgtgattcacaaggctgtgacagttaacctgcttttgccacatcttgatttagtggcccagaacttcctcatttccacagaagaatctgccagataaggaaggggtgcctgcmggagggccgctgccaccgctcctccccagggaggtgctgcagtgtgctgccctgcttctcggatagagcactccatggggcagcatggcaagctgcaggmcttcttgctccgggtgagctctggaaagatgcgagcayttgatttctcggaaggtgaaagtgatttcttctaacacgagtgcagaccgttcctgcgatctcactgagacggaaggtttctctttgccctgctttcttaattccctccttgtagatgtcttttctcctcctccgtctgacgcagggcctgggccacatctcccctcctcttgcagtagggggactgagagggaccacgttcacatcggtgaagcccgctggctttgttttgtcacacgtgacagcagtgggagttgtgct

SEQ ID NO: 92466 - DNA, 600 bp, Chicken  19866894409427_3
gcccaaagctgtgagggaaagcacctggagaggctatttacgtctgtgatgtgattcacaaggctgtgacagttaacctgcttttgccacatcttgatttagtggcccagaacttcctcatttccacagaagaatctgccagataaggaaggggtgcctgcmggagggccgctgccaccgctcctccccagggaggtgctgcagtgtgctgccctgcttctcggatagagcactccatggggcagcatggcaagctgcaggmcttcttgctccgggtgagctctggaaagatgcgagcayttgatttctcggaaggtgaaagtgatttcttctaacacgagtgcagaccgttcctgcgatctcactgagacggaaggtttctctttgccctgctttcttaattccctccttgtagatgtcttttctcctcctccgtctgacgcagggcctgggccacatctcccctcctcttgcagtagggggactgagagggaccacgttcacatcggtgaagcccgctggctttgttttgtcacacgtgacagcagtgggagttgtgctttgcaggtattttttcctgttatttcagagacagcagca

SEQ ID NO: 92467 - DNA, 600 bp, Chicken  19866894409433_1
ttatctacagaaatgttaactgaattctaattatttggctgaatgctgatttgcctttgcacttccttctcttttgggcatagcagtctttcaaaacgcttgttattcatagtggaggtgatcgtgcccctctactcagctcttttgaggccccttctggagtactgtgtccaggcctgaggcccccagtacaggaaggatgtggagctcttagagcaggtccagaggagggccactaagatgatcagagggctggagcacctctcctatgaggaaaggttgagggagctgggcttgttwagcttagagaagagaaggctccggggagacctcattgcggccttccgatacttgaagagggcatataaacaggagggggaacggctttttatgagggtggacagtaataggacaaggtggaatggtcttaaactgagacaggggaggtttaagttagatattaggaggaggtttttcactcagagggtggtgacgcactggaacaggttgcccaaggaggttgtggatgccccattgctgaaggcattcaaggccaggctggatgtggctctggacagcctggtctggtagttggaaacc

SEQ ID NO: 92468 - DNA, 600 bp, Chicken  19866894409439_1
accctagtgagctaatggtgcacaatattttttctctgggacttaggtgaactgtcctcttgaccttctattcataatttaatgagttgactttttcagacgtaatagctcgacctagcctcacttttccaagtcatttttacttgatttccaagctactgcctcacaaactgggccaagttttccattaattcccatgacttctgcagaatggtgctgctctggagcatagcccatggtctttagtgaactcagttgtgttgacttctaatggatcactttcttcatcttggtttcctygtcagcccatgcaagggaaggatggtgggcttattgctccaaaacaagaggtattcttcagtcctgtcaacaggaaatactgaacaggtattactgtactataataacgtaaatcacaaggaatactgcaatacygaacacaacaggtttctccttatggccaacagcaaaaacaatctgtaagcttgaacaggagagcatcatccagtagactcacatagtacagattctgtccatcttctgctggacaaaagcaaatacatagctatcctcagtgttgttaagtccctccacatgcat

SEQ ID NO: 92469 - DNA, 599 bp, Chicken  19866894409439_2
atttttacttgatttccaagctactgcctcacaaactgggccaagttttccattaattcccatgacttctgcagaatggtgctgctctggagcatagcccatggtctttagtgaactcagttgtgttgacttctaatggatcactttcttcatcttggtttcctygtcagcccatgcaagggaaggatggtgggcttattgctccaaaacaagaggtattcttcagtcctgtcaacaggaaatactgaacaggtattactgtactataataacgtaaatcacaaggaatactgcaatacygaacacaacaggtttctccttatggccaacagcaaaaacaatctgtaagcttgaacaggagagcatcatccagtagactcacatagtacagattctgtccatcttctgctggacaaaagcaaatacatagctatcctcagtgttgttaagtccctccacatgcatgactggttttggataactgggtctctgacactcttggtgtacatcagtgggagaatttgacctaaaaagtgcacatttaaagtaaaaagcacaggcagctcttaaaaatagctgggataggttgcttgtcttgg

SEQ ID NO: 92470 - DNA, 600 bp, Chicken  19866894409449_1
cagagaaaaagaaaacagtgatgtgctcattttatgtactgtgaagtaaacctcaccaatttctaccagggttgaagctgcaagttactattggtgatgggactgagttaggcagcattgcctccctgcttctcttaagtaagaaaggtgtaatagagacctgaatatgaaaagaaggttcaaaagaaagcgttgccaagcagagcagagtccttgcctatctctaatgctctactttccccaagcactgatatcaacaggggcatttggggcaacaagtgggaaaatagtggagtacasgctccctcttggatctgaaagaagagttttgtccataatctctttcagtgttaattcactggtgtctctatgtcagtgacaggatttttctttaattttatctgattaaaaatttcacttcatcactgctaatgacctgatcttcttattcacttaatgaaggtaacttaaagaatttcattttcatcatgtttggtagaataaggtttgggttttcttaaagtgtgtagcagacaattactgggaaggaggtcttgagtagaaagcacgtctactaatctcatgtgaaggaggaaaagg

SEQ ID NO: 92471 - DNA, 600 bp, Chicken  19866894409451_1
gccatactggtgccatatgcctgcacttgacaccagatggatctccaaacaatactttgtcagtgggaagaagcgatcggaggagttcacaagcatttctagcctccaaaataccaggttatgctgcagcaggcactcaggaaactcctgcgtatgttttctagctgagcaaacacatgcaaaagagaactgagatactaaataaagtccttttttcttgccagattaatggccgagaatcagcgtggacaagcagaggtatcagatcagtacactggttccacttgctgactttgcccyggctgctgagatacatggatttgtacactggcatagagactgtgttccttccaagcatcttgtttattgttagcattagcagatataattctggacatttctgtttcacacaaatgtctaagtataattaatagttatgagatagtaaacaaatggcagagagtgtaacagcaaaaatacattttttttttcccaattaagtttgaaatggtacctagaaaattatttctgtgtatggaaaccttcagcaaagatgttagccctaaactgtaaagcccctaaactacaagacatttggta

SEQ ID NO: 92472 - DNA, 416 bp, Chicken  19866894409454_1
cgatagcaaatttatctagctgttctgctaatactgttcttttgctgttttgtttccctcaaatcactttctaagtcattacagccatttgtgatcaagttctaagaatacagcacgtgtgttttatcaggtaatttcgtgactttgttttcaaatctaattgataattttgctgctgtgactatcttggatctcagaaattaagtatgagtgggtggaggcaggagtccagcaggagacttcaggtgctacattgaataccaatggtgttttaaggggttagcagtttatcttgatctygcaatgaaggttggacatgtgattgctttgtaactatattatctctccaagcttttcactattgttctcttgttcattgccatcatttctggaatggattttgtgtctgatcagtt

SEQ ID NO: 92473 - DNA, 600 bp, Chicken  19866894409464_1
gacctcattgtggccttccagtacttgaagggagcatataaacaggagggagaacgattgtttatgaggggaatggttttaaactgagtcagggaaggtttaggttggatattaggaagaactttttcacacagagggtggtgacacactggaatgggttgcccaaggaggttgtggatgccacatcgctggaggtgttcaaggccaggctggatgtggctctgggcagcctggtctggtggttggcaaccctgcacatagcagggggtttgaaactcgatgatcactgtggttcttttmaacccaggccattctgtgattctatgcttcatactgaacttcaggttttgcttcatttcaggagactgaatgtttctggacagtacataagtaaattatcttctttccttttgaagtctttatcataatgacgtgatttgcaggagcaatcatgcatgtcattataaaaaggtgattgtttcttgttcaagtcaatcatctctatattggtgctgcaaattcccttaagaaagtttctgtgaacaagaattaagttaaattcaggagaaaattcagggaartatgaattaaagaatagac

SEQ ID NO: 92474 - DNA, 600 bp, Chicken  19866894409464_2
gatcactgtggttcttttmaacccaggccattctgtgattctatgcttcatactgaacttcaggttttgcttcatttcaggagactgaatgtttctggacagtacataagtaaattatcttctttccttttgaagtctttatcataatgacgtgatttgcaggagcaatcatgcatgtcattataaaaaggtgattgtttcttgttcaagtcaatcatctctatattggtgctgcaaattcccttaagaaagtttctgtgaacaagaattaagttaaattcaggagaaaattcagggaartatgaattaaagaatagacttagcaggaagtccatagattcatttatgtccatagattcatttatgaactttggaatgggctgcccagagaggtggtggagtcaccgagcctggtggtgctcaaagagcgtttggatgttgtgttgagggacatggtttagcgagacccattggtgaagggcgaatggttggactggatgatcctgtgggtcttttccaaccttagtgattctatgattccactactgtgctttctcaattaaacattgctgctttcttgtaattttagccatggaaaga

SEQ ID NO: 92475 - DNA, 600 bp, Chicken  19866894409464_3
ctaaactcagagaaatgccttctaccctgaggcatttacagtctaaggttgcaatgctataatgagttgtgtgggcttgatcctaaagaagaaactgagggctgaagacttaattctaaaaaagatcagcaagtgagcttaccaatacataaaacgtggatgagaacaaaagtagtaagaaagttgctgaagcctgtggtctacataatctgagaactcgaaagaagtctggatctctcagctaggatttaaaaataaatctgtcctctgtgaatgtattaataaattagcttctaactyaagcctgagtatatctgcttttattttttcataaaatggggttaatacaagccttcaaaaatctaaatacttttatgttgcataatttagtaggtgactggtgacagtattatgaaagctatggccagcgttttctctgtcactacttctcttatggggaggctttcccaaatcacatcacaacccctttttccactctagaattcctttgcattcacaacaccacttgataaaattaagtaaaaaatctctatcctgtttttttttttacaatagtcacgagcactcctgtacattatt

SEQ ID NO: 92476 - DNA, 600 bp, Chicken  19866894409469_1
tatattgcagtgaaaaattacaataattaacacctatgcaatcctatgtaatacgttccaggtttcaatttctgaacacagttcaattattctgctatgcattctgcctgcatttcagactcttgggtatactaacgtgcataaaattggctttgcagttttgtgggcagaaacctaaacgtagctatgcataggacctattttgtccctttttgtatttacaggctttgtctcattttgtcagtttaggtaatgtagcagacatttgcaagtattctcagttatttttaacaagtgtcygttgtacagtgcakgagattattactgttggtaaggtaatgttgacctaaatgcagaaaacattctgctttgattcaatttccattgatgtgtgttgggattctttttgagaataacataattagggggaggatattcccatcttttgccagaaggtatccaacagcattattttgtgcaacatagctatktcagtcccacatcctttttcagagttcctttcctttataygaagcttactaacttggttagctcaaagaactctgctaagaatgtcctcaggattcaaatgctgtatca

SEQ ID NO: 92477 - DNA, 600 bp, Chicken  19866894409469_2
aaattacaataattaacacctatgcaatcctatgtaatacgttccaggtttcaatttctgaacacagttcaattattctgctatgcattctgcctgcatttcagactcttgggtatactaacgtgcataaaattggctttgcagttttgtgggcagaaacctaaacgtagctatgcataggacctattttgtccctttttgtatttacaggctttgtctcattttgtcagtttaggtaatgtagcagacatttgcaagtattctcagttatttttaacaagtgtcygttgtacagtgcakgagattattactgttggtaaggtaatgttgacctaaatgcagaaaacattctgctttgattcaatttccattgatgtgtgttgggattctttttgagaataacataattagggggaggatattcccatcttttgccagaaggtatccaacagcattattttgtgcaacatagctatktcagtcccacatcctttttcagagttcctttcctttataygaagcttactaacttggttagctcaaagaactctgctaagaatgtcctcaggattcaaatgctgtatcaaccaaggtttgcta

SEQ ID NO: 92478 - DNA, 600 bp, Chicken  19866894409469_3
taggacctattttgtccctttttgtatttacaggctttgtctcattttgtcagtttaggtaatgtagcagacatttgcaagtattctcagttatttttaacaagtgtcygttgtacagtgcakgagattattactgttggtaaggtaatgttgacctaaatgcagaaaacattctgctttgattcaatttccattgatgtgtgttgggattctttttgagaataacataattagggggaggatattcccatcttttgccagaaggtatccaacagcattattttgtgcaacatagctatktcagtcccacatcctttttcagagttcctttcctttataygaagcttactaacttggttagctcaaagaactctgctaagaatgtcctcaggattcaaatgctgtatcaaccaaggtttgctacaagcaattgccagatgcagaaggactgtaccccagtggtcctgacttgtagctgctttattttgtaactacttgttgtatccttggtaaccaaccatgtggaagaaaaatgatagaatcacctgagtaaccatggaaacacaaacatttaggagtaattggataatctgaccttac

SEQ ID NO: 92479 - DNA, 600 bp, Chicken  19866894409469_4
ctcattttgtcagtttaggtaatgtagcagacatttgcaagtattctcagttatttttaacaagtgtcygttgtacagtgcakgagattattactgttggtaaggtaatgttgacctaaatgcagaaaacattctgctttgattcaatttccattgatgtgtgttgggattctttttgagaataacataattagggggaggatattcccatcttttgccagaaggtatccaacagcattattttgtgcaacatagctatktcagtcccacatcctttttcagagttcctttcctttataygaagcttactaacttggttagctcaaagaactctgctaagaatgtcctcaggattcaaatgctgtatcaaccaaggtttgctacaagcaattgccagatgcagaaggactgtaccccagtggtcctgacttgtagctgctttattttgtaactacttgttgtatccttggtaaccaaccatgtggaagaaaaatgatagaatcacctgagtaaccatggaaacacaaacatttaggagtaattggataatctgaccttacctacatgacacaagagatgctttctatttaatacctggag

SEQ ID NO: 92480 - DNA, 599 bp, Chicken  19866894409472_1
  misc_feature (1)..(13): n is any nucleotide
nnnnnnnnnnnnnaagtagagacttctgctaagaactcagtttgaaatagataaccagtgcaacactgttaaattacatcaaactagcagcgttaaagttgaaagcaagcaaaaccaaattgttagtataaaggatttcagttgagctcagtgatttctcaagttactttataatgaaaaattttataaagaaaaatacaaaacaaaaaaaagtatttcctaattttggtgattacagtcaaacaatattttcccccacccctcctgcaaaaattgcacctaatggtgaaacaggagaayttacactgatatgtttgtctggtagttagtatcttacacaaatacaatgaataaataygctaaacttaccatcacagcagggtttttcacagtgatacatggagtagtagctcggagggctccactaacaccatggtagtatttaaaacagatctttatttcagctggaaaagaaarcaaaaatcacatcaaatcctttgtgactgacactaggcaaaagaaaatgaaaggaacacatacagggagtcatagctcacttctgttcacagcctgagtcacatctgctgtagaagcacaca

SEQ ID NO: 92481 - DNA, 600 bp, Chicken  19866894409472_2
tgcaacactgttaaattacatcaaactagcagcgttaaagttgaaagcaagcaaaaccaaattgttagtataaaggatttcagttgagctcagtgatttctcaagttactttataatgaaaaattttataaagaaaaatacaaaacaaaaaaaagtatttcctaattttggtgattacagtcaaacaatattttcccccacccctcctgcaaaaattgcacctaatggtgaaacaggagaayttacactgatatgtttgtctggtagttagtatcttacacaaatacaatgaataaataygctaaacttaccatcacagcagggtttttcacagtgatacatggagtagtagctcggagggctccactaacaccatggtagtatttaaaacagatctttatttcagctggaaaagaaarcaaaaatcacatcaaatcctttgtgactgacactaggcaaaagaaaatgaaaggaacacatacagggagtcatagctcacttctgttcacagcctgagtcacatctgctgtagaagcacacaataactataaatgaactatgtcttcttttaacctgcagagaatcaggatacagattcag

SEQ ID NO: 92482 - DNA, 600 bp, Chicken  19866894409472_3
aaaattttataaagaaaaatacaaaacaaaaaaaagtatttcctaattttggtgattacagtcaaacaatattttcccccacccctcctgcaaaaattgcacctaatggtgaaacaggagaayttacactgatatgtttgtctggtagttagtatcttacacaaatacaatgaataaataygctaaacttaccatcacagcagggtttttcacagtgatacatggagtagtagctcggagggctccactaacaccatggtagtatttaaaacagatctttatttcagctggaaaagaaarcaaaaatcacatcaaatcctttgtgactgacactaggcaaaagaaaatgaaaggaacacatacagggagtcatagctcacttctgttcacagcctgagtcacatctgctgtagaagcacacaataactataaatgaactatgtcttcttttaacctgcagagaatcaggatacagattcaggatatatttccatggactataatacaaccctctttgctgcaaggtaactgcttttcctctgagttgattcttaggatacagaggagaaaataaatgattagatcatctcctgtgatcgt

SEQ ID NO: 92483 - DNA, 534 bp, Chicken  19866894409491_1
atcccttgaaagacttcaagtccctgctgacttaatccttggtttgagtgtcagatatgaacacagtgaaaataaagggtatgttttaatgcctctgtgctctctgaagattaagagaaggcaagaggaataagaaatgtttagaaacctgtaggtaccatacagccagataggtaacttgataaatagggagggaaggtctgctgaaacagtaaaggggtggaattcacctcgaaaaggaagttctgcattttaaaaaagccaaaaacatctgcatcagtaaataaacacttatacatyttccctaggatcatttggaggatgacactgtttatcagaacagatgagcatgtgctgcacctccaatttgttckatatgtttgatgcaactgaaggggctgatgaagaagttaagctttttcacagacttactttcctttaaaacacaaggagaaaaatgtacagggcagtattcgtcaagagtgttttctgagcagatcaaaaccaacattgcttctcattccagaagaacaa

SEQ ID NO: 92484 - DNA, 460 bp, Chicken  19866894409491_2
aagggtatgttttaatgcctctgtgctctctgaagattaagagaaggcaagaggaataagaaatgtttagaaacctgtaggtaccatacagccagataggtaacttgataaatagggagggaaggtctgctgaaacagtaaaggggtggaattcacctcgaaaaggaagttctgcattttaaaaaagccaaaaacatctgcatcagtaaataaacacttatacatyttccctaggatcatttggaggatgacactgtttatcagaacagatgagcatgtgctgcacctccaatttgttckatatgtttgatgcaactgaaggggctgatgaagaagttaagctttttcacagacttactttcctttaaaacacaaggagaaaaatgtacagggcagtattcgtcaagagtgttttctgagcagatcaaaaccaacattgcttctcattccagaagaacaa

SEQ ID NO: 92485 - DNA, 599 bp, Chicken  19866894409496_1
  misc_feature (1)..(229): n is any nucleotide
nnnnnnnnnnnnnnnnnnnnnnnnnnnnnnnnnnnnnnnnnnnnnnnnnnnnnnnnnnnnnnnnnnnnnnnnnnnnnnnnnnnnnnnnnnnnnnnnnnnnnnnnnnnnnnnnnnnnnnnnnnnnnnnnnnnnnnnnnnnnnnnnnnnnnnnnnnnnnnnnnnnnnnnnnnnnnnnnnnnnnnnnnnnnnnnnnnnnnnnnnnnnnnnnnnnnnnnnnnnnnnnnnnnnngcaaagatatcaaatggtcactttctgcggtggtggtaaaagagcttgtagaaaaacacaatggttgatcrgatccactgttacagtcggagcagaatgtcaggtttttagggaaaaagactcctgcctcctgggctgcccaaaccacctactgactgtgtccctgagctcttccatttttgcactccacctgtgttactgggtgtcatgaagttgccacctcttcctgtaaatcaggccttttatttcctcaacccatcctgcctctgcaatttgagatgatgaacagaacactgatactgaaagatggagaaggaaacagaagggagaccaaagttatgaaagaggatgcatgactctgatggagtat

SEQ ID NO: 92486 - DNA, 600 bp, Chicken  19866894409496_2
tgcccaaaccacctactgactgtgtccctgagctcttccatttttgcactccacctgtgttactgggtgtcatgaagttgccacctcttcctgtaaatcaggccttttatttcctcaacccatcctgcctctgcaatttgagatgatgaacagaacactgatactgaaagatggagaaggaaacagaagggagaccaaagttatgaaagaggatgcatgactctgatggagtatcagtcacttcagagtgcatttttctgctgactagacttgcaataactgatttcttaaaagacagaraagaagaaagatagaacatgaagaaaatgacactctttacaaagtatgaggcagatagagagggctatggaacataaaaacaatggatttttttcactactgcctaccagtaaaagcttgatcygcctgtattcagaaaagggtgatttcttctccttacaccctgtgcttctgtaaagtactcatttctcccatgttagcacagcacgtgtatgtttattaaaaaccctgcaagtgcaaagtggcaaaaccagcctgtaagagttgcctctctgaagaagatctgagtttactgggcaa

SEQ ID NO: 92487 - DNA, 600 bp, Chicken  19866894409496_3
ctgcctctgcaatttgagatgatgaacagaacactgatactgaaagatggagaaggaaacagaagggagaccaaagttatgaaagaggatgcatgactctgatggagtatcagtcacttcagagtgcatttttctgctgactagacttgcaataactgatttcttaaaagacagaraagaagaaagatagaacatgaagaaaatgacactctttacaaagtatgaggcagatagagagggctatggaacataaaaacaatggatttttttcactactgcctaccagtaaaagcttgatcygcctgtattcagaaaagggtgatttcttctccttacaccctgtgcttctgtaaagtactcatttctcccatgttagcacagcacgtgtatgtttattaaaaaccctgcaagtgcaaagtggcaaaaccagcctgtaagagttgcctctctgaagaagatctgagtttactgggcaaaacaataatgtcaaaaatggaagcaagaaatcaaaatgaaaagcagttaggcagacaaatcaaaatttctctccctctacaaaggtggcagcgtgcagcggtgggaggttctgtctgagtgcac

SEQ ID NO: 92488 - DNA, 585 bp, Chicken  19866894409501_1
tgtccagttcagaacaaaattgggtaagaattggaacagtaaggctaagaatgcttgctcaatatattttacattcatagcattattagaagtaaaaactaaggtttttttttttttaaatcaactgactactgcttacctcatagaggaaaataccacattctggattctgaagctacaattaattccctctgctgagcttctattctcaaagcaaggactacattagcaaagttataagcacagattttgcatgacaaatctatctatccgcccacttatcgccactgtatacagatyccccccaagaaactgatatgtgtccccaccagaggctgtaggtgtgaatgtgttcctgtgtgtgcattcacaccatcaaatcatttaggaaacagtcaacaacagcgcaatgcctttgtattatcaaccattcatgaattgacttttatgaactaatccgattacttctattaacacagagagactaccagcactctcaggacgtgacagtaagaagtttcagtctgactgcacgtagtgtgagcaatcagcagcttttgtttagaaccaccccctgccaacttc

SEQ ID NO: 92489 - DNA, 600 bp, Chicken  19866894409509_1
gagggataggaagattaaataagctttctttgtggactgtacttagtgtttctgtgagcaatggtgtaatttgcattcggtgtcatccagagaggaaaaatctcttcaagaaactgtctgtggatgaagtcattaggtgtggtttggatttgggctctaaatagcacagatgtccagcacaaaatgattttgttttgttaattttttgcactagtcagagagggaacaaagaaatgaagagtctttgctctttctgcagcaatctgtgctgtggagaggggtgggtatcagagttgggtrcatggctctgcccaggggctggctgtcaaagtaatgacaataagtttcacgggcggtggcagatccatgcctgactgggcagggggagcggtagaagttaagtgtaagtcacacagcttgggtaacagagaagagtggtagggggctgtagctcgctggaggcagattttaacgagctatttcacaaactgggcagaatcatttccagcacagcccttattttggcactgactcagtctcctgcatgttgagagaaaaaccctacatgttgacagaggaccacaggctagaatatatcta

SEQ ID NO: 92490 - DNA, 600 bp, Chicken  19866894409510_1
atggtaccttgtagggatccatgacacgcagatagagcactccatcaatctgcaaggtgacattatctgccaggagaaaacgatacattctgtttatcaaagcaaatgcatggcaccttctctgagagaattagcagagctggaaagggtggtccctttcctgctatagcatggcaggtgctggcccttggaggcaatgaaatcaacttgataaatactttgcaataccaagcagtgttgttaggaacatcaatagtcatatacaggaagaagttaacccatctgactggtgacacagtstctggctacagaacacccattctcagagaggggccttcatccaggagacactctccctgtggaggccagtccttaaatgagcccagggaggaaagcaaaggtgaactgtttgcacctgtgcttcctaggccaacccttcaccaggtgctcaatcatcagttcaggttatgacttaacagttccctcacagctggaatagcagaaatgcagatccttgtgcaaaaagggctcctacatcctctacagagtgcatcatttttacacaagaaatctcaggtcttgagatcatgatgtctcatg

SEQ ID NO: 92491 - DNA, 488 bp, Chicken  19866894409526_1
aattagaggagggatttggggacatggaatggaagctaactgtgactgtgtcaaacagtctttaaaattgtcttgctttttgattaacaacaagcaaacctcagttttatcttcaaggaaatataccaacattccacaagacatcaatcacacgggattgagttccagagcggcttgagtgcccaccagttcacccctctccccagctggataagctggatttagctctccttcctgggtgctgcaactgcaacacaccaccgtcattcaagatcagccctgcttgagaggaaaagcatytgctggagcacacgctctgactttcttggctctcaccaccaactagcagagcctgcctgtacaataccacccaggcaggtatatatggaggaggggtcagggcatctccacattcccaatgcagcagccacaacatccatctggccctgctgctgttgacctttccttcaagcccagcccaaatccag

SEQ ID NO: 92492 - DNA, 502 bp, Chicken  19866894409546_1
  misc_feature (1)..(104): n is any nucleotide
nnnnnnnnnnnnnnnnnnnnnnnnnnnnnnnnnnnnnnnnnnnnnnnnnnnnnnnnnnnnnnnnnnnnnnnnnnnnnnnnnnnnnnnnnnnnnnnnnnnnnnnncatatggccccaaacggccctatatccttatatggccctatatctttctacggtcctatatccttatatggtcctatatctttatatgaccctatatctttatacggccccaaatggacctatatccttatacggccccatatggccccaaacggccctatatccttatatggccccatatggccctttatccttrtatggccccatacggccctgtatccttatgtggttctatatccttatatggccctatatccttatatggccctacatccytatatggccccatatggccccatacggccctatatccttatatggccccatatggccccatatggccccatggcctgcagcaccccatagaaacacacaccacccccccattaacgcccacc

SEQ ID NO: 92493 - DNA, 422 bp, Chicken  19866894409546_2
  misc_feature (1)..(24): n is any nucleotide
nnnnnnnnnnnnnnnnnnnnnnnncatatggccccaaacggccctatatccttatatggccctatatctttctacggtcctatatccttatatggtcctatatctttatatgaccctatatctttatacggccccaaatggacctatatccttatacggccccatatggccccaaacggccctatatccttatatggccccatatggccctttatccttrtatggccccatacggccctgtatccttatgtggttctatatccttatatggccctatatccttatatggccctacatccytatatggccccatatggccccatacggccctatatccttatatggccccatatggccccatatggccccatggcctgcagcaccccatagaaacacacaccacccccccattaacgcccacc

SEQ ID NO: 92494 - DNA, 590 bp, Chicken  19866894409549_1
caaatgaaccatggcaaggcccgccagaacaatgcaaaatccaaggagaaaggtgaaggttaaggaagaaaggaactgaatgactgcaacgctactaacaatttctattgctataacaattactataactatatgactatatataattactataacaattactaacaataaaaaactgacagtaccagagatcacagatgtagcaccacagacaaaaatataacgctctcttggggaaagaaacatgccagattagctatgactaagcattattaagcttgcaatttgagtggttaggcrtgcctgttttgtcagacatcatggagtttggtctgagaggatcatagttacttttcrcttctcttaccccatcttgtcttccctttataattccatctcttaaawttagatttcaacttgcattgatgacagcaggagaaactggaagaaaattgtatagacataattttaacctgttcaaaattctgctgtgtgtaatggaggaccaggagccggtaagggcctgtctttctcagatcaccatttaattggtgtcaatgtggcccaaagtgtctctgcagtgtacattt

SEQ ID NO: 92495 - DNA, 533 bp, Chicken  19866894409549_2
ggttaaggaagaaaggaactgaatgactgcaacgctactaacaatttctattgctataacaattactataactatatgactatatataattactataacaattactaacaataaaaaactgacagtaccagagatcacagatgtagcaccacagacaaaaatataacgctctcttggggaaagaaacatgccagattagctatgactaagcattattaagcttgcaatttgagtggttaggcrtgcctgttttgtcagacatcatggagtttggtctgagaggatcatagttacttttcrcttctcttaccccatcttgtcttccctttataattccatctcttaaawttagatttcaacttgcattgatgacagcaggagaaactggaagaaaattgtatagacataattttaacctgttcaaaattctgctgtgtgtaatggaggaccaggagccggtaagggcctgtctttctcagatcaccatttaattggtgtcaatgtggcccaaagtgtctctgcagtgtacattt

SEQ ID NO: 92496 - DNA, 485 bp, Chicken  19866894409549_3
tattgctataacaattactataactatatgactatatataattactataacaattactaacaataaaaaactgacagtaccagagatcacagatgtagcaccacagacaaaaatataacgctctcttggggaaagaaacatgccagattagctatgactaagcattattaagcttgcaatttgagtggttaggcrtgcctgttttgtcagacatcatggagtttggtctgagaggatcatagttacttttcrcttctcttaccccatcttgtcttccctttataattccatctcttaaawttagatttcaacttgcattgatgacagcaggagaaactggaagaaaattgtatagacataattttaacctgttcaaaattctgctgtgtgtaatggaggaccaggagccggtaagggcctgtctttctcagatcaccatttaattggtgtcaatgtggcccaaagtgtctctgcagtgtacattt

SEQ ID NO: 92497 - DNA, 600 bp, Chicken  19866894409550_1
tggtttgagaaaatcaaatacctattttgctcttcagatctgaagcaagttcaatgtttaagtgctggttttaaaatatcttcaaagtatgcaagccagactaaacacaactggaaagttataaagcaacagtaatgactttccccccctatttttataactaattctattttcaacaccttaagttatatcctattcctctatttaaaatatcaaaagaaggacaatgaatcaaggaaatctttcttatattacagagcatatgatgttaatcaatccagctgacttatgcaaaaatgyctgctgtgtccacagagaaaatgctttccaaaatgtaactggtggagtaattggattattctccctacagtattacactcacatacagtaaatgtttcttttwaaagcttcaacagtagcttcgcattcttaaacatggctcaagttttagggctgaagaaataagttttaaaagccctttacataaagaggacactagattctacaatattttmctaataatataaagatttaaaaaactgttttaaaaacttataacctaagaacttgaaatttaacctgtatataattttcctcaac

SEQ ID NO: 92498 - DNA, 600 bp, Chicken  19866894409550_2
aacacaactggaaagttataaagcaacagtaatgactttccccccctatttttataactaattctattttcaacaccttaagttatatcctattcctctatttaaaatatcaaaagaaggacaatgaatcaaggaaatctttcttatattacagagcatatgatgttaatcaatccagctgacttatgcaaaaatgyctgctgtgtccacagagaaaatgctttccaaaatgtaactggtggagtaattggattattctccctacagtattacactcacatacagtaaatgtttcttttwaaagcttcaacagtagcttcgcattcttaaacatggctcaagttttagggctgaagaaataagttttaaaagccctttacataaagaggacactagattctacaatattttmctaataatataaagatttaaaaaactgttttaaaaacttataacctaagaacttgaaatttaacctgtatataattttcctcaactttcatagtccattttcttctgcatcattcccaaaatgcagcttagcaagcccagaactgttgaagcagataggtgcttttcttaagattgttatgaaatgaa

SEQ ID NO: 92499 - DNA, 600 bp, Chicken  19866894409550_3
aaagaaggacaatgaatcaaggaaatctttcttatattacagagcatatgatgttaatcaatccagctgacttatgcaaaaatgyctgctgtgtccacagagaaaatgctttccaaaatgtaactggtggagtaattggattattctccctacagtattacactcacatacagtaaatgtttcttttwaaagcttcaacagtagcttcgcattcttaaacatggctcaagttttagggctgaagaaataagttttaaaagccctttacataaagaggacactagattctacaatattttmctaataatataaagatttaaaaaactgttttaaaaacttataacctaagaacttgaaatttaacctgtatataattttcctcaactttcatagtccattttcttctgcatcattcccaaaatgcagcttagcaagcccagaactgttgaagcagataggtgcttttcttaagattgttatgaaatgaaaaataaaatttaaaaacacctcatgtcaaagatctgagaagttattayacacaagcaaattgctcacaattttatcagaccacaactatctcaagctctgctacatgagatg

SEQ ID NO: 92500 - DNA, 600 bp, Chicken  19866894409550_4
ggctgaagaaataagttttaaaagccctttacataaagaggacactagattctacaatattttmctaataatataaagatttaaaaaactgttttaaaaacttataacctaagaacttgaaatttaacctgtatataattttcctcaactttcatagtccattttcttctgcatcattcccaaaatgcagcttagcaagcccagaactgttgaagcagataggtgcttttcttaagattgttatgaaatgaaaaataaaatttaaaaacacctcatgtcaaagatctgagaagttattayacacaagcaaattgctcacaattttatcagaccacaactatctcaagctctgctacatgagatggctaaaattcattactaaaaagaaaaactttcctgctttatttatattgctttctaaaagaatgagtaacaatattattcagcatggaatgttaagtgtttatgcagtatctcccttacaaaagggggacataactttcagttgccacaaagtggtacttaacacactgctatgttttcttaagtagaaggaaaatcaacaactaagttgaatatgttttttcttaagtgactaac

SEQ ID NO: 92501 - DNA, 599 bp, Chicken  19866894409572_1
  misc_feature (1)..(117): n is any nucleotide
nnnnnnnnnnnnnnnnnnnnnnnnnnnnnnnnnnnnnnnnnnnnnnnnnnnnnnnnnnnnnnnnnnnnnnnnnnnnnnnnnnnnnnnnnnnnnnnnnnnnnnnnnnnnnnnnnnnnnttgcacctcatttaaataaacagaatattgaaactacctaactgcaagcaacgtagccaagtccctgtgtcacatggcttgttaaattagatgcattcacccagaagaccctcagcatctaattcttgacctactgaagctgatggagttttgccaatgacttcaagcaaaccaggatttcaytcaggatactttggatctcataatttgtaaggaaaatgctgactggaaatgataacgtgaattatatgcagcatgctgtcactgctaacagtgactacaaacagccattagcacagcatcagcaagaatgacttcagaacagatatgcaccatgttttatcgtgaaattggaatcacagatagaaagtgatttaagaaagtgtgaagactttttaaaaaaagttttaaatgcccattttcattttcttgctgacgcttccactttagctttatgctgctcaagtacatgaactgragag

SEQ ID NO: 92502 - DNA, 600 bp, Chicken  19866894409572_2
ttcaytcaggatactttggatctcataatttgtaaggaaaatgctgactggaaatgataacgtgaattatatgcagcatgctgtcactgctaacagtgactacaaacagccattagcacagcatcagcaagaatgacttcagaacagatatgcaccatgttttatcgtgaaattggaatcacagatagaaagtgatttaagaaagtgtgaagactttttaaaaaaagttttaaatgcccattttcattttcttgctgacgcttccactttagctttatgctgctcaagtacatgaactgragagtgatattttgagagcatcatttcttctgtaaaattcttctttaaaaatgctgacyctgtgctaaaagaggttctgatgccatcccccatagcactgtagctcaagccaaaactcaaagttaataaacaagtagtctctcctatatcttcttaaaacctctaaatgtctgaacttgctaagacagccaaaacgttccgagctgccctttccctctgaggacacttggcacttctttcatgggaccctacacaggacaggtgactgaaatgaatacagaactcaccagaagaccaccc

SEQ ID NO: 92503 - DNA, 600 bp, Chicken  19866894409572_3
acgtgaattatatgcagcatgctgtcactgctaacagtgactacaaacagccattagcacagcatcagcaagaatgacttcagaacagatatgcaccatgttttatcgtgaaattggaatcacagatagaaagtgatttaagaaagtgtgaagactttttaaaaaaagttttaaatgcccattttcattttcttgctgacgcttccactttagctttatgctgctcaagtacatgaactgragagtgatattttgagagcatcatttcttctgtaaaattcttctttaaaaatgctgacyctgtgctaaaagaggttctgatgccatcccccatagcactgtagctcaagccaaaactcaaagttaataaacaagtagtctctcctatatcttcttaaaacctctaaatgtctgaacttgctaagacagccaaaacgttccgagctgccctttccctctgaggacacttggcacttctttcatgggaccctacacaggacaggtgactgaaatgaatacagaactcaccagaagaccacccttagactccagatctgtgcatgttaagtttcagcagttcaggtgttgttttattgcctt

SEQ ID NO: 92504 - DNA, 600 bp, Chicken  19866894409580_1
actgagccttattgtgaccaaattggccacactgaaaacaaggacctctgtaggattctgcggcgttgcagtggccttgatgtcacagccattatgttggtgatagcgggccgctaggccctcattagtcaggggggtagttttttgtttatccaacacatatctaataatctcccctggtgtggcgattttcccgggggctgcacgaagcagggtttttatatcttcaagagacctttgcttaaggcagtccacgatcacagggccatggacggctctaggcaagtccgacccttcaastgccttaattagcctgtcagcaaactcctgaaaagattctgttggactttgggctaatgggtcttgtgtttcatattccgacagaaagttgccctaagcttcaatagctttcacattatattgcccatgatggaactgtttgtatgaatacctatagctacaactaaagtagtgtcctaagcagtgcttggacctgggcaccactgctctgctggttgtactattaaactattattgcaggtgtaagaatgtaagtcttctgtgctttagggcagtgccaggtgacactatcccagaaaa

SEQ ID NO: 92505 - DNA, 600 bp, Chicken  19866894409594_1
gctgtttcaaacttttatcagagaacacctgcgtggaggaggaggtaaagctaccatgctctccctctgcagcgtaggttttcctgcactctctaactgagctctctcctcccatgcgtatgtgcagggatgaagatccacaagtgccagtactgtaacaagtccttcagccgacgagcccacatgatagagcatcagcgctcgcacaccggcaactacaaataccgctgccccacctgcagcaagggcttcacgcgccacaagtacatgaaggaccacaagtgccgtctgggctcaccyaaggacaaagacctgcagctcaggaagccccagaagaaacgggtggtgcggggacgtaaagtgggcctttcccttcccaaccagctggttctgggagagctgaaggacagtgttggtggggaaagcccccaggaaggtgtccctaacaaagagccattccaggagtcagatgctgtcctgtccattgtggttggtgggtcaggagctgctgactcagaccttgtcgttcctgggcagcccagcagtatcgcatccaatttgtccttggcagaactgcaggctgcctcggatggcccctgc

SEQ ID NO: 92506 - DNA, 600 bp, Chicken  19866894409597_1
cacatagctcacagaaggctcagaagtacagttctcctgttgccatcatctgccccatgtttttgattcaggcccacatgtagctctgtgaccatccagcagcaccccatgtagaggtgaggaagccaaagggtgctctttgtctgatgtgctatggaaagctgttggtctgatgagtgtgcgttgctcacatggcatgcccatctcagctgaagtcattgtttcatcacctgtgccatgcactgcactgctgtcctccttggcactgagcaccaatacatgcctcaggtgttggctgtkcacgcagtgaggtcagacgctgccacatccttgctgccatactaagtgaycacatgggcacctccttctcctgctaatgggccacttagaaagctgcatgcattaaagtctcagcaaatgggggctgcaaacttttggaggcagtttgarggacttttcgtgaatgtaaatatgtagtgcagctgtcctgcctggctctcaggctgcttccttcaagtactgaaagagttgtatttagatttacactatccgttttcttggaaaagagatatgagacaaagaaacaaagcagaagaataa

SEQ ID NO: 92507 - DNA, 600 bp, Chicken  19866894409597_2
tgccccatgtttttgattcaggcccacatgtagctctgtgaccatccagcagcaccccatgtagaggtgaggaagccaaagggtgctctttgtctgatgtgctatggaaagctgttggtctgatgagtgtgcgttgctcacatggcatgcccatctcagctgaagtcattgtttcatcacctgtgccatgcactgcactgctgtcctccttggcactgagcaccaatacatgcctcaggtgttggctgtkcacgcagtgaggtcagacgctgccacatccttgctgccatactaagtgaycacatgggcacctccttctcctgctaatgggccacttagaaagctgcatgcattaaagtctcagcaaatgggggctgcaaacttttggaggcagtttgarggacttttcgtgaatgtaaatatgtagtgcagctgtcctgcctggctctcaggctgcttccttcaagtactgaaagagttgtatttagatttacactatccgttttcttggaaaagagatatgagacaaagaaacaaagcagaagaataatactgaatgtgttctgtggaagaccaaatcccttctgactgaatgcgtgc

SEQ ID NO: 92508 - DNA, 600 bp, Chicken  19866894409597_3
gctatggaaagctgttggtctgatgagtgtgcgttgctcacatggcatgcccatctcagctgaagtcattgtttcatcacctgtgccatgcactgcactgctgtcctccttggcactgagcaccaatacatgcctcaggtgttggctgtkcacgcagtgaggtcagacgctgccacatccttgctgccatactaagtgaycacatgggcacctccttctcctgctaatgggccacttagaaagctgcatgcattaaagtctcagcaaatgggggctgcaaacttttggaggcagtttgarggacttttcgtgaatgtaaatatgtagtgcagctgtcctgcctggctctcaggctgcttccttcaagtactgaaagagttgtatttagatttacactatccgttttcttggaaaagagatatgagacaaagaaacaaagcagaagaataatactgaatgtgttctgtggaagaccaaatcccttctgactgaatgcgtgctgagataatcagataagcaaaatgatttcagcttccctttcccaatataggaagcatttagtcaaatttgccctggttgtatagcaatgcattactaaca

SEQ ID NO: 92509 - DNA, 600 bp, Chicken  19866894409606_1
tcttatgtcatagataggctcaagtagcacttgtttgtgaatgggattctcctcttcttcattatgtttgatttcttatcttggggattatagccacgcatagcacatgaagtctaaatcctagtgcaaagaaagaattgaagctcctgtgcctagcattcgttcagcttccaacatcttccatcttcctcatttggttatgttttgcttttggtatatctaactcagaaatcttgcagatgtctctagttcctgaaatatcaatctgtagtttgtgtatttattttcatgagtaaaagraattataaagtcaacctcaaagcctaatcgattctattagaagaccaattctacagtttgtttttaaaagcattgactctgcttttgtttaagtgaaggtgtttggtcctgatacttcttgtactccacatacctagagttcccttactggtccagtaacattcatcctcttctgacattattaaaactttgtctgttgattcctaagtagtacagctctcattgacctagcagtggcatgcctgtgtactcgagggcagaagttagctcttaattagcgtgctctggctttttttttca

SEQ ID NO: 92510 - DNA, 599 bp, Chicken  19866894409610_1
  misc_feature (1)..(119): n is any nucleotide
nnnnnnnnnnnnnnnnnnnnnnnnnnnnnnnnnnnnnnnnnnnnnnnnnnnnnnnnnnnnnnnnnnnnnnnnnnnnnnnnnnnnnnnnnnnnnnnnnnnnnnnnnnnnnnnnnnnnnnncagaaagaatagcagccaacaccccagcgtgttctgtaaaggtaaaactgagtcacgctcaagtatatgagggagtgggtcaaaagcagtggttgaacctgtactaagtatatttccagctttgttcagtgattccttatcacccctcaacagctctgagatgctctgttaattttagttyggccctgatgcacaaaaatgactgtctctgggacttggtgcacctaatctgaatgccagacctgcttccacgtggaaggacatggagagctgactgctcactcttcctctcccacaacacattgagcacaacaaaaatgggagcagtaaatcatctatttaggcatatttctttaattgcttcttttatgaaagcgcaaatacagacaaaaccgacattgtatttcctaggaaattagcctgtcagtgagacctcagatcttatttagcatctagcttttgtgctattggtctaactgc

SEQ ID NO: 92511 - DNA, 600 bp, Chicken  19866894409613_1
aacttgaaaaatattttacaaagaaaaagaacattgttcatctgaatgtcattcattattatattgctatattttataccctattattaatatatacaaaatttcttaattgccttttacagatgcacggaagcatataatataacagttctaaagtatcccattattagactttttcttggctcatctcaatctctttaataaactatgtttgcttggagaatataggaagtatttggaatgttgtttaaagtttaatagtaactggtagcattgtccatttgcgggcctgaatggtgrgagcacctatcagggcgatctggtagagatagcagcatcataagactcaaacaatcatggaaggctgttaatgtgcagtgtcgacgggtgccaggtcctgttctttactgggggcttttcgtttcttcggctgcgttttgttgttgttttccctctgctctcggttttgccttcgggctgctcgccctttgctttcctgtcttgactccttactttcgtctttgttggacttttttcttttttcctccctattttttttccctgaaataaaaatgatgacacattagaagatttgctcag

SEQ ID NO: 92512 - DNA, 600 bp, Chicken  19866894409613_2
ccctattttttttccctgaaataaaaatgatgacacattagaagatttgctcaggctgcaatttctgattcccctgcgttgccacagcctgtaaaacttgccctggattaccacctcccattaggagctggacactagtaccagtgtctgggagtgtccaactcttcttcaacctactaaattagtacactggactagcacctcccatcagcctggctctaaacaaagaactgaaagttccctggagagaatcagtgttttagagccaatataaatgtacttctctctcccccagccagrggcacagctccatgtactccaccaaaacacaaatgggaatttctgtgggccttttttactgagagactgagaggtgctggaatgggttgctcagaaagattgtggatgccctgttcctgaaggccaggttggatggggccctgggcagtcttacttggtacttgatatagcagctgacaaccctgcctgtggcaggggagctggaacttgatccttgaggtcccttccaacccaagccattctatgattcattctatgcttctaagccaggtaatactaactattgactgatataacttt

SEQ ID NO: 92513 - DNA, 600 bp, Chicken  19866894409619_1
aatgagaggaatcccaactttttagaataaagttcatgtgaaagaataaaatgggtgtaaggctgcatggcacatgcatcaagtgggtaagtttgataaccaagctgtcatatatctccctcaatagtcactgtttcacatgcaggggtagccaaaaaaagctcattaaatgctctctctctatatatacatatacatatatatatatgtatgtattttgcatctgtttattactcagttgattttattaatgtgatagcaattttctgtattaaagtgtaacctacagtgctttgagayctgtctctcaagcagtctttagaggcagggcatatgcttgggatgtgaatgacatctcccagggtaagcaccaaagaggacatctacatcccatgaatgcattacttcttgtttgaggacataaaggtatttaagtaagaccttaaagtagttgtatcactgcaacaggatgaattccacctgaaatgcctcagctcattgtttgtaagatgattcagaggtgcacaggttctatggccagggggatctctcatcagcctgtctcartacacagacaaaacagcttctctgagcagttgg

SEQ ID NO: 92514 - DNA, 600 bp, Chicken  19866894409619_2
tgtattaaagtgtaacctacagtgctttgagayctgtctctcaagcagtctttagaggcagggcatatgcttgggatgtgaatgacatctcccagggtaagcaccaaagaggacatctacatcccatgaatgcattacttcttgtttgaggacataaaggtatttaagtaagaccttaaagtagttgtatcactgcaacaggatgaattccacctgaaatgcctcagctcattgtttgtaagatgattcagaggtgcacaggttctatggccagggggatctctcatcagcctgtctcartacacagacaaaacagcttctctgagcagttggattaagcttttccaatatatagatgatctggttttatagaactgggatgatgatgagtctgccacatctcctggttagatgttacagtgcttaattaacctcactgctacaaaactgcacatgccttcaagactgaatttatttaactatgccttccaactaacaaactttgttgttcccttagactgcaatatcaaaaaggcctccttgtttcagagcttgttcaggcactggtgtctacayactgagcaatcccaattccttcag

SEQ ID NO: 92515 - DNA, 600 bp, Chicken  19866894409619_3
ggatctctcatcagcctgtctcartacacagacaaaacagcttctctgagcagttggattaagcttttccaatatatagatgatctggttttatagaactgggatgatgatgagtctgccacatctcctggttagatgttacagtgcttaattaacctcactgctacaaaactgcacatgccttcaagactgaatttatttaactatgccttccaactaacaaactttgttgttcccttagactgcaatatcaaaaaggcctccttgtttcagagcttgttcaggcactggtgtctacayactgagcaatcccaattccttcagctgctccccataagacttatgctccagacccctcacagtttcgttgcccttctctggacacattctagggcctcagagtctttcttatagtgaggggcccaacactgagcacagcactcgaggtgcggcctcaccagtgctgagtacagagggattatcagcttctgctcctgctggctgcactactgctgatacaaggcaggatgctagcggcattcttggccacctgggcacagtgctggcttgtgttcagctgtgtgtcaaccaacatcctca

SEQ ID NO: 92516 - DNA, 600 bp, Chicken  19866894409623_1
cagggaaggtccaagaggctccatgcttggccatcttcaagggataaacagaacagagcaaagaaggagttccagctgcagtaggcaaaagtacccgctcctcattcctcaagaacaacagtcaattttttttatttttttttcccacaaactacttcccttttcagcacttgcttttcagagtactgtgttttcatgatccaattcctaaagtgccagggttgtaccaccaggcatccctatgttagaagtcctcacccttattgccccctccgcaccgccctcctcccatctgaaccrattatcactgcagtaaagccatgttggagataatggaatcactgccatcggcagagggacataatatccttcctacaggatgacctgggaggaaaagagtttcagaatgagcattttgaatattctctccttgtgaaatctttcctgtgggttatcaccctacaggcagatggttcagaacatggtagctgccaccgcctctttttaaatgtgcacagggtctctgacaggcacacatcacacgaacaccaagctaacctcagcactcagcaataaagctctttgtctcaggcaaacccg

SEQ ID NO: 92517 - DNA, 538 bp, Chicken  19866894409637_1
gtgtcctcctgtaagccctataaacagctttccccgtgacaacttctggaatgcagacatctcctgccttgccgcaaatcctcataaactgtttctatgagatggaccaaaaaaaaacccaaacaatcctatttgtgggactccaggaagagtctgacagcagcatagttctgttttaatccagaaagctggccttaccctaattagaaaggagtggaacgaatacaaaaacaggtacacgcatttatagcacccaagtatgaacttcacctatgcgcattctctctgttctaataatgyaccaggtccttagcccagaccttaccactgacactcagttttatgcacctgctcttctgactactgttagttgctggactcccttaagttttctttttatctgcctcttctatctgcaagatcacacagctgcatgcaggctctgtgcagatataagcgagtcagtgctgtggtctacattcaactaaggccacaacagcaagtcattcttgtacagatacgcaaaatagacttaaga

SEQ ID NO: 92518 - DNA, 600 bp, Chicken  19866894409645_1
ctgatgctcctcggctcataaattaaagaagctttccattctgtacgaattggtgaggtgcgtataagctggctgaaggcaacctggcccgtatgtcactgaggctatggcctggcccgagctgtgcctgtcctccggctgccgggactgccaccctgctggcacagagtggtcagcatgggcaccctaatccgcctcaggcaagatctgtcacatcagtatagaggagcagtttgagcacacacaccccttcccgcaggaagcgtgctggggagcacactccttcctgaaccggaggcrgctgagaggggacaacaccagcaactggctgagtaatgctgcaaagctggctctagggaagggcttcccacagctcttgactacgatcttgtttacatctggaaattgcactggtttaagtaaatggacagtttgtatccaatatacttcaactaccgtaaacgcttgtgtaagcacttagtgaaatttagcttaagcatgggtgtggcacgagtttcactaaatctgttaaactgatttaaattaaactggtgggatttctatgcactaacaaatcctttgcaactccaggagggcaaa

SEQ ID NO: 92519 - DNA, 599 bp, Chicken  19866894409649_1
  misc_feature (1)..(202): n is any nucleotide
nnnnnnnnnnnnnnnnnnnnnnnnnnnnnnnnnnnnnnnnnnnnnnnnnnnnnnnnnnnnnnnnnnnnnnnnnnnnnnnnnnnnnnnnnnnnnnnnnnnnnnnnnnnnnnnnnnnnnnnnnnnnnnnnnnnnnnnnnnnnnnnnnnnnnnnnnnnnnnnnnnnnnnnnnnnnnnnnnnnnnnnnnnnnnnnnnnnnnnnnnncgtgggctgtttctaccaatgcattttacaaagcagcacgcccaaacgtgtgggttttggaagcttacttcaggaggcatcgccgccagagctgagcygttgtgttggcctctggctgctcctggccaaagcacggtgccctcacgcaggtggtgctgctgggtttttggtgaacagttggacctgagggtgctcctgcagagggtgtgaagtgcggttgcttctgtcgaggggagggtgtgtgcctttgctcccacaactcrgccacggggtgagcagcagagggcacattttggctgtctgctctcttcctgagctcaagctctgtgctatgtgagggtgtgagcacttgctgagctgtggcagcagctctggtcacgctgcagcctgctggcag

SEQ ID NO: 92520 - DNA, 599 bp, Chicken  19866894409649_2
  misc_feature (1)..(37): n is any nucleotide
nnnnnnnnnnnnnnnnnnnnnnnnnnnnnnnnnnnnncgtgggctgtttctaccaatgcattttacaaagcagcacgcccaaacgtgtgggttttggaagcttacttcaggaggcatcgccgccagagctgagcygttgtgttggcctctggctgctcctggccaaagcacggtgccctcacgcaggtggtgctgctgggtttttggtgaacagttggacctgagggtgctcctgcagagggtgtgaagtgcggttgcttctgtcgaggggagggtgtgtgcctttgctcccacaactcrgccacggggtgagcagcagagggcacattttggctgtctgctctcttcctgagctcaagctctgtgctatgtgagggtgtgagcacttgctgagctgtggcagcagctctggtcacgctgcagcctgctggcagtgctcagtggtgtgtttccagcarcctttgtctctttcgctgctctggtaaagggccatttttattttctaagcgaaccattctgcctaatggcctcttggcctctctgctgggccagatctcagtctcccttcagaaggaaaaaccaaagcaacagctggatga

SEQ ID NO: 92521 - DNA, 600 bp, Chicken  19866894409649_3
ctggccaaagcacggtgccctcacgcaggtggtgctgctgggtttttggtgaacagttggacctgagggtgctcctgcagagggtgtgaagtgcggttgcttctgtcgaggggagggtgtgtgcctttgctcccacaactcrgccacggggtgagcagcagagggcacattttggctgtctgctctcttcctgagctcaagctctgtgctatgtgagggtgtgagcacttgctgagctgtggcagcagctctggtcacgctgcagcctgctggcagtgctcagtggtgtgtttccagcarcctttgtctctttcgctgctctggtaaagggccatttttattttctaagcgaaccattctgcctaatggcctcttggcctctctgctgggccagatctcagtctcccttcagaaggaaaaaccaaagcaacagctggatgatgtataaagtacaaatacgtggatgtgagaagctgcacttgctgaaaatgttttccagtacacgtatccaattcaacagcaaacagagagcgattgtggtctcctatcattagggctgtggttaggtttgtttgtttgcttttgtacaagcctgagtgg

SEQ ID NO: 92522 - DNA, 600 bp, Chicken  19866894409680_1
aacattaagtttcaactgattttgtctacctaaactaagggcaagtgatgtcatctacctagacttgtgcaaggcctttgatatggtcccacaccacatccttatctctgaattggagagatacagcttcaaaggctggactgtttggtggataaggaattgtctggatgattgcagccaaaggcttgttgtcaacagacccgtgtccagttggaggccagtgaggagtagtgtcccccatgggcctgtcttaggaccagtgctctttatcagtgacataaatgatgggattgagtgcammctcagcaagtttgctgatgacaccaaactgagcagtgcagttgatacagcacacggaagggataccatccaaagggaccttggtaaacttgggcacacgtgcaggttcagtgaggccaagtgcaaggtgttgcatgtgggtcagggaaatcccagatgaatgtacagactgggagaagaactccttgagagtagccctgtggagacttaggggtcctggtagattaaaaacttaatatgagccatcagtgtgcacctgcagcccagaagaccaatggtatcctggtctgcattggaaga

SEQ ID NO: 92523 - DNA, 600 bp, Chicken  19866894409680_2
acattaagtttcaactgattttgtctacctaaactaagggcaagtgatgtcatctacctagacttgtgcaaggcctttgatatggtcccacaccacatccttatctctgaattggagagatacagcttcaaaggctggactgtttggtggataaggaattgtctggatgattgcagccaaaggcttgttgtcaacagacccgtgtccagttggaggccagtgaggagtagtgtcccccatgggcctgtcttaggaccagtgctctttatcagtgacataaatgatgggattgagtgcammctcagcaagtttgctgatgacaccaaactgagcagtgcagttgatacagcacacggaagggataccatccaaagggaccttggtaaacttgggcacacgtgcaggttcagtgaggccaagtgcaaggtgttgcatgtgggtcagggaaatcccagatgaatgtacagactgggagaagaactccttgagagtagccctgtggagacttaggggtcctggtagattaaaaacttaatatgagccatcagtgtgcacctgcagcccagaagaccaatggtatcctggtctgcattggaagag

SEQ ID NO: 92524 - DNA, 600 bp, Chicken  19866894409681_1
attttcacccttagtacaggcacagcattgataccttgagtgctgaaatcggaatgccaatacccaagggattaatacacagagatgtttttgctaagtgcttaggcacttttgtaactttgctctcattggattgattgggaatttctaatcagacagtcatagaatcattgacagtggtagggacctctggaagtcatctgatccaatccccttcctcatgcaggaacacctggacctatttgcccatgatgatctacagggggcttttgaagatctccaaagaggagactccaaagrctttttgggcaacctgtgccagtgatcagttacctggacagtaatgttaggatcattgaatcatgtaatcattaaggctggaaagaactttaagataattaaatcgaacaatcaacccattaccaccatgcccactaacagtgtcagtgacacattcacacgtttcttgaacacctccagggatggtgactccaccaccttcctgtgcagcccattccaacgcattaccacttttttggagaataaatttttccaacctgaatctcccctggtgcagcaacttgaggccatgaccactcg

SEQ ID NO: 92525 - DNA, 600 bp, Chicken  19866894409681_2
tttttggagaataaatttttccaacctgaatctcccctggtgcagcaacttgaggccatgaccactcgtcctattgctgttacctgggagaagaggccaatcctcacctcagtacaacctccttctggggagttggagagagcactgagatctcccctgagcctcctcttcttgaggctaaacaatcccagttctctcagccgctccccataagacttgtgttccagaccccctcacagtttcattgtccttctctgaacaagctcaaggacctccgtgtcttttctgtagtgaggatcycaaaagtgaacacaacacttgaggaacggcctcaccagtgctgagcacagggggttgattacctcyctgttcctcctgactgcactatttccgacacaagccaggatgccattggccttcttggccacatgggcacactgctggcttatgttcagccaagcatcaacctgcacccccagatccacttctcccaaacagtcttccagccactctgccccaatcccrtaacgttgtctgtggttgatgtgaccaaagttcaggacctggaactgtccttgatctactggaactgtctacttg

SEQ ID NO: 92526 - DNA, 600 bp, Chicken  19866894409681_3
cgtcctattgctgttacctgggagaagaggccaatcctcacctcagtacaacctccttctggggagttggagagagcactgagatctcccctgagcctcctcttcttgaggctaaacaatcccagttctctcagccgctccccataagacttgtgttccagaccccctcacagtttcattgtccttctctgaacaagctcaaggacctccgtgtcttttctgtagtgaggatcycaaaagtgaacacaacacttgaggaacggcctcaccagtgctgagcacagggggttgattacctcyctgttcctcctgactgcactatttccgacacaagccaggatgccattggccttcttggccacatgggcacactgctggcttatgttcagccaagcatcaacctgcacccccagatccacttctcccaaacagtcttccagccactctgccccaatcccrtaacgttgtctgtggttgatgtgaccaaagttcaggacctggaactgtccttgatctactggaactgtctacttgaactttatacaattggcctcagcccatcgatatggtttatccaggaccttctgaagtgccttccta

SEQ ID NO: 92527 - DNA, 600 bp, Chicken  19866894409681_4
agaccccctcacagtttcattgtccttctctgaacaagctcaaggacctccgtgtcttttctgtagtgaggatcycaaaagtgaacacaacacttgaggaacggcctcaccagtgctgagcacagggggttgattacctcyctgttcctcctgactgcactatttccgacacaagccaggatgccattggccttcttggccacatgggcacactgctggcttatgttcagccaagcatcaacctgcacccccagatccacttctcccaaacagtcttccagccactctgccccaatcccrtaacgttgtctgtggttgatgtgaccaaagttcaggacctggaactgtccttgatctactggaactgtctacttgaactttatacaattggcctcagcccatcgatatggtttatccaggaccttctgaagtgccttcctacccccaggcaggtcaacacttcctcccaacttggtgtcatttgcaaacttattgagggcgcactcatgaccagctgtcagctggattcaactccatgcaccaccactctctgcactcagcactccaggcagttctttacccagcaaagagtatactgtc

SEQ ID NO: 92528 - DNA, 600 bp, Chicken  19866894409683_1
tctttgctataacaacttctccccttcactgcaacttcatgcatttgggggtcagcatcaaacagttctcacagtaataacaagtgctcataattccctccatcttccagtggttatgtgggttatgtaactatagcctactgcctcacagacctagcagcctctctcatcttcatttcctcctttcctaccaaaatattaagataactgtacacttctaattttcaggtcctgtagttgacagaatatacaggaaagatctaaaaaaactaaagtaacaactcttctgcttcccttctrgagattacatgtcttagtttattgccgggcttgcccagctttgagtcagaagatttctatgagtctggtactatcctcttagggtttgtttctgtcagatactgcaaatgcaatatctccttggtgatgattttagatggaatatttgtacctacatatctgcatgaatgtcacaaccacagattgaaagaaggctcagatgcagttttggaaaataatttgtagatatcccatgcaacctaactggcttggctccacctcctttcaggtcaacagaacctgtatatctttgctgtaatt

SEQ ID NO: 92529 - DNA, 599 bp, Chicken  19866894409688_1
  misc_feature (1)..(80): n is any nucleotide
nnnnnnnnnnnnnnnnnnnnnnnnnnnnnnnnnnnnnnnnnnnnnnnnnnnnnnnnnnnnnnnnnnnnnnnnnnnnnnnntatctatgcccaccagatatatatatatgtcatctctctgaaaaggataaaaggtgactttgtctttgcatgcacaaccaaagcctctgctccacgacgacagcaaacgggggacggggccgcaccccacgcccgccttattgctatggggccgtcctcacatcccagccctgggggtacggagtggggagacgagacctcgggctgctgccccacatcrgaggggaatggggcgtcagtgcctctccagccccgctgccaccacgaggacgtgccgggggggaggggggggggaacataggcaccgagtcacaaggcaaagtctggataaggcgaaccgaacccaactacagagcggcagcacccgggtgtggggctgggggccgcagggacgggcggaggggacgccgtcatagggccgtgctctccgagtcctcctcctcctccgcggggcccttcagctgcactctctgcgcggcgtccagcgggtcccggcgcagcgcggcctccaggcccccc

SEQ ID NO: 92530 - DNA, 600 bp, Chicken  19866894409690_1
aaaccaaccacatacaaatcccagagcctggcagcaatctctcacaactatgtcatacccatacattgatatatatttgaatatacggtatgtgaggtgagatgcaacccctctccccaacgcacacggatctggggaggctgtgggggtgagggcctggcctgagaggcagccctcctgtggcgggaaaacaaaatggcgtcagtgggtgttaccggcacggggaagctcagtgcctctgtggtagcagctcagtgcctgcctctggacccctcaggatgggatttgaggcataaatgmcttgaagggaaagctggctgagtcatcttggagcacacagaggtggggtaagtgaaataacatcaatttaaaatgtgggggaatacaaactctccttctctgacatcccaccctgctgcaggcaggctcctgccgggctgagaggaacaggcctgagctgcggccygatgtagtggttggcaccactgccccctggcagggggttggaacaagatgatctctgaggtcccttccaacycaagccattctatgattcattctatgattctaaaccaaaaaaagtgttccttggctgggata

SEQ ID NO: 92531 - DNA, 600 bp, Chicken  19866894409690_2
aggcagccctcctgtggcgggaaaacaaaatggcgtcagtgggtgttaccggcacggggaagctcagtgcctctgtggtagcagctcagtgcctgcctctggacccctcaggatgggatttgaggcataaatgmcttgaagggaaagctggctgagtcatcttggagcacacagaggtggggtaagtgaaataacatcaatttaaaatgtgggggaatacaaactctccttctctgacatcccaccctgctgcaggcaggctcctgccgggctgagaggaacaggcctgagctgcggccygatgtagtggttggcaccactgccccctggcagggggttggaacaagatgatctctgaggtcccttccaacycaagccattctatgattcattctatgattctaaaccaaaaaaagtgttccttggctgggataggtttggactgtgggacaggtggtasgagcagaatgggaatgggcgtgctcctccatgttctctcactgaagcagcagcagtaacagccaggagggragttttgaaaggacacagctgccttccaggtgtcacgtcctcagaggggagctccagagaaggaagctg

SEQ ID NO: 92532 - DNA, 600 bp, Chicken  19866894409690_3
ctgtggtagcagctcagtgcctgcctctggacccctcaggatgggatttgaggcataaatgmcttgaagggaaagctggctgagtcatcttggagcacacagaggtggggtaagtgaaataacatcaatttaaaatgtgggggaatacaaactctccttctctgacatcccaccctgctgcaggcaggctcctgccgggctgagaggaacaggcctgagctgcggccygatgtagtggttggcaccactgccccctggcagggggttggaacaagatgatctctgaggtcccttccaacycaagccattctatgattcattctatgattctaaaccaaaaaaagtgttccttggctgggataggtttggactgtgggacaggtggtasgagcagaatgggaatgggcgtgctcctccatgttctctcactgaagcagcagcagtaacagccaggagggragttttgaaaggacacagctgccttccaggtgtcacgtcctcagaggggagctccagagaaggaagctgaggacaactttgtatgtggagttgatgctccagtgctggaaggggcctggccccacctttctgttgagattc

SEQ ID NO: 92533 - DNA, 600 bp, Chicken  19866894409690_4
cttggagcacacagaggtggggtaagtgaaataacatcaatttaaaatgtgggggaatacaaactctccttctctgacatcccaccctgctgcaggcaggctcctgccgggctgagaggaacaggcctgagctgcggccygatgtagtggttggcaccactgccccctggcagggggttggaacaagatgatctctgaggtcccttccaacycaagccattctatgattcattctatgattctaaaccaaaaaaagtgttccttggctgggataggtttggactgtgggacaggtggtasgagcagaatgggaatgggcgtgctcctccatgttctctcactgaagcagcagcagtaacagccaggagggragttttgaaaggacacagctgccttccaggtgtcacgtcctcagaggggagctccagagaaggaagctgaggacaactttgtatgtggagttgatgctccagtgctggaaggggcctggccccacctttctgttgagattcactgtgtggcttagtaatgcacaacttgctcacaggatacagagcagagcccacctactcattcctctgaacagctatgaggcggtaa

SEQ ID NO: 92534 - DNA, 600 bp, Chicken  19866894409690_5
ctctgacatcccaccctgctgcaggcaggctcctgccgggctgagaggaacaggcctgagctgcggccygatgtagtggttggcaccactgccccctggcagggggttggaacaagatgatctctgaggtcccttccaacycaagccattctatgattcattctatgattctaaaccaaaaaaagtgttccttggctgggataggtttggactgtgggacaggtggtasgagcagaatgggaatgggcgtgctcctccatgttctctcactgaagcagcagcagtaacagccaggagggragttttgaaaggacacagctgccttccaggtgtcacgtcctcagaggggagctccagagaaggaagctgaggacaactttgtatgtggagttgatgctccagtgctggaaggggcctggccccacctttctgttgagattcactgtgtggcttagtaatgcacaacttgctcacaggatacagagcagagcccacctactcattcctctgaacagctatgaggcggtaatgactctcagtaaatggcgtagctttgaacaggtgcctagaggtgaaagtatttgtattccattactagcc

SEQ ID NO: 92535 - DNA, 599 bp, Chicken  19866894409695_1
  misc_feature (1)..(22): n is any nucleotide
nnnnnnnnnnnnnnnnnnnnnncgtagaagaaaatgaattaaaagttcaattttgagacaaagattattttcagggcagtaacaatgctattgcatataactgtatgtgatagtcccagactcttcatttacacgaaattcattgcagtgggcaattctgacactggctcaagtacagttctgaaagtaactgatctgaatccaggttatgtacattaaataatcattctgccaaatggaatccgtggtacattttgtttccataaatatctgttttgcaacaagtgtgacattaaaaamcaaaaaggagcttaagagaagagtgaaagtaggttaaatattattacaggttatatcaggcagaagtaatggtgctttgctggtactcttgtgagataaaatcttttagtagaacatgtatccaaaaaaggattttttgtcttctttttctgaaagagcttaggttaaggaaggtgtagcccagtaataatttcacttatgtgaagagaacttggaagatctctgctcatattcttgctgtttttaatttctgtccatttgcagattgagtatgtcttcacagataaaacaggaacctt

SEQ ID NO: 92536 - DNA, 600 bp, Chicken  19866894409696_1
tttaatttcggttttgctttccaagagaagagcgcggatggagccacggcggctcccacactgcatcccagtgccaccgctcggtgacatcgggacccggcggccacagctcagagatggatgcaaagaccccacgggcatccgttggtcgagttcagcaaacggcaaagcttcgaggtggggcacctcaaagggaaccccgcggcggtgttgcgcagagggatttggggtttggaggaggccgggagcgctgcgggctctgcgcccctctaatcctcgtggtgtttggtgaggaactgmgtcgaggccacgggggagccgagctgaaagcgctccacgaagctctccagcgaccaggagcctggggggagagagcagaggggtgagcggggctgcatcctgctgctgtgtgcaaagcgcccgaccacatcctgcaaacagctctgcactgctgcgcagaggccatgcggtgctgcacactgctctgagcagcccccggggggtggcagaggatggggacccccctccgcccccactgcttcctgctgacctttgggcagagctgcgcactgcttcctctgagcctgagcctggaaatcc

SEQ ID NO: 92537 - DNA, 599 bp, Chicken  19866894409697_1
  misc_feature (1)..(26): n is any nucleotide
nnnnnnnnnnnnnnnnnnnnnnnnnnccagcatagaggatccttaatatagctctgtgatttgaaagaaaatactctcttcagagggcaggtattgttaaaccataaactgctctgtgtggaatacattcttaggggatgaaatttctgaagccaataaaaagtgatgtgtgtccacttgcttcacaaagagtgagacctcagtgcctgaatcctctggacagctctggaaattgcaactgcataatgaagaaaggttgagggaactgggtttgtttagcttggagaagagaaggctccrgggagacctcactgtggccttccagtacttgaagggagcgtataaacaggaaggggaatggctgtttacgagggtgcatggtgataggacaagggggaatggttttaaactgggacaggggaggtttgggttagatactagggggaagtttttcacgcagaggagggtgatgatatactggaacaggttgtctaaggaggttgtggatgccccatccctggaggcattcaaggccaggctggatgtggctctgggcagcctggtctgstggttggcgaccctgcacatagcaggggggt

SEQ ID NO: 92538 - DNA, 600 bp, Chicken  19866894409697_2
ggtttgtttagcttggagaagagaaggctccrgggagacctcactgtggccttccagtacttgaagggagcgtataaacaggaaggggaatggctgtttacgagggtgcatggtgataggacaagggggaatggttttaaactgggacaggggaggtttgggttagatactagggggaagtttttcacgcagaggagggtgatgatatactggaacaggttgtctaaggaggttgtggatgccccatccctggaggcattcaaggccaggctggatgtggctctgggcagcctggtctgstggttggcgaccctgcacatagcaggggggttgaaactsgatgatcaytgtggtccttttcaacccaggccattctatgattctgtgatatatttcaagaaattgcctgagtgtacacaagctgtacactcctgtgtrtaacctatcaacagatgcttttctgtttaaaaatagtttgattccagtgaaatgaagttcataaactatgtaagcaaacaaaggagcttttctttctgattgaattaaatattaatttataaggcacagtggcatgcttaaagctgctgtatgttctgattg

SEQ ID NO: 92539 - DNA, 600 bp, Chicken  19866894409697_3
ctcactgtggccttccagtacttgaagggagcgtataaacaggaaggggaatggctgtttacgagggtgcatggtgataggacaagggggaatggttttaaactgggacaggggaggtttgggttagatactagggggaagtttttcacgcagaggagggtgatgatatactggaacaggttgtctaaggaggttgtggatgccccatccctggaggcattcaaggccaggctggatgtggctctgggcagcctggtctgstggttggcgaccctgcacatagcaggggggttgaaactsgatgatcaytgtggtccttttcaacccaggccattctatgattctgtgatatatttcaagaaattgcctgagtgtacacaagctgtacactcctgtgtrtaacctatcaacagatgcttttctgtttaaaaatagtttgattccagtgaaatgaagttcataaactatgtaagcaaacaaaggagcttttctttctgattgaattaaatattaatttataaggcacagtggcatgcttaaagctgctgtatgttctgattgtttcttctcttactttgggagggatgcacaacatgcagg

SEQ ID NO: 92540 - DNA, 600 bp, Chicken  19866894409697_4
gccttccagtacttgaagggagcgtataaacaggaaggggaatggctgtttacgagggtgcatggtgataggacaagggggaatggttttaaactgggacaggggaggtttgggttagatactagggggaagtttttcacgcagaggagggtgatgatatactggaacaggttgtctaaggaggttgtggatgccccatccctggaggcattcaaggccaggctggatgtggctctgggcagcctggtctgstggttggcgaccctgcacatagcaggggggttgaaactsgatgatcaytgtggtccttttcaacccaggccattctatgattctgtgatatatttcaagaaattgcctgagtgtacacaagctgtacactcctgtgtrtaacctatcaacagatgcttttctgtttaaaaatagtttgattccagtgaaatgaagttcataaactatgtaagcaaacaaaggagcttttctttctgattgaattaaatattaatttataaggcacagtggcatgcttaaagctgctgtatgttctgattgtttcttctcttactttgggagggatgcacaacatgcaggccctaacac

SEQ ID NO: 92541 - DNA, 600 bp, Chicken  19866894409697_5
aaactgggacaggggaggtttgggttagatactagggggaagtttttcacgcagaggagggtgatgatatactggaacaggttgtctaaggaggttgtggatgccccatccctggaggcattcaaggccaggctggatgtggctctgggcagcctggtctgstggttggcgaccctgcacatagcaggggggttgaaactsgatgatcaytgtggtccttttcaacccaggccattctatgattctgtgatatatttcaagaaattgcctgagtgtacacaagctgtacactcctgtgtrtaacctatcaacagatgcttttctgtttaaaaatagtttgattccagtgaaatgaagttcataaactatgtaagcaaacaaaggagcttttctttctgattgaattaaatattaatttataaggcacagtggcatgcttaaagctgctgtatgttctgattgtttcttctcttactttgggagggatgcacaacatgcaggccctaacaccrttggtgatttgattascatctctagaaatggcacattatattcaggggttgaattcccatgcaccaaaagcatcggcttgggagagtg

SEQ ID NO: 92542 - DNA, 486 bp, Chicken  19866894409697_6
tggtccttttcaacccaggccattctatgattctgtgatatatttcaagaaattgcctgagtgtacacaagctgtacactcctgtgtrtaacctatcaacagatgcttttctgtttaaaaatagtttgattccagtgaaatgaagttcataaactatgtaagcaaacaaaggagcttttctttctgattgaattaaatattaatttataaggcacagtggcatgcttaaagctgctgtatgttctgattgtttcttctcttactttgggagggatgcacaacatgcaggccctaacaccrttggtgatttgattascatctctagaaatggcacattatattcaggggttgaattcccatgcaccaaaagcatcggcttgggagagtggttagggcagtggattttactggtaggggaatattagcatagagtttgattataaaatggaagtatgatatttcagttcgaattatttttttttacta

SEQ ID NO: 92543 - DNA, 470 bp, Chicken  19866894409697_7
aggccattctatgattctgtgatatatttcaagaaattgcctgagtgtacacaagctgtacactcctgtgtrtaacctatcaacagatgcttttctgtttaaaaatagtttgattccagtgaaatgaagttcataaactatgtaagcaaacaaaggagcttttctttctgattgaattaaatattaatttataaggcacagtggcatgcttaaagctgctgtatgttctgattgtttcttctcttactttgggagggatgcacaacatgcaggccctaacaccrttggtgatttgattascatctctagaaatggcacattatattcaggggttgaattcccatgcaccaaaagcatcggcttgggagagtggttagggcagtggattttactggtaggggaatattagcatagagtttgattataaaatggaagtatgatatttcagttcgaattatttttttttacta

SEQ ID NO: 92544 - DNA, 599 bp, Chicken  19866894409698_1
  misc_feature (1)..(184): n is any nucleotide
nnnnnnnnnnnnnnnnnnnnnnnnnnnnnnnnnnnnnnnnnnnnnnnnnnnnnnnnnnnnnnnnnnnnnnnnnnnnnnnnnnnnnnnnnnnnnnnnnnnnnnnnnnnnnnnnnnnnnnnnnnnnnnnnnnnnnnnnnnnnnnnnnnnnnnnnnnnnnnnnnnnnnnnnnnnnnnnnnnnnnnnncaacatttattaatgcataacattgccaacatttaaaaaagcacctataaagaaaataacatcttaaaaattcagtatttcaattcactattcaaggcaaatgatgtcatctccarcccgcaagtccttgcacccaacctggtgtgcacagagctaggataactgagagcatttcagtatggaccttttcctctaaaaactcaccatttgctgatggcataagtactgtggccctattcagtgcatcacttaagaccaaacacagctttaaggacacagtgctccctatgtactcgatggaattacaaaaaggcttaagtttaagtgcacacttaagtactttgctggattagtgccagaatatttagcactttgtctaatcagacccctgacaacagaactaaagataccatgc

SEQ ID NO: 92545 - DNA, 599 bp, Chicken  19866894409699_1
  misc_feature (1)..(41): n is any nucleotide
nnnnnnnnnnnnnnnnnnnnnnnnnnnnnnnnnnnnnnnnnccggctttagtaattgaagaaagcaaacttggtgctgaagtttatttgataggttaaccaaggttaattgtacgagctgaaaatgaaaatgtctggcccataaatccctaaacctcattaaagaggattaaatgatacaactactttgtaaatcctaaaatttcatgcaaacctctcataaacaataacaccagaacgcctgtcacactgtctcttctaatcccggtgccagctctagtacagagtggaaccaagccamcagctccttcagcctgtgtccattcctgcagtggtcccaccggtgtgcaagagtcctttgtgtccttgtcccatgcagtaaggggggctgtggctgggcagtgctgagcagggcactggcactaccacgtcaactgctctgccacatcctgtgctcgcttctccaactggggcaacacatggaaggaaataataatctcttagatctgggtaatgctggagaaattctgcaataactaacttggctctgagccatgattgatgtgttttgttccagcaatatattgttttgcaagctcc

SEQ ID NO: 92546 - DNA, 570 bp, Chicken  19866894409703_1
tcttcactggaaagccagagcagatgcagtacagcttttgtatcacgctgacgtcctgtgttcccagaataacactgagaactctcggggacttttcagcattgatctcagagcatccatccattcagctgcaattatgatataatgttgtgagtcaggaagctcgaagttgcttggatctgcttctcatttcacctcgtgagcaggatttcgctctctgaagcctttaagcagcatcctctaggagaagtacatccgtggagcagggcagtagctccccattggcatgcctgcaacccrggcatggatgactatggtcttcagattgttttttttttttgtttttttgtcagtaacctgagctaatgtgtatgggttaggttggctgtatcttgcaaggtacagctggtgggactgaatggcgtgagttggtggagctgcttcaggagcaaaccacttgttggatgggcctcatttgtgatgtgagcagtcaggctctctaaaacttagtctgtggggctcaatgggttttgtgctccttgatctttctgctcttcaaaagctgtgtta

SEQ ID NO: 92547 - DNA, 600 bp, Chicken  19866894409704_1
cagaatgttctttaaagaaaaagatataaattaatgtgccattaaaaactggcagatgtaaacacagttgtgaagaaaaaatataccttaccaattcgtaaaaaaatgaaagtctggttttgtaactcagttgatttcctgtgggaaaaatgtgtagatgtgcagaagaattaataataaggagaggaaaatttcattggctttcagataaaatcaatccattaacattttcagaagtgccagatatttaagacagggcaacagtatagatatctagtacttagcaaattaataaggacrttctggagttggtcagcatagaagagtattattgagcttggcctttgcagacagaaaatggatcagagaaatctcttgctacaatgaagacaggaggctgagatcttgtactttttgcagcttttctcttcataggagagagctttcataggagcataggataaggtcatccatttcagcccccaactccatcccattctttccaagcttttaattaactttttgcttgcctcaagcagatttattgttttcttttcccttttcccttttttctttttttctttttccttttttcctttt

SEQ ID NO: 92548 - DNA, 444 bp, Chicken  19866894409706_1
aaacgctagccttctgcaaaagaaagtggtgtttgtaattctagtcagtgaagccctgaaacttccctacgggttttcacgggccattgggagcaaatgcccagtttgccggtcaaaatccacagcactgctagaacctatgtacataaaatctgatgtgctccattgaacactgtatacctcctgtcttgttttgacatttactctgagtgaaacagccaaatcaatctagatcaattcaatcctttctgggtggaaatcaagctgttcaactctgttacttcgtaggaatttgcaacrctcaaatgtatgtaatttcctttaacttggagctcctgaatactgtagagaaagggcaaaacaaaaacaaaacaaaacaaaaaasaaaacaggttttaaagccaatgcccaaattccctgtttgcattcagctggtgtatgtgt

SEQ ID NO: 92549 - DNA, 359 bp, Chicken  19866894409706_2
attgggagcaaatgcccagtttgccggtcaaaatccacagcactgctagaacctatgtacataaaatctgatgtgctccattgaacactgtatacctcctgtcttgttttgacatttactctgagtgaaacagccaaatcaatctagatcaattcaatcctttctgggtggaaatcaagctgttcaactctgttacttcgtaggaatttgcaacrctcaaatgtatgtaatttcctttaacttggagctcctgaatactgtagagaaagggcaaaacaaaaacaaaacaaaacaaaaaasaaaacaggttttaaagccaatgcccaaattccctgtttgcattcagctggtgtatgtgt

SEQ ID NO: 92550 - DNA, 465 bp, Chicken  19866894409712_1
cagcaatagcactagctcagtttcagaagagaaagaaaaaaaaaaaaggcagaaaagcttattgagttgtctttgcaaaccaaaagtatgctggggaggcagtctccatccattcttatctcttgtaaaaaagtggagatgatggactattccagctgtgaattaattacacaggtagaaaatatgcatatattccatttaattcatcaccttctttgcaacagaatataattcaggaggatggatttcctgtcctagtacaaagaaatatcatttacaaagtttcttacgtatcctatstcaagggacagggctgttgtaaggagaggcctaccattgattaagctttagaatatttctgtacaaggacaagtgtacttcatagaaaatccagagtcttctatagtttaggtagtgctcagtgcagaaaatttttaaaatattcatttaactacacgatcattc

SEQ ID NO: 92551 - DNA, 600 bp, Chicken  19866894409713_1
gtctgaataaggcctttcaattcagtgcatatccttaatatagcaaagacttatttcctgaataagctttaaaactatgtgctcttatgccaatgataaattaacgtagcaataggatcagtgttaacatgcaagtgagtttaaactacaggaagaatatctactcatgttcagttgtagagttgtctcccataaagtattgaataatttcaattcttttgcatttcctgaacactgagcattttgcattctgattttgtgtctcgtgcccagtatgatgaacttcgtcagaaagagttyggccatttctggaaagcatagtttttgcttgaataaattgccaaagatatggttaacaactctcragcttttgcctttcagagcacaaacttaaaatctaatgctgacacttgtgtgtgccatcagaagtgctgaaatatctcgattcatagtatatactactgcaactattatactagttatagtatatatagtatatagtatatatactactgcaatataactattgcacaagcaccgagatgtgctttgctagtaagtttcatggatgcatgcttatagcagaagtatgacagrtta

SEQ ID NO: 92552 - DNA, 600 bp, Chicken  19866894409713_2
gctttaaaactatgtgctcttatgccaatgataaattaacgtagcaataggatcagtgttaacatgcaagtgagtttaaactacaggaagaatatctactcatgttcagttgtagagttgtctcccataaagtattgaataatttcaattcttttgcatttcctgaacactgagcattttgcattctgattttgtgtctcgtgcccagtatgatgaacttcgtcagaaagagttyggccatttctggaaagcatagtttttgcttgaataaattgccaaagatatggttaacaactctcragcttttgcctttcagagcacaaacttaaaatctaatgctgacacttgtgtgtgccatcagaagtgctgaaatatctcgattcatagtatatactactgcaactattatactagttatagtatatatagtatatagtatatatactactgcaatataactattgcacaagcaccgagatgtgctttgctagtaagtttcatggatgcatgcttatagcagaagtatgacagrttatgatagtaatgatttagtaggtgtatactcatctaccctcctactgtgagtcacttyatyaccat

SEQ ID NO: 92553 - DNA, 600 bp, Chicken  19866894409713_3
ttyggccatttctggaaagcatagtttttgcttgaataaattgccaaagatatggttaacaactctcragcttttgcctttcagagcacaaacttaaaatctaatgctgacacttgtgtgtgccatcagaagtgctgaaatatctcgattcatagtatatactactgcaactattatactagttatagtatatatagtatatagtatatatactactgcaatataactattgcacaagcaccgagatgtgctttgctagtaagtttcatggatgcatgcttatagcagaagtatgacagrttatgatagtaatgatttagtaggtgtatactcatctaccctcctactgtgagtcacttyatyaccatatcctttctaaatctttttctggctatgtctctagtctacttgtcattgcctaccttttttccattccacaacttcctcattttggacacagtgttttcccttatagtaatgctgtctaatggaagattgagtcagagtctgtagagaggaaatatgtatgtctaaatatttatacttgctttctttgccaccaagtgacggttaacatttccagacatcctgtccttcagc

SEQ ID NO: 92554 - DNA, 600 bp, Chicken  19866894409713_4
aactctcragcttttgcctttcagagcacaaacttaaaatctaatgctgacacttgtgtgtgccatcagaagtgctgaaatatctcgattcatagtatatactactgcaactattatactagttatagtatatatagtatatagtatatatactactgcaatataactattgcacaagcaccgagatgtgctttgctagtaagtttcatggatgcatgcttatagcagaagtatgacagrttatgatagtaatgatttagtaggtgtatactcatctaccctcctactgtgagtcacttyatyaccatatcctttctaaatctttttctggctatgtctctagtctacttgtcattgcctaccttttttccattccacaacttcctcattttggacacagtgttttcccttatagtaatgctgtctaatggaagattgagtcagagtctgtagagaggaaatatgtatgtctaaatatttatacttgctttctttgccaccaagtgacggttaacatttccagacatcctgtccttcagctttctaactggcttacagtgctcttcttagtttgtcctcatttttttcccggtttcttgt

SEQ ID NO: 92555 - DNA, 600 bp, Chicken  19866894409713_5
tctcragcttttgcctttcagagcacaaacttaaaatctaatgctgacacttgtgtgtgccatcagaagtgctgaaatatctcgattcatagtatatactactgcaactattatactagttatagtatatatagtatatagtatatatactactgcaatataactattgcacaagcaccgagatgtgctttgctagtaagtttcatggatgcatgcttatagcagaagtatgacagrttatgatagtaatgatttagtaggtgtatactcatctaccctcctactgtgagtcacttyatyaccatatcctttctaaatctttttctggctatgtctctagtctacttgtcattgcctaccttttttccattccacaacttcctcattttggacacagtgttttcccttatagtaatgctgtctaatggaagattgagtcagagtctgtagagaggaaatatgtatgtctaaatatttatacttgctttctttgccaccaagtgacggttaacatttccagacatcctgtccttcagctttctaactggcttacagtgctcttcttagtttgtcctcatttttttcccggtttcttgtccc

SEQ ID NO: 92556 - DNA, 600 bp, Chicken  19866894409719_1
ctcaaagattaagctatctaaactgactgagcactggagcatttaaaatgtaaacgcactgagctttaatcacagcctgcagactaccccctcactctttcctcctgcatatacacgagggctatttccttgcaatttctgggcactgcacctgcacctcatggcatcagtacatcccacagttagctggagctgtgcaaatcacagggaaagcgccttggggatcgcccatccagcagaatagagagtggagtggaagcacgtgtgctgaggcccctgccccaactccttgcaaagcaygtggcagtgttggggacctggggatttctttctacrctggggaaaactccctatgcytgggrtattgcaaatcctgcatgsagaaccctgggaggagaagacacagtgtgtctgggctgcagctctggtcatggggggagagcagtttcctaagccacaggcagcatctgcagtatcagccgcactaggcctctgctggttactgtcccattaatttgcctaattgcttttgaaccaatgtatagtttcggcacctgaagcatcctgtggcaatgagttctgccaattaattacgtccat

SEQ ID NO: 92557 - DNA, 600 bp, Chicken  19866894409719_2
gagcatttaaaatgtaaacgcactgagctttaatcacagcctgcagactaccccctcactctttcctcctgcatatacacgagggctatttccttgcaatttctgggcactgcacctgcacctcatggcatcagtacatcccacagttagctggagctgtgcaaatcacagggaaagcgccttggggatcgcccatccagcagaatagagagtggagtggaagcacgtgtgctgaggcccctgccccaactccttgcaaagcaygtggcagtgttggggacctggggatttctttctacrctggggaaaactccctatgcytgggrtattgcaaatcctgcatgsagaaccctgggaggagaagacacagtgtgtctgggctgcagctctggtcatggggggagagcagtttcctaagccacaggcagcatctgcagtatcagccgcactaggcctctgctggttactgtcccattaatttgcctaattgcttttgaaccaatgtatagtttcggcacctgaagcatcctgtggcaatgagttctgccaattaattacgtccatgtgaaaaagacttcctcctcaatgcgttaaaaatat

SEQ ID NO: 92558 - DNA, 600 bp, Chicken  19866894409719_3
actgagctttaatcacagcctgcagactaccccctcactctttcctcctgcatatacacgagggctatttccttgcaatttctgggcactgcacctgcacctcatggcatcagtacatcccacagttagctggagctgtgcaaatcacagggaaagcgccttggggatcgcccatccagcagaatagagagtggagtggaagcacgtgtgctgaggcccctgccccaactccttgcaaagcaygtggcagtgttggggacctggggatttctttctacrctggggaaaactccctatgcytgggrtattgcaaatcctgcatgsagaaccctgggaggagaagacacagtgtgtctgggctgcagctctggtcatggggggagagcagtttcctaagccacaggcagcatctgcagtatcagccgcactaggcctctgctggttactgtcccattaatttgcctaattgcttttgaaccaatgtatagtttcggcacctgaagcatcctgtggcaatgagttctgccaattaattacgtccatgtgaaaaagacttcctcctcaatgcgttaaaaatatatctggtctatgacttcattt

SEQ ID NO: 92559 - DNA, 600 bp, Chicken  19866894409719_4
gctttaatcacagcctgcagactaccccctcactctttcctcctgcatatacacgagggctatttccttgcaatttctgggcactgcacctgcacctcatggcatcagtacatcccacagttagctggagctgtgcaaatcacagggaaagcgccttggggatcgcccatccagcagaatagagagtggagtggaagcacgtgtgctgaggcccctgccccaactccttgcaaagcaygtggcagtgttggggacctggggatttctttctacrctggggaaaactccctatgcytgggrtattgcaaatcctgcatgsagaaccctgggaggagaagacacagtgtgtctgggctgcagctctggtcatggggggagagcagtttcctaagccacaggcagcatctgcagtatcagccgcactaggcctctgctggttactgtcccattaatttgcctaattgcttttgaaccaatgtatagtttcggcacctgaagcatcctgtggcaatgagttctgccaattaattacgtccatgtgaaaaagacttcctcctcaatgcgttaaaaatatatctggtctatgacttcatttaacat

SEQ ID NO: 92560 - DNA, 600 bp, Chicken  19866894409719_5
gactaccccctcactctttcctcctgcatatacacgagggctatttccttgcaatttctgggcactgcacctgcacctcatggcatcagtacatcccacagttagctggagctgtgcaaatcacagggaaagcgccttggggatcgcccatccagcagaatagagagtggagtggaagcacgtgtgctgaggcccctgccccaactccttgcaaagcaygtggcagtgttggggacctggggatttctttctacrctggggaaaactccctatgcytgggrtattgcaaatcctgcatgsagaaccctgggaggagaagacacagtgtgtctgggctgcagctctggtcatggggggagagcagtttcctaagccacaggcagcatctgcagtatcagccgcactaggcctctgctggttactgtcccattaatttgcctaattgcttttgaaccaatgtatagtttcggcacctgaagcatcctgtggcaatgagttctgccaattaattacgtccatgtgaaaaagacttcctcctcaatgcgttaaaaatatatctggtctatgacttcatttaacatcccttacatctcgtgagca

SEQ ID NO: 92561 - DNA, 522 bp, Chicken  19866894409722_1
atactgctcagacacccttcagaatttataagcacatttagctccttctaacatgagtagaaattaaagtatttccaagaagtcattctaaaaaagctctacagcatgtgacagaaattaaatcagttaaaattaactcagagtaaaatacatcctgaaaggagaatttttatttccactaatattttcaataatgttggaaaaatatgctcaaaaacttttaaaagaaaacatcaatagatcctgaaataaattcttatttatttatttatttatttatttattttaaatttccatagktttttttttttccttcctctgggaggcagttaatttctacaataaaataataaatatatgaagtggtggtaaataagtgatgtgaaattttatggctgaaaaagaaatcgattcttagcaaacactatagcattctatttatagtaaaaaattcaaagaatgtttagatattctacaaatgttcaataagctctactagacattccatcaagtcatatccat

SEQ ID NO: 92562 - DNA, 600 bp, Chicken  19866894409725_1
gaatacaagcttccatcactacccttagaagtgatgctctttcaaattttcctttgcatcaacaagctgactctctttcaaaaaacagttcacataaatcattttaccgtgattgcttgctaagccccgtaggaaactgaaaaaagcaacgctaattgggatggaacttaatcgctcacttaatgataagaatgcccaaagcttccccaaacagggaaaggcagcagcacatgtttatatgcttttcagagcacaagccaaaaaagaaaaaaaaaaaggaggcccaagggagtgaatcaygcatttcttttcttgatccttggaaaaaaaaaaaaaaaagagctttcttctaatcattaaagaaggaaggaggcaggacaagtaagcttccgttatttgctcttcacttttactgtttaatacttgtctaaaaaagacacagaaatcctggtagtataaaatggttttcaagtggaaaagttaaggaagaaggaataaagatgatgacatttgaagacatctgaaactgatgcctccttgaaggaggagagcagcatcactgcaccagatttaaagatctccctctgccttgtgcacatc

SEQ ID NO: 92563 - DNA, 599 bp, Chicken  19866894409729_1
  misc_feature (1)..(75): n is any nucleotide
nnnnnnnnnnnnnnnnnnnnnnnnnnnnnnnnnnnnnnnnnnnnnnnnnnnnnnnnnnnnnnnnnnnnnnnnnnntatttctgccttccttctcctggcctggagagttagtttttctccctctttaaaagagctgtgctcttctctgagtgttaatgtgcttatataggccccttgttgcctttaatgtcccaaactcagcctcaggctgaacgtgctcattggtgctctgttctcatctagccttccttttgaacgtgggagctggtggttgaaaatgaaagaggctaattaaaaacygtgcatatgtgggggttgtttcgttctgcaaaattagcagatggagcgtggtgccatgggataccctttaggctaagaactttgcaagctgcagaagaggcccaatatatgtgaaaagggtgaggtacaaactagtgattgaaaattaaaacctmaaaaagtcacaacacaggagcttgggaagggtttcgggtggggtctcttggctagatggatctgctgtgactcttctgcctgttacctgatcttctcaattggctgttggcaaaatatatctctccagcgggcccacttctcct

SEQ ID NO: 92564 - DNA, 600 bp, Chicken  19866894409729_2
atgtgcttatataggccccttgttgcctttaatgtcccaaactcagcctcaggctgaacgtgctcattggtgctctgttctcatctagccttccttttgaacgtgggagctggtggttgaaaatgaaagaggctaattaaaaacygtgcatatgtgggggttgtttcgttctgcaaaattagcagatggagcgtggtgccatgggataccctttaggctaagaactttgcaagctgcagaagaggcccaatatatgtgaaaagggtgaggtacaaactagtgattgaaaattaaaacctmaaaaagtcacaacacaggagcttgggaagggtttcgggtggggtctcttggctagatggatctgctgtgactcttctgcctgttacctgatcttctcaattggctgttggcaaaatatatctctccagcgggcccacttctccttcaggaattcccttacctcttctttctggagaacagagaagtcagtaagacacacaggaatattagggcatccttaatccccagccctgctgccaagctgccattgggagcccttcatccaggtacatctcaataaagccccagtcacccagagct

SEQ ID NO: 92565 - DNA, 600 bp, Chicken  19866894409734_1
gtgtgacttctaacgatgtgtgttttcacctgtagcagcagctgctccatgtaagcaggtattcaagaacacagccatgcacagcaaagaggggttcagatgggcagaatgctcatttgcctggaacccagcacgggtgcagggattaaaactcacccttaatgcaaagtgtcacaggatccttaacgaccctgagaggtcaggctctccatttagcatttagtgaaaaggtaacggggcaatgccagctccttctgcaccattagagccattcaattcgttatgggaaggaggaacacygggtgcccaccactcctcacagcctggagctgctttctggtggtcaggggctggcagctccacgtgttcagtgctccttatctcggtctgcatctgtaatcaggtgtgcttaaacacctgagctgcccagcaccagatgcaccacacggctgggatttcctgacttcagactcaggagatggaagggcttttccacgtgtttgtttaaatgctcttgtgcacatttccaaataacaataattaaaaaaaaaaacaacaaggaaagatgctctcatgcccacgatcttcaaccaaaacaaa

SEQ ID NO: 92566 - DNA, 477 bp, Chicken  19866894409736_1
caaaatgtcttattccatttgaagtcacttcagtgaagttaggattttctctggaaggtttttgtatcaaacacttaatttgagttctgctgaattgagtgaatgtttcctgaacttactgaaattggctctggaatttcataatatctattttttgtctaattatatttacatgatctcaagaaaactagatctctgttttcttcccagtgctgtagatactccataatgatcatctgttaagtattactctgcgtttttatattacctcaagttacatttccttttatattacagtgyttctgtagcaggactatttcaatcccactaattccttattgtggggaacttatttattcaatttcakatttctgaaggaatctgaaacctgaatagtaaacaataactacatatataagatatggggtgattctttacacctaatattacagtattagattatcaaaataagaaaca

SEQ ID NO: 92567 - DNA, 410 bp, Chicken  19866894409736_2
caaacacttaatttgagttctgctgaattgagtgaatgtttcctgaacttactgaaattggctctggaatttcataatatctattttttgtctaattatatttacatgatctcaagaaaactagatctctgttttcttcccagtgctgtagatactccataatgatcatctgttaagtattactctgcgtttttatattacctcaagttacatttccttttatattacagtgyttctgtagcaggactatttcaatcccactaattccttattgtggggaacttatttattcaatttcakatttctgaaggaatctgaaacctgaatagtaaacaataactacatatataagatatggggtgattctttacacctaatattacagtattagattatcaaaataagaaaca

SEQ ID NO: 92568 - DNA, 600 bp, Chicken  19866894409738_1
tattcatgtttacttctcatttccacactatctcatactcccaaaactagatgatttctaaaccactggacacactgcatcgtgccgtttgacccatgacatccttatttattgtggaaaattcatagccagtaatggcactcttagctttaggtgcaatttattttacctcccaggggaaaaatttcccctgaaaaaaggcaaagtttgaaagactccatggaatcctacatggtacataatagtagttgcttctcataaaggtttcatttaattaaaaaaatttactaagtaatataytacttaattctgtttgttcaagtccacaaagctagtagccctgtttccagtaagacaagaatcatcacagttttcaaatacgggaagattcgttttgagacagtttgctttgtccacatcactttatttaaaacttgttcatttgtcactgacaatatcacctgctgagctaaaatgttttccaggctgaagctggaggatgggcaaccaagattaatgggctatgaatcacatgttagcaaatgattttctttgaccagtactgaattctcatttacgctattggacagtgctaggaaa

SEQ ID NO: 92569 - DNA, 600 bp, Chicken  19866894409758_1
gccttctcctcagcctcctggcaactgaagaagccagttgataagtctttccggaataccagtggcatcaaatgcccagtctttccaaaagaccttaaaacaagatggaaattgaccttttatcctgaaactgcaaaaacaccttcactttatgacaaggctatttggatatcaagaaactgaaaaagagtcaaattcttctacagaagcttagtaaggcatgaaatttcaaactatgtagtttcataccgttagtaatataagaagctacacaactcatctaagaattgtaattcacakgtatctccattatataccacaagctactatacagtacagttaagctggtacagaaagtcaactggaacaaagtcaaactggaagttcactggaacataggaaattccacactaacacagggaagaacttctttaccatcagagtgacaaagcagtggaagaggctgcccagaatgtgcatctacatttatttcaatcagggctgaatttttgctgcagaactgatagttttgacagttctcacatcccactggtttacaccatggagaaggcagggagcacataaagtattccttttgga

SEQ ID NO: 92570 - DNA, 599 bp, Chicken  19866894409760_1
  misc_feature (1)..(56): n is any nucleotide
nnnnnnnnnnnnnnnnnnnnnnnnnnnnnnnnnnnnnnnnnnnnnnnnnnnnnnnncattaattttgtgacgactgaattgtacatgtgttggggagctggaagcctaatgtagctcgcaggcaatgggtctatctcgtgccaaattcagcagccctcttgccctagattttgtccttagttgccaggtgtagagtaggagagagggacagctggtgtcagaggttggctcagcccctgggtgagccagaaagctgttctttcacctttgcaattgaagtggcaaaatcaggtgggctgsatgcagactgaagtgtctgtctgtctgtattctttttaatagacctacctgtgtaggtggccgtacagtgctggattaccaccactggctttgttctaactatgaatatagaggtgttccacgttctgaaagggaactcctggtgataacatgctggttggtctggggaagtgatccagcaacgctttttgtccttaacaattatggagtttaaagtactggttttatgcaatacagacacacagttatgtgcagagaagaacaaaacaaacaaaatcacataaacccaaaccacagac

SEQ ID NO: 92571 - DNA, 567 bp, Chicken  19866894409760_2
gtaggtggccgtacagtgctggattaccaccactggctttgttctaactatgaatatagaggtgttccacgttctgaaagggaactcctggtgataacatgctggttggtctggggaagtgatccagcaacgctttttgtccttaacaattatggagtttaaagtactggttttatgcaatacagacacacagttatgtgcagagaagaacaaaacaaacaaaatcacataaacccaaaccacagacagatatgcaatttttttcttatgcatttgtcttcacataagatggcttttttwatgaaaatggcttttgtgctttccagtttgatttaagtgctgtctttacatgtatatgcaagtgctacgcaaacttattctttgcaaagttaagaaactttagaaactgcctccataggatttcagcctcaaggcaaatctttgtgagagttatgagaaatgagtttcctacaaaagaattggtttgggttattattttctaatcctgttagttcagtgtagttgggaagagaaatgttgttagaaaacaattagtgctgtcagtca

SEQ ID NO: 92572 - DNA, 600 bp, Chicken  19866894409774_1
tggaaatggtttggtatggagaagaggaggctcaggagagacctcattgctccctacagttcccagacaggaggctgtgatgagatgggtgttggtttcttctcgtgggtaacggcaacaggacatgaggtgatggcctcaagttgcaccaggggaggttcaggttggagattaggaaaagtttattctcagaaagagtggtcagcactgaaacaggctgcccagggaggtggtggagtcactgtgccaggatgttcaagaaacattaagatgtggtactaagggacatggtttagtacrgaaatattagtggtaggtggatggtaggactggatgatcttggaggtcctttccaacactggtgattctatgattctrtgaacttaagcattgtgtttaccrtgtgcattcactaagtcaaagtagcagtgtgcatttctgttgttctattagcaargatgtgacagagccactactcagcttttttatattcatgcaggtgagcagtgggattatgcgaagacccatgggatatgctatccatctctaacagccattacagaaatgggtttgcccaattctcaaagcaccctgagagtg

SEQ ID NO: 92573 - DNA, 600 bp, Chicken  19866894409774_2
gatgagatgggtgttggtttcttctcgtgggtaacggcaacaggacatgaggtgatggcctcaagttgcaccaggggaggttcaggttggagattaggaaaagtttattctcagaaagagtggtcagcactgaaacaggctgcccagggaggtggtggagtcactgtgccaggatgttcaagaaacattaagatgtggtactaagggacatggtttagtacrgaaatattagtggtaggtggatggtaggactggatgatcttggaggtcctttccaacactggtgattctatgattctrtgaacttaagcattgtgtttaccrtgtgcattcactaagtcaaagtagcagtgtgcatttctgttgttctattagcaargatgtgacagagccactactcagcttttttatattcatgcaggtgagcagtgggattatgcgaagacccatgggatatgctatccatctctaacagccattacagaaatgggtttgcccaattctcaaagcaccctgagagtgccatgtagccttcttgtcacatccacaatattttctttcttcaatggaacaatggcagtgagcagcctcagagtgttt

SEQ ID NO: 92574 - DNA, 600 bp, Chicken  19866894409774_3
tcgtgggtaacggcaacaggacatgaggtgatggcctcaagttgcaccaggggaggttcaggttggagattaggaaaagtttattctcagaaagagtggtcagcactgaaacaggctgcccagggaggtggtggagtcactgtgccaggatgttcaagaaacattaagatgtggtactaagggacatggtttagtacrgaaatattagtggtaggtggatggtaggactggatgatcttggaggtcctttccaacactggtgattctatgattctrtgaacttaagcattgtgtttaccrtgtgcattcactaagtcaaagtagcagtgtgcatttctgttgttctattagcaargatgtgacagagccactactcagcttttttatattcatgcaggtgagcagtgggattatgcgaagacccatgggatatgctatccatctctaacagccattacagaaatgggtttgcccaattctcaaagcaccctgagagtgccatgtagccttcttgtcacatccacaatattttctttcttcaatggaacaatggcagtgagcagcctcagagtgttttgattttttccattttgggtaaca

SEQ ID NO: 92575 - DNA, 600 bp, Chicken  19866894409774_4
gttcaggttggagattaggaaaagtttattctcagaaagagtggtcagcactgaaacaggctgcccagggaggtggtggagtcactgtgccaggatgttcaagaaacattaagatgtggtactaagggacatggtttagtacrgaaatattagtggtaggtggatggtaggactggatgatcttggaggtcctttccaacactggtgattctatgattctrtgaacttaagcattgtgtttaccrtgtgcattcactaagtcaaagtagcagtgtgcatttctgttgttctattagcaargatgtgacagagccactactcagcttttttatattcatgcaggtgagcagtgggattatgcgaagacccatgggatatgctatccatctctaacagccattacagaaatgggtttgcccaattctcaaagcaccctgagagtgccatgtagccttcttgtcacatccacaatattttctttcttcaatggaacaatggcagtgagcagcctcagagtgttttgattttttccattttgggtaacaaaagaaatgaaatctggaaacaggagctgacctttgttgtgcagaagacattgtg

SEQ ID NO: 92576 - DNA, 600 bp, Chicken  19866894409776_1
aaataacagccagcaaaggtctcatttgtgtggctgtggtgcagaccttggataaccctgaagcagaggacatcattctgggcagcctgatagcactgcgaccagtaacactcaggagcctactagcttacttaggaagcccaaggtaacagctttcatcagtttttcctacacccattaggttcatcactcattacatgccagatcagtgctagtttctgtgagtgctgcagtggggattcctttgtgattttatttgcttagtgcatgctcagtaacaataatcccttttttggggcycttcagcaccgatgcaattaatagcattatctacaaaacctcagagccccatagcacagatgttcttcctccagaagcacagcatcygctaaccgtttgcggaagaagaatctctatcagctctcactggtggctggaataagcaagattagccacttacaaagggcagcatgccagtttgtatttgaccttcccaaactaagcatgctggamtgtagtcagcattggctaggtgaygctatcttacaaagggacaagattctatcattacctctcatcaactactggcttctgtatcag

SEQ ID NO: 92577 - DNA, 600 bp, Chicken  19866894409776_2
tgatagcactgcgaccagtaacactcaggagcctactagcttacttaggaagcccaaggtaacagctttcatcagtttttcctacacccattaggttcatcactcattacatgccagatcagtgctagtttctgtgagtgctgcagtggggattcctttgtgattttatttgcttagtgcatgctcagtaacaataatcccttttttggggcycttcagcaccgatgcaattaatagcattatctacaaaacctcagagccccatagcacagatgttcttcctccagaagcacagcatcygctaaccgtttgcggaagaagaatctctatcagctctcactggtggctggaataagcaagattagccacttacaaagggcagcatgccagtttgtatttgaccttcccaaactaagcatgctggamtgtagtcagcattggctaggtgaygctatcttacaaagggacaagattctatcattacctctcatcaactactggcttctgtatcagactacccagttctggatttcctcagggtcaaaggctggacctctctctgaagcccacaatcccagtgctacggcagccctgctgcac

SEQ ID NO: 92578 - DNA, 600 bp, Chicken  19866894409776_3
agtttctgtgagtgctgcagtggggattcctttgtgattttatttgcttagtgcatgctcagtaacaataatcccttttttggggcycttcagcaccgatgcaattaatagcattatctacaaaacctcagagccccatagcacagatgttcttcctccagaagcacagcatcygctaaccgtttgcggaagaagaatctctatcagctctcactggtggctggaataagcaagattagccacttacaaagggcagcatgccagtttgtatttgaccttcccaaactaagcatgctggamtgtagtcagcattggctaggtgaygctatcttacaaagggacaagattctatcattacctctcatcaactactggcttctgtatcagactacccagttctggatttcctcagggtcaaaggctggacctctctctgaagcccacaatcccagtgctacggcagccctgctgcacactgttcaatatctgctyacaagtcaaaaaatcgctgaattataggggttggaagggaccctggacatcaaggtccaacaccctcctgaagcagctccttacagtaagtcacacaagaaagtgtcc

SEQ ID NO: 92579 - DNA, 600 bp, Chicken  19866894409776_4
gattcctttgtgattttatttgcttagtgcatgctcagtaacaataatcccttttttggggcycttcagcaccgatgcaattaatagcattatctacaaaacctcagagccccatagcacagatgttcttcctccagaagcacagcatcygctaaccgtttgcggaagaagaatctctatcagctctcactggtggctggaataagcaagattagccacttacaaagggcagcatgccagtttgtatttgaccttcccaaactaagcatgctggamtgtagtcagcattggctaggtgaygctatcttacaaagggacaagattctatcattacctctcatcaactactggcttctgtatcagactacccagttctggatttcctcagggtcaaaggctggacctctctctgaagcccacaatcccagtgctacggcagccctgctgcacactgttcaatatctgctyacaagtcaaaaaatcgctgaattataggggttggaagggaccctggacatcaaggtccaacaccctcctgaagcagctccttacagtaagtcacacaagaaagtgtccagacaggtcttgaatagagaagca

SEQ ID NO: 92580 - DNA, 600 bp, Chicken  19866894409776_5
aagaatctctatcagctctcactggtggctggaataagcaagattagccacttacaaagggcagcatgccagtttgtatttgaccttcccaaactaagcatgctggamtgtagtcagcattggctaggtgaygctatcttacaaagggacaagattctatcattacctctcatcaactactggcttctgtatcagactacccagttctggatttcctcagggtcaaaggctggacctctctctgaagcccacaatcccagtgctacggcagccctgctgcacactgttcaatatctgctyacaagtcaaaaaatcgctgaattataggggttggaagggaccctggacatcaaggtccaacaccctcctgaagcagctccttacagtaagtcacacaagaaagtgtccagacaggtcttgaatagagaagcagactccacaacctctctgggcagcctgttccagtgctctgtcatccccaaagtaaggctttcctcatgttcttatgaaacttcctgcgttccaatttgtgcccacttccctttgtcctttcactgagctccactgaagagagcctggccccatccactggatatcctt

SEQ ID NO: 92581 - DNA, 600 bp, Chicken  19866894409783_1
aaaatgcatgcactcatataggcagacccaactttgttctaccccaaatcaacttcagaggctcccagttatgttatgcccaagaattcatgttgacaaatcttggctggaagctgcactcttttctgggacagagtgtgcttgtctacaggaggttggaaagtaggagggtgcaagagccattgctaaaccattctgcaagctatgagcaaatcagtaaaactgtttaaatttggacacagtctttatcgtcacagaatcatagaatcatagaatggcttgggttgaaaaggaccacartgatcatctacttccaaccccctgctatgtgcagggtcgccaaccascagaccaggctgcccggagccacatccaacctggccttgaatgcctgcagggatggggcatccgcagcattttccagaatgtctttgtctgttctgataattattactttaaactggctgtggaagatctacctaaccagataatgtttagagtaaattttcaacatggtttttaattatgtggggcatttctgtcaaggtgggtggtgctcaaaatacttctgtgagataaattcatgaccacctattctcc

SEQ ID NO: 92582 - DNA, 600 bp, Chicken  19866894409783_2
atcaacttcagaggctcccagttatgttatgcccaagaattcatgttgacaaatcttggctggaagctgcactcttttctgggacagagtgtgcttgtctacaggaggttggaaagtaggagggtgcaagagccattgctaaaccattctgcaagctatgagcaaatcagtaaaactgtttaaatttggacacagtctttatcgtcacagaatcatagaatcatagaatggcttgggttgaaaaggaccacartgatcatctacttccaaccccctgctatgtgcagggtcgccaaccascagaccaggctgcccggagccacatccaacctggccttgaatgcctgcagggatggggcatccgcagcattttccagaatgtctttgtctgttctgataattattactttaaactggctgtggaagatctacctaaccagataatgtttagagtaaattttcaacatggtttttaattatgtggggcatttctgtcaaggtgggtggtgctcaaaatacttctgtgagataaattcatgaccacctattctccatctcactctgtagctgctctgcacagattctcgtctggtgtgaatg

SEQ ID NO: 92583 - DNA, 600 bp, Chicken  19866894409789_1
tcagtgccctgcagagccccacttctcccagctccagggatgtgtgctgcttctcccatctccctgacacacacaaagctcctacttgagtagctgtatttccaaaaccaagcttcaaagagagctcagaagctaccagtgatgaaggagacttaaatctgctgacctttggtgagacttagacttatgaaattccctgatcacttctggaaataccaatcagaccgctagcccatgtggagatttctgaaagcagctgctaaacacaccaccctctcaatgcctgcctccactttcctscatctctgcagaactatctatagcacctggcaagttgacagcacagccaatcaacacagtttagacatacctgctctcatatatattgccgcatgtggygcttaaatttattacctgttgacaagctataaataacattgccattagagtcccacaatgtgtgacattccatgagcagaagcagacctctattttccctaccttagctcaactgtcctttgagtagaggaagttgctctgtcttgctcaccagtcaaggagcagttgtttctctgtcttgccgatcttgcaatttctatg

SEQ ID NO: 92584 - DNA, 600 bp, Chicken  19866894409789_2
ttccaaaaccaagcttcaaagagagctcagaagctaccagtgatgaaggagacttaaatctgctgacctttggtgagacttagacttatgaaattccctgatcacttctggaaataccaatcagaccgctagcccatgtggagatttctgaaagcagctgctaaacacaccaccctctcaatgcctgcctccactttcctscatctctgcagaactatctatagcacctggcaagttgacagcacagccaatcaacacagtttagacatacctgctctcatatatattgccgcatgtggygcttaaatttattacctgttgacaagctataaataacattgccattagagtcccacaatgtgtgacattccatgagcagaagcagacctctattttccctaccttagctcaactgtcctttgagtagaggaagttgctctgtcttgctcaccagtcaaggagcagttgtttctctgtcttgccgatcttgcaatttctatgctcttgactggaaggattactcatttgttagtgccagactgtcatttctttgaaagtagagccacaagatcttaacagactggatgtacacggctgtta

SEQ ID NO: 92585 - DNA, 562 bp, Chicken  19866894409791_1
tcaccatgcagcccatggtgctgcagagctcctggcatccttatggacactgctgtgcaaacagcacaccgggctccacacgctgcgtgcaccgacctccctctatgcacagtttacggcttgcatcttgcagagcaagaaatctaaatcactttggggaagggatgggagcgatgagcgtacgtgggaaatactaccttttcccccctttcaaatgccaaaagaaaatgtcaaagaaattgctttcttgaaaagactcacggcttccaaataaattgccatgtgtcagcctgcagctcrgctcccagcaccccgcagcatggcagtgcttctcccagcatcgggagccttccctttagccccagccctgccaggtaaaggggagcacggaggcactcttttgcccctcctgcaacaggagaagcaaacctgcaagcatccctgtgggaaggcatgcaaacggacagcctgtgcccgtaccactgccgtggccgaggagctccaggcagtcccaaggctgcacaaatggtggcccctgtgtttatgggcaggaggacccagg

SEQ ID NO: 92586 - DNA, 600 bp, Chicken  19866894409793_1
tgcacaaaaataaagcttcaaaactctcaactcgtgaaaatcatgtagaccaaaatttctactattaccccagtatttggatgcctgctgaattttcctagtgcctgcagatagactccataaaaatactttaactgttctcagcagtaaaatcccactaattccaacagaatcagaaaggccaatgttgggaacttcctaaagtatcatcctaagttgttttttttcctttccccccaagccccatacgcctgttgggggcacctgtatgacctctatagagtcaaaggccaaagaaaktgccactgtaagagatggaggttctgctgagcttcttggttacccccatgagcaagcatataaaaaagctgctgtttttaagacttccagtatctgaccctccttgtacttyttgcttcctctgaaacttcaactgagagctatttctcctcattgtttggaagaactttttaatagcaggtgatgagtttaaagagaaaatgtctaagccaggaagaacacagtaaagttcaagctacaattattgcagtactttttggaaaatttgaagaattcaaagacaggcaactcagtactgaa

SEQ ID NO: 92587 - DNA, 600 bp, Chicken  19866894409793_2
agactccataaaaatactttaactgttctcagcagtaaaatcccactaattccaacagaatcagaaaggccaatgttgggaacttcctaaagtatcatcctaagttgttttttttcctttccccccaagccccatacgcctgttgggggcacctgtatgacctctatagagtcaaaggccaaagaaaktgccactgtaagagatggaggttctgctgagcttcttggttacccccatgagcaagcatataaaaaagctgctgtttttaagacttccagtatctgaccctccttgtacttyttgcttcctctgaaacttcaactgagagctatttctcctcattgtttggaagaactttttaatagcaggtgatgagtttaaagagaaaatgtctaagccaggaagaacacagtaaagttcaagctacaattattgcagtactttttggaaaatttgaagaattcaaagacaggcaactcagtactgaagagacactctgatcctaacctatcccatggcgcctacgaacttggaagagtctcagctcagtaactgatagtattgcttgcaggtcattggatatcagcagcaatcttaaac

SEQ ID NO: 92588 - DNA, 600 bp, Chicken  19866894409801_1
gtattccagcatgtttcgcatggttgttccttcacatgcctttgtgctcctgtgaatgagagcaagaaggcaaaggtgggagtctgctcagatgtacatagtgcatgccctctgcaacatatagatgaagctctgtattcagctagataggtaattgttggctattgacattgtggccaaaaggggctgtatttcagagctgtgctcaataaaaattgggaataaagaaaaatggcatcaaaagtacagctgggatgtctgtgccccactgcatgaatggggtttgttgtaaggtctgcrtggatgtggttcagagaacaaggccttggggtggataaagaccagggggctcaagagtagagatggggtgcttaacgtgggcagaattaaaacaacaaatgyaaggaaaaaggagaaatattgaaaagaytcagggcaatgaggtggaaaaaaatagatgaagatgggcacaaagaaggtatcttgataggtagatccatcactcagaatttaatgtctttatggctacaaaaccagcccataggttatataggatgagtactgatcattttcctagtgccaccatgctgtttctgtatg

SEQ ID NO: 92589 - DNA, 600 bp, Chicken  19866894409801_2
gcatgccctctgcaacatatagatgaagctctgtattcagctagataggtaattgttggctattgacattgtggccaaaaggggctgtatttcagagctgtgctcaataaaaattgggaataaagaaaaatggcatcaaaagtacagctgggatgtctgtgccccactgcatgaatggggtttgttgtaaggtctgcrtggatgtggttcagagaacaaggccttggggtggataaagaccagggggctcaagagtagagatggggtgcttaacgtgggcagaattaaaacaacaaatgyaaggaaaaaggagaaatattgaaaagaytcagggcaatgaggtggaaaaaaatagatgaagatgggcacaaagaaggtatcttgataggtagatccatcactcagaatttaatgtctttatggctacaaaaccagcccataggttatataggatgagtactgatcattttcctagtgccaccatgctgtttctgtatgaacwtcccgaagacttgtactttacccagtgacttcagtgggaaaatgggctgctttctcaacagattcacatcactcagtttgaatgtaacaagtatgcaa

SEQ ID NO: 92590 - DNA, 600 bp, Chicken  19866894409801_3
ctctgtattcagctagataggtaattgttggctattgacattgtggccaaaaggggctgtatttcagagctgtgctcaataaaaattgggaataaagaaaaatggcatcaaaagtacagctgggatgtctgtgccccactgcatgaatggggtttgttgtaaggtctgcrtggatgtggttcagagaacaaggccttggggtggataaagaccagggggctcaagagtagagatggggtgcttaacgtgggcagaattaaaacaacaaatgyaaggaaaaaggagaaatattgaaaagaytcagggcaatgaggtggaaaaaaatagatgaagatgggcacaaagaaggtatcttgataggtagatccatcactcagaatttaatgtctttatggctacaaaaccagcccataggttatataggatgagtactgatcattttcctagtgccaccatgctgtttctgtatgaacwtcccgaagacttgtactttacccagtgacttcagtgggaaaatgggctgctttctcaacagattcacatcactcagtttgaatgtaacaagtatgcaaggtcttctcacccctaataaaaaggaca

SEQ ID NO: 92591 - DNA, 468 bp, Chicken  19866894409801_4
tgtggttcagagaacaaggccttggggtggataaagaccagggggctcaagagtagagatggggtgcttaacgtgggcagaattaaaacaacaaatgyaaggaaaaaggagaaatattgaaaagaytcagggcaatgaggtggaaaaaaatagatgaagatgggcacaaagaaggtatcttgataggtagatccatcactcagaatttaatgtctttatggctacaaaaccagcccataggttatataggatgagtactgatcattttcctagtgccaccatgctgtttctgtatgaacwtcccgaagacttgtactttacccagtgacttcagtgggaaaatgggctgctttctcaacagattcacatcactcagtttgaatgtaacaagtatgcaaggtcttctcacccctaataaaaaggacagtggaaatgtactcgaatcagattgttctggatgacagatgt

SEQ ID NO: 92592 - DNA, 430 bp, Chicken  19866894409807_1
attttgctggttttgtctaaagactattggttagttgaatctggactaccaaatcacttccaagattttttcagcaataacaaatataagtttggatattcttttatccatataagcatccagttgtttttaaaagttcagtatattcctgtcttccacagcttccctcatcaaggcagaccatctacgactgcacattttatgccagcatgccttattttaggctttaattgctgtctcatatttttgttattagaagaagaaaattgcacatataaccaagtgcataattgtctttgktctgaataaataatctaacattttcttgttttgataattgtttactttgtgatagtttgtatgctactaattgggggttagaacataaaacatcaccaaataatgacacaacacaaacatttcctactag

SEQ ID NO: 92593 - DNA, 600 bp, Chicken  19866894409811_1
agctgagcactgatgcccccttagtccctgtgctacccgtctcagtttcctcccacgaggtactgtcttcttcattttaactaacgatttctcgtgggacaccataacaaaaatttggtgaagcccagggagagctgactgactgcctctcctttgtctagaaaatgagttactcaggaaagctcccggagttcttgggcaagaatttcatttggcagacaccacagacagatggagaagttgcccaaggcaacttgctttcttaaactactgttttccagtaccgcttctgaatgtcayagatttatttcaaatacttgttgttggacttaaaacttgatagcctgactcttccctgtctctggggtggagctggtccagttctttcagtttgtatgcacttagctcgttcagattttcattcccttcagatgtggtcatttccatatcctgatgtccctcatccatcttcmctttgtcctgggattcaggatcctttttcttcccaaagcctgacacaaaacaggcacctaatttgagggatggagttcagtatctttaagcttcaccacatcctgggcacacagaaaccrcatttct

SEQ ID NO: 92594 - DNA, 600 bp, Chicken  19866894409811_2
tcaggaaagctcccggagttcttgggcaagaatttcatttggcagacaccacagacagatggagaagttgcccaaggcaacttgctttcttaaactactgttttccagtaccgcttctgaatgtcayagatttatttcaaatacttgttgttggacttaaaacttgatagcctgactcttccctgtctctggggtggagctggtccagttctttcagtttgtatgcacttagctcgttcagattttcattcccttcagatgtggtcatttccatatcctgatgtccctcatccatcttcmctttgtcctgggattcaggatcctttttcttcccaaagcctgacacaaaacaggcacctaatttgagggatggagttcagtatctttaagcttcaccacatcctgggcacacagaaaccrcatttctttgttctcttctcatttgtgactcatgaacattttactagttgttttaatttcctttgcaagatcgaacgcagcttgactttggcgattctcatgttacccctacrcttcctgacctctaacatcaaattctctttgctggttaattcctttttccatccactgcaggcttgt

SEQ ID NO: 92595 - DNA, 600 bp, Chicken  19866894409811_3
atgtcayagatttatttcaaatacttgttgttggacttaaaacttgatagcctgactcttccctgtctctggggtggagctggtccagttctttcagtttgtatgcacttagctcgttcagattttcattcccttcagatgtggtcatttccatatcctgatgtccctcatccatcttcmctttgtcctgggattcaggatcctttttcttcccaaagcctgacacaaaacaggcacctaatttgagggatggagttcagtatctttaagcttcaccacatcctgggcacacagaaaccrcatttctttgttctcttctcatttgtgactcatgaacattttactagttgttttaatttcctttgcaagatcgaacgcagcttgactttggcgattctcatgttacccctacrcttcctgacctctaacatcaaattctctttgctggttaattcctttttccatccactgcaggcttgtggttattcctaattttctttttgtggtaattcttcatccaattaaggcattagcctttcccctgagagctttcctctcttgcctgggatatatgatccatattgttctaagttcagttga

SEQ ID NO: 92596 - DNA, 600 bp, Chicken  19866894409811_4
tcgttcagattttcattcccttcagatgtggtcatttccatatcctgatgtccctcatccatcttcmctttgtcctgggattcaggatcctttttcttcccaaagcctgacacaaaacaggcacctaatttgagggatggagttcagtatctttaagcttcaccacatcctgggcacacagaaaccrcatttctttgttctcttctcatttgtgactcatgaacattttactagttgttttaatttcctttgcaagatcgaacgcagcttgactttggcgattctcatgttacccctacrcttcctgacctctaacatcaaattctctttgctggttaattcctttttccatccactgcaggcttgtggttattcctaattttctttttgtggtaattcttcatccaattaaggcattagcctttcccctgagagctttcctctcttgcctgggatatatgatccatattgttctaagttcagttgatttctctgaataattccctttatttctctaaaatccccctctgaaatgttaatgtcgagctaacttctttttgatttaaatggagatgccttgagggcacrtgatccaagata

SEQ ID NO: 92597 - DNA, 464 bp, Chicken  19866894409811_5
gttacccctacrcttcctgacctctaacatcaaattctctttgctggttaattcctttttccatccactgcaggcttgtggttattcctaattttctttttgtggtaattcttcatccaattaaggcattagcctttcccctgagagctttcctctcttgcctgggatatatgatccatattgttctaagttcagttgatttctctgaataattccctttatttctctaaaatccccctctgaaatgttaatgtcgagctaacttctttttgatttaaatggagatgccttgagggcacrtgatccaagatattttctatgacaaattgctckgtaaagtstttacctcttagcaaagcaagtgcaaggtgttgcagcacttgagtcagggcaatcccagatatgagtgtagaaagggagaagagttccttgagagcagccctgcagagtaggacttgggcatc

SEQ ID NO: 92598 - DNA, 431 bp, Chicken  19866894409811_6
attctctttgctggttaattcctttttccatccactgcaggcttgtggttattcctaattttctttttgtggtaattcttcatccaattaaggcattagcctttcccctgagagctttcctctcttgcctgggatatatgatccatattgttctaagttcagttgatttctctgaataattccctttatttctctaaaatccccctctgaaatgttaatgtcgagctaacttctttttgatttaaatggagatgccttgagggcacrtgatccaagatattttctatgacaaattgctckgtaaagtstttacctcttagcaaagcaagtgcaaggtgttgcagcacttgagtcagggcaatcccagatatgagtgtagaaagggagaagagttccttgagagcagccctgcagagtaggacttgggcatc

SEQ ID NO: 92599 - DNA, 423 bp, Chicken  19866894409811_7
tgctggttaattcctttttccatccactgcaggcttgtggttattcctaattttctttttgtggtaattcttcatccaattaaggcattagcctttcccctgagagctttcctctcttgcctgggatatatgatccatattgttctaagttcagttgatttctctgaataattccctttatttctctaaaatccccctctgaaatgttaatgtcgagctaacttctttttgatttaaatggagatgccttgagggcacrtgatccaagatattttctatgacaaattgctckgtaaagtstttacctcttagcaaagcaagtgcaaggtgttgcagcacttgagtcagggcaatcccagatatgagtgtagaaagggagaagagttccttgagagcagccctgcagagtaggacttgggcatc

SEQ ID NO: 92600 - DNA, 600 bp, Chicken  19866894409817_1
aactgctggcagctcgcaggataaatcagctttcctactgagctccatactatatttaaaataaataaataaaaaaattcagtaatcaccataaaaaaatgtattttttttctgactatcttgcttagtccttcttgttcttacgcctcaaggataacaaattcctttgactccatgcaagatgagattccttctaattgccaagagctttagccagtagcatcttgtctcctttgctgttcactagcaggcaatggaaccaagatcagcttatcagcattgaactctacttctgcagaytccctgtgtgatattggcaagttattccgctctgtaagtgggaataattgtgcttttgttctttgtccacctcagatggaaaacctttggrccagagatttttgttttttaaatccacaccaattgcagtgagtctggcactgaattccagtcggggagaattatcatggagcaaaaccaaatctgatttgttacaattatttctgtttctgtctgagttatgactgagtgtgaactcatggaatttggctcactaatgagcagagaaagatccagtttgagtaactgatttcagcaaga

SEQ ID NO: 92601 - DNA, 600 bp, Chicken  19866894409817_2
taaaaaaatgtattttttttctgactatcttgcttagtccttcttgttcttacgcctcaaggataacaaattcctttgactccatgcaagatgagattccttctaattgccaagagctttagccagtagcatcttgtctcctttgctgttcactagcaggcaatggaaccaagatcagcttatcagcattgaactctacttctgcagaytccctgtgtgatattggcaagttattccgctctgtaagtgggaataattgtgcttttgttctttgtccacctcagatggaaaacctttggrccagagatttttgttttttaaatccacaccaattgcagtgagtctggcactgaattccagtcggggagaattatcatggagcaaaaccaaatctgatttgttacaattatttctgtttctgtctgagttatgactgagtgtgaactcatggaatttggctcactaatgagcagagaaagatccagtttgagtaactgatttcagcaagatagtgtacgcacacttgctacaagatgtgtatctgtatgctatacaccccttactacaaggctacatatatacatcccttcactacaagaa

SEQ ID NO: 92602 - DNA, 600 bp, Chicken  19866894409820_1
cttaggtatttctgctttaaagagagcatgctgtgtggaatgtcctttcggtcagcgttctgcctgctgctgggatttttccttcagagaaggaatacctcttaggttattcttctgtcagatgccttcgctcaaaagctgattcctttttaatgtagcagcagtgtgtcttgagttaaaatttgccttaagtgtgtgcttcaggatgccatttcccaggtaatcatcacctcttttgtttgttgcagccaagaataaacagttaccctgaggaaaacctccccggatgatgagaaatckgagacgataaaacacttccctgactcacagaacagagccccaccagctcataggaggcagagtattcctgtctgtgggcctcagactgactcttcccccattggtatgaccagcagcatcagtagcccaggattgctcacagctagatacagcgacttgggtaaatgcattgcatttcctaagggtgacttgtttcctgtaaaaggaaatcagtttgggatcagctttgttttcagtagacagttattttaatacaaactgaccacaaagcacagctttccttgtaatgcgtgtgctggt

SEQ ID NO: 92603 - DNA, 600 bp, Chicken  19866894409823_1
ctggaaaggatcttaggaagggaaactgtcactagtagagctgtggattagacagatcctggcagttctggtgatcctaatagcagccactgagccaggtccctttttactcacacttgcaaacccacaggaccacatatatggcagcacacaagctgtgcaaccacacctgtctgcagctcccatggcgaaaagatggtgggagagataacagaaatccctcttcctccaccctcatcttgtgctgatggacaaagggatttcctgggcacccctctggcccactctgtaattctgcaycagatttctgggtcctcttttggaaaaaacaccttgcaatcatagggagtggcagtggcaggaaccccgggctgtctggtcccctcacaggtgtccctctgagagtgccacgccagcctgttcgcccactgacgtgctggtagagcagcagagggtagtttcaggggctgctgcactcaaccccaaatgtaagcagtggctgcagaactgagcagatctggaggacagatgagctggtccccttctcagatgcttcatgtttgttctcacgctttgtgcttcttctccagcccactcttc

SEQ ID NO: 92604 - DNA, 600 bp, Chicken  19866894409831_1
acgtttaatctaaatcagagcagcaacaaaggttttatcagaaaataaacaatataaaaatccaaaattaacagagactaggaaagcatgtgtgagtaaaagggagatatacaatgctctcgatgcccactgtgtctccgcaggtgatttctagctttcaggcttggctgcagcaactttctgagttgcactaaagcaataaactctacacagtcccaaggaaattcttctcatcacttctgtggcctgactgtccttcctcaactcctcaagcactttcagcctcagcatgagctgcaygcaggcttccaactctctgctgtgagcacttgcctgcccaagcctgtagtctcttatttttttccccttttagcttgtcccctagctcgcactggagcacaaacagcctttctacacgtttctgcctgaccaggctacctaaaagaacacagtaattgagaacaacatggaagaaagcaccatgtcataaatatattgtcacgtttaagcatcatgtcatgtttatgcaatataaaatttcttgtacagataaagcaattaaatgctcagaccaaacttccttttctggtaatctctgaa

SEQ ID NO: 92605 - DNA, 600 bp, Chicken  19866894409845_1
gaatataaactcacctcaaagttaccgattgtctatcctacatttcatggccttgaggaaccattcaaaacaagatacacaaatgcagacacaggaaggggcagagctcctacagccaagctagtccaagttctccaggcagtgcagtacagcctcacaactggaactgctgctctctgtacaaacaattcagagcccgccatgtttttgggcagccttgtgttcactaatgtacagcaccaatgatataacccacatgtacaacgtcatttcctataaatggcattagatgttttttgygttaccttggcagcactttggccaacaaccctcttgctctgtgccacttactttgcatactcatcctgcagagaacctgtgacttctttctcagcatccttttgaacactcagcatcaacatcatacttactgtctcattctcttttataacaaaaaaaaaaaaaaaaatacaaccacctccttttcttttaaaaccggcactggtcacttcattgatggactggtatgtctccctacctacatcagaaggatgatgggaagttttgggacagaaaaacttcatcaagtaagaagtgaac

SEQ ID NO: 92606 - DNA, 600 bp, Chicken  19866894409845_2
gcttgaattattattgtaatcctttgccacatgcctacagaaaacttgacaacagctaagctgtcaacatgctatcataccacccatcctgctgaccaatctttgtttttctgtactcccccagttatctgtgtccatctgttgtctcttgtctcattattagcttgctagctctttggggcagggaacattttttgccctgtgtttgatcctggactgtgtaggtgctaccacaacaggcagggataataataacaaaaataattaggttatgtcttactaactccttggatttgaatktttccctcctaacttcacagcagggttcacaaacaattattacttcatgcaatatggagcctcataaataactacaccccagcctatctctgaccatttcatcagtaatcccccttcaggcttgcatgtgctgagctttccatgtgcttcaaatggtgagtgtgtgtgtgaactcagctacagaggaaaataccagccttgtagcgtagcaggactaatgccatggatataacccttggatagatcttccctggacagaacaaccttcctacacacaaactgttgcctcctactgttatg

SEQ ID NO: 92607 - DNA, 600 bp, Chicken  19866894409850_1
tgggggaaatggatggccttgattgcctgccaatgccatgaactttttagcttcatgttggcagcaggtgaacttcatcttcctttcctccttctgaagaaagtgaagtgaaagatactgtttgagagttttcatttccaagccttccctacacgatctgatcgagagcattcatgatttatagccccgactacagactgtatttaaaatcaaccaggtaaactacccctcattacagatagagaggtagaatgtctaggccttgatggcagagtcaaaacagataaatgcattaacaaratctgcacttccacagagaagggtccacagctatagaattactaatgcttaagagcagtaacaattttatcattgtgtaagactacttggttttgactggtaaaattttagaacctctcagaaacatttctgctagctttcagaaggtatataaaaatacagtgtatgttggtgtattacctaagaagtccaatcctatgctgcagatgtaaactgtatctacaccacctcatccaccattccacttatgttctctgggtactatcatggtttttagcaccttcaacgtatgaagaaaaa

SEQ ID NO: 92608 - DNA, 600 bp, Chicken  19866894409854_1
aaagttttcctaactgtgagatttaaaaacgagggccaaacttctgggatttggagatgtattcagaaattggctgcatttatctacagtggtgactactaagcctacatagtcttagtaggctattgatccaaccaaagagcattgcatgggatattttcaaaggagtatcaatatgaaaacatcaaattattggtgttctttctgcagaagagcacagaaaaatttatgtgtatgaggtaactgaaaccaaatacctttggggataatagctgtccattttaagtaattttttttttkttgttgctttggaaagcaaaataccaaaacagtataataccaaaacagtataatatgtatctttttctaagatgcaaactgttaaaagattgcttgtttatgcattggtcagaagttcatcattaatatgattcccttgaaatgtttgattgattatctgtttatttataaacgtaagtccaaagccaatgaaagtttgtcttattgttaattctcagatgccttttctttgtgagacaattaaagtatttttccctacatctttgctaacatgaggtaactaaaatgaaataaactgta

SEQ ID NO: 92609 - DNA, 599 bp, Chicken  19866894409857_1
  misc_feature (1)..(56): n is any nucleotide
nnnnnnnnnnnnnnnnnnnnnnnnnnnnnnnnnnnnnnnnnnnnnnnnnnnnnnnnttctttggagtaagtcagaagtctatggttcaaaggcctagactgataatgtatctgtttaaagaaaacagccaatttcagattttcatatcagcacaactgctaggattaggactcatcaacagaagtagtactggatagaaaaacatttacaggaccctttatggagaattatgttgctcttttgatggacttacatgactccaggaactttgaaatggactttgaaatgaactttgaatgractttgaaaggagaagaatctttttcttcagttcattaaattttgtgctagttattcctcttgtatccawtagaagtcctgacgacctacaacagaggctgcctcttcatcagctgatttgccaygtcctgccagggtgtgtctttgaagaaggtagactccagaaatatcaggaaatccttctgtgacagttctcaggcaacaragagaggaatcattcaacaaaagcttaattgtgaaggaggtctggagaaaccctaggagatgctgtaccatttcatgtcccattgaccctacct

SEQ ID NO: 92610 - DNA, 600 bp, Chicken  19866894409857_2
tcagaagtctatggttcaaaggcctagactgataatgtatctgtttaaagaaaacagccaatttcagattttcatatcagcacaactgctaggattaggactcatcaacagaagtagtactggatagaaaaacatttacaggaccctttatggagaattatgttgctcttttgatggacttacatgactccaggaactttgaaatggactttgaaatgaactttgaatgractttgaaaggagaagaatctttttcttcagttcattaaattttgtgctagttattcctcttgtatccawtagaagtcctgacgacctacaacagaggctgcctcttcatcagctgatttgccaygtcctgccagggtgtgtctttgaagaaggtagactccagaaatatcaggaaatccttctgtgacagttctcaggcaacaragagaggaatcattcaacaaaagcttaattgtgaaggaggtctggagaaaccctaggagatgctgtaccatttcatgtcccattgaccctacctctgataagaccactcttttctacgttccagtttttttctcttaacttggatgagtgcctcgttcttcctca

SEQ ID NO: 92611 - DNA, 600 bp, Chicken  19866894409857_3
agccaatttcagattttcatatcagcacaactgctaggattaggactcatcaacagaagtagtactggatagaaaaacatttacaggaccctttatggagaattatgttgctcttttgatggacttacatgactccaggaactttgaaatggactttgaaatgaactttgaatgractttgaaaggagaagaatctttttcttcagttcattaaattttgtgctagttattcctcttgtatccawtagaagtcctgacgacctacaacagaggctgcctcttcatcagctgatttgccaygtcctgccagggtgtgtctttgaagaaggtagactccagaaatatcaggaaatccttctgtgacagttctcaggcaacaragagaggaatcattcaacaaaagcttaattgtgaaggaggtctggagaaaccctaggagatgctgtaccatttcatgtcccattgaccctacctctgataagaccactcttttctacgttccagtttttttctcttaacttggatgagtgcctcgttcttcctcaacagcatcgtacttcatcctttatctggtagttcaatgctttatgcctgtagctc

SEQ ID NO: 92612 - DNA, 600 bp, Chicken  19866894409857_4
ttacaggaccctttatggagaattatgttgctcttttgatggacttacatgactccaggaactttgaaatggactttgaaatgaactttgaatgractttgaaaggagaagaatctttttcttcagttcattaaattttgtgctagttattcctcttgtatccawtagaagtcctgacgacctacaacagaggctgcctcttcatcagctgatttgccaygtcctgccagggtgtgtctttgaagaaggtagactccagaaatatcaggaaatccttctgtgacagttctcaggcaacaragagaggaatcattcaacaaaagcttaattgtgaaggaggtctggagaaaccctaggagatgctgtaccatttcatgtcccattgaccctacctctgataagaccactcttttctacgttccagtttttttctcttaacttggatgagtgcctcgttcttcctcaacagcatcgtacttcatcctttatctggtagttcaatgctttatgcctgtagctctttataaaaaaaaaataaaaatgttttggatttgagtgtggtggattacaaggagtagattgctcatttatgtgagctct

SEQ ID NO: 92613 - DNA, 600 bp, Chicken  19866894409857_5
cctcgttcttcctcaacagcatcgtacttcatcctttatctggtagttcaatgctttatgcctgtagctctttataaaaaaaaaataaaaatgttttggatttgagtgtggtggattacaaggagtagattgctcatttatgtgagctctcttccccttagggccactgcacagataatttttccatttagtatgttgttttatcattgcctttacaaatcatgcagttgactgcacgggagaagttgccaaatgaatcctgctgtacagaaatagttaaacaccttaagattgttgacwgtgccagtgttgggctaatgagaggacctgctcatatccatgaaaatgaggaagaaaaaagtcagaattgtagcttgaattccatacttagtttgaaatttctagttatggcagcatatttttgtacatagaattattaatctttggcaagcccttctgtgtctaaacacttttgggtgggctaaggatgaagtttcagtttaactcagaattttcttgcttttgtggttttaaacttcagattgtaataacatttcacgagcatcaatttatatggtacagttatttgtagaaaatgtt

SEQ ID NO: 92614 - DNA, 599 bp, Chicken  19866894409867_1
  misc_feature (1)..(1): n is any nucleotide
ntgaggatttgaaagaatcatctcacctttgaacacacttcaccttcaggaatgttcatcttttaacagctgtgtaggaatgactagaaggaagaatgtcaggaaggaggacggaaagagctcttggactcaatattgtatcttaactgtgatgttactgatgggaatgtgatttcttgtctcctcatctctgtaagtgatatatgacttctgcataggctgctcagtgtcttttctgcgttgcttccagaacaagagctcagctctgtgaggaagggctgacataatgagatgcaagtyctgaaaatcctttttagtggcagtgggcaggaaaaatacttcaatttgggtcaagatayaaggctggactaaagtatatggtttttggattactgagtgctccttaggaataattcaagtgcattgtgggggaaacagtgcttaggtgacattagagtagctgaaggacagcaaaaagattaccttaactttgaggacaaccatacagttgcctacctttgcactcytatatttggcccagtttaaaatgtcagagaacaagccatgtgaatatgccaggtaacctattttgcagaatt

SEQ ID NO: 92615 - DNA, 600 bp, Chicken  19866894409867_2
cttttaacagctgtgtaggaatgactagaaggaagaatgtcaggaaggaggacggaaagagctcttggactcaatattgtatcttaactgtgatgttactgatgggaatgtgatttcttgtctcctcatctctgtaagtgatatatgacttctgcataggctgctcagtgtcttttctgcgttgcttccagaacaagagctcagctctgtgaggaagggctgacataatgagatgcaagtyctgaaaatcctttttagtggcagtgggcaggaaaaatacttcaatttgggtcaagatayaaggctggactaaagtatatggtttttggattactgagtgctccttaggaataattcaagtgcattgtgggggaaacagtgcttaggtgacattagagtagctgaaggacagcaaaaagattaccttaactttgaggacaaccatacagttgcctacctttgcactcytatatttggcccagtttaaaatgtcagagaacaagccatgtgaatatgccaggtaacctattttgcagaatttaaaggtaacaaagtgttcagttgatggggcacaaccataaagaggaactgaatcaatag

SEQ ID NO: 92616 - DNA, 600 bp, Chicken  19866894409867_3
tgtcttttctgcgttgcttccagaacaagagctcagctctgtgaggaagggctgacataatgagatgcaagtyctgaaaatcctttttagtggcagtgggcaggaaaaatacttcaatttgggtcaagatayaaggctggactaaagtatatggtttttggattactgagtgctccttaggaataattcaagtgcattgtgggggaaacagtgcttaggtgacattagagtagctgaaggacagcaaaaagattaccttaactttgaggacaaccatacagttgcctacctttgcactcytatatttggcccagtttaaaatgtcagagaacaagccatgtgaatatgccaggtaacctattttgcagaatttaaaggtaacaaagtgttcagttgatggggcacaaccataaagaggaactgaatcaatagacctatttgagtcagacctgctgaactgcaagaagtgatttactgctcttcagtttttgaagaaaggtactgtatcttatgcttctttcattatgccacagtctgtcaaccaacacataagcatacctaaacattctctcgataatgatagagatggcaataaaggaa

SEQ ID NO: 92617 - DNA, 471 bp, Chicken  19866894409876_1
attttcatgtgtaaatatctctattatatcataacactatggtaaaaatcttcattgcattcagttaacatctgtattaaactgtaatccattaatttcctttcatgtctgcattgtcttcccatgaggagactttgtttgagtttgtcctgcagagttgaaagggagataggggttttctgagtaaactcttttgtttgtcttgaaagtcagcaattcttttaccatctgttggtgcttggtgaaggtatgagaaagtttactgtctgtttcctgttatttttttcttcgctgctttcyttactagctatttacattttccattgataaagcaatttttttattgtaaaacccctagaaaatgccttgcaacaagtaagtctgacaaagcaccctttgagcaattcaggtatgcagtaaaaatagcattgtctccatataggatggcacaagttagtctcggatggggct

SEQ ID NO: 92618 - DNA, 600 bp, Chicken  19866894409877_1
cactcacaggtggagcagggcaggccagagacaaacttagacctcctggctgagaggatggaaaaggggcagaaaaatgtagaaagctgcagagaagaaaaaacaagaatctgcaatttaaatcctttcatccctgaggggctaatagaacaactgcttgcaattgcattagtgcattttaatacgttaactgtcccccagctgctggtaactgccccatcagctggagtgtggtctgctgaccattcacttctgctgctctacaacacaaagtcagacaggacccctcgagagccttasgtaaacaaagattaaatcacacagcaacacactgggcacagagtcaaggccagttgtgattatctgagccccagggtggtagctggctgatgcagtaggagggattttcttagagatgcartgaaattcacagcactgctgctgatgctsccttctcttcaaaaattttctcatgtaatttacaccaggtgtcagtgtacgtagaaaatattgggatgttaaggaagtcataacactggcagatgatattttacgtagtaatatgyatgctgaagacaatacgagtatctcccataagcg

SEQ ID NO: 92619 - DNA, 600 bp, Chicken  19866894409877_2
atcctttcatccctgaggggctaatagaacaactgcttgcaattgcattagtgcattttaatacgttaactgtcccccagctgctggtaactgccccatcagctggagtgtggtctgctgaccattcacttctgctgctctacaacacaaagtcagacaggacccctcgagagccttasgtaaacaaagattaaatcacacagcaacacactgggcacagagtcaaggccagttgtgattatctgagccccagggtggtagctggctgatgcagtaggagggattttcttagagatgcartgaaattcacagcactgctgctgatgctsccttctcttcaaaaattttctcatgtaatttacaccaggtgtcagtgtacgtagaaaatattgggatgttaaggaagtcataacactggcagatgatattttacgtagtaatatgyatgctgaagacaatacgagtatctcccataagcgactaccactcaacatgaataatagctgcaaggtcaggcccctaatgaacagttgtctagctgtgaatatatacactttttcacactgttgtaggcaatgatctctgatrcctaattaggtt

SEQ ID NO: 92620 - DNA, 600 bp, Chicken  19866894409877_3
caactgcttgcaattgcattagtgcattttaatacgttaactgtcccccagctgctggtaactgccccatcagctggagtgtggtctgctgaccattcacttctgctgctctacaacacaaagtcagacaggacccctcgagagccttasgtaaacaaagattaaatcacacagcaacacactgggcacagagtcaaggccagttgtgattatctgagccccagggtggtagctggctgatgcagtaggagggattttcttagagatgcartgaaattcacagcactgctgctgatgctsccttctcttcaaaaattttctcatgtaatttacaccaggtgtcagtgtacgtagaaaatattgggatgttaaggaagtcataacactggcagatgatattttacgtagtaatatgyatgctgaagacaatacgagtatctcccataagcgactaccactcaacatgaataatagctgcaaggtcaggcccctaatgaacagttgtctagctgtgaatatatacactttttcacactgttgtaggcaatgatctctgatrcctaattaggttgatccgtgaatatgattattcattacctg

SEQ ID NO: 92621 - DNA, 600 bp, Chicken  19866894409877_4
cacaaagtcagacaggacccctcgagagccttasgtaaacaaagattaaatcacacagcaacacactgggcacagagtcaaggccagttgtgattatctgagccccagggtggtagctggctgatgcagtaggagggattttcttagagatgcartgaaattcacagcactgctgctgatgctsccttctcttcaaaaattttctcatgtaatttacaccaggtgtcagtgtacgtagaaaatattgggatgttaaggaagtcataacactggcagatgatattttacgtagtaatatgyatgctgaagacaatacgagtatctcccataagcgactaccactcaacatgaataatagctgcaaggtcaggcccctaatgaacagttgtctagctgtgaatatatacactttttcacactgttgtaggcaatgatctctgatrcctaattaggttgatccgtgaatatgattattcattacctgaagtctcggagttcagtattatgtatctgtgcactgttccttaaataaaaagtctgtgaaattcccatatcaaataaggtgactgcaaagaaaaatgaggaatgcaaagaaaaaag

SEQ ID NO: 92622 - DNA, 600 bp, Chicken  19866894409877_5
ttagagatgcartgaaattcacagcactgctgctgatgctsccttctcttcaaaaattttctcatgtaatttacaccaggtgtcagtgtacgtagaaaatattgggatgttaaggaagtcataacactggcagatgatattttacgtagtaatatgyatgctgaagacaatacgagtatctcccataagcgactaccactcaacatgaataatagctgcaaggtcaggcccctaatgaacagttgtctagctgtgaatatatacactttttcacactgttgtaggcaatgatctctgatrcctaattaggttgatccgtgaatatgattattcattacctgaagtctcggagttcagtattatgtatctgtgcactgttccttaaataaaaagtctgtgaaattcccatatcaaataaggtgactgcaaagaaaaatgaggaatgcaaagaaaaaagcactgtttgtctcaggacattctatggaagtgtggaagtatggaaatttccacaaaaattcaccttgaacctggggttcaagatgcaagttgaagataaatttcaactgacagagccctcgcaaaagaaagtccagttcctgc

SEQ ID NO: 92623 - DNA, 599 bp, Chicken  19866894409878_1
  misc_feature (1)..(4): n is any nucleotide
nnnngctggcagtggtgtaggtgcaggcttatctctgttcaggtagtcacacttgattctaccaagaggactgttcatctcagtcaagtcttcgccacaagattccatggatttcatcttttatgtagagctacagcaatataacacatgatatctttacagatttacagatttacagattgatggagtgggtctagatgtgtcagaggaactcatttattaagacaagtaccgaaggcagaatgaatgttgaattcttttagctgacagtgaataaaggctgtagatttttttattttwttttttttttctcttgattcctacttgttctggtggtgtaaagtgggactcacccttgagatctggtgtctgaaccatccacttcggcacatactaaagaccaggagtgaagaaagtgcccaggtttcttttacataaagcacctctgatgtttctgcctaatgttaatgtacagtatggttgcagacatggtgcacacaccatgaacgacgaaatagatacaaccttaatgactttcatagatgtaactttaatgaccttcttaactgagtcaggagacctcaaggagcagccgaaaa

SEQ ID NO: 92624 - DNA, 599 bp, Chicken  19866894409884_1
  misc_feature (1)..(135): n is any nucleotide
nnnnnnnnnnnnnnnnnnnnnnnnnnnnnnnnnnnnnnnnnnnnnnnnnnnnnnnnnnnnnnnnnnnnnnnnnnnnnnnnnnnnnnnnnnnnnnnnnnnnnnnnnnnnnnnnnnnnnnnnnnnnnnnnnnnnnnnttctaatggattaattaaggagggcccatgattttctctctaaaatataaattctgtatttttcatgtctttcctatctaaatgatttcctatcacagtatccctacgtatagaggtacttccatattgctgatgtgaatggaggaggggtgcaacttagcaagkgacttcagaaggaactctcacatgagctgcacaaggrggttcacctgcatggggtgatatttggaatttcacagggcaagtgagaaatgtgaaggtctgctaacaaacaatgccttttttttctttccccattaacttgctttgtgtgcactctgtaggagcagaagtgtaaatgaataggagtaaaccacttacagttaaagaattatttttatttctctttggatattagcttttaataggtttatctttttaattcctagcaactttaatgtggagctgttgaatgagccttctat

SEQ ID NO: 92625 - DNA, 599 bp, Chicken  19866894409884_2
  misc_feature (1)..(98): n is any nucleotide
nnnnnnnnnnnnnnnnnnnnnnnnnnnnnnnnnnnnnnnnnnnnnnnnnnnnnnnnnnnnnnnnnnnnnnnnnnnnnnnnnnnnnnnnnnnnnnnnnnttctaatggattaattaaggagggcccatgattttctctctaaaatataaattctgtatttttcatgtctttcctatctaaatgatttcctatcacagtatccctacgtatagaggtacttccatattgctgatgtgaatggaggaggggtgcaacttagcaagkgacttcagaaggaactctcacatgagctgcacaaggrggttcacctgcatggggtgatatttggaatttcacagggcaagtgagaaatgtgaaggtctgctaacaaacaatgccttttttttctttccccattaacttgctttgtgtgcactctgtaggagcagaagtgtaaatgaataggagtaaaccacttacagttaaagaattatttttatttctctttggatattagcttttaataggtttatctttttaattcctagcaactttaatgtggagctgttgaatgagccttctatagaaatgcttatgtagagatttatggagttctggatc

SEQ ID NO: 92626 - DNA, 600 bp, Chicken  19866894409887_1
gcagcaggcctgcagccccgctgtgggaagtggtgaagcaaactgagggaactcccttgaccaggttgctgcacaactgggggacgagctgtgcaggccctaccatgggcaggcccgtgggtgctaggcattgcccactgagagctgggagtgttatcctaaactcgaaatggctgcaaacctgaggcagtgatgctttggtgcagtgctttggacggcctcatgctataagtatatgtttactttaaattcctgtttgcgtaactcaatcttccaaagcagcaagctgttatctcctcycattgaaatcagagatgcatgtgatttcccgtgccttcctgcatttgccgtaaggagctcactttctcctgcccaggggtacattttccatggcaccatggggtgtgaaggcacgctgtgatcactgaaacatggggcagccattgaggccttttggtgggttagcttcactcagcacagtcagtcatgaggttactctaagaggaatgataaagaaagtactagatgctgttatttctgcatcattttctgcccgtgttccctaagtcccacagaggccccctgcagcagcagcacagt

SEQ ID NO: 92627 - DNA, 539 bp, Chicken  19866894409899_1
agtgtgagacacagtggtagaagggagtttgggggagggagtggggttgtgatccaagctgtttggtaaggcaaagtgtaggcttgcaggtctttgtcagatgatccagggctcttttcactacaaatacagccagaattatatttaaatgcaggaaataagtgatttgcttataccacagatcaagcagtttttggaagtggaatacaaacccatgtgtgtaactggcggtgccttgtaagagctttcaagggctgctggttatttgtgacatttgtgttaatatgctgttttaagcartatttcaagcagtcatattacagatttatggcatctcagcattcccttaggtaggaacaccgatacatatccagcaaacatgcattgtgtacttcaggtacacgggtagctttggagtcgggaaggcacaacttgcctacaatgccaacagactcctggggcctgcagcacacttgggctgggagcgcaggtggaggtgcaagagaagtacacggtccatgaggacacaagctggggaa

SEQ ID NO: 92628 - DNA, 600 bp, Chicken  19866894409903_1
gttaagtatacaacatcatctttgactaaaaataacaagccatccatacacagtgtaccatattaatgtctaaatacttatttttcctaggaataatatcctgcttaggaagtggtaatgtgttcccaggagggggggcctttcagctgttctatgtaaggtttaaaagcttactgtattgtttagggaagtagaacaaacgcttgaaacaatttcttcctcatcaaggccaaaacaatttcaatggattcaaagtcttaatggctcggtacaaatctatgtgtgtctgatatatatatwtttttaattatttaaagttgctatacatggtagctaatgaaactgatctygcttccaacaggtcgttctgttttgttggaacagccacgcaagtcaggctctaaagtcattagtcacatgctcagcagccatggaggagaaatttttctgcatgtattaagcagctcacgatcaattctagaagatcccccatccattagtgaaggttgcggtgggagagttactgactaccggattacagtaagacttttagcttgttttcacatcgatgacaagagatgtagtgcaatgggtgttgtg

SEQ ID NO: 92629 - DNA, 600 bp, Chicken  19866894409903_2
cagtgtaccatattaatgtctaaatacttatttttcctaggaataatatcctgcttaggaagtggtaatgtgttcccaggagggggggcctttcagctgttctatgtaaggtttaaaagcttactgtattgtttagggaagtagaacaaacgcttgaaacaatttcttcctcatcaaggccaaaacaatttcaatggattcaaagtcttaatggctcggtacaaatctatgtgtgtctgatatatatatwtttttaattatttaaagttgctatacatggtagctaatgaaactgatctygcttccaacaggtcgttctgttttgttggaacagccacgcaagtcaggctctaaagtcattagtcacatgctcagcagccatggaggagaaatttttctgcatgtattaagcagctcacgatcaattctagaagatcccccatccattagtgaaggttgcggtgggagagttactgactaccggattacagtaagacttttagcttgttttcacatcgatgacaagagatgtagtgcaatgggtgttgtgtgttttggagattcgggggtggtttacatgacatcgtagtctgatttttc

SEQ ID NO: 92630 - DNA, 600 bp, Chicken  19866894409903_3
aggagaaatttttctgcatgtattaagcagctcacgatcaattctagaagatcccccatccattagtgaaggttgcggtgggagagttactgactaccggattacagtaagacttttagcttgttttcacatcgatgacaagagatgtagtgcaatgggtgttgtgtgttttggagattcgggggtggtttacatgacatcgtagtctgatttttctttgtgtacattgatgtatatttagtacaaagtagaacatctgtttattgtcacatgtgcttcatagaatcttttccatgttgmggaaacgcttgctgccttatgcactatccatatctaaactttgttctgattctgaaacagaattttcctggcaaggttttagcatgggctgggtacacstagaactgtatcatggtcattgttggaaggcttgattgtacgtgaatgagttgtaaaaataagtaggaaagatgaagttgtcagctttgaactctggatatagaacagacagtaagctggcatttttttttaacacttcctttgtatctaccgtatgtaagcaggagtgactcccagaaaaacatagtaaagcttcttacc

SEQ ID NO: 92631 - DNA, 600 bp, Chicken  19866894409903_4
gattacagtaagacttttagcttgttttcacatcgatgacaagagatgtagtgcaatgggtgttgtgtgttttggagattcgggggtggtttacatgacatcgtagtctgatttttctttgtgtacattgatgtatatttagtacaaagtagaacatctgtttattgtcacatgtgcttcatagaatcttttccatgttgmggaaacgcttgctgccttatgcactatccatatctaaactttgttctgattctgaaacagaattttcctggcaaggttttagcatgggctgggtacacstagaactgtatcatggtcattgttggaaggcttgattgtacgtgaatgagttgtaaaaataagtaggaaagatgaagttgtcagctttgaactctggatatagaacagacagtaagctggcatttttttttaacacttcctttgtatctaccgtatgtaagcaggagtgactcccagaaaaacatagtaaagcttcttaccatgcacaaaataccttacaagttcagaagactttctcattaaaaactccatgtcagtttttaacccctgttaatatgaatttctgtgttcacctcaaag

SEQ ID NO: 92632 - DNA, 600 bp, Chicken  19866894409917_1
tgcttgaatccacccctctccctgcagttggaggaaaagggacagagagagatgcaaaacacagagattgttctacttgggcacgtagagaccagaattcctgagtgcgcatcgtgcctgagtgctttggatggctgctgcttctggaagtaaatgcgataccaagccactaaattctttcaaatctctcttcagtatgacctcagtgctggcactgggatgtctgcgttttgtttctcccacctctgtctgctttttcactctcctttttgcagcacaggagccactgctatcgctgtygatcrgattaaaagaaaatgcggtcccactggagacttacggtcattgaggggaaaagaaaatagaaaaaaaagagagaacaaaaacctggaataagttggggtctcatctcctgggagatgagaggacagcaccgagagccctctgcagagtgggtgctgtttgggttgctcccaccctcagtgctgccccagycctctccttgtgctctgcatgggtctcattccttgctctgtctcaggtggaaagaaaccaaaggtgctgacttcataagggggaaaagagtcctttagggagaaa

SEQ ID NO: 92633 - DNA, 600 bp, Chicken  19866894409917_2
gaatccacccctctccctgcagttggaggaaaagggacagagagagatgcaaaacacagagattgttctacttgggcacgtagagaccagaattcctgagtgcgcatcgtgcctgagtgctttggatggctgctgcttctggaagtaaatgcgataccaagccactaaattctttcaaatctctcttcagtatgacctcagtgctggcactgggatgtctgcgttttgtttctcccacctctgtctgctttttcactctcctttttgcagcacaggagccactgctatcgctgtygatcrgattaaaagaaaatgcggtcccactggagacttacggtcattgaggggaaaagaaaatagaaaaaaaagagagaacaaaaacctggaataagttggggtctcatctcctgggagatgagaggacagcaccgagagccctctgcagagtgggtgctgtttgggttgctcccaccctcagtgctgccccagycctctccttgtgctctgcatgggtctcattccttgctctgtctcaggtggaaagaaaccaaaggtgctgacttcataagggggaaaagagtcctttagggagaaactctg

SEQ ID NO: 92634 - DNA, 600 bp, Chicken  19866894409917_3
tatgacctcagtgctggcactgggatgtctgcgttttgtttctcccacctctgtctgctttttcactctcctttttgcagcacaggagccactgctatcgctgtygatcrgattaaaagaaaatgcggtcccactggagacttacggtcattgaggggaaaagaaaatagaaaaaaaagagagaacaaaaacctggaataagttggggtctcatctcctgggagatgagaggacagcaccgagagccctctgcagagtgggtgctgtttgggttgctcccaccctcagtgctgccccagycctctccttgtgctctgcatgggtctcattccttgctctgtctcaggtggaaagaaaccaaaggtgctgacttcataagggggaaaagagtcctttagggagaaactctgatttaccaaactcttctgaaaaggcccgwggtgaatgccaaggtaacatttccataaaacttgacattccaggatgactcctagttaaaacattgctgacgatgatactccgttcctccagggaaggattcagattcctttatggcctgattgatatcatcttccttttctgtacatctgcctacttaat

SEQ ID NO: 92635 - DNA, 600 bp, Chicken  19866894409917_4
acttacggtcattgaggggaaaagaaaatagaaaaaaaagagagaacaaaaacctggaataagttggggtctcatctcctgggagatgagaggacagcaccgagagccctctgcagagtgggtgctgtttgggttgctcccaccctcagtgctgccccagycctctccttgtgctctgcatgggtctcattccttgctctgtctcaggtggaaagaaaccaaaggtgctgacttcataagggggaaaagagtcctttagggagaaactctgatttaccaaactcttctgaaaaggcccgwggtgaatgccaaggtaacatttccataaaacttgacattccaggatgactcctagttaaaacattgctgacgatgatactccgttcctccagggaaggattcagattcctttatggcctgattgatatcatcttccttttctgtacatctgcctacttaatctgttctcgtcgtagtagcaccacaagccaaagcatttctgtttctagatgccaagccttgcaatggtcatttgttcctcctcaggcttcaggaggaacaggacctggatgctttcctcatcccacagtcctggggtca

SEQ ID NO: 92636 - DNA, 600 bp, Chicken  19866894409923_1
ggcagggagtaaagaggggaaaagtgcacaagaacagctttactggagattttctgaataacttgcagttttttcaatgaacaggagtcattctgaaaatgattcccgtgtgtctaatacctgactgtcatctgctagaaatacagtctgttttttcttacgtaaagttttgcagagtacctttttagcactgcatgatgctgtatgcagaaagttatctcctcagctaatgaagtgtttaagttaggacgtgcagattcttgcttagtagcattgatttaaaccatatgcacatcagaytgatgcacacacrgtaatccccatgttttcattgtcactgcttaatgtttgttgtagcagcagttcgtattcaacaacttagacccgtatgtcttcatagcctacagaatgtcatgtagctcatggctccagaggagttttgctctttagacaggacagcatagcagtgttactgaacctgtgcatctttggtaagttcttggaagtgcaggaaagtgttttgcwtcagttaggccaagtgtaagaatatctgtgggggtgacagtgagtttaagtggtggactatcaaacataggcttc

SEQ ID NO: 92637 - DNA, 600 bp, Chicken  19866894409923_2
gaggggaaaagtgcacaagaacagctttactggagattttctgaataacttgcagttttttcaatgaacaggagtcattctgaaaatgattcccgtgtgtctaatacctgactgtcatctgctagaaatacagtctgttttttcttacgtaaagttttgcagagtacctttttagcactgcatgatgctgtatgcagaaagttatctcctcagctaatgaagtgtttaagttaggacgtgcagattcttgcttagtagcattgatttaaaccatatgcacatcagaytgatgcacacacrgtaatccccatgttttcattgtcactgcttaatgtttgttgtagcagcagttcgtattcaacaacttagacccgtatgtcttcatagcctacagaatgtcatgtagctcatggctccagaggagttttgctctttagacaggacagcatagcagtgttactgaacctgtgcatctttggtaagttcttggaagtgcaggaaagtgttttgcwtcagttaggccaagtgtaagaatatctgtgggggtgacagtgagtttaagtggtggactatcaaacataggcttctatttacaaccac

SEQ ID NO: 92638 - DNA, 600 bp, Chicken  19866894409923_3
gctaatgaagtgtttaagttaggacgtgcagattcttgcttagtagcattgatttaaaccatatgcacatcagaytgatgcacacacrgtaatccccatgttttcattgtcactgcttaatgtttgttgtagcagcagttcgtattcaacaacttagacccgtatgtcttcatagcctacagaatgtcatgtagctcatggctccagaggagttttgctctttagacaggacagcatagcagtgttactgaacctgtgcatctttggtaagttcttggaagtgcaggaaagtgttttgcwtcagttaggccaagtgtaagaatatctgtgggggtgacagtgagtttaagtggtggactatcaaacataggcttctatttacaaccacagctgtcaaatgcaattgttcatgatctaaagggcacaaaagaagcaaataccacaactcagagttctaggaagagcgcgagcttcgaatacaaaattctgaatacggctgtcttggcagttactttaatctcttggaacttgccctccttttctgctttcattctaggaaaaagtcaaacttattgcagaattgctaccttcacgtgttaa

SEQ ID NO: 92639 - DNA, 600 bp, Chicken  19866894409926_1
gcttccctattcatattaagctgttgaactccttttaaaaaggaaaaaggaggggggagggggtgaagcgagctgagtgtttccattgcggggcagctgtgttacgttgtgcccagcagcgctggtgcaggggatgaagggttggatgtccggccagatctccccaacagatttctctgggttgctggctggagctcggttactaaatagtgctgaggacacgatcccatagagggcagcagaccagaaaatgaaaggcttcagtggcttttaggctttgagttccttgaaaaaagacasgggacaaaaaaccatgacccggggatgccattcagccgtctcttctgctgacctcagctcacggtgcactgaaatcaccaacagccccaagccactgtccctctcccaccccatcagacaagccctcggtggtcctgcagcctcgttcctccagcagcaggctcagaaatcatcctacagaatgacacgcacactctgtggttggtagtgaggctcrcagggccgtggcagcagcttggcactgctgtctgggtctggcttggctgcagttagcagcacagctcctggaagcagggagct

SEQ ID NO: 92640 - DNA, 553 bp, Chicken  19866894409926_2
gacacgatcccatagagggcagcagaccagaaaatgaaaggcttcagtggcttttaggctttgagttccttgaaaaaagacasgggacaaaaaaccatgacccggggatgccattcagccgtctcttctgctgacctcagctcacggtgcactgaaatcaccaacagccccaagccactgtccctctcccaccccatcagacaagccctcggtggtcctgcagcctcgttcctccagcagcaggctcagaaatcatcctacagaatgacacgcacactctgtggttggtagtgaggctcrcagggccgtggcagcagcttggcactgctgtctgggtctggcttggctgcagttagcagcacagctcctggaagcagggagctcctgtggtccctctggagccagggggcagtgatgctgtgtgcaggtgatgccttggaatgggaaatggcttcttgactttgaacaatgttccctttaaatgtggctgtaaccctctgacttacagaaattgttcccatctgtgcaaggagctgtaattttatacagagga

SEQ ID NO: 92641 - DNA, 600 bp, Chicken  19866894409938_1
ggagcagacacatgtgtcaagttcttgagctgtcaaggctcaaagcgacagtttatctggagggtttaaaacatccccgccaagtttccccttcttcccttcccactgcccttgttgacaatccgcttgaaagatgacagatgctgtgggagcagttttctttagacttgctttaattccacaaggtgcaatacaccgaatgcaatgctgcccactgttaaaatgccaagctgagaatcaaggcatgctgttggagggagaagaggcattccctcacgctgacgtgtatttccagataamtttgatgctctcactctaccatcctaattttctttgcccacagtaaacgcattacatggacgttcctggagaaaacaaagaattttgcagctgggatgaggtttgtcaagccactcttcaaccatgtttagctgaatatttcataccactctaacacaacgctgaacactgacatgctcagtatgaaatatttcctctcacatcattctagcctaacagcactgtagggttgtttgtagatttgtttgcatgaaaatgagatctatctcgtaagcagaactgaattgcttatgagagcat

SEQ ID NO: 92642 - DNA, 600 bp, Chicken  19866894409947_1
aaaacaaatacattcatattgccgtgcactaatcacaccacacactctacagacgtgtttaaatacggcccttggaccaagtaacagcaactcacttcaatattacaaaaacattcaaaacggcttcagagaccacgagcgaaaaggaatggaaaacaaacagtaaaacaaacaaacgttacatgcttcaagacttctttttgcagcacagatatacgggagagacataagaaggacaagttattttgtcaagtgaaaaaaaaaaacccacctgcaacaaaaaccacaactattttagaytgggaagaaaataagcatttttcttcacccaagtatatattaagaaggtatggagtaataaccgtgtgataatcaagttggtttttttcctctttgaataaagcaagtagaatagtagacatggcgtgtttattaaaggctttatgagtgactaagcctcatcttttcaatttattttatttacgtatttcttcagctctttgtaacttcagtatggctgatccctggattctattgtcagtgttcctcagcgataggtcacgagctctgtacgagggacctcattagggataagcagtg

SEQ ID NO: 92643 - DNA, 600 bp, Chicken  19866894409950_1
tcaaatggcaacgttctataaaatgagttagaaatgattacctactcagtttcattatgcaataaagtatttgtcatagattccaattaatttctaactgaaatgaatgggagccttctcagtgggataaagtcagtgctggtgtttgaaatgtctggtgtgtgtgaagaaaacaaataataataataataataaacactagaaaagcaacagattagcacagatatgtatttccagtcagtatatccccttatttccaggatatgttcttgatgtcattaatacaccgccattttttamaccaagtagctcacacaaagttaccacagactcacagaatggtgtaggttggaaggaaccacaaagcccacccagctcccagccgtgccatgggcagggctgcccgcaccagctcaggctgcccagggcccatctgacccggtatggagcacctccagggatggggcacgcacagctctgtgtctcacccaggtaccgacacgagcccgttctggccatgcagaactgcatcctcattttctcttctaccaactgatttcaaagcctaaatacgccacgctccaaacccagggggacgtg

SEQ ID NO: 92644 - DNA, 600 bp, Chicken  19866894409953_1
caacagtcttcgttataaacacatttttcaattttaattttcataccaggtagcatttgagtgaatgaatggacagctgcattgtttgaatagtgctataactgtacctgctgctgtacatacagcaggtgaaatattaatgcaccatgtctgaactaaagcagaatgaagaggtgacttggcacagcatttgtgaatattttgttattgccagaacatatgagactttttattttatttgcattaacttatatgtaaaagtatatttttagaggcaggtgcgggccttaggtatgtctrtgctagagtaaaaatctatctgaaacaattagttgttagaaatgttaaatggaagtactgctgtgtatcatttccctagtagaatttagaggtgcttgaagaaagttgtggagaaccagccgtaccagttcaaaggggctgagctctccttttaaaggtacttacacacaaggctggtggaatagcaggaatgcctgagttaaaagttattctgggtacctccacattgtgctgctgtatcacatattctatattaccttcagtgggactacacagaagttacagggctgatagtgagac

SEQ ID NO: 92645 - DNA, 599 bp, Chicken  19866894409958_1
  misc_feature (1)..(98): n is any nucleotide
nnnnnnnnnnnnnnnnnnnnnnnnnnnnnnnnnnnnnnnnnnnnnnnnnnnnnnnnnnnnnnnnnnnnnnnnnnnnnnnnnnnnnnnnnnnnnnnnnnatggctccccatctctgcacctcttccgtcggccttcagcacctcacaccttttctgtgggtcaagaattctctccttagggcaaaccgtgctgataagcccctcatttggggttttggcagtggggatgtttttggcagagttgcctgaagcattcagttctgctggaagatggtgccccaggcaaccaatggcaaacccyagggagggagaggagcaagggatgaggtgaggtagggacacccaaatgctttggataaggcgttacgtttctcaaagcagagaagaccacactttccccagcttggtagctgtgtgctttctctgagtctctctgtctttcctctttccccagggccagctttaaaaacagcatttctgaattgcatttttttcttgccaagagagcactgtcagtgagacaagagctggagatttccttcttcctggctataaactggctaacacatttcaggactaacacattcctaacctgtgctt

SEQ ID NO: 92646 - DNA, 600 bp, Chicken  19866894409958_2
gaggagcaagggatgaggtgaggtagggacacccaaatgctttggataaggcgttacgtttctcaaagcagagaagaccacactttccccagcttggtagctgtgtgctttctctgagtctctctgtctttcctctttccccagggccagctttaaaaacagcatttctgaattgcatttttttcttgccaagagagcactgtcagtgagacaagagctggagatttccttcttcctggctataaactggctaacacatttcaggactaacacattcctaacctgtgctttctcactgakttctgtagctatctcttccagmcatatgtgccaacaaaagagctgcagttaagaggaactatgcatttggaaaacagttattaccattcctcacttcttgccccaggatctgagagcttggtttagcaccagkgaggggacagagagagctgctctgtgagggacagacaataggatcagggatgcaacccctgagtatctgggcaagagctgagtgggtcttgtacccacagccgtggactaccacaatccagatccactcacaagcacacactgacgggacagttgtagtctgtaggg

SEQ ID NO: 92647 - DNA, 600 bp, Chicken  19866894409958_3
gtagggacacccaaatgctttggataaggcgttacgtttctcaaagcagagaagaccacactttccccagcttggtagctgtgtgctttctctgagtctctctgtctttcctctttccccagggccagctttaaaaacagcatttctgaattgcatttttttcttgccaagagagcactgtcagtgagacaagagctggagatttccttcttcctggctataaactggctaacacatttcaggactaacacattcctaacctgtgctttctcactgakttctgtagctatctcttccagmcatatgtgccaacaaaagagctgcagttaagaggaactatgcatttggaaaacagttattaccattcctcacttcttgccccaggatctgagagcttggtttagcaccagkgaggggacagagagagctgctctgtgagggacagacaataggatcagggatgcaacccctgagtatctgggcaagagctgagtgggtcttgtacccacagccgtggactaccacaatccagatccactcacaagcacacactgacgggacagttgtagtctgtagggtcaagggcagcatcctccccag

SEQ ID NO: 92648 - DNA, 600 bp, Chicken  19866894409958_4
tctttccccagggccagctttaaaaacagcatttctgaattgcatttttttcttgccaagagagcactgtcagtgagacaagagctggagatttccttcttcctggctataaactggctaacacatttcaggactaacacattcctaacctgtgctttctcactgakttctgtagctatctcttccagmcatatgtgccaacaaaagagctgcagttaagaggaactatgcatttggaaaacagttattaccattcctcacttcttgccccaggatctgagagcttggtttagcaccagkgaggggacagagagagctgctctgtgagggacagacaataggatcagggatgcaacccctgagtatctgggcaagagctgagtgggtcttgtacccacagccgtggactaccacaatccagatccactcacaagcacacactgacgggacagttgtagtctgtagggtcaagggcagcatcctccccagcaatgaacccagggaggctctgggaacaacctgctctcaaccagccagcccttctgtggcagaaacattcaattcttgagatatttttggcagcactttgccttaaaatga

SEQ ID NO: 92649 - DNA, 599 bp, Chicken  19866894409959_1
  misc_feature (1)..(143): n is any nucleotide
nnnnnnnnnnnnnnnnnnnnnnnnnnnnnnnnnnnnnnnnnnnnnnnnnnnnnnnnnnnnnnnnnnnnnnnnnnnnnnnnnnnnnnnnnnnnnnnnnnnnnnnnnnnnnnnnnnnnnnnnnnnnnnnnnnnnnnnnnnnnnnntggctgggatggagttttgatgctaaatcctgcagcctcccactccctgccttctctccctgctctcagctctgcagtcagcacagtgggacccatccgaggaaggtcagaattgggttttgtagtgagcaggtgggaatggctggagcagagcagyggtttgacagctgctctgacggcacaggatgtgagaactggaggaaagttcaagatggtgaaacatgaacatccaacacattgtcctttcacctcccctggacgtggctgtgctgcwgcaataactggagcagaaaggcagtgacccagacagggccaacgatgcatcgctgcagtgcccgcagcacagcctcagcaatcagcctgctcccatttccacagaagatgcaccatgccagggcactgggtaccagggagatgggcccagctatttcaggagtgagtttggcctggggctgg

SEQ ID NO: 92650 - DNA, 599 bp, Chicken  19866894409959_2
  misc_feature (1)..(26): n is any nucleotide
nnnnnnnnnnnnnnnnnnnnnnnnnntggctgggatggagttttgatgctaaatcctgcagcctcccactccctgccttctctccctgctctcagctctgcagtcagcacagtgggacccatccgaggaaggtcagaattgggttttgtagtgagcaggtgggaatggctggagcagagcagyggtttgacagctgctctgacggcacaggatgtgagaactggaggaaagttcaagatggtgaaacatgaacatccaacacattgtcctttcacctcccctggacgtggctgtgctgcwgcaataactggagcagaaaggcagtgacccagacagggccaacgatgcatcgctgcagtgcccgcagcacagcctcagcaatcagcctgctcccatttccacagaagatgcaccatgccagggcactgggtaccagggagatgggcccagctatttcaggagtgagtttggcctggggctggtgctacttggaatgacgttggactcagtgacctgtagaagccacttgtttggcacctggttcagttgaaagcccaacctgcaaacagtaaagtcttggttgtcctacagaccagaac

SEQ ID NO: 92651 - DNA, 600 bp, Chicken  19866894409980_1
atatgggattggatttacaaatatggtggaaaggacaacacctggaagcaaagacctctccaggcaggataacacagtagaatatcatacttgttaaggaataaatggttacgattataatttcaagttatttcttcttttttttttttactttcagtaaagagtttcgagaaggagggcgaattctgatgcagaaattacagaagtataaacctcgtatagcagctttcaatggaaaatgtgagaatcttaatttggaatgaatttgttctattagtagcctttttttgtccactcatyccgtcccctcatttcaggtatctatgaaatttttagtagagaagtatttggaataagagttaagaacttggaatttggattgcagccccacaaggtaccagagacagaaactgtaagtactgagagcactcttctttggttatttcaaaactamtggagtcttagggcttacgcccacttacagtaatggcaaagtacaaggaatgtgaagggcttttacttaattagagaaaggaggattttacatcttttatacagcttaatcagactggcagatgttattttggaaatggcgtatag

SEQ ID NO: 92652 - DNA, 600 bp, Chicken  19866894409980_2
cagtaaagagtttcgagaaggagggcgaattctgatgcagaaattacagaagtataaacctcgtatagcagctttcaatggaaaatgtgagaatcttaatttggaatgaatttgttctattagtagcctttttttgtccactcatyccgtcccctcatttcaggtatctatgaaatttttagtagagaagtatttggaataagagttaagaacttggaatttggattgcagccccacaaggtaccagagacagaaactgtaagtactgagagcactcttctttggttatttcaaaactamtggagtcttagggcttacgcccacttacagtaatggcaaagtacaaggaatgtgaagggcttttacttaattagagaaaggaggattttacatcttttatacagcttaatcagactggcagatgttattttggaaatggcgtatagtgattagtagggttagttcatttttctgaagagtattgaaaatatgaattaaacacatgtgcatttgtaactgtcatctacttccgtctgattacctgtggccagttacttgtatgctaatattactgaattttaatgctgggagccacagctg

SEQ ID NO: 92653 - DNA, 599 bp, Chicken  19866894409987_1
  misc_feature (1)..(61): n is any nucleotide
nnnnnnnnnnnnnnnnnnnnnnnnnnnnnnnnnnnnnnnnnnnnnnnnnnnnnnnnnnnnnaaatgcctatacttcactgaggataaatcaatgcacaaatgagaaataactagctaaggcaatgtatgggagtaaagggtctcacactgtatgagtctttctcaggttcagtcatacctttgtcttaaaacttgttttccttcaattgcagaaggcccagatctccaactgtgataatttttcagtctgctcaattactttaacaagctgaaagaaacaaggaggcgagccactctcartgatatttaaaaagtcatggtggtcaggtgaaggactggtaaggcctcaaaaagaatactttttccattgatgagttaacagtcttaaaataagatgtggaaaaaaatacatcacagtccaggagagagcctgaagacagtgcagggatttaagagatatgatctatcaggaaagcttgaaataacagtatttgcttggtctagatgagtcaaggctgagtcatgaaatgatcttgtttttaactctgttataaagagatggtgagcaattgttctctgggcaaggacaagatgacatt

SEQ ID NO: 92654 - DNA, 600 bp, Chicken  19866894409987_2
ttaaaaagtcatggtggtcaggtgaaggactggtaaggcctcaaaaagaatactttttccattgatgagttaacagtcttaaaataagatgtggaaaaaaatacatcacagtccaggagagagcctgaagacagtgcagggatttaagagatatgatctatcaggaaagcttgaaataacagtatttgcttggtctagatgagtcaaggctgagtcatgaaatgatcttgtttttaactctgttataaagagatggtgagcaattgttctctgggcaaggacaagatgacatttactcartttggatcaaaaaatatttaaactgtgtacttggaaacaattgctattgggatgcaaatacttgaacagtatacctrgaaaatgtcttctcactggctggctttaagaattataagcaaacaacagtcatagatagtcttcacatgatttggcctcagttaatgtagttgtttcatgtattgggctcttttcctctccttgcctatgtctatgatttgattgtgaaattttgcattacttcccatttgtaggtatgagaacaggagtaggacgcttttagactctcctctctctgtctta

SEQ ID NO: 92655 - DNA, 600 bp, Chicken  19866894409987_3
cttaaaataagatgtggaaaaaaatacatcacagtccaggagagagcctgaagacagtgcagggatttaagagatatgatctatcaggaaagcttgaaataacagtatttgcttggtctagatgagtcaaggctgagtcatgaaatgatcttgtttttaactctgttataaagagatggtgagcaattgttctctgggcaaggacaagatgacatttactcartttggatcaaaaaatatttaaactgtgtacttggaaacaattgctattgggatgcaaatacttgaacagtatacctrgaaaatgtcttctcactggctggctttaagaattataagcaaacaacagtcatagatagtcttcacatgatttggcctcagttaatgtagttgtttcatgtattgggctcttttcctctccttgcctatgtctatgatttgattgtgaaattttgcattacttcccatttgtaggtatgagaacaggagtaggacgcttttagactctcctctctctgtcttatgtaatgcataaggtgtctgagaaatcattgtagaattagtgtcttacatgtcataaaaggacacttattctcagca

SEQ ID NO: 92656 - DNA, 600 bp, Chicken  19866894409987_4
atgatttggcctcagttaatgtagttgtttcatgtattgggctcttttcctctccttgcctatgtctatgatttgattgtgaaattttgcattacttcccatttgtaggtatgagaacaggagtaggacgcttttagactctcctctctctgtcttatgtaatgcataaggtgtctgagaaatcattgtagaattagtgtcttacatgtcataaaaggacacttattctcagcaaaatgcagttgattcagtggagaactgctgcaatcatggggcacagtaggaacaaaagcagcactygaatccctagataaactcagctgaattactttaaatgctgagagtattattgtcagtttgttgctactaattacgaaagtataaagctcttttgcagtctgacattgtataagacaattttcaatctaaaattctttctagaagagatttgttgcttgaggcttgattgagtcctactgtgtggtaaatatagcagaggctgtgtgctattttgactcagctgaagagctaggctgaagatgttaggctcactgtgacccataggacatgccatttaatttcagttatgcaactctgctc

SEQ ID NO: 92657 - DNA, 599 bp, Chicken  19866894409992_1
  misc_feature (1)..(126): n is any nucleotide
nnnnnnnnnnnnnnnnnnnnnnnnnnnnnnnnnnnnnnnnnnnnnnnnnnnnnnnnnnnnnnnnnnnnnnnnnnnnnnnnnnnnnnnnnnnnnnnnnnnnnnnnnnnnnnnnnnnnnnnnnnnnnntggtttcctgccctgtgccacaggtgtgaggtgctgagtgtgtcccagctgtgagctgggcactgtgtggcctccattagcaggcagtgggctgagaggttcttgctcatacagaggccccctgggcagctgcaggcttccttcttgtccttcaggaggatgagaagcgctgtragttacgccatattactcctagggaaggaaatgagtgatgawgtgcacacggggtttgtgagcctccagccttgtatcagtgctggtattcaaactatgcgcagcgtatcagagagaaggaaagtatttcctcctatctgtgcctgcctttcttctcggctttgatacaaagataaggctgtgccctaatgaatcgctgttatgggagatagtaagattgattaacctattactgagtgaataggtcagatgcccgaagtacagaggcagacttcaactcggatagctgtcagctgtgc

SEQ ID NO: 92658 - DNA, 599 bp, Chicken  19866894409992_2
  misc_feature (1)..(84): n is any nucleotide
nnnnnnnnnnnnnnnnnnnnnnnnnnnnnnnnnnnnnnnnnnnnnnnnnnnnnnnnnnnnnnnnnnnnnnnnnnnnnnnnnnnntggtttcctgccctgtgccacaggtgtgaggtgctgagtgtgtcccagctgtgagctgggcactgtgtggcctccattagcaggcagtgggctgagaggttcttgctcatacagaggccccctgggcagctgcaggcttccttcttgtccttcaggaggatgagaagcgctgtragttacgccatattactcctagggaaggaaatgagtgatgawgtgcacacggggtttgtgagcctccagccttgtatcagtgctggtattcaaactatgcgcagcgtatcagagagaaggaaagtatttcctcctatctgtgcctgcctttcttctcggctttgatacaaagataaggctgtgccctaatgaatcgctgttatgggagatagtaagattgattaacctattactgagtgaataggtcagatgcccgaagtacagaggcagacttcaactcggatagctgtcagctgtgctttttatgttcccccctccctaaaatagcttttatatctaca

SEQ ID NO: 92659 - DNA, 600 bp, Chicken  19866894410003_1
tgatgctgttctctatcttgattatcttgattatcttcctttagccaggtaactaacttgtcctaacagcactggcacaacacagtattcaggacagcaaggactccatgtgtagctgctgccatgcccttgcattgctcactactcttgatcctccctcaaaagcactacgggatgcttccaggaagcacaccatacgtaaggacacacaaacacaaatgacaggcaatggctgccttctgagagacttgttctaatgatactcttccatcttgcctagaaaaaacgaagaagaaaaasatgaaggttagaggaaagcataccttgaatacaaaacagtgctaggtaaaactttagcacagatgaagcgaagattttggaatagactttatctttgtaatgttccccgtaaggactgagagcatttttcctccagtggaattctagatcttatgttcaggtgacgataaaatactgtttggtcattgtaaggtttaagcatagtagacttcctacattagtatgtctcactgactgaggcctatgcaaaacaaaacaaaacaaaacaaaaaaaccctacaatgttcttggcagttcaaa

SEQ ID NO: 92660 - DNA, 599 bp, Chicken  19866894410006_1
  misc_feature (1)..(152): n is any nucleotide
nnnnnnnnnnnnnnnnnnnnnnnnnnnnnnnnnnnnnnnnnnnnnnnnnnnnnnnnnnnnnnnnnnnnnnnnnnnnnnnnnnnnnnnnnnnnnnnnnnnnnnnnnnnnnnnnnnnnnnnnnnnnnnnnnnnnnnnnnnnnnnnnnnnnnnnnaatttccatctattttaaattctgcttgcattgagagagcacagacagaagctttgcctttcattgcagtttcagcaaagctcggactcaaaagctgaaatagccttctatcgggcacattttcttatctgatatccctaaactgcaygttaaagctgggtgggaagaygctgtctatggggtttcacatatattatggaaaagatgtgacacgaagcttaaacctcagctacacagactagtgctagcagacatgccagctaccttgcacatttcttccagcagctgaattttattatcctaattcccctagaattgtaagaacctacaagtcaaaaaaggctggagatagctttgcagagataargactggggtgatttttcttgctgttgcctgactgtagctgagaaaatcctaccatctgctggagaaaagaaaacctgctc

SEQ ID NO: 92661 - DNA, 599 bp, Chicken  19866894410006_2
  misc_feature (1)..(131): n is any nucleotide
nnnnnnnnnnnnnnnnnnnnnnnnnnnnnnnnnnnnnnnnnnnnnnnnnnnnnnnnnnnnnnnnnnnnnnnnnnnnnnnnnnnnnnnnnnnnnnnnnnnnnnnnnnnnnnnnnnnnnnnnnnnnnnnnnnnaatttccatctattttaaattctgcttgcattgagagagcacagacagaagctttgcctttcattgcagtttcagcaaagctcggactcaaaagctgaaatagccttctatcgggcacattttcttatctgatatccctaaactgcaygttaaagctgggtgggaagaygctgtctatggggtttcacatatattatggaaaagatgtgacacgaagcttaaacctcagctacacagactagtgctagcagacatgccagctaccttgcacatttcttccagcagctgaattttattatcctaattcccctagaattgtaagaacctacaagtcaaaaaaggctggagatagctttgcagagataargactggggtgatttttcttgctgttgcctgactgtagctgagaaaatcctaccatctgctggagaaaagaaaacctgctccggtttccatagctgtaattt

SEQ ID NO: 92662 - DNA, 600 bp, Chicken  19866894410006_3
agtttcagcaaagctcggactcaaaagctgaaatagccttctatcgggcacattttcttatctgatatccctaaactgcaygttaaagctgggtgggaagaygctgtctatggggtttcacatatattatggaaaagatgtgacacgaagcttaaacctcagctacacagactagtgctagcagacatgccagctaccttgcacatttcttccagcagctgaattttattatcctaattcccctagaattgtaagaacctacaagtcaaaaaaggctggagatagctttgcagagataargactggggtgatttttcttgctgttgcctgactgtagctgagaaaatcctaccatctgctggagaaaagaaaacctgctccggtttccatagctgtaatttcatcttcctgtatctcacgtgcccttgtctcatttttgctttggttctccttttctttgtttcattatcatrtgtgcacagcaatttggctgcgtcgttctgtgttggtgtctcagatattcactctaccctttaactcccgctgctgtctcacagtgaggcagacacagcctcatctcatttgtactaactagaagct

SEQ ID NO: 92663 - DNA, 600 bp, Chicken  19866894410006_4
agtgctagcagacatgccagctaccttgcacatttcttccagcagctgaattttattatcctaattcccctagaattgtaagaacctacaagtcaaaaaaggctggagatagctttgcagagataargactggggtgatttttcttgctgttgcctgactgtagctgagaaaatcctaccatctgctggagaaaagaaaacctgctccggtttccatagctgtaatttcatcttcctgtatctcacgtgcccttgtctcatttttgctttggttctccttttctttgtttcattatcatrtgtgcacagcaatttggctgcgtcgttctgtgttggtgtctcagatattcactctaccctttaactcccgctgctgtctcacagtgaggcagacacagcctcatctcatttgtactaactagaagctttgcgcagggaaaaaaaagctgacttcaacatatttttattacttcttgagatataaggtgactagatctagcgtgtttctgagaagcaggcttttcgtgctggctggaacaggtgatggtcatgctaagccaggcctgccaacctggtccctcaacatagctcatatggtga

SEQ ID NO: 92664 - DNA, 599 bp, Chicken  19866894410009_1
  misc_feature (1)..(107): n is any nucleotide
nnnnnnnnnnnnnnnnnnnnnnnnnnnnnnnnnnnnnnnnnnnnnnnnnnnnnnnnnnnnnnnnnnnnnnnnnnnnnnnnnnnnnnnnnnnnnnnnnnnnnnnnnnntttcaatacacagaattgcacctgccccaaaaccaactttctccttgtagatctcagtgtgtgaggagggccagaagagaagggcaagagctgaacctaagggtctttctgcaacttcgtgagtgtgaagggatatggaaatatattggaaagtttgaactgctgttatatagcttttcctgatgtgaaacayccaggtctcaaygacagcaaagtctaaaagcgagttgctggtgacatgtgatggaagaacttgcatcacatagatagaatttgtgaaaagtttactcgtgaaaaatctcttaactatagccctgctataattcataccactgtctggaagggggtaaaaagtctactttcgtgggggatgatcaaggatttaatgcaagcacagtactaccractacactttcttcaagaaatgtagaaataggacccaaatgtgtgagcactgtgctgggaagggagcaggcaggatttttgagtgtg

SEQ ID NO: 92665 - DNA, 599 bp, Chicken  19866894410009_2
  misc_feature (1)..(95): n is any nucleotide
nnnnnnnnnnnnnnnnnnnnnnnnnnnnnnnnnnnnnnnnnnnnnnnnnnnnnnnnnnnnnnnnnnnnnnnnnnnnnnnnnnnnnnnnnnnnnnntttcaatacacagaattgcacctgccccaaaaccaactttctccttgtagatctcagtgtgtgaggagggccagaagagaagggcaagagctgaacctaagggtctttctgcaacttcgtgagtgtgaagggatatggaaatatattggaaagtttgaactgctgttatatagcttttcctgatgtgaaacayccaggtctcaaygacagcaaagtctaaaagcgagttgctggtgacatgtgatggaagaacttgcatcacatagatagaatttgtgaaaagtttactcgtgaaaaatctcttaactatagccctgctataattcataccactgtctggaagggggtaaaaagtctactttcgtgggggatgatcaaggatttaatgcaagcacagtactaccractacactttcttcaagaaatgtagaaataggacccaaatgtgtgagcactgtgctgggaagggagcaggcaggatttttgagtgtgtacttcactcat

SEQ ID NO: 92666 - DNA, 600 bp, Chicken  19866894410009_3
tttctgcaacttcgtgagtgtgaagggatatggaaatatattggaaagtttgaactgctgttatatagcttttcctgatgtgaaacayccaggtctcaaygacagcaaagtctaaaagcgagttgctggtgacatgtgatggaagaacttgcatcacatagatagaatttgtgaaaagtttactcgtgaaaaatctcttaactatagccctgctataattcataccactgtctggaagggggtaaaaagtctactttcgtgggggatgatcaaggatttaatgcaagcacagtactaccractacactttcttcaagaaatgtagaaataggacccaaatgtgtgagcactgtgctgggaagggagcaggcaggatttttgagtgtgtacttcactcataatgtttttagctttcaaaatgatgtagagaaactagcattcagctgcagaatatcaaagcactgacaaaaagaaaatgactgaattcctttcagtgaacatcagcgaacttctgcacaaggcagaagcagtaggtagtattctgacttcagtaagattttccacgtcttacaagatgctgtcacagacaaggaaaattag

SEQ ID NO: 92667 - DNA, 599 bp, Chicken  19866894410023_1
  misc_feature (1)..(7): n is any nucleotide
nnnnnnnaaattacccgtgttcgttcccaatggagcagcagttcagcttctcagccgcgcagacagacagaactgcagcccttgcttcagctcagccacattatccaaatttgtgtcctaggatttaacagtgatggatttgagcaagagatctatttcaacatgaactggaaaacaggtgggtttttttgtttgtttgtttgttttggcaatgctctcaagtacctttatctaaagaaacccacctttggcatcccgtaccagaatacgatacactaattctcaaaatccataattttrcaytgtagcagtgtcaccagaacttcttcagcatcaaaagctgcagcaggctgtaactaaactaacccagcagcagccagtatttgcatgcaaacttgtgacycttcctgaggacgctggctatgcttcccagatcagcaagcagagaacggggccttgaacacctacacatacagcctcaaaaggatgcagctaagcacacacagcggacacttaaattgggcatgaagccatatgactggctgaacatcatagtggtgtaactcgtccacatcatgttttaarcaattttccctccc

SEQ ID NO: 92668 - DNA, 599 bp, Chicken  19866894410023_2
  misc_feature (1)..(4): n is any nucleotide
nnnnaaattacccgtgttcgttcccaatggagcagcagttcagcttctcagccgcgcagacagacagaactgcagcccttgcttcagctcagccacattatccaaatttgtgtcctaggatttaacagtgatggatttgagcaagagatctatttcaacatgaactggaaaacaggtgggtttttttgtttgtttgtttgttttggcaatgctctcaagtacctttatctaaagaaacccacctttggcatcccgtaccagaatacgatacactaattctcaaaatccataattttrcaytgtagcagtgtcaccagaacttcttcagcatcaaaagctgcagcaggctgtaactaaactaacccagcagcagccagtatttgcatgcaaacttgtgacycttcctgaggacgctggctatgcttcccagatcagcaagcagagaacggggccttgaacacctacacatacagcctcaaaaggatgcagctaagcacacacagcggacacttaaattgggcatgaagccatatgactggctgaacatcatagtggtgtaactcgtccacatcatgttttaarcaattttccctcccaag

SEQ ID NO: 92669 - DNA, 600 bp, Chicken  19866894410023_3
tccaaatttgtgtcctaggatttaacagtgatggatttgagcaagagatctatttcaacatgaactggaaaacaggtgggtttttttgtttgtttgtttgttttggcaatgctctcaagtacctttatctaaagaaacccacctttggcatcccgtaccagaatacgatacactaattctcaaaatccataattttrcaytgtagcagtgtcaccagaacttcttcagcatcaaaagctgcagcaggctgtaactaaactaacccagcagcagccagtatttgcatgcaaacttgtgacycttcctgaggacgctggctatgcttcccagatcagcaagcagagaacggggccttgaacacctacacatacagcctcaaaaggatgcagctaagcacacacagcggacacttaaattgggcatgaagccatatgactggctgaacatcatagtggtgtaactcgtccacatcatgttttaarcaattttccctcccaaggattactatagccaaaggatgaaaaatgagatcatcagcttttacagatactctcccagctttttaaaccgaaatgactgcagtgcaaaaggttcctagct

SEQ ID NO: 92670 - DNA, 600 bp, Chicken  19866894410023_4
aaatccataattttrcaytgtagcagtgtcaccagaacttcttcagcatcaaaagctgcagcaggctgtaactaaactaacccagcagcagccagtatttgcatgcaaacttgtgacycttcctgaggacgctggctatgcttcccagatcagcaagcagagaacggggccttgaacacctacacatacagcctcaaaaggatgcagctaagcacacacagcggacacttaaattgggcatgaagccatatgactggctgaacatcatagtggtgtaactcgtccacatcatgttttaarcaattttccctcccaaggattactatagccaaaggatgaaaaatgagatcatcagcttttacagatactctcccagctttttaaaccgaaatgactgcagtgcaaaaggttcctagctcctccgccatgcagctgtttgagtactgacatttttccttatcagctcttgcggccagtctgtctgctggggatcgagtgctcctgctcagtcatttgctgcccttctgcaagccaatcctctgtaaggaggctgcaggcaaatggcttctcttcccccctgctaggaagaaggcagttcta

SEQ ID NO: 92671 - DNA, 600 bp, Chicken  19866894410026_1
ttgcaaaaaatgcatcacaacaacagtgcagtacctagacaacactttcccacttacgatatagtccaaaatctatcggccttggcttacaagtcacttggcttggaattaggtctgaatgtttttttctcattcgaagagtagttctgctattttactcagggctctccaaaagatttcatctgtgttctcacatctgctcccttctgccaggaacacgtctgctgggatgtcctgtcaagtaactcacacgttaccagttagagagcgacactcacttgtaaccatagtgagggaacsaaggcaaacagccttggaagatcaagtaagccatgcagctcttttggcagaccatgtcttacagtgcagcttgttgaacacaaaagagaaaaatatatctttcagaaatatttctctgcaacctagagctaagagatatggatacaggcactaattaccgatgggttgctaaagtgtgaaagtgcctcaaagctgacttgctttaattgctcttcttcctgcagtaaattcttcttctccaggttggcagtttacccctcatttacttgctgaagaggaaactctctcatgtgtgcctca

SEQ ID NO: 92672 - DNA, 600 bp, Chicken  19866894410027_1
tttgtttttgtgcccatagctgctgcatttgggcatgttctcacttgctgcagcctgggactttgcttccccactatcactgttgtgtttcccattgcattacagagttacagcaaccacttcagagaactcaactaaaactgcataatgctggtgaagcttataacagcacattcaattttaatctcctgaattcctgagtaactccacagtggttttctgtgtgccgtcagaagcaggttcagactgcctggaatgctcctagaacaaaactcacagggctcacactaccaatttacygggcttcaattgatatatttctgtgctagaatcattttgtaatgggaaaaaaaccaaaaaatcccacaacgaactgcgattcctgagtacgcctccttacctcagagccaatcttggcgccatgcagagcgccgcacctccgcccctcagcagcccccgcgtggctgccctcggcgtacccctcctggtagccctccccgtggaacctgcaaggacagatgcacggctatacgccttcctcttcgtttcgcgccgccatcgcgggccggcccggcgctccctccctccctgcagccggca

SEQ ID NO: 92673 - DNA, 599 bp, Chicken  19866894410032_1
  misc_feature (1)..(54): n is any nucleotide
nnnnnnnnnnnnnnnnnnnnnnnnnnnnnnnnnnnnnnnnnnnnnnnnnnnnnnctctgcactgtctttgtgctttgcaggagcaggtaggactctttcagcaccaggagttccagtgttggtgcagcagagcttagcctgaaaacacatgaatctgaaatgctaaagaaaggaaaagcacaggaatactgacagaatgttttcacactaagtatagaaccatttagggggaactgcatacttgcctctccagcccagcccctctctgacagcttctgacctcttgggctttgcagagaygccaaatctcacatttctgccatgggttttattctccctcatgccacacttaccacttacattgtgtgcatcccaaccatcccttgcaagcagagagttggttcaactctgtgatacagagcaaaccagaaatcatctcycatkccatccaccagctgaccatgaacaactgcaagtccttagagagctttcccagcccctcccacctgggagcagttttgcattctctgcacttatttgcccacttctttcatgccacagaggaacactgggaagtgatgctgaactggaccgggatg

SEQ ID NO: 92674 - DNA, 600 bp, Chicken  19866894410032_2
gaaaacacatgaatctgaaatgctaaagaaaggaaaagcacaggaatactgacagaatgttttcacactaagtatagaaccatttagggggaactgcatacttgcctctccagcccagcccctctctgacagcttctgacctcttgggctttgcagagaygccaaatctcacatttctgccatgggttttattctccctcatgccacacttaccacttacattgtgtgcatcccaaccatcccttgcaagcagagagttggttcaactctgtgatacagagcaaaccagaaatcatctcycatkccatccaccagctgaccatgaacaactgcaagtccttagagagctttcccagcccctcccacctgggagcagttttgcattctctgcacttatttgcccacttctttcatgccacagaggaacactgggaagtgatgctgaactggaccgggatgctgcagtcctgcccaggagaggagctgagtgctggccatcaggtttgcaaggaccagactagactgcatcagattccgatgctctgaaaatctctctatgttcccaagggtgcrcatgggcatccctatgctgcagcataa

SEQ ID NO: 92675 - DNA, 600 bp, Chicken  19866894410032_3
acacatgaatctgaaatgctaaagaaaggaaaagcacaggaatactgacagaatgttttcacactaagtatagaaccatttagggggaactgcatacttgcctctccagcccagcccctctctgacagcttctgacctcttgggctttgcagagaygccaaatctcacatttctgccatgggttttattctccctcatgccacacttaccacttacattgtgtgcatcccaaccatcccttgcaagcagagagttggttcaactctgtgatacagagcaaaccagaaatcatctcycatkccatccaccagctgaccatgaacaactgcaagtccttagagagctttcccagcccctcccacctgggagcagttttgcattctctgcacttatttgcccacttctttcatgccacagaggaacactgggaagtgatgctgaactggaccgggatgctgcagtcctgcccaggagaggagctgagtgctggccatcaggtttgcaaggaccagactagactgcatcagattccgatgctctgaaaatctctctatgttcccaagggtgcrcatgggcatccctatgctgcagcataatatc

SEQ ID NO: 92676 - DNA, 600 bp, Chicken  19866894410032_4
atacagagcaaaccagaaatcatctcycatkccatccaccagctgaccatgaacaactgcaagtccttagagagctttcccagcccctcccacctgggagcagttttgcattctctgcacttatttgcccacttctttcatgccacagaggaacactgggaagtgatgctgaactggaccgggatgctgcagtcctgcccaggagaggagctgagtgctggccatcaggtttgcaaggaccagactagactgcatcagattccgatgctctgaaaatctctctatgttcccaagggtgcrcatgggcatccctatgctgcagcataatatctaagacagtcaccccactcatacaggagatgacaggatggatcttgcagcacaagctcagcctcaagtgctgcagccacttccccaagctccatccatattgctccagcaccagccccagagtttatgtacaccacagccttcctggctgctaggagcagggtgttggtgctccttgctgtatagcaagtggtttggggatgggaacaagctgctgcagccctcattcagcactagggctcagcagacttcgtgtagagccccacccca

SEQ ID NO: 92677 - DNA, 600 bp, Chicken  19866894410033_1
tctcccatttatgttaacacaaaaattcatgttgtcattaatggaaacagatttggatcttaagacttctgtcttctctgacaattcatagactgtggttctatcacggacaattgaatcatcaatccattccatagggcctgaaaacagtattccagcagtgaaatgttatataaaaatttccagcgtgccctggttaatgaaggtgtttatgttctgtgtcaaaagccataatcctgttgaagaacctacttactgcgtgacttgaacaaggcacagtttagatttttgcgtgcatayatgygcttaagatattttcagaaaactcctaaaagcttttgttgatttgaaagatctagtcttcccagtcacttgtgctccatcacgtcttactagtgtgctaccagtgcccacagttatccagttcatggggcgtgatggagcatgctactgtctggctcatacaaatgctttctttgcttgcttttcatgaaggcaaragcaggaatatgggagagaaagactaatttatacacttggcctgctattcatttaggatccagtctgggcacattcctggactggaaactgttcctatat

SEQ ID NO: 92678 - DNA, 600 bp, Chicken  19866894410033_2
ccatttatgttaacacaaaaattcatgttgtcattaatggaaacagatttggatcttaagacttctgtcttctctgacaattcatagactgtggttctatcacggacaattgaatcatcaatccattccatagggcctgaaaacagtattccagcagtgaaatgttatataaaaatttccagcgtgccctggttaatgaaggtgtttatgttctgtgtcaaaagccataatcctgttgaagaacctacttactgcgtgacttgaacaaggcacagtttagatttttgcgtgcatayatgygcttaagatattttcagaaaactcctaaaagcttttgttgatttgaaagatctagtcttcccagtcacttgtgctccatcacgtcttactagtgtgctaccagtgcccacagttatccagttcatggggcgtgatggagcatgctactgtctggctcatacaaatgctttctttgcttgcttttcatgaaggcaaragcaggaatatgggagagaaagactaatttatacacttggcctgctattcatttaggatccagtctgggcacattcctggactggaaactgttcctatatgtgt

SEQ ID NO: 92679 - DNA, 600 bp, Chicken  19866894410033_3
tgaaggtgtttatgttctgtgtcaaaagccataatcctgttgaagaacctacttactgcgtgacttgaacaaggcacagtttagatttttgcgtgcatayatgygcttaagatattttcagaaaactcctaaaagcttttgttgatttgaaagatctagtcttcccagtcacttgtgctccatcacgtcttactagtgtgctaccagtgcccacagttatccagttcatggggcgtgatggagcatgctactgtctggctcatacaaatgctttctttgcttgcttttcatgaaggcaaragcaggaatatgggagagaaagactaatttatacacttggcctgctattcatttaggatccagtctgggcacattcctggactggaaactgttcctatatgtgtarcttatttttaagcctctttcttttttcctttcaaaaagtatttggtcagcacacatacatattgatacagtgatcagcagcttaatgtaggcttaagcaggccaaacagtttccagtagcaaaaaaacataacccgaagatgaattctatagatggaaacagcgtttctttttcaggaatgttcctcctatttt

SEQ ID NO: 92680 - DNA, 600 bp, Chicken  19866894410033_4
ttaagatattttcagaaaactcctaaaagcttttgttgatttgaaagatctagtcttcccagtcacttgtgctccatcacgtcttactagtgtgctaccagtgcccacagttatccagttcatggggcgtgatggagcatgctactgtctggctcatacaaatgctttctttgcttgcttttcatgaaggcaaragcaggaatatgggagagaaagactaatttatacacttggcctgctattcatttaggatccagtctgggcacattcctggactggaaactgttcctatatgtgtarcttatttttaagcctctttcttttttcctttcaaaaagtatttggtcagcacacatacatattgatacagtgatcagcagcttaatgtaggcttaagcaggccaaacagtttccagtagcaaaaaaacataacccgaagatgaattctatagatggaaacagcgtttctttttcaggaatgttcctcctatttttggacactgaggatttgccataaagagaagtaaaaccaggcactcaggtctacaagcagtgtctttactgacattaactttgcgtggccacatttaaccttctttc

SEQ ID NO: 92681 - DNA, 600 bp, Chicken  19866894410036_1
ctgtagtgctaagactgtatgattctatgacagtgccaaacagggcacagggtgagctagggcagagtaggcatcaaagtgtcacagagtggtgtcaagacagaggaaggctgcaatgatcttcctacgcctatttaagagtctaagagctgcagtgcagggactaacagctacaggaattttgccctttcagagctaagcagtatacatccacatccctgcccagttatctccatgtttacccttccctggagtgccaaatgcctcacagctcagccacgtctgcagcctgctgtctgyatccagcaggctgcccctttcccaccctgccctcgcttccctccgttttctctttaggtcatgtgtaaaatatttattgggctttttgggcgagtcttcaccctgtccccatttccttcagagccacgatggagccatcctcacagacctgggaaggaaatgggcagcctcacaatgaagctttatcaaacccggacacataaacggtttgtcaggaaacgtgacctgatgtcagctcccagcccatgctgctcgagacctcactgccttgctctccttctctaagacaattttgggtca

SEQ ID NO: 92682 - DNA, 599 bp, Chicken  19866894410044_1
  misc_feature (1)..(108): n is any nucleotide
nnnnnnnnnnnnnnnnnnnnnnnnnnnnnnnnnnnnnnnnnnnnnnnnnnnnnnnnnnnnnnnnnnnnnnnnnnnnnnnnnnnnnnnnnnnnnnnnnnnnnnnnnnnngatcccggcaccgcaccgccccggttctgccctcacccagcaccgggacgccgttcctgtgcgccgcattggtccagcacacgggtgggatggtgacagtgtggtggctgaagtagacgaagatgtcgatgtagcgccagtggtagaacacgtacgggttgcgtgtggccgagccctggatgaacctgtggsagagcagagggaagtaattgggcaatgtgggagcgacgccacggagccgggyaggacctgaggcagcccacaagttgggcagagcggtggcactgtgtcactccggcagtcccggcagggctggccccatccacggagcyccagagccagagataaagccctctggccccacttggagaggccaacagcaggaaacagaccaggcactgaactgraggctggagaaagggcagcagcgggctgggtgtgtgccgggagctgcatgcacctgtcctccaggtaccacgcacctgtcctcc

SEQ ID NO: 92683 - DNA, 599 bp, Chicken  19866894410044_2
  misc_feature (1)..(56): n is any nucleotide
nnnnnnnnnnnnnnnnnnnnnnnnnnnnnnnnnnnnnnnnnnnnnnnnnnnnnnnngatcccggcaccgcaccgccccggttctgccctcacccagcaccgggacgccgttcctgtgcgccgcattggtccagcacacgggtgggatggtgacagtgtggtggctgaagtagacgaagatgtcgatgtagcgccagtggtagaacacgtacgggttgcgtgtggccgagccctggatgaacctgtggsagagcagagggaagtaattgggcaatgtgggagcgacgccacggagccgggyaggacctgaggcagcccacaagttgggcagagcggtggcactgtgtcactccggcagtcccggcagggctggccccatccacggagcyccagagccagagataaagccctctggccccacttggagaggccaacagcaggaaacagaccaggcactgaactgraggctggagaaagggcagcagcgggctgggtgtgtgccgggagctgcatgcacctgtcctccaggtaccacgcacctgtcctccaggtatcccccacgcatgtcgtggcacagcagcgtgcggggtctccggctgt

SEQ ID NO: 92684 - DNA, 600 bp, Chicken  19866894410044_3
tcacccagcaccgggacgccgttcctgtgcgccgcattggtccagcacacgggtgggatggtgacagtgtggtggctgaagtagacgaagatgtcgatgtagcgccagtggtagaacacgtacgggttgcgtgtggccgagccctggatgaacctgtggsagagcagagggaagtaattgggcaatgtgggagcgacgccacggagccgggyaggacctgaggcagcccacaagttgggcagagcggtggcactgtgtcactccggcagtcccggcagggctggccccatccacggagcyccagagccagagataaagccctctggccccacttggagaggccaacagcaggaaacagaccaggcactgaactgraggctggagaaagggcagcagcgggctgggtgtgtgccgggagctgcatgcacctgtcctccaggtaccacgcacctgtcctccaggtatcccccacgcatgtcgtggcacagcagcgtgcggggtctccggctgtgcagcgggggctggcgctgggccagcggcaccgcacagacgttgaattcatcatcgctgctgggatgccaggccagcagctcctccagg

SEQ ID NO: 92685 - DNA, 600 bp, Chicken  19866894410044_4
ctgaagtagacgaagatgtcgatgtagcgccagtggtagaacacgtacgggttgcgtgtggccgagccctggatgaacctgtggsagagcagagggaagtaattgggcaatgtgggagcgacgccacggagccgggyaggacctgaggcagcccacaagttgggcagagcggtggcactgtgtcactccggcagtcccggcagggctggccccatccacggagcyccagagccagagataaagccctctggccccacttggagaggccaacagcaggaaacagaccaggcactgaactgraggctggagaaagggcagcagcgggctgggtgtgtgccgggagctgcatgcacctgtcctccaggtaccacgcacctgtcctccaggtatcccccacgcatgtcgtggcacagcagcgtgcggggtctccggctgtgcagcgggggctggcgctgggccagcggcaccgcacagacgttgaattcatcatcgctgctgggatgccaggccagcagctcctccaggccggacaggaagaagctgacgggctccgtggtgccggtgtcgaagtaccgcgctggggaggcaacgagccgggac

SEQ ID NO: 92686 - DNA, 534 bp, Chicken  19866894410049_1
tttgggatgtgacagcagcattcttcagaagaagacttgggaaatgccttgtcatggctgggaaaggccagtgagctgcttgctggttgagttctccagatatccagctgggtacctggtattaaaccaggcagcagtgagatcactgttaacgttttcaaaacttcagaacaaacagctgcagcaatgcaaaggccctcaccaaaccaactgaagaactgcctttgctttagatggtgggaagacttggacatataggtgctaagaccagtcaggaaagtagcagcagaactggaagtmtgttttgtatcttctgacgttaagaagcttctccttggtttgcatcagtgcatgaaatggaggctgtctgacctgcagaaataagggttaaggtttagcaaattggcatttctgggagtgaagtttctctaattagcacgttgctcaatttgggttgcaggtgagttgagagagaagttggagctgctccgtgtgtttctacaggtctggtgggtatttctggcctcattgatt

SEQ ID NO: 92687 - DNA, 600 bp, Chicken  19866894410051_1
aggaatgacacgtgtctgtctgtatctcctaagagtcacccacagctgttacactgacatttcacaactgtcctcattactgtcaccgcgtgaagtgcaaatgagagaactccacatgaaactctatcaatttatgagaccttgagactcatcaagacaatactggctttgaaggaaaataaaatgctttgaaaatgcatatagagaagtcacatatggaagggaactgccaaaatgacacgtcaatatgtgaaatactcttccaacctaatcatttgtacaatttgaaagttactcttwcactgctaagacagacttgactgtgaagacgtaagagcaattcttttgataattacttcagcaacacgcatataaatagcattacaattgaatcttgctcagaaaatccttctgtgtattggcagaagatggatttatgacagcaatgtctagagagagaaggaggcaaaacagcaaaagaagaagacaagttaagaaaaaaaacccacacaattcaagctagatatatttataatgtgaggttttaggttaataagaacaacctgaagtaactgctttaccttaaatgcctacttgaat

SEQ ID NO: 92688 - DNA, 600 bp, Chicken  19866894410056_1
ctgaagctccttggcacaacttaatgccatggtgccggcctcatggtgccctcgtacattatttgggcatgtcatatcccacattcttaaaaagcttttcagcacaaatctgacccaatatcgtaagagtcataagatatgagaactgcgagtcactgacaagttatgctcttctaaaagtgcatatttctgagttgatttcatttgcttttagatgttacgacactggtattgtcaggactttctctgccatcagaaggccttggaacattatttccttccaaaatatctattgtttcrtgttgtttttttggttttttttaataatttgaccagcaaaagttgagattcctatataacacagcaaccagcagagtctgtaggaggtcagcagacacacggctgagcggctgcactgctctgtgcccaygcaggacggatgggcaggagctggcagagagggagctgggcaggcagctcacagctctttctgcaggcacatggagggtcacacgcctcttgtacaactggcagggaaaggtgcttaaaacttggaagctcgggtgtttgtgccagaagtgttaggttttatagkagatt

SEQ ID NO: 92689 - DNA, 600 bp, Chicken  19866894410056_2
cataagatatgagaactgcgagtcactgacaagttatgctcttctaaaagtgcatatttctgagttgatttcatttgcttttagatgttacgacactggtattgtcaggactttctctgccatcagaaggccttggaacattatttccttccaaaatatctattgtttcrtgttgtttttttggttttttttaataatttgaccagcaaaagttgagattcctatataacacagcaaccagcagagtctgtaggaggtcagcagacacacggctgagcggctgcactgctctgtgcccaygcaggacggatgggcaggagctggcagagagggagctgggcaggcagctcacagctctttctgcaggcacatggagggtcacacgcctcttgtacaactggcagggaaaggtgcttaaaacttggaagctcgggtgtttgtgccagaagtgttaggttttatagkagattagacaccgcttgacacagcaggtcctcttgccagatccctggctcaaagacaattaagtgagccaaataaccacatccatctcagcatgtccatgcatgcgcaaacaattactctgtgggactgttatta

SEQ ID NO: 92690 - DNA, 600 bp, Chicken  19866894410056_3
tttcrtgttgtttttttggttttttttaataatttgaccagcaaaagttgagattcctatataacacagcaaccagcagagtctgtaggaggtcagcagacacacggctgagcggctgcactgctctgtgcccaygcaggacggatgggcaggagctggcagagagggagctgggcaggcagctcacagctctttctgcaggcacatggagggtcacacgcctcttgtacaactggcagggaaaggtgcttaaaacttggaagctcgggtgtttgtgccagaagtgttaggttttatagkagattagacaccgcttgacacagcaggtcctcttgccagatccctggctcaaagacaattaagtgagccaaataaccacatccatctcagcatgtccatgcatgcgcaaacaattactctgtgggactgttattaaagaaaattaaattttaggtctgcacccggccaggaaatcttaagggagcctaattttctaggaacagtcaagtgggctcagcccgggtagactaggattggtttgtaaatctgcttcaggagtctgtaatcctgcttatttgctactgtacttctttttaaaac

SEQ ID NO: 92691 - DNA, 562 bp, Chicken  19866894410060_1
tacataaattgattaaattagtaccagctgacttgggcagcgtgatgttagtctgcaagatgcgttcacatgtgtaatggagcccagtaagacagagaaagattaaggtgacactgggagaacaagaataagcagaatgtccacaaaccttcctcggcctctggaaggcactgcaatccgaggcagctgagtaagagccacctgatacctggggagtcaggcacagctccacgctcagcatggatggtgcccccaaggacatgaggtgcggagcccaccttggctgtcagggcataccasgtgtcctgcatgaagccctggggctgctaaccacaaccctcaccgtttctcctaacagccatagcagggtggctcgttgtaagtcagggcattccccagacttatctttggtgggtgctgacattgttggctctcgagttcagcttggaatccagccagctctttggagcaacacgttcagcattcaacacgggggcacccgtgagaacttcacagttagaacagcaacaagagatacaggaagaatagctgtgagcttctc

SEQ ID NO: 92692 - DNA, 600 bp, Chicken  19866894410061_1
cagagtgcaaagaatcctcactgtaaaatagttccgatcaaatacgtttcaggttacagaggggtttgggattggttttgattcttaataaccctcctgccaataacatctaatgctgctccatgtgacacgttagtggcgttaattaaatatatatatataaaaagggagccagcaatacaaaccaaagtctgcctggaaaagttttaaaggacagagtaagtgtttcacagactgaaccagttccactgggtctgcacatggaaagattgcagcagacccctgaatgcacccagcagyatcaccaccagggcatgacagkgtgccatgctgcagaagccagaatgaacatgaggtatggatgagaggactattcacactatagggggtgtgtgacagatactcagacgatgacaaattacttttcttatggacaaaaaggggcccatcaggcaaatataatctccatgtggtaaaagataaactcatcctcttgccacagcagacaaagcccagtcaacagctccattttcagttcagtttgagagytctcaggtagagactggagaccagttaacaaatgggtgtcacttaaataaa

SEQ ID NO: 92693 - DNA, 600 bp, Chicken  19866894410061_2
gtaaaatagttccgatcaaatacgtttcaggttacagaggggtttgggattggttttgattcttaataaccctcctgccaataacatctaatgctgctccatgtgacacgttagtggcgttaattaaatatatatatataaaaagggagccagcaatacaaaccaaagtctgcctggaaaagttttaaaggacagagtaagtgtttcacagactgaaccagttccactgggtctgcacatggaaagattgcagcagacccctgaatgcacccagcagyatcaccaccagggcatgacagkgtgccatgctgcagaagccagaatgaacatgaggtatggatgagaggactattcacactatagggggtgtgtgacagatactcagacgatgacaaattacttttcttatggacaaaaaggggcccatcaggcaaatataatctccatgtggtaaaagataaactcatcctcttgccacagcagacaaagcccagtcaacagctccattttcagttcagtttgagagytctcaggtagagactggagaccagttaacaaatgggtgtcacttaaataaactacagctggagaactaaagtg

SEQ ID NO: 92694 - DNA, 600 bp, Chicken  19866894410061_3
tgggtctgcacatggaaagattgcagcagacccctgaatgcacccagcagyatcaccaccagggcatgacagkgtgccatgctgcagaagccagaatgaacatgaggtatggatgagaggactattcacactatagggggtgtgtgacagatactcagacgatgacaaattacttttcttatggacaaaaaggggcccatcaggcaaatataatctccatgtggtaaaagataaactcatcctcttgccacagcagacaaagcccagtcaacagctccattttcagttcagtttgagagytctcaggtagagactggagaccagttaacaaatgggtgtcacttaaataaactacagctggagaactaaagtgtgtgtgccagggcaatccatgggtgtataggtctgcakgggtttcataattcaacacagtgagaaaaccatgaagagcccagaatatagaatcattacaattggaaaaggccgctaagaccatcaagtccaaccaccaacccaacaccaccatgagcagtttgtgctgcagagctcagctccaatccaagcaaagccagggcaactccagccagggctgccccagtg

SEQ ID NO: 92695 - DNA, 600 bp, Chicken  19866894410061_4
gatgagaggactattcacactatagggggtgtgtgacagatactcagacgatgacaaattacttttcttatggacaaaaaggggcccatcaggcaaatataatctccatgtggtaaaagataaactcatcctcttgccacagcagacaaagcccagtcaacagctccattttcagttcagtttgagagytctcaggtagagactggagaccagttaacaaatgggtgtcacttaaataaactacagctggagaactaaagtgtgtgtgccagggcaatccatgggtgtataggtctgcakgggtttcataattcaacacagtgagaaaaccatgaagagcccagaatatagaatcattacaattggaaaaggccgctaagaccatcaagtccaaccaccaacccaacaccaccatgagcagtttgtgctgcagagctcagctccaatccaagcaaagccagggcaactccagccagggctgccccagtgcaaagaaaacatcctgatcctccagtgcagaagagccataaaatagtcttttatcacatccttccacctaaatcaaagtatgtggaagagttttagaggggcacacaccaa

SEQ ID NO: 92696 - DNA, 600 bp, Chicken  19866894410062_1
aataccaaggtcagagactacagtcaagtaaggaacaaattgtatcttccaccccttttctcaactttcaacaaaatgtaatcaatatctaacaaaatgccagactaccactttattttcctaaaaattcacaagcaatttactgagtttataaaatatatatttatatttgaacatggaaaatgaaactagatctgccagcttatcagtgtcctctggcattacaggaattctgtcctacgatagatctcttattttcatttcaataactcatttcatcttgattttcctggaggaaawttttttttaaccatttactgacaactgcatmattcctggcaacagttagtagatgtccccaccargagaacagaaggtcactgcttgggaatatggactatatgttaatcccacaaagttatgtagtatcttgacactgctccttacttcaacaaaataggtttttgttctttatacccactgccaatactgcattctttgtaatagttacagagactgaaagtccattaagaacaacaggattttgaactgtacagttatgcataatgctatttctgctttgtcttctgctaccacagc

SEQ ID NO: 92697 - DNA, 600 bp, Chicken  19866894410062_2
ggaacaaattgtatcttccaccccttttctcaactttcaacaaaatgtaatcaatatctaacaaaatgccagactaccactttattttcctaaaaattcacaagcaatttactgagtttataaaatatatatttatatttgaacatggaaaatgaaactagatctgccagcttatcagtgtcctctggcattacaggaattctgtcctacgatagatctcttattttcatttcaataactcatttcatcttgattttcctggaggaaawttttttttaaccatttactgacaactgcatmattcctggcaacagttagtagatgtccccaccargagaacagaaggtcactgcttgggaatatggactatatgttaatcccacaaagttatgtagtatcttgacactgctccttacttcaacaaaataggtttttgttctttatacccactgccaatactgcattctttgtaatagttacagagactgaaagtccattaagaacaacaggattttgaactgtacagttatgcataatgctatttctgctttgtcttctgctaccacagctatgcaactaatggaactaaggcatcactgt

SEQ ID NO: 92698 - DNA, 600 bp, Chicken  19866894410062_3
tttcaacaaaatgtaatcaatatctaacaaaatgccagactaccactttattttcctaaaaattcacaagcaatttactgagtttataaaatatatatttatatttgaacatggaaaatgaaactagatctgccagcttatcagtgtcctctggcattacaggaattctgtcctacgatagatctcttattttcatttcaataactcatttcatcttgattttcctggaggaaawttttttttaaccatttactgacaactgcatmattcctggcaacagttagtagatgtccccaccargagaacagaaggtcactgcttgggaatatggactatatgttaatcccacaaagttatgtagtatcttgacactgctccttacttcaacaaaataggtttttgttctttatacccactgccaatactgcattctttgtaatagttacagagactgaaagtccattaagaacaacaggattttgaactgtacagttatgcataatgctatttctgctttgtcttctgctaccacagctatgcaactaatggaactaaggcatcactgtatgtctcctgaactttctgtgcttaccatgtttc

SEQ ID NO: 92699 - DNA, 600 bp, Chicken  19866894410067_1
ctgcaattcacactatgttaattcacatctttatagaaatacatatccttctgtatccatgtgatgcaatattaacaaacaggcacgaggctctggcggaaaaaggggaagtgtactttgccttctaaagcttgaaaatgagtagcttagcatttctccacgacacgtttctttctgtgactgggattctgctataatcactttattccagctgtgagggatttaaatttccaaatattgtgagaacagcaaaaaaaaaccaacgcagtactgactaagagcagtgcttttaggttctcrtgctaatcctgatctgttgcaagaaactgtagttcctgtttgggttagtgggagctgcagacactcagcaattctcatgattatgcctttaatgttttcacgtctgtatgttcagcatctgtgaaatgttatagttcatctggttctgatcattcgctttaaaatgtgtgctctgcttttgtactgtaagagccttttcatctcgtcttctattattttatctgtgcgcatttcttcctaccatttgctgcattgttctttgctttccttgtagctttccttcctctgataccaaattat

SEQ ID NO: 92700 - DNA, 600 bp, Chicken  19866894410071_1
gcaagtgaggtctgagggagttaatgggaacgttgcagccccttcagccatttcagagattcagctcctgaggagaaggcactccacctggcaaatgatgctaataataaaaattattgtaattatatacataattactttacacttataattattaaccaatgctaataaaggcgaagcctgaaaaaaatattaaaatcagattgccatttgcacttcagcagcatatttgtttatcaatcttttaattttagaacatactttgtgactttgaaggtgtggatgtgagaggagaaacakagaagtagctgaagagcttttttcctttttctgctttgcgttatgcaaaagaagttgaagaaatcataagactggctgcaaatatatttgaagagaacattggggaaagatggctcctagaggggacacaaaagagtgtggtaagaaccaccatggttcttacagtgttacatggccctggaggaccccacaggcctctctggccctaaccagccacaccagaggccttccccaaaccccaagagagccatttcagcacaacccagcatctttgtgcccctcctgagccacaggccctgc

SEQ ID NO: 92701 - DNA, 600 bp, Chicken  19866894410078_1
agacagaaaatacctgatcatctgaaatgacaagcgttgctgctccccactggctctgtccttccactttcagagaggcagagttctgtgatgctgcagtacatcagccttttgctcaggaaaggaggagggaaatgcaaaggagttgttattcgctaatttctgtggcaccagcatcactctgtaccttcagtttttcagctttctggccagtttgcaccagagagcagcagaaaggccttcgtgcactggaataaatgtaaaggtaacctacattctctgaatttcgtcaaataaaayagcctccatggtgaagmtccagtgctgcacttggcatccttgccgtggcactgaggagaaggacagggtaactgcagcacccctcctcatgcccccccagcattttgcaagcactcggtttaaaaaaaaaaataaagtagtttacatcaatcttaggtgccatacacatacgcctggagtgataggcacagcctctcattcttgatttttgcatgaggtaagagtacttaaatggattagagaagcttgttctgcatttaggaaacaaacctgtccagaacgatggtgcctgcatgaatt

SEQ ID NO: 92702 - DNA, 600 bp, Chicken  19866894410078_2
tcatctgaaatgacaagcgttgctgctccccactggctctgtccttccactttcagagaggcagagttctgtgatgctgcagtacatcagccttttgctcaggaaaggaggagggaaatgcaaaggagttgttattcgctaatttctgtggcaccagcatcactctgtaccttcagtttttcagctttctggccagtttgcaccagagagcagcagaaaggccttcgtgcactggaataaatgtaaaggtaacctacattctctgaatttcgtcaaataaaayagcctccatggtgaagmtccagtgctgcacttggcatccttgccgtggcactgaggagaaggacagggtaactgcagcacccctcctcatgcccccccagcattttgcaagcactcggtttaaaaaaaaaaataaagtagtttacatcaatcttaggtgccatacacatacgcctggagtgataggcacagcctctcattcttgatttttgcatgaggtaagagtacttaaatggattagagaagcttgttctgcatttaggaaacaaacctgtccagaacgatggtgcctgcatgaattattaaaagggaagcaca

SEQ ID NO: 92703 - DNA, 600 bp, Chicken  19866894410086_1
gcaggaggaaggatgcaacaggccctggaggtaccggatcctgtgtgcaactcacttggagatggcagcaaggtacacaagggcttggttagcaaataaagctgatgtggatttcacgccactaacaaacccgtacaagatgagcacctatctgggcacgccgcagtttgcatcgggaccctctgtgagccagatgccttatggccatgtggaagttcaatattagttctggtttaaggagaaagataaagtttaagagccataacaacacagagggcggagtttgcagtcagtgctgargaggcaatgcgggggttaaatctgtgctttatctcctagcacatctcagtaacaaccacagagaactaccaccrgttttcctgaagcacaaaagcagcrctaagaccatacaagrcagatctgtgctcttctgytcggyayttgcaggagccgtatgactccgccatccaatctgaaggccttcacgaccgaactaaccacgtccagggcctcagcgcccaccactgggccagtctggctgagaaccggcagcacttcggggctctctgggttgcacaggaactcactctgcttccctgg

SEQ ID NO: 92704 - DNA, 600 bp, Chicken  19866894410086_2
acacaagggcttggttagcaaataaagctgatgtggatttcacgccactaacaaacccgtacaagatgagcacctatctgggcacgccgcagtttgcatcgggaccctctgtgagccagatgccttatggccatgtggaagttcaatattagttctggtttaaggagaaagataaagtttaagagccataacaacacagagggcggagtttgcagtcagtgctgargaggcaatgcgggggttaaatctgtgctttatctcctagcacatctcagtaacaaccacagagaactaccaccrgttttcctgaagcacaaaagcagcrctaagaccatacaagrcagatctgtgctcttctgytcggyayttgcaggagccgtatgactccgccatccaatctgaaggccttcacgaccgaactaaccacgtccagggcctcagcgcccaccactgggccagtctggctgagaaccggcagcacttcggggctctctgggttgcacaggaactcactctgcttccctggatgtcacacagcagcgtatcttccaaggctggctgaaagggggtaaggagctgctcaccaaaaaaagcattcgg

SEQ ID NO: 92705 - DNA, 600 bp, Chicken  19866894410086_3
agctgatgtggatttcacgccactaacaaacccgtacaagatgagcacctatctgggcacgccgcagtttgcatcgggaccctctgtgagccagatgccttatggccatgtggaagttcaatattagttctggtttaaggagaaagataaagtttaagagccataacaacacagagggcggagtttgcagtcagtgctgargaggcaatgcgggggttaaatctgtgctttatctcctagcacatctcagtaacaaccacagagaactaccaccrgttttcctgaagcacaaaagcagcrctaagaccatacaagrcagatctgtgctcttctgytcggyayttgcaggagccgtatgactccgccatccaatctgaaggccttcacgaccgaactaaccacgtccagggcctcagcgcccaccactgggccagtctggctgagaaccggcagcacttcggggctctctgggttgcacaggaactcactctgcttccctggatgtcacacagcagcgtatcttccaaggctggctgaaagggggtaaggagctgctcaccaaaaaaagcattcgggtatttagtggaaatgcaaagatgc

SEQ ID NO: 92706 - DNA, 600 bp, Chicken  19866894410086_4
acgccactaacaaacccgtacaagatgagcacctatctgggcacgccgcagtttgcatcgggaccctctgtgagccagatgccttatggccatgtggaagttcaatattagttctggtttaaggagaaagataaagtttaagagccataacaacacagagggcggagtttgcagtcagtgctgargaggcaatgcgggggttaaatctgtgctttatctcctagcacatctcagtaacaaccacagagaactaccaccrgttttcctgaagcacaaaagcagcrctaagaccatacaagrcagatctgtgctcttctgytcggyayttgcaggagccgtatgactccgccatccaatctgaaggccttcacgaccgaactaaccacgtccagggcctcagcgcccaccactgggccagtctggctgagaaccggcagcacttcggggctctctgggttgcacaggaactcactctgcttccctggatgtcacacagcagcgtatcttccaaggctggctgaaagggggtaaggagctgctcaccaaaaaaagcattcgggtatttagtggaaatgcaaagatgcccattgagaactggta

SEQ ID NO: 92707 - DNA, 600 bp, Chicken  19866894410086_5
acaagatgagcacctatctgggcacgccgcagtttgcatcgggaccctctgtgagccagatgccttatggccatgtggaagttcaatattagttctggtttaaggagaaagataaagtttaagagccataacaacacagagggcggagtttgcagtcagtgctgargaggcaatgcgggggttaaatctgtgctttatctcctagcacatctcagtaacaaccacagagaactaccaccrgttttcctgaagcacaaaagcagcrctaagaccatacaagrcagatctgtgctcttctgytcggyayttgcaggagccgtatgactccgccatccaatctgaaggccttcacgaccgaactaaccacgtccagggcctcagcgcccaccactgggccagtctggctgagaaccggcagcacttcggggctctctgggttgcacaggaactcactctgcttccctggatgtcacacagcagcgtatcttccaaggctggctgaaagggggtaaggagctgctcaccaaaaaaagcattcgggtatttagtggaaatgcaaagatgcccattgagaactggtaaatcctaccactagccgaa

SEQ ID NO: 92708 - DNA, 600 bp, Chicken  19866894410086_6
atgagcacctatctgggcacgccgcagtttgcatcgggaccctctgtgagccagatgccttatggccatgtggaagttcaatattagttctggtttaaggagaaagataaagtttaagagccataacaacacagagggcggagtttgcagtcagtgctgargaggcaatgcgggggttaaatctgtgctttatctcctagcacatctcagtaacaaccacagagaactaccaccrgttttcctgaagcacaaaagcagcrctaagaccatacaagrcagatctgtgctcttctgytcggyayttgcaggagccgtatgactccgccatccaatctgaaggccttcacgaccgaactaaccacgtccagggcctcagcgcccaccactgggccagtctggctgagaaccggcagcacttcggggctctctgggttgcacaggaactcactctgcttccctggatgtcacacagcagcgtatcttccaaggctggctgaaagggggtaaggagctgctcaccaaaaaaagcattcgggtatttagtggaaatgcaaagatgcccattgagaactggtaaatcctaccactagccgaaaacat

SEQ ID NO: 92709 - DNA, 600 bp, Chicken  19866894410086_7
gagcacctatctgggcacgccgcagtttgcatcgggaccctctgtgagccagatgccttatggccatgtggaagttcaatattagttctggtttaaggagaaagataaagtttaagagccataacaacacagagggcggagtttgcagtcagtgctgargaggcaatgcgggggttaaatctgtgctttatctcctagcacatctcagtaacaaccacagagaactaccaccrgttttcctgaagcacaaaagcagcrctaagaccatacaagrcagatctgtgctcttctgytcggyayttgcaggagccgtatgactccgccatccaatctgaaggccttcacgaccgaactaaccacgtccagggcctcagcgcccaccactgggccagtctggctgagaaccggcagcacttcggggctctctgggttgcacaggaactcactctgcttccctggatgtcacacagcagcgtatcttccaaggctggctgaaagggggtaaggagctgctcaccaaaaaaagcattcgggtatttagtggaaatgcaaagatgcccattgagaactggtaaatcctaccactagccgaaaacatca

SEQ ID NO: 92710 - DNA, 599 bp, Chicken  19866894410092_1
  misc_feature (1)..(182): n is any nucleotide
nnnnnnnnnnnnnnnnnnnnnnnnnnnnnnnnnnnnnnnnnnnnnnnnnnnnnnnnnnnnnnnnnnnnnnnnnnnnnnnnnnnnnnnnnnnnnnnnnnnnnnnnnnnnnnnnnnnnnnnnnnnnnnnnnnnnnnnnnnnnnnnnnnnnnnnnnnnnnnnnnnnnnnnnnnnnnnnnnnnnnntagaatggcttgggttggaagggtcctcaaagatatctagttccaaactccctgccatgggcaggattgccaaccgctatatcaaatactagattaggctgcccacatccccatcctscctgatcttgagcacctccaaggacaaggcatccacagccaatctgggcagcctgtgccaatgcctcatcaccctctctgtgaaaaacttctccctgatatctaatctaaatctcctcttctttagttttaaaccattcccccttgtcctatcactatcagatcatgtaaaaagtcgatctctctcctgtttataattttcctttaaatattgaaaggttgcaatgaggtcttcctgcagtcttcttttctccagactgaacaagccaaggtccsagcctgtctttgtaggagaggtac

SEQ ID NO: 92711 - DNA, 543 bp, Chicken  19866894410092_2
ttaggctgcccacatccccatcctscctgatcttgagcacctccaaggacaaggcatccacagccaatctgggcagcctgtgccaatgcctcatcaccctctctgtgaaaaacttctccctgatatctaatctaaatctcctcttctttagttttaaaccattcccccttgtcctatcactatcagatcatgtaaaaagtcgatctctctcctgtttataattttcctttaaatattgaaaggttgcaatgaggtcttcctgcagtcttcttttctccagactgaacaagccaaggtccsagcctgtctttgtaggagaggtactccagccccctgatcatcatggccctcctctggatcttctccagaacctcttcatctttcctgtgttgggggcaccagacctagatgaaatacttcagatgggacctcacgagggcagagtagagatggacaacccccccgcaccttctccctgccagccacccctcttttgctgcagccaaggatactattggccttctgggcttcaagaacacactg

SEQ ID NO: 92712 - DNA, 600 bp, Chicken  19866894410095_1
tgtcggttacaaacctattgtactttttcaaaagtctcccattgactgtaaataggctttgaattatatcccaaagcagcaagtagagtttaatttgcacagtccctattgcctcagcgcaaggtatttcttattttctgtttgttgcacagtaaagcctaaaagaatgcaaagtctgattatctatattttacacatatcacctgcagctgatacctttaaaggtaggcaggtgactttatgtgaaaagtaagtcttaagtgaatacccatacttatacacgggtattaaatatatatyagatacatatttaatttcaaaagctgtctaatgctaagcaggaagtagttccattataacaagcaggattagctattggcttaaattaagtagtttgcttagttgatacagagaaatatccagtgtacccagtgctgaagaaatcagcatgatatctcctgtgtacccttcacgtttcagggacccagggactatttttttattgaacacatttgaaattaaatctaggagactattagcaaagctattatatgggatataatatttagaagtcagagaacatttgttattattaaattg

SEQ ID NO: 92713 - DNA, 600 bp, Chicken  19866894410096_1
agtctgcagaaagctaacaggagtgttctgctttggattacagctgagcggtactgaccttgcacagtgacaaagatcactgaacccagtcagggcaacttctggtgagaaactacagggacggtgcagaagtgctcaaagcactgaagaagcacagagccacgcggctctcctcaaaccagaatgggcaatccttgcccaccagccatgataagttctgggcaaaatctgctagagaattaaatatttaagtgccattgcaaagcaaacagatctgtatttgaatcactcggaaagatygcaatgtttggagttcttaaccaagctgtgtttggcaaagttacaaaatcacctttcaaaaaaatctactcatttttccactgtcagtgctcctttatacgcatgatgacaaaactgaattcagtttaaaaagcacctgtcagatctgtcacctgtcagcagcactcttttgttgtttggttatgctgcccggcgattccagcatgttttcactaagagcaggaggtgtcatctgcatacggcaaaacaaaaccttgcagtcactcagcaaaatcagacagacattacagcttggtggga

SEQ ID NO: 92714 - DNA, 600 bp, Chicken  19866894410096_2
ccatctacacaaccttttgttaaaacaccttctacactcaaacacctgattaaacagaggaggaaaaaaaaaaaagcctttgttagagttctggcatcccatttcttccattagattcttccaatatgttttcagcatagaactaatgttcttgatatttttactcataacacttctgcaaagaagagagaaaggaaataatttgtaatgccccaccatttctgcataggatggaagacacaccactgcaaggctcctctgcaagtcaatcacctgctatctacagcagcagttctccgratctgaagcacactaaaataaatatggtaaagacagattgaaacacaagggaagtgtagcgtacgtatctcctatgcaccagtacttgtccctaaaggtccaggcaagcatctattattccaaatggttggcatgggctttggtccagcaaggcgatatcacaatattgtgattctgctttatgttgggccaacactgaaaattcaaattaaaatacgtggcctgctgttagccttcagtagtcgctcaaaattcaggtgatctgctccttcgtattgttgcaaaggagcatttttgttc

SEQ ID NO: 92715 - DNA, 600 bp, Chicken  19866894410100_1
gcttatcttcaataagccgctgctaccacaacagatggcaggttagtggtttagctgaggttgactggaagtttttcaccacttgattggccataacttatgtatgtgactatagaaagtgcatagttgagaacagaatcttcattggaatagataccagatgaattttgtagtgtttttgttgttgttgctgagctagggatggaatgcttctgtgtactgtcagaaggaacttcatggttctatctgtgtgatcatctgtatttctttgcttctttttcctggctgttcccatgattygtctgcactgactgtgattctgtgctccttgttgtgggctctgtggggaattgtacccacgtgtgctgtgatttggggcagctcggagcagtgggctggggctgatggggctttctgttagcgctgtgctggctgagaggctgaaacacaggaggaagagtggacaaactaaagccttcrtggtgtataagtacacattactttaaacaaacaaacawaaccccaacaacttacattttcagtgtaaaaaggtcatgattttttttctgtcctggaagcttccatacttatatgcttttc

SEQ ID NO: 92716 - DNA, 600 bp, Chicken  19866894410100_2
gttgttgttgctgagctagggatggaatgcttctgtgtactgtcagaaggaacttcatggttctatctgtgtgatcatctgtatttctttgcttctttttcctggctgttcccatgattygtctgcactgactgtgattctgtgctccttgttgtgggctctgtggggaattgtacccacgtgtgctgtgatttggggcagctcggagcagtgggctggggctgatggggctttctgttagcgctgtgctggctgagaggctgaaacacaggaggaagagtggacaaactaaagccttcrtggtgtataagtacacattactttaaacaaacaaacawaaccccaacaacttacattttcagtgtaaaaaggtcatgattttttttctgtcctggaagcttccatacttatatgcttttctcccctagcctgaattttgaaaccttaagtaggagaggcaggaactttgtactgaggaacactgcatcgtaatgaagttaaatattaattactatctaatgttttaggaagggctgttgctggccacccaacataccggctttcagagttccagggaaatcatgaccttaatgatgcatg

SEQ ID NO: 92717 - DNA, 600 bp, Chicken  19866894410100_3
actgtcagaaggaacttcatggttctatctgtgtgatcatctgtatttctttgcttctttttcctggctgttcccatgattygtctgcactgactgtgattctgtgctccttgttgtgggctctgtggggaattgtacccacgtgtgctgtgatttggggcagctcggagcagtgggctggggctgatggggctttctgttagcgctgtgctggctgagaggctgaaacacaggaggaagagtggacaaactaaagccttcrtggtgtataagtacacattactttaaacaaacaaacawaaccccaacaacttacattttcagtgtaaaaaggtcatgattttttttctgtcctggaagcttccatacttatatgcttttctcccctagcctgaattttgaaaccttaagtaggagaggcaggaactttgtactgaggaacactgcatcgtaatgaagttaaatattaattactatctaatgttttaggaagggctgttgctggccacccaacataccggctttcagagttccagggaaatcatgaccttaatgatgcatggtttgaatactatgtccattgcatttctttaaacctca

SEQ ID NO: 92718 - DNA, 600 bp, Chicken  19866894410100_4
tgttctatatccgtgctttaccatttgaacttggtgctagctaaataggtagcccttgctgctggtctggaatagctgcttactgtgaaaatgctttgttacaatcttaccgaaatacttgtcttcagtgtcacagggtaataaagatactgttgctgaatagctgggaggtgcagcggttcgtgggtgtgggtcttggaggcttttttgttaaggagcccttcagaatctgatgttttgttattgcaaggtatttgtatattgcgacagaattcccttcaagttcctttttcataatcygagyttattagactccgtaactctcagtgggagctcaggctgctagatagycttttgattccttctgcacttttaaaactatcttcccgtttcataccagggctgaatgtaatgttcctgaatctatctgtgctgtaagatcttaatttcaagtttcattccctcttatctcattcatttctccctctcctggccaatggagacagcattggttacacttgtcagctgtttgcctgtgtgttctcataatgaccttattgatggagacacygcaacctcaccatgcagcttatttttgtc

SEQ ID NO: 92719 - DNA, 600 bp, Chicken  19866894410100_5
ctatatccgtgctttaccatttgaacttggtgctagctaaataggtagcccttgctgctggtctggaatagctgcttactgtgaaaatgctttgttacaatcttaccgaaatacttgtcttcagtgtcacagggtaataaagatactgttgctgaatagctgggaggtgcagcggttcgtgggtgtgggtcttggaggcttttttgttaaggagcccttcagaatctgatgttttgttattgcaaggtatttgtatattgcgacagaattcccttcaagttcctttttcataatcygagyttattagactccgtaactctcagtgggagctcaggctgctagatagycttttgattccttctgcacttttaaaactatcttcccgtttcataccagggctgaatgtaatgttcctgaatctatctgtgctgtaagatcttaatttcaagtttcattccctcttatctcattcatttctccctctcctggccaatggagacagcattggttacacttgtcagctgtttgcctgtgtgttctcataatgaccttattgatggagacacygcaacctcaccatgcagcttatttttgtcctga

SEQ ID NO: 92720 - DNA, 600 bp, Chicken  19866894410100_6
gcccttgctgctggtctggaatagctgcttactgtgaaaatgctttgttacaatcttaccgaaatacttgtcttcagtgtcacagggtaataaagatactgttgctgaatagctgggaggtgcagcggttcgtgggtgtgggtcttggaggcttttttgttaaggagcccttcagaatctgatgttttgttattgcaaggtatttgtatattgcgacagaattcccttcaagttcctttttcataatcygagyttattagactccgtaactctcagtgggagctcaggctgctagatagycttttgattccttctgcacttttaaaactatcttcccgtttcataccagggctgaatgtaatgttcctgaatctatctgtgctgtaagatcttaatttcaagtttcattccctcttatctcattcatttctccctctcctggccaatggagacagcattggttacacttgtcagctgtttgcctgtgtgttctcataatgaccttattgatggagacacygcaacctcaccatgcagcttatttttgtcctgaaatgctttactgttagttttctactgtacgatctgactctcccttgc

SEQ ID NO: 92721 - DNA, 470 bp, Chicken  19866894410100_7
attcccttcaagttcctttttcataatcygagyttattagactccgtaactctcagtgggagctcaggctgctagatagycttttgattccttctgcacttttaaaactatcttcccgtttcataccagggctgaatgtaatgttcctgaatctatctgtgctgtaagatcttaatttcaagtttcattccctcttatctcattcatttctccctctcctggccaatggagacagcattggttacacttgtcagctgtttgcctgtgtgttctcataatgaccttattgatggagacacygcaacctcaccatgcagcttatttttgtcctgaaatgctttactgttagttttctactgtacgatctgactctcccttgctgcagttcaagtacttcattgcttgttctgtttgagaactgactgttcctccctgcagtaagctgggtgtccctgcttccttcaaccctc

SEQ ID NO: 92722 - DNA, 600 bp, Chicken  19866894410104_1
caaacagtaggcaattcaatttttcacctaccagaaggattttgttttctatgcctctttgtatttttatctacagatgatattgtattgaggaagagaactgagttcctatcagtaaacacagaaagccaacaaaataggggtttgttgactaaaccaaatttcagattattactgaagtatcccactaatctcagtgcaggagcgcaaaggcttcacaaggtcttagacttacttaagccacgacatcctttcctgagcagatactttgctcaggaaacagatattctgtttccagayagggtctgcagaaaactcatatataatggattcaaactgtgtagtgtattcccattgtctaatagtggacacaccagcataggcaacgtttgctgaatgccacaaatctggctcagcaagttcagttagccaaaaatctgaaaggacaaaataggacactgcaagaaatcaagaatccaacagtcatagctagggactctttttaaggccattaccaaatattaatttgttaccctaattagaaaaaaatattgtgcatactggttgatttgtaaactattttgccaaaatcctgtttta

SEQ ID NO: 92723 - DNA, 600 bp, Chicken  19866894410104_2
caaagagtgaccagctttttataatccatgcacatctgattgacagtcgtactctgtcttacaagggggctgcatggtgccagatactagtgagtatctgcagttattcaatggtacagtacttttatacagaagaagcatttaactggagaggaggagaacgtgtgatttctggaacagaggcacttggcactgctgcagtagaatactgtgggatcagcactccaagccaccatggggcagctgctcatcatcccagtgatacaatcggacaagaataacccttaaggaatcaacacraagaataataatcctcagcratgtcacttactacaggctaccaaaaaaaaatgaagagtctagactttggagaaaggtagattcaacagagcagtctcccagctccatgctggaacacagtctgaccctgtgttgtatgcccctggggacctaattctgcatctgagtatgataagcacctaactcactgcggtacagtaagataaataactagatgcttctaagtgatcccaagaacctcaatttctctcactgggcaatcttatgctggcaaaggaataaatactgttctaactggga

SEQ ID NO: 92724 - DNA, 600 bp, Chicken  19866894410104_3
ataatccatgcacatctgattgacagtcgtactctgtcttacaagggggctgcatggtgccagatactagtgagtatctgcagttattcaatggtacagtacttttatacagaagaagcatttaactggagaggaggagaacgtgtgatttctggaacagaggcacttggcactgctgcagtagaatactgtgggatcagcactccaagccaccatggggcagctgctcatcatcccagtgatacaatcggacaagaataacccttaaggaatcaacacraagaataataatcctcagcratgtcacttactacaggctaccaaaaaaaaatgaagagtctagactttggagaaaggtagattcaacagagcagtctcccagctccatgctggaacacagtctgaccctgtgttgtatgcccctggggacctaattctgcatctgagtatgataagcacctaactcactgcggtacagtaagataaataactagatgcttctaagtgatcccaagaacctcaatttctctcactgggcaatcttatgctggcaaaggaataaatactgttctaactgggatctgcgcgcctgctagtgta

SEQ ID NO: 92725 - DNA, 600 bp, Chicken  19866894410108_1
tagttcatcttaggagtgtttcatgggtttgttcccacaagctaaagaaactatagtgagctctggaagtgagataagtgtggtactgtgcagctctgggcataggctacaggaataaaagaatacctgtgaagcagtgcagtacagaatctctgctgcatctgccacttgagctggcttgttcaaagctgcctgtggctgtttgcagtacactgcaagcagcctgaacagaagaaagaggaaaaagatcaccaagaaggaatagtcagaaacatggataaatccacacatttgagcctrtggtcaatggccaggtggccatacattgaacgggatagtaatcttggatactttcatcctcagctccagagccagcacaccccacagctggaactgcctactccacagaagtctgtgtaagtccagcaatttcacagtgcacacatcctagacagtatggtctacagaaaccccatgcacaaaatcagatgtgaaaggaagatagtactgcccatgaccacgacccttcagttttttgagatgttacatttcctgttgcaaaatcatccagcatgagcccattctttaactcagttgctt

SEQ ID NO: 92726 - DNA, 600 bp, Chicken  19866894410109_1
cagctgacaatacattttttattacacccccagcatactaataacagaccacctcacaggtgggaaagaggttcttgagggccagtgagcagagaattgtatcaatgtgtcacaattacaggaacacctgtgctaaataactctgagcgttgatccactgtgaagagtcagtgctcagtagccctcaaaatttctcatttcttatctgcagtggggtggtcttgtagtggagcagtggttgtacagaatttcctaaatgtttttctttcttatccctgaggatgcctgtcgcacagacgygcagtccctaaattgccacctttcctgtctctrtgtttttcttttcatttctgttcttcctgtacggtgaaagacattagagacagagtgataaaaacacatcataaaacagcatcactggggagatctgtgccttggaaatactgggacaaagtctgcactcaaaaaaactttccattgatgagggcgggttatgcctcgtgacaaaaggcaaagggctccttaaaactacttgcctaattaagggcctggttcagctagagtgcctaatttaaaacagatgactcgatgttgatggtg

SEQ ID NO: 92727 - DNA, 600 bp, Chicken  19866894410109_2
catactaataacagaccacctcacaggtgggaaagaggttcttgagggccagtgagcagagaattgtatcaatgtgtcacaattacaggaacacctgtgctaaataactctgagcgttgatccactgtgaagagtcagtgctcagtagccctcaaaatttctcatttcttatctgcagtggggtggtcttgtagtggagcagtggttgtacagaatttcctaaatgtttttctttcttatccctgaggatgcctgtcgcacagacgygcagtccctaaattgccacctttcctgtctctrtgtttttcttttcatttctgttcttcctgtacggtgaaagacattagagacagagtgataaaaacacatcataaaacagcatcactggggagatctgtgccttggaaatactgggacaaagtctgcactcaaaaaaactttccattgatgagggcgggttatgcctcgtgacaaaaggcaaagggctccttaaaactacttgcctaattaagggcctggttcagctagagtgcctaatttaaaacagatgactcgatgttgatggtgatgcactttaagttgggtacctgcctaagtact

SEQ ID NO: 92728 - DNA, 600 bp, Chicken  19866894410109_3
aataaataaatgacttacagattgccaacgtgacaggctacgccagagcagaattcagatcccatttgaattcatgggaaagcagggacttttgaaactgctaagttaaccaaaaatatatattgttaaagccaacgaatttatttttttctgtttgaaggtccctgttttgctatacaggggaatgggatctgaattctctgactcttcagcatcataaaatctggagtgcctgcttggggaggtgtcaggaaaatattggttcccattctaggctcacattatatttacactgtggcyctccaaaatactaaagcagtaagagatattataattaacctcttcaatttttcccttaagaagtatctggttcaatgaactgtcaatcagctctcccactctctattagaatgggtgtgaatacgctgaactgataaattagttcaagtgaaaggggtggcaataaagggctgtggatggtaaacaaaggtaaatattaagtgaattttacktaagtacaaatttgcaaaggctctgcagctgcttctcagctacattagccctctctttcccctccttctcagggtgcacatggttgtt

SEQ ID NO: 92729 - DNA, 600 bp, Chicken  19866894410109_4
catcataaaatctggagtgcctgcttggggaggtgtcaggaaaatattggttcccattctaggctcacattatatttacactgtggcyctccaaaatactaaagcagtaagagatattataattaacctcttcaatttttcccttaagaagtatctggttcaatgaactgtcaatcagctctcccactctctattagaatgggtgtgaatacgctgaactgataaattagttcaagtgaaaggggtggcaataaagggctgtggatggtaaacaaaggtaaatattaagtgaattttacktaagtacaaatttgcaaaggctctgcagctgcttctcagctacattagccctctctttcccctccttctcagggtgcacatggttgttggtgccactgcatgcctgctcctgttttgtgggagctstttagaccactggaattgatttgcagacatgtaaacgtgacacttaaaggcatgcaggtatgctactatcagtgatgtgacaaacctgcactgaaaatgagatcagtgaccaaatccattcactaaatgctaaaaaggtctgaattgtgcactaatcctgtgccacagctcagt

SEQ ID NO: 92730 - DNA, 600 bp, Chicken  19866894410109_5
cctcttcaatttttcccttaagaagtatctggttcaatgaactgtcaatcagctctcccactctctattagaatgggtgtgaatacgctgaactgataaattagttcaagtgaaaggggtggcaataaagggctgtggatggtaaacaaaggtaaatattaagtgaattttacktaagtacaaatttgcaaaggctctgcagctgcttctcagctacattagccctctctttcccctccttctcagggtgcacatggttgttggtgccactgcatgcctgctcctgttttgtgggagctstttagaccactggaattgatttgcagacatgtaaacgtgacacttaaaggcatgcaggtatgctactatcagtgatgtgacaaacctgcactgaaaatgagatcagtgaccaaatccattcactaaatgctaaaaaggtctgaattgtgcactaatcctgtgccacagctcagtgtttgaaacattatcccttcaccttaggattcaacttttataaatgtaggtctatctacagtccccagtgctgcaactgactgcattatttattatttatcattattaattatcataatgtattat

SEQ ID NO: 92731 - DNA, 600 bp, Chicken  19866894410109_6
tatcattattaattatcataatgtattatttatgccatgcaataggtatgcacagcattttgccaagaaacctccctcactctcacgtttattaatttctagaatattgttacactgcttgatttggaaatgaatcaaaaatacctagatattaaaacgagtaattctgaaaagcttcaaaaggtctcctgttgtcagctgtgagaatcagctagcaatttgggattcttttcaaggttgctactctcctttccgagcctgcacactaatccaccagaaggagctgtgcagcctttgggytcagcctagtgccccaggaccactctyttgaccccccctgaagccacagctcaaaaaccagcatctgggctgcagctgagggtcacttgttgggcttggaattagctgatrttgggcagccacttcctgccattacaacttcccttaggttttattgtttgctaacttgtgcccgatatttctcaacaagaagaaggtctgctatattggattctgtacacatatgcagtaagaatagtgggcctgaagggtttacagcatttgtaaagattaatattaaaagaactatgaatcaataaa

SEQ ID NO: 92732 - DNA, 600 bp, Chicken  19866894410109_7
atttatgccatgcaataggtatgcacagcattttgccaagaaacctccctcactctcacgtttattaatttctagaatattgttacactgcttgatttggaaatgaatcaaaaatacctagatattaaaacgagtaattctgaaaagcttcaaaaggtctcctgttgtcagctgtgagaatcagctagcaatttgggattcttttcaaggttgctactctcctttccgagcctgcacactaatccaccagaaggagctgtgcagcctttgggytcagcctagtgccccaggaccactctyttgaccccccctgaagccacagctcaaaaaccagcatctgggctgcagctgagggtcacttgttgggcttggaattagctgatrttgggcagccacttcctgccattacaacttcccttaggttttattgtttgctaacttgtgcccgatatttctcaacaagaagaaggtctgctatattggattctgtacacatatgcagtaagaatagtgggcctgaagggtttacagcatttgtaaagattaatattaaaagaactatgaatcaataaaacaaacaaaagcctccagtaaggttgg

SEQ ID NO: 92733 - DNA, 600 bp, Chicken  19866894410109_8
acactgcttgatttggaaatgaatcaaaaatacctagatattaaaacgagtaattctgaaaagcttcaaaaggtctcctgttgtcagctgtgagaatcagctagcaatttgggattcttttcaaggttgctactctcctttccgagcctgcacactaatccaccagaaggagctgtgcagcctttgggytcagcctagtgccccaggaccactctyttgaccccccctgaagccacagctcaaaaaccagcatctgggctgcagctgagggtcacttgttgggcttggaattagctgatrttgggcagccacttcctgccattacaacttcccttaggttttattgtttgctaacttgtgcccgatatttctcaacaagaagaaggtctgctatattggattctgtacacatatgcagtaagaatagtgggcctgaagggtttacagcatttgtaaagattaatattaaaagaactatgaatcaataaaacaaacaaaagcctccagtaaggttggattttcaaaactgctctggttctgtgatatgcctacatttctaaagcacttttgatagtctcatattgcaactcaaatagatgt

SEQ ID NO: 92734 - DNA, 600 bp, Chicken  19866894410109_9
ttttattgtttgctaacttgtgcccgatatttctcaacaagaagaaggtctgctatattggattctgtacacatatgcagtaagaatagtgggcctgaagggtttacagcatttgtaaagattaatattaaaagaactatgaatcaataaaacaaacaaaagcctccagtaaggttggattttcaaaactgctctggttctgtgatatgcctacatttctaaagcacttttgatagtctcatattgcaactcaaatagatgttatctataaatttatttatggctaataaggcttccttrtggccacaggtgaggtctcaagcagtctaacatcacaagccaaatataggttgagaggaaagccctggaggtccaaggcctgcaaagcttgccttttttatttgttattatttcacaactgtgctacttaacgacttacttttttaagtaagcaaaacacagttgtacatacagaccgttcctgttccaaggagctcaccaaacacaaggatgtagcagcctgctgaaacaaataagtagagctgatgaagcacacatacaaaactgtattgaagcttttacagatacaagaaagcaata

SEQ ID NO: 92735 - DNA, 600 bp, Chicken  19866894410118_1
agcttttaattagagggagcgtaaagcaccacaggggctgggggggctgcagggcctgctcagacctcaaccctactgggtccccagctggaaacggggggcaggtacccaaaaaccacccaccacggagctgataaccaactcctctgcttcccagaccaatgccaccgactgctccggggtgacacagccgcacttgaggggatgcagctcagggcagggagtgatgcactcccatcctgcacgctcctttcccacagcccagcaaaccgagcacatgaatcagatcgctccgttttrccccccaaaaaagcagctcccagcacagctcctcgccggcccttcaccctcctcctcctcattcagggctggggcagccccaggggccgcaatgtgctttaacaaacccagcgaaatgaagcagcaggagcagagcgggtgattaatcagagcgtcccccggcccgtttccaccttcctgtcttcatgaaggttatttacccgctaagtatcagtgcgtggtgcagaatgcaatgctcctccactctcctcatcccagcgctcaccccacagggtccgcgcctgccctacattcccagcc

SEQ ID NO: 92736 - DNA, 600 bp, Chicken  19866894410118_2
ccccacagggtccgcgcctgccctacattcccagccagcaaatccagcgtgcacacacacgcgagcacacgcagctcctgcacaacgggccgccgtcctcccttgggtgaattattcatgctgtgcaacacccctgtgctaaaaagagctcgacgactcactgcaacacaggaaaggagtgcctcaaagtgctcggtgcgcccactcgccagggaagatccttgccctggatgagtgctgggtcagcactggattgcaaagcacagcccagctcctgccacagcctttgggagtcccatytgcagggggtggatttggtttcttttcrcatcgctgtggttgttcgggagaaagtgggtagtgctgaggctggagaggcagcagacaggggtgggaaggagctggagcgtgccagaaagctctggcggtgacgacagagagatgctatcgcaaggaggcaagagaagggatttggggggaggattctctgcatgcagagctgcgaggagtgatgaaaccagtttggacagaggatgccgcatctgcaagttgttccactgatgtacagctttaattaggcagtggcatctaacgaaggac

SEQ ID NO: 92737 - DNA, 600 bp, Chicken  19866894410118_3
tcccagccagcaaatccagcgtgcacacacacgcgagcacacgcagctcctgcacaacgggccgccgtcctcccttgggtgaattattcatgctgtgcaacacccctgtgctaaaaagagctcgacgactcactgcaacacaggaaaggagtgcctcaaagtgctcggtgcgcccactcgccagggaagatccttgccctggatgagtgctgggtcagcactggattgcaaagcacagcccagctcctgccacagcctttgggagtcccatytgcagggggtggatttggtttcttttcrcatcgctgtggttgttcgggagaaagtgggtagtgctgaggctggagaggcagcagacaggggtgggaaggagctggagcgtgccagaaagctctggcggtgacgacagagagatgctatcgcaaggaggcaagagaagggatttggggggaggattctctgcatgcagagctgcgaggagtgatgaaaccagtttggacagaggatgccgcatctgcaagttgttccactgatgtacagctttaattaggcagtggcatctaacgaaggacacgttatttatttatgtagcatggaagc

SEQ ID NO: 92738 - DNA, 599 bp, Chicken  19866894410120_1
  misc_feature (1)..(222): n is any nucleotide
nnnnnnnnnnnnnnnnnnnnnnnnnnnnnnnnnnnnnnnnnnnnnnnnnnnnnnnnnnnnnnnnnnnnnnnnnnnnnnnnnnnnnnnnnnnnnnnnnnnnnnnnnnnnnnnnnnnnnnnnnnnnnnnnnnnnnnnnnnnnnnnnnnnnnnnnnnnnnnnnnnnnnnnnnnnnnnnnnnnnnnnnnnnnnnnnnnnnnnnnnnnnnnnnnnnnnnnnnnnnnntgtatgtagcacatacatcaggacaaatttctttgaaaacagtaaatgacaggaagccacctgactacatgtatatamgaatacgtgcagcttatcttaagcactgctatgcctttatgaatgtatttgacttttaaatctgtgtatcacagatcctcagaatttgatttaggtgagacttgaacctcggagtagaaaatgtgagattatttcctggtctcagactgcctgcaatcactagcacgctcccaccaactgggtgaaccttcacaagcaggagacatttatttgcctgcatttggtacttaagaccatctcttggcagaataaattgcctcaatcccatggccttccactgagctggaacaaccccyttt

SEQ ID NO: 92739 - DNA, 600 bp, Chicken  19866894410120_2
atamgaatacgtgcagcttatcttaagcactgctatgcctttatgaatgtatttgacttttaaatctgtgtatcacagatcctcagaatttgatttaggtgagacttgaacctcggagtagaaaatgtgagattatttcctggtctcagactgcctgcaatcactagcacgctcccaccaactgggtgaaccttcacaagcaggagacatttatttgcctgcatttggtacttaagaccatctcttggcagaataaattgcctcaatcccatggccttccactgagctggaacaaccccytttgagttgtccttaatacgtttcttattacagatatacatcaggtatcagaagtctttctgtgtcaaacatccagcaaagatttcttcagcaaawggccttgtgagaaaaaagtctttttttcttctaaatgcttttgagaaagtgccatcaatggtgtgataagaaggtgtgaaacatttgcatgtatgcatcttgcatgtatgcaactttaccttttgcaaggtagtcaggaaaaaaaaaaagagctttgcaaatatttgcaaatgcttgaagttcagctaagctatgccatagatc

SEQ ID NO: 92740 - DNA, 548 bp, Chicken  19866894410120_3
aggtgagacttgaacctcggagtagaaaatgtgagattatttcctggtctcagactgcctgcaatcactagcacgctcccaccaactgggtgaaccttcacaagcaggagacatttatttgcctgcatttggtacttaagaccatctcttggcagaataaattgcctcaatcccatggccttccactgagctggaacaaccccytttgagttgtccttaatacgtttcttattacagatatacatcaggtatcagaagtctttctgtgtcaaacatccagcaaagatttcttcagcaaawggccttgtgagaaaaaagtctttttttcttctaaatgcttttgagaaagtgccatcaatggtgtgataagaaggtgtgaaacatttgcatgtatgcatcttgcatgtatgcaactttaccttttgcaaggtagtcaggaaaaaaaaaaagagctttgcaaatatttgcaaatgcttgaagttcagctaagctatgccatagatcctgccagttgcttgccacaaggttaaaggtagcttccagctcca

SEQ ID NO: 92741 - DNA, 600 bp, Chicken  19866894410125_1
attaatctcaatgctgcctgcaaaagcactggaggctctgaaaacttttcattgttctaagatttatgctgtcttcatctaagctgttggcttcttacttcagcctaaatcacagcctgcaaagcctttgaagttaaggcacccagagcccaaactgtgccagaaagatgaaatttccaagaaataagttaataaagtaggccttcttttattctactttcaggcttcatttaaagtttatcatttgctgcgagtagaataaaacctttcctgccttcttctcagctagttgtgaaaatygctgctgccccggagctctgcagccccagcacactgctcagctctggtgggaattgcaggcatcttccaagcggagccatgcggtggttgcagggtgagtttttgggaagaggcaccttagtttcccagttggtgggtgggagactgctctgagccccgcttggccctgcagccctcttttgtttcccttctgtggttttccacttctcctgctgcagggatgtgagttatagacaacacgtagtagctacaagatcgcacacacagagcttactctcattaaatactaaaggcacaact

SEQ ID NO: 92742 - DNA, 599 bp, Chicken  19866894410130_1
  misc_feature (1)..(88): n is any nucleotide
nnnnnnnnnnnnnnnnnnnnnnnnnnnnnnnnnnnnnnnnnnnnnnnnnnnnnnnnnnnnnnnnnnnnnnnnnnnnnnnnnnnnnnnnatatattatgattggcttggatcaaggcacagccatacttgtgcccacccctcttgcaaagcagatgggactacatggtgccctatttaagagttcaagagctccagagctcattaaaatttgtatgcaaggtcactttaggcttaaaggtaggcttgcacccttgcttaccatgtaatagaaataaaaaatgacatgggtgacaaagcttycactagcttcagagtgcccagggcttatagtcttacataattactagtctggcactgaaagcctaaaatacaataaagccatcagcaacacagatgctaaattaattactttaaaatatagctctttccacattacaacctcacaaggactgaagaagcagatcttaagagacttatgctctacattatataattaaatattacctctatgctatagatagggaagcagccacgcagacatgaaggaatttagccagtctctcagaaaatgtgtggcataatcctcctytccctcacca

SEQ ID NO: 92743 - DNA, 528 bp, Chicken  19866894410130_2
gacaaagcttycactagcttcagagtgcccagggcttatagtcttacataattactagtctggcactgaaagcctaaaatacaataaagccatcagcaacacagatgctaaattaattactttaaaatatagctctttccacattacaacctcacaaggactgaagaagcagatcttaagagacttatgctctacattatataattaaatattacctctatgctatagatagggaagcagccacgcagacatgaaggaatttagccagtctctcagaaaatgtgtggcataatcctcctytccctcaccagatttaacattyattttgagaaaggctgagcagcacgagaagtgagccaggatggagaaaaaaatggatggctgccaaaagggattgatgtccttcagactccagggagtttttaacccttcccaatggttttgccagcctgaaaaacctgggggggggtcatcagcctgtactgctcctctgctgatccatgagagatttgccagtgggagcagctg

SEQ ID NO: 92744 - DNA, 506 bp, Chicken  19866894410130_3
gagtgcccagggcttatagtcttacataattactagtctggcactgaaagcctaaaatacaataaagccatcagcaacacagatgctaaattaattactttaaaatatagctctttccacattacaacctcacaaggactgaagaagcagatcttaagagacttatgctctacattatataattaaatattacctctatgctatagatagggaagcagccacgcagacatgaaggaatttagccagtctctcagaaaatgtgtggcataatcctcctytccctcaccagatttaacattyattttgagaaaggctgagcagcacgagaagtgagccaggatggagaaaaaaatggatggctgccaaaagggattgatgtccttcagactccagggagtttttaacccttcccaatggttttgccagcctgaaaaacctgggggggggtcatcagcctgtactgctcctctgctgatccatgagagatttgccagtgggagcagctg

SEQ ID NO: 92745 - DNA, 600 bp, Chicken  19866894410140_1
tgcatgttagtgttcaccgtccacattgattcgtagcaagaaagatgaattttaagcatgtgcttaaagtgactgatctcacatcaacaccctttccccccacgataattaacttcagcagcagtgaaagcggcatatgagctcccagctcccggcttcccaacacacagaagtgagagctgaggctccagtacggcaagtgctggtaccactgccactctagcacataacagccatccatagtgaccagatcaatgtgcaccagtaaagcagagcagagagaaccacctacccagtggwgmgtgagcaagcaaaggcagaagggcttgtcagcctgcctggcctgaccctcctcaccttcctccccagacatggagccggggcagcgcagcctggatgcagagcagatgcagcagcagcagcagttgaaactacgggagcggcagaaattctttgaggaggttttccagcatgaagtggatttcttcttccctgtgtctcacctgcagctggagcatcggagacgtaagtgctgcgggcggtggagcagggctagacatgctttggggagctggcacaggttagagattggtgggatgt

SEQ ID NO: 92746 - DNA, 600 bp, Chicken  19866894410140_2
catgttagtgttcaccgtccacattgattcgtagcaagaaagatgaattttaagcatgtgcttaaagtgactgatctcacatcaacaccctttccccccacgataattaacttcagcagcagtgaaagcggcatatgagctcccagctcccggcttcccaacacacagaagtgagagctgaggctccagtacggcaagtgctggtaccactgccactctagcacataacagccatccatagtgaccagatcaatgtgcaccagtaaagcagagcagagagaaccacctacccagtggwgmgtgagcaagcaaaggcagaagggcttgtcagcctgcctggcctgaccctcctcaccttcctccccagacatggagccggggcagcgcagcctggatgcagagcagatgcagcagcagcagcagttgaaactacgggagcggcagaaattctttgaggaggttttccagcatgaagtggatttcttcttccctgtgtctcacctgcagctggagcatcggagacgtaagtgctgcgggcggtggagcagggctagacatgctttggggagctggcacaggttagagattggtgggatgtcc

SEQ ID NO: 92747 - DNA, 600 bp, Chicken  19866894410140_3
ttttccagcatgaagtggatttcttcttccctgtgtctcacctgcagctggagcatcggagacgtaagtgctgcgggcggtggagcagggctagacatgctttggggagctggcacaggttagagattggtgggatgtccccagtctaaaggcagccagggacatgcatgtcctgcacggagacagggccacacatgctgcgtgtgggtgtgcatgtggattactcactccacttaacaaaggcactgaactggggtacccaggctggctgccttcatagtcactggctcctgcagacascagtttggagctggagcagagattgcagtgacagcagggttttccaggggatgttttaagcaaatgtgattctcatgtggacctcttaccagcaggtgcaatttggttctccactgcaaggctagcctcccattttggggttcttcctgaagcccatgggccagacaggcttgcatggtgcccttagcctgacactagcactcacctttttgctgacctctgtctctgcagcccccttggggagcatttcctccatggaggtgaatgtggacgtgctagagcagatggacatgatggacc

SEQ ID NO: 92748 - DNA, 600 bp, Chicken  19866894410156_1
cctgcagtatcttgttgggttgcaggccttttccttaaaattatcacattccacttccaagtggtgacccatgctgggtcacacttgccaaaactgacagagttccaattttgacatgtcaaaattgttacgtaagcagaaaccttattgtccttgatagcttccccttcagcatatgcagcattgcctgataaagcctgtatttgctccaaaacttactgtaccagaaagaacacagctggaagagctgcacaaagatcctgacttaaactttaatcttcagataacttctggtacatmatatgctcagcaccagaggaaataccaaagagtactctcaaataatattctcatatagtatcttgctaacagcagaacaaattctcagctggcctgaatcagtgaagccaaagtactttgtctcactgggaaccttgttctacataatgtaaatggaattaacatggccttgcttgcctctaaaaagtaaccaaatgaaaatatgtctttggggccacgaagctcggatttacctgaaatatgcattggtcttttaacttgtgttgaaactggggcctgagatgatggtcccagtgtgta

SEQ ID NO: 92749 - DNA, 600 bp, Chicken  19866894410161_1
actattttgttcttgccagttgctatatgcagatgccacaaattactaaaggaatgaataatttggagggcatttattattacagatgatgcattgcaaagaacacttacactgtacagtcaattgacagaagtgttaggaagggcagtaaaaaaaactaaaacgtttccatacaggtgtaagtaatctcattttatctcgttttatactgaagtgctgagatgactaccagtcccaacaatacaaactcttctacaacaaaaaccatagtacagaattaaagtttctttcccctcacawttaatatcaagtctatcctgaagctgttatgttaccggagaaacagctgcagagagggaaagtttgcatgatgaaacagagaggactgcaatccctcttctgtcccttttaattttgatttttcaaatgatgtgagaaactcaggtggaaggatatgctctgcatgtctgcccatgtggcagagaggaaaatgtaattgattattcttattaaggaaactggtttttgccagaagcatcaagtttactcagtttcatccttaaaacgtaatatacagcatagttagatattttaacttca

SEQ ID NO: 92750 - DNA, 539 bp, Chicken  19866894410179_1
ctgatgcaggcacttccaggaatttgatcctctttctactttagctttcttccaaagctgtatggtgccctcgagtggctacagtgctcgtcttttcccccatacagcttataaatgcagctgtgttttttccaggttcctgcttaagatgaactagagtaagttttacataattagccacggaaataaacagttcaattaaaaacaaatcagacttcagggaaaaaaaacctaactgtaggtgaggctgatccagatcatgcttaggctgaagactgcacatgttcaaaacagggttgktttttttcccacttaaaataatrataatacatttgcaaacaaggttttacctgtagtttaatatcatatactgatggatagcacctagaggccccaaatcaacatttgacgcccccccagtgttgcacatagacatgtctctgccccaaagagcttacagtctaagcagtcaagaagtgggagaaaataataaccgtgctcacttttatagaagagaaactcagatctaatacaggtca

SEQ ID NO: 92751 - DNA, 516 bp, Chicken  19866894410179_2
ttgatcctctttctactttagctttcttccaaagctgtatggtgccctcgagtggctacagtgctcgtcttttcccccatacagcttataaatgcagctgtgttttttccaggttcctgcttaagatgaactagagtaagttttacataattagccacggaaataaacagttcaattaaaaacaaatcagacttcagggaaaaaaaacctaactgtaggtgaggctgatccagatcatgcttaggctgaagactgcacatgttcaaaacagggttgktttttttcccacttaaaataatrataatacatttgcaaacaaggttttacctgtagtttaatatcatatactgatggatagcacctagaggccccaaatcaacatttgacgcccccccagtgttgcacatagacatgtctctgccccaaagagcttacagtctaagcagtcaagaagtgggagaaaataataaccgtgctcacttttatagaagagaaactcagatctaatacaggtca

SEQ ID NO: 92752 - DNA, 600 bp, Chicken  19866894410183_1
ggcaaatgcttacatgcttggtcatttgttttcttaaggatatggtttttactagctagtattcagctcaggtaaacaaagagaggagggacacctgttgtatggctactcttctctccaaggaatgaagttaaataatcttccattgtaggaaggcacatttcattatgtggcacaaaagcggtagctcttatgaagagattttcagagagaatgcctgtgatctaataatagaagacaaaaccttcccagaagtacttactttcatttagtatgaaaaaaagaaagcattctttgggytaagaaaaaaagttagattgcaagtgagaatcacttgatatctccagctaatttgctgttgtggaagattaataggaaagagaattctggacactcatcttaatactactttgtgtgcatatgtataagtgatttgatgacatttgtagcttactgtaaatttattcatatagagctgtactgattgacatgatatatttttccacttcatgacatttgtttacattgtaatttgccttttagttttgcagtgttcacttcaaaatcaccaacatacaatgctaactctaaatgaaattc

SEQ ID NO: 92753 - DNA, 600 bp, Chicken  19866894410194_1
aaatttaaaaaagcaaagctttatcaatttaattctaacagtactaagcctggtaacaagataatcatagggaggactttggtgcacacttcctattaccatggtaaatgtgctttatagaatcaaggctagaagaggccattaaatcagtcatataactctgcgtacagataaaccacctgcacaaccaagatcatacattcacctaatttctgctgttttaagccccataaattgtatacgtctaaaatccatcttgaaaggacacacccatccttgactggaaatatcaggaaacarggaatacagttctgctttttaatgcttgctgcagtagttgaatgttactactacaatgtatgctatttttattttgaagagtcccacctccattcactgctagaaaataatgccatttccacagttcagttttcatttccaattgattcttggtttttctccctccttaagtaaaaagcccacattctagcccatttcctgcatgtgcatttcagcttcacaaactcactattccactgtttacacacctcatgtcccttacatgctttctaatagggctttgcactggatattcatatt

SEQ ID NO: 92754 - DNA, 519 bp, Chicken  19866894410221_1
gtgaaatgtacataacagcggcaaaatatttacttgtgcacacacccaggttcctgctcgtgtatgctcacgtgctgggtggatgtgctgctagcagagcagttgttcagattctctttgttttaaggaacaaagcttggtgaagagcaaacagcgggcacgccttagttcttaattgccttccatatggaggacgtgacacgttgtatgcctggttgatatttctaataaatttctacagtaattactgctcatctgattcttgtccttcccccacatcaaccttgtaaatgggaaacrgcgcttgctgtttgtagatgctttataagggtgccaagtaccactgcccatgtctcagcttgaggctgaacacaggctgtattgaagcaaactgttcccatcgctgccgctgcctcaaaaggacatttaaaaagctggaatgctgtgttactgtcttagcactgctgagaacatgtttaatgtagtattgtagggattctgttatctgatcctctgcca

SEQ ID NO: 92755 - DNA, 600 bp, Chicken  19866894410228_1
tacatttttacctacataaccatgctgtcatgtcccactctgactggttcacaccagataacattgtgccttatttggatatttccacattcttttctcatccttcttcttctcctgttttctctgcatcaaggtcagcacgatagcactgtctctctgtgcttagggagaggcctgtcccgtacaccccatagccgcacaagacgcctactacaacattactcattcaattttgactagaaatcttgctttcccagaagctttgcccctctcccccatgaaaattggagcaaaactagkatatttctccaaatgttactgattcaacacagtggacttctttctaaacaacttgacaaaaagttctttctactataatacaaaaacattatcccacttgactcaaggtcaaattgacttacagactgtgtttcaagacactgaaacacctaaatttagggttttgctcatacaagaacaattgacaaaataaaactaaaggggaaaaaaaaaaccacacacaaaaaccaaatgacaaaccaccaaaacggtccactactgtaagcaataattaacttgcattttttttctaactagggg

SEQ ID NO: 92756 - DNA, 599 bp, Chicken  19866894410230_1
  misc_feature (1)..(55): n is any nucleotide
nnnnnnnnnnnnnnnnnnnnnnnnnnnnnnnnnnnnnnnnnnnnnnnnnnnnnnngcgcagtgctgggtgcagggcaacagatgcagtgccctgggattgtcccctgcatatttctgacagaaagctggggcacatgaacgaacacaataagctctctgatgtactcttaccagcgtttactttgtgctgacaacacaggctgggatgccaaccggttggaaagtactgaatgtttaagtatgcctatccccagtatatattgttttctccctaacctgctcagcatgaacctgaaatcyttcctcaaaccacagcgttgctggtgtctgggtttgtgtcgcctctaacactgtgactccttatcatagctatcctgtgctcctgaactctgagacccgtgttctccccagacactctcccagtggtttttatacagaagtgcatccttaccttttttccatcgtaaagctcctgggacttctcctgtctctcagggaagaacagatagctcttcatgctctcccagccttacctcttttaaccgtgtttagttttccacagccctgcttcacaagtccgtgctttctggtctgcaact

SEQ ID NO: 92757 - DNA, 502 bp, Chicken  19866894410230_2
aaccacagcgttgctggtgtctgggtttgtgtcgcctctaacactgtgactccttatcatagctatcctgtgctcctgaactctgagacccgtgttctccccagacactctcccagtggtttttatacagaagtgcatccttaccttttttccatcgtaaagctcctgggacttctcctgtctctcagggaagaacagatagctcttcatgctctcccagccttacctcttttaaccgtgtttagttttccacagccctgcttcacaagtccgtgctttctggtctgcaactaccaaatratatgatctagtgtctccttctcaggaaggaagatttccttcagtaccagccagtatgaattcctctgtgtttattacatgtgatagacttatgcattctcacataacttgcaaatcctaaaatggacacacattaatttatgatttccatttcccaaaataacacaaatcaaggttctgcttttcccaaaatagcataaat

SEQ ID NO: 92758 - DNA, 599 bp, Chicken  19866894410242_1
  misc_feature (1)..(117): n is any nucleotide
nnnnnnnnnnnnnnnnnnnnnnnnnnnnnnnnnnnnnnnnnnnnnnnnnnnnnnnnnnnnnnnnnnnnnnnnnnnnnnnnnnnnnnnnnnnnnnnnnnnnnnnnnnnnnnnnnnnnncagaaattaatgaatgtttttcattaataaatgaaattaacatatggtagacatacaaatgaatagtatcttcagaaatatgactacagaggttcagtggtagaaatgttcctgaaggagtgctttaaaagccacggtgggtgcagaaaaactcctcaggaataagtagatcccgtccaatarttctgcttcaaatcctgtttcagcagtggctttaatagtctatagtctaattatagtacttaagctgaatttcacttgaaaaacacaacatatcacttaaytaaggattaaattatgtgacaagtcagaatctaagtttgatctggttttgttcgaggctgtcagaactacatagattaacttttttgaaagtttatcattttctttaagtcatgtaagattttttttcctttaaaagaagaagttaaaataaaaacagtacattcttatttatataaatactgcattctttctcattc

SEQ ID NO: 92759 - DNA, 599 bp, Chicken  19866894410242_2
  misc_feature (1)..(16): n is any nucleotide
nnnnnnnnnnnnnnnncagaaattaatgaatgtttttcattaataaatgaaattaacatatggtagacatacaaatgaatagtatcttcagaaatatgactacagaggttcagtggtagaaatgttcctgaaggagtgctttaaaagccacggtgggtgcagaaaaactcctcaggaataagtagatcccgtccaatarttctgcttcaaatcctgtttcagcagtggctttaatagtctatagtctaattatagtacttaagctgaatttcacttgaaaaacacaacatatcacttaaytaaggattaaattatgtgacaagtcagaatctaagtttgatctggttttgttcgaggctgtcagaactacatagattaacttttttgaaagtttatcattttctttaagtcatgtaagattttttttcctttaaaagaagaagttaaaataaaaacagtacattcttatttatataaatactgcattctttctcattctacattctctttctagaatactacaccaaaataaataggccccaaatagaattcttacattacatgaaaatccacactttgtctgcaaaattgtcagagct

SEQ ID NO: 92760 - DNA, 600 bp, Chicken  19866894410249_1
tttgtgagtgtatttgcacaggggctcttctggcagtcgtaccactgatgttggtagacttgcaggactccttgccactgagcaccttcatcttctgttgacttcaacaatgagcagaaaatatttcctggagcacagtaagtcagcagagcaaactgtgccaagcaggtaactcactgcagttcttgcggcctctcctctgccagaacatacattaggttgagcaacaaagactaaagtgtaagagaaagtataacatataatgtttcactgaaagtccactgcactgtgaagcatttrtgtcatggaaaccaagctcatcgtttctcagagctgaagcataaggaacattagggcaccaagacaagacatttatttccttggactagacagctcctacactggaatatcattcttggaacatttggggacatcgtgctacgttggcttttactatgtacatgctgcagcctgcaaacagttctgcagcttccaaagtagaaagccaagaatcatcaagagaaatgaaagcacacaggggagaaaggaaaagttgggagctgtcagggtcaatctgaattttttttcatggattgaaag

SEQ ID NO: 92761 - DNA, 600 bp, Chicken  19866894410252_1
tagtgttatatttgaaggctgataaggccaattggcagtaaaaatgaaatgttcttctaatgttttaattaattctcgtattctctgtctgtatatagaactagctgcataataatttgagtcaggacatttcggataacccacattttgaatacaataatacagtaatacaatataatacaataattaccatgcttaacagaccatttatgaatatatatgaagatcccaaatctgtctgggtagactagaggattaataaaaattgcttcatatcttccttcagaaacaacacttcarctcttttgtcttttccttataactctcttctgagcggagtcttcatcagtgttaaaacttgttcctytctggttaaaactctgccttgcacttygggagctccacctatgstctcttctcttagggcttgactttcaactccttccatttaagaagagcccatcttattatcttcctagcatatcactgtttaaatgtcatagcaatgatttgctcagagatctaacaacaaaaaacagataatttcttgtatttcttatgaggtcttcagcaatgcatctgcccctctttagttaatgt

SEQ ID NO: 92762 - DNA, 592 bp, Chicken  19866894410252_2
attaattctcgtattctctgtctgtatatagaactagctgcataataatttgagtcaggacatttcggataacccacattttgaatacaataatacagtaatacaatataatacaataattaccatgcttaacagaccatttatgaatatatatgaagatcccaaatctgtctgggtagactagaggattaataaaaattgcttcatatcttccttcagaaacaacacttcarctcttttgtcttttccttataactctcttctgagcggagtcttcatcagtgttaaaacttgttcctytctggttaaaactctgccttgcacttygggagctccacctatgstctcttctcttagggcttgactttcaactccttccatttaagaagagcccatcttattatcttcctagcatatcactgtttaaatgtcatagcaatgatttgctcagagatctaacaacaaaaaacagataatttcttgtatttcttatgaggtcttcagcaatgcatctgcccctctttagttaatgtgctcattcataaagtttagtcatgacacagataaacagaaaacagcaagagattctata

SEQ ID NO: 92763 - DNA, 565 bp, Chicken  19866894410252_3
atagaactagctgcataataatttgagtcaggacatttcggataacccacattttgaatacaataatacagtaatacaatataatacaataattaccatgcttaacagaccatttatgaatatatatgaagatcccaaatctgtctgggtagactagaggattaataaaaattgcttcatatcttccttcagaaacaacacttcarctcttttgtcttttccttataactctcttctgagcggagtcttcatcagtgttaaaacttgttcctytctggttaaaactctgccttgcacttygggagctccacctatgstctcttctcttagggcttgactttcaactccttccatttaagaagagcccatcttattatcttcctagcatatcactgtttaaatgtcatagcaatgatttgctcagagatctaacaacaaaaaacagataatttcttgtatttcttatgaggtcttcagcaatgcatctgcccctctttagttaatgtgctcattcataaagtttagtcatgacacagataaacagaaaacagcaagagattctata

SEQ ID NO: 92764 - DNA, 548 bp, Chicken  19866894410252_4
ataatttgagtcaggacatttcggataacccacattttgaatacaataatacagtaatacaatataatacaataattaccatgcttaacagaccatttatgaatatatatgaagatcccaaatctgtctgggtagactagaggattaataaaaattgcttcatatcttccttcagaaacaacacttcarctcttttgtcttttccttataactctcttctgagcggagtcttcatcagtgttaaaacttgttcctytctggttaaaactctgccttgcacttygggagctccacctatgstctcttctcttagggcttgactttcaactccttccatttaagaagagcccatcttattatcttcctagcatatcactgtttaaatgtcatagcaatgatttgctcagagatctaacaacaaaaaacagataatttcttgtatttcttatgaggtcttcagcaatgcatctgcccctctttagttaatgtgctcattcataaagtttagtcatgacacagataaacagaaaacagcaagagattctata

SEQ ID NO: 92765 - DNA, 600 bp, Chicken  19866894410266_1
cttgggttgttgttcccaggctatgcaatgcatccatgccatagatctgccactttgcggggctgggaaagcatcccttcaggttgctgtgccccactattcagcaggccttattgtgatgtgtctgtgctctctaggtcggagttgttcagtatggagaagacgtggtccacgagttccatttaaatgactacaggtctgtaaaagacgtggtagcggctgccagccacatagagcaaagaggagggacagagaccaggactgcctacgggatagagtttgctcggtaaaaatccctcrcgttcaccttcatctccataagttcaaactcagtaccttcttcccttctctccctcgtcgcactccatccctctctgcagtctgcaaagcgtgggcacaggaacgcagctgggatgcaggggacacgttggggtggctgtgacccctgcggtgactctgagcagcccagggcatctcttcaattgcagctcggaagcgtttcagaaaggtggccggaaaggggcaaagagagtaatgattgtaatcacagatggagagtcgcacgacagcccagacctggagaaggtgattgaggacagc

SEQ ID NO: 92766 - DNA, 600 bp, Chicken  19866894410268_1
atgactagcttaattggaattcaggattcattgtggaactgtagcctctatgaaaccgttcatttccttgtgttagctttgcttagctaatatttaaatagacatcaataatcactacaaaaaaggcagatatttttgtacttgtgtttgattccttggctaaataggtatacagctgtgactgtcgatgctgtaactgattggaccagctctactggagtgctgttacaatagatgaatcaaaagttggaagcacttccaattgtggggattacctgcaaagctttttttttttttttwttgtcccaaagcagccactygagtcgatgtctgtattgcattttgatgtcatgttgtagttaaatttactttttctttgacttgcccaggtctctgtgccgaaggggcgctctgactgcagtgcagttcagtggtagctttcctaaagcaaaagggaaagtgatgctaggtagaagtcaatagagaaagaaggaacacgatgtctgcaaagtctttgaaaccttctcttacagtgttagcatattgggttctgtagatgcaggtatgaaaatgtaacatggttgtggagtgagatggggg

SEQ ID NO: 92767 - DNA, 600 bp, Chicken  19866894410268_2
tcaggattcattgtggaactgtagcctctatgaaaccgttcatttccttgtgttagctttgcttagctaatatttaaatagacatcaataatcactacaaaaaaggcagatatttttgtacttgtgtttgattccttggctaaataggtatacagctgtgactgtcgatgctgtaactgattggaccagctctactggagtgctgttacaatagatgaatcaaaagttggaagcacttccaattgtggggattacctgcaaagctttttttttttttttwttgtcccaaagcagccactygagtcgatgtctgtattgcattttgatgtcatgttgtagttaaatttactttttctttgacttgcccaggtctctgtgccgaaggggcgctctgactgcagtgcagttcagtggtagctttcctaaagcaaaagggaaagtgatgctaggtagaagtcaatagagaaagaaggaacacgatgtctgcaaagtctttgaaaccttctcttacagtgttagcatattgggttctgtagatgcaggtatgaaaatgtaacatggttgtggagtgagatgggggacagagccagcggcagactc

SEQ ID NO: 92768 - DNA, 600 bp, Chicken  19866894410272_1
tccccacactgccacaaattccaacaagttttccctggacagaaaaacaacatatgtatggtagtcattatactcattacttacattctccatctttttcaggactaccttttcacctcagagattaaagccagactgtaatgacagctgaaaaatgataaaatagaaatgtaagtgagtcaatgttctaattctccaaaaatataaacagaatactaatccactgtggattaaagccagaggaactccacaggtgaaaaggaatgtttcttaagatcagtttccttcagactgagcccratagaagcccaagcccagagaatactgcactcagccagaagttccaagacctgcctgaacagaatacaccaagatgctcctgagtctggtttccaaagtcctttcactgtcttcagtgggtggcagctcagatttaaaagaaaaaaaaagtctgtgtatcatagtcagaaaatgaataaggacatgactgcagcaagaagaaaaaattcacagataaatgaaaggtttcatatcactgatttacaacacctggtcagtgtgataagaaaaaacaaagagcggaggactgggaaaaaaaaa

SEQ ID NO: 92769 - DNA, 599 bp, Chicken  19866894410273_1
  misc_feature (1)..(73): n is any nucleotide
nnnnnnnnnnnnnnnnnnnnnnnnnnnnnnnnnnnnnnnnnnnnnnnnnnnnnnnnnnnnnnnnnnnnnnnnnccctgcacccatccaccttcacccacacccctccatccgtcccttcctctcggactcatccatctctcacccatcccagcacagctccatccccacctcaccaataccctcccgctgccactttccacgtcccattgacaccttcatcccccatcccattctcactgtgtgctgacggctccatcccacagcgcctccatacgccacaagcttaccagaggacagcrcggtgcgtgcgggcgacacggtgcagctgcagtgcctggcccacggcaccccgccactgctctacacttgggacaagctcaatggcagtctgtcccctcgtgctgtgccccgtgccggcctcctgcgcatcagccctgcgctgctctccgatgctggcacctatcgctgcatggtcactaaccgtgtgggcagagccgagaccttcgcccgcgtcactgtccatggtgagtgcccgggtgccccacactgcactggggatgcccgccttgcccgatgtcacctttacrtcccacgcagg

SEQ ID NO: 92770 - DNA, 369 bp, Chicken  19866894410273_2
ccctgcacccatccaccttcacccacacccctccatccgtcccttcctctcggactcatccatctctcacccatcccagcacagctccatccccacctcaccaataccctcccgctgccactttccacgtcccattgacaccttcatcccccatcccattctcactgtgtgctgacggctccatcccacagcgcctccatacgccacaagcttaccagaggacagcrcggtgcgtgcgggcgacacggtgcagctgcagtgcctggcccacggcaccccgccactgctctacacttgggrtcccacgcaggtgatggtggtggtgacagtggtggtcccctggccgtgcgggtgacaccagggagcctg

SEQ ID NO: 92771 - DNA, 599 bp, Chicken  19866894410277_1
  misc_feature (1)..(43): n is any nucleotide
nnnnnnnnnnnnnnnnnnnnnnnnnnnnnnnnnnnnnnnnnnnaagtttcaattaaaacataaaaaggactgcctgaaagtgagggagaataaattaagtggatgctctgcgctataagcacgggattttactgcagtttctggagtttttccccaaacttggcacattttatgaagtatcctctactgcccagattctttggtgccaaacagaagtgcagcccaggtgacaatctcttatctggagggcacttcactgttctatccactagctagccactgcttttcaaaacactggtrtttttgtgggaaccagaaggagcagaaggttgtatctttgaaaacttttaccaattgagcttggaattgaatactgggtacaaaaattatgtgggactaaaagctcttgagcagcataatgcctccttctgcagcacaaaggctggtatctgcatctgttctctacacagttatcagctctggtacctctcactgggttagacagcccaagatgtttctcgaccagttccatgcacttctcatccatgaactcataggcagacaggatctctcccagcatggttctgcaggttgtaaac

SEQ ID NO: 92772 - DNA, 599 bp, Chicken  19866894410278_1
  misc_feature (1)..(148): n is any nucleotide
nnnnnnnnnnnnnnnnnnnnnnnnnnnnnnnnnnnnnnnnnnnnnnnnnnnnnnnnnnnnnnnnnnnnnnnnnnnnnnnnnnnnnnnnnnnnnnnnnnnnnnnnnnnnnnnnnnnnnnnnnnnnnnnnnnnnnnnnnnnnnnnnnnnntagtctttctgcagtacagtacctgtggttgagctcccagcactgcctgctttgaagacatgagctgcagcccccaaggacatgtgtagggatgctgtttttcatactggaatggttaatgagtgtgcagataccacctggacatgtgttcrgggttattccaagtatagacatctaatgctgtctgctgaagccctggagctgctttgcactggatgaaagaagagagcagggatccatatgctatttcattggtcaaagtggagagaacaaattgaagtggctattttagcacagtgagacagctgggctcttctcaaggcagctcctgagaagtcacatctccatgcatgatgaagggaaaagcatctggcttagctgcagctggtggggaagatatggctagactggctgatgttaaggaagtctttggatgattgcttgacaaaga

SEQ ID NO: 92773 - DNA, 599 bp, Chicken  19866894410281_1
  misc_feature (1)..(182): n is any nucleotide
nnnnnnnnnnnnnnnnnnnnnnnnnnnnnnnnnnnnnnnnnnnnnnnnnnnnnnnnnnnnnnnnnnnnnnnnnnnnnnnnnnnnnnnnnnnnnnnnnnnnnnnnnnnnnnnnnnnnnnnnnnnnnnnnnnnnnnnnnnnnnnnnnnnnnnnnnnnnnnnnnnnnnnnnnnnnnnnnnnnnnnttcagcaccaaaaatgtaatgggatgattcatgcatgcactggatgtttaaggtatgcgtgtctgtgtctccctactaatttttcaatctgatttccaatttcaaccaagtctgacaragggraaaatgatgctggggcacaaagtccccacaggctctgcaaaaacaggcaaatagaggaaattggcaaggcaatggggcaaccaggtctgcagctcatagacctgcttgattcaatgataactcatgtctgtgcgtgactggtgggcaatatgcaccctcctacaggctcataaacaaaacagagcctgacggcttctttccaccattagcaccagtggagcaacacacagagaaaatcagcctcaatgcacatttccctgatctacacagagggagctgtgctttcaaggagag

SEQ ID NO: 92774 - DNA, 599 bp, Chicken  19866894410281_2
  misc_feature (1)..(177): n is any nucleotide
nnnnnnnnnnnnnnnnnnnnnnnnnnnnnnnnnnnnnnnnnnnnnnnnnnnnnnnnnnnnnnnnnnnnnnnnnnnnnnnnnnnnnnnnnnnnnnnnnnnnnnnnnnnnnnnnnnnnnnnnnnnnnnnnnnnnnnnnnnnnnnnnnnnnnnnnnnnnnnnnnnnnnnnnnnnnnnnnnttcagcaccaaaaatgtaatgggatgattcatgcatgcactggatgtttaaggtatgcgtgtctgtgtctccctactaatttttcaatctgatttccaatttcaaccaagtctgacaragggraaaatgatgctggggcacaaagtccccacaggctctgcaaaaacaggcaaatagaggaaattggcaaggcaatggggcaaccaggtctgcagctcatagacctgcttgattcaatgataactcatgtctgtgcgtgactggtgggcaatatgcaccctcctacaggctcataaacaaaacagagcctgacggcttctttccaccattagcaccagtggagcaacacacagagaaaatcagcctcaatgcacatttccctgatctacacagagggagctgtgctttcaaggagaggatgt

SEQ ID NO: 92775 - DNA, 600 bp, Chicken  19866894410281_3
gaagtgcattagagctggagcagcaacacaggaaaagcagggtcaggctgacatttttcattcccagaggcaccctatgttgttcagtgctggaaaacatgagaacctcaagtcctgaaaaagggaaggggaatcaagtgtgcctgctgttagcttttggaggacacccaaggcaaaactgtcatgtaccctttcctcttgctgcccatatgtggcctgatttgcaatgctgcaagatctgcccatcaagagcccaagctctgattgctcctccctaaatcctgttctctctgcccttcrggctccagagtttttctgaaatatcaagaaaaccaggtttaatgggcttggaaatgcaaactgttcctctgaagaagttaaatcyagatctgtcctcaggaatgtaggagacatcagcagaaagatgaatcaggtactcaacaggccaaactctccaaactgagagtacacagctccatgcaagcattgtatgagcacaaacgctcttggtgacaccctgtagctctgcatgcacactcatacamccaaacatgcccacactggaaactgaacacacatgtggattsacatyctaatgtt

SEQ ID NO: 92776 - DNA, 600 bp, Chicken  19866894410281_4
agtgctggaaaacatgagaacctcaagtcctgaaaaagggaaggggaatcaagtgtgcctgctgttagcttttggaggacacccaaggcaaaactgtcatgtaccctttcctcttgctgcccatatgtggcctgatttgcaatgctgcaagatctgcccatcaagagcccaagctctgattgctcctccctaaatcctgttctctctgcccttcrggctccagagtttttctgaaatatcaagaaaaccaggtttaatgggcttggaaatgcaaactgttcctctgaagaagttaaatcyagatctgtcctcaggaatgtaggagacatcagcagaaagatgaatcaggtactcaacaggccaaactctccaaactgagagtacacagctccatgcaagcattgtatgagcacaaacgctcttggtgacaccctgtagctctgcatgcacactcatacamccaaacatgcccacactggaaactgaacacacatgtggattsacatyctaatgttcagggtcatgtcacgttaggcctgtgctgagaggttcctctattctcaggcctgttctaataatcaccactttctagaatcttgt

SEQ ID NO: 92777 - DNA, 600 bp, Chicken  19866894410281_5
tcaagagcccaagctctgattgctcctccctaaatcctgttctctctgcccttcrggctccagagtttttctgaaatatcaagaaaaccaggtttaatgggcttggaaatgcaaactgttcctctgaagaagttaaatcyagatctgtcctcaggaatgtaggagacatcagcagaaagatgaatcaggtactcaacaggccaaactctccaaactgagagtacacagctccatgcaagcattgtatgagcacaaacgctcttggtgacaccctgtagctctgcatgcacactcatacamccaaacatgcccacactggaaactgaacacacatgtggattsacatyctaatgttcagggtcatgtcacgttaggcctgtgctgagaggttcctctattctcaggcctgttctaataatcaccactttctagaatcttgtttctaatgacatccatccatgctccttgaggagatgtctcctgtttctctcccagggaaacgtaaatgttcacagagcaaccactagcaaggtacttccacacacacaagccaactcagtcctrtattttttgaacaatgcctatttttgagaaggaaca

SEQ ID NO: 92778 - DNA, 600 bp, Chicken  19866894410281_6
tctctgcccttcrggctccagagtttttctgaaatatcaagaaaaccaggtttaatgggcttggaaatgcaaactgttcctctgaagaagttaaatcyagatctgtcctcaggaatgtaggagacatcagcagaaagatgaatcaggtactcaacaggccaaactctccaaactgagagtacacagctccatgcaagcattgtatgagcacaaacgctcttggtgacaccctgtagctctgcatgcacactcatacamccaaacatgcccacactggaaactgaacacacatgtggattsacatyctaatgttcagggtcatgtcacgttaggcctgtgctgagaggttcctctattctcaggcctgttctaataatcaccactttctagaatcttgtttctaatgacatccatccatgctccttgaggagatgtctcctgtttctctcccagggaaacgtaaatgttcacagagcaaccactagcaaggtacttccacacacacaagccaactcagtcctrtattttttgaacaatgcctatttttgagaaggaacagctattatttcacacagtctttgtgtaattaagcctagatca

SEQ ID NO: 92779 - DNA, 600 bp, Chicken  19866894410281_7
gcccttcrggctccagagtttttctgaaatatcaagaaaaccaggtttaatgggcttggaaatgcaaactgttcctctgaagaagttaaatcyagatctgtcctcaggaatgtaggagacatcagcagaaagatgaatcaggtactcaacaggccaaactctccaaactgagagtacacagctccatgcaagcattgtatgagcacaaacgctcttggtgacaccctgtagctctgcatgcacactcatacamccaaacatgcccacactggaaactgaacacacatgtggattsacatyctaatgttcagggtcatgtcacgttaggcctgtgctgagaggttcctctattctcaggcctgttctaataatcaccactttctagaatcttgtttctaatgacatccatccatgctccttgaggagatgtctcctgtttctctcccagggaaacgtaaatgttcacagagcaaccactagcaaggtacttccacacacacaagccaactcagtcctrtattttttgaacaatgcctatttttgagaaggaacagctattatttcacacagtctttgtgtaattaagcctagatcatgtgg

SEQ ID NO: 92780 - DNA, 495 bp, Chicken  19866894410281_8
gtgacaccctgtagctctgcatgcacactcatacamccaaacatgcccacactggaaactgaacacacatgtggattsacatyctaatgttcagggtcatgtcacgttaggcctgtgctgagaggttcctctattctcaggcctgttctaataatcaccactttctagaatcttgtttctaatgacatccatccatgctccttgaggagatgtctcctgtttctctcccagggaaacgtaaatgttcacagagcaaccactagcaaggtacttccacacacacaagccaactcagtcctrtattttttgaacaatgcctatttttgagaaggaacagctattatttcacacagtctttgtgtaattaagcctagatcatgtgggtactcattttcttacatagctgtgaagaggtaatcatgcctgagccataagaccatactgtgtattcgctctgtaaatacccagcttcacatctgtctagcttattgtata

SEQ ID NO: 92781 - DNA, 600 bp, Chicken  19866894410289_1
tttcagtccctggtgaaaggtgtatgtgctgcagtactccatcatttgttgtagctggtgtatgagggtaattaatggcgctggtctcttctgtcccctgggttcacctttgcactcatctgtctctttggttctgactgtcagctccactcactgcctggcttgcttggagcgctctgcatccattcacacccgatttcctcccctgctctttccctggcttgcccctgagaggacttgtctgtggctcagctcctccctgaggtgctgtggggtctgggtttggtgcaggatcatagwgaatgcacatggcaccgtgggcactgcccaatgccagkatcagagggcaccaggagcagcagtgcaccttccctgcaccttcccagcctgtccccccaccgtgctggrgacagcaacatgtctcaaaccgagtatgaarttgggggttacaaagcagcgttagacatgaacaagaaaaaattataaacaaggatgatcaaaagtggtcctgtttaggtgcttcttttctatttaaattttatttgaagacttgagtttcttttattctatgtgcaaaatttaatttaaaatacaggaaag

SEQ ID NO: 92782 - DNA, 600 bp, Chicken  19866894410289_2
ccatcatttgttgtagctggtgtatgagggtaattaatggcgctggtctcttctgtcccctgggttcacctttgcactcatctgtctctttggttctgactgtcagctccactcactgcctggcttgcttggagcgctctgcatccattcacacccgatttcctcccctgctctttccctggcttgcccctgagaggacttgtctgtggctcagctcctccctgaggtgctgtggggtctgggtttggtgcaggatcatagwgaatgcacatggcaccgtgggcactgcccaatgccagkatcagagggcaccaggagcagcagtgcaccttccctgcaccttcccagcctgtccccccaccgtgctggrgacagcaacatgtctcaaaccgagtatgaarttgggggttacaaagcagcgttagacatgaacaagaaaaaattataaacaaggatgatcaaaagtggtcctgtttaggtgcttcttttctatttaaattttatttgaagacttgagtttcttttattctatgtgcaaaatttaatttaaaatacaggaaagtgatgcttactggaaatgctttaattggtgtttgttgg

SEQ ID NO: 92783 - DNA, 600 bp, Chicken  19866894410289_3
tttgcactcatctgtctctttggttctgactgtcagctccactcactgcctggcttgcttggagcgctctgcatccattcacacccgatttcctcccctgctctttccctggcttgcccctgagaggacttgtctgtggctcagctcctccctgaggtgctgtggggtctgggtttggtgcaggatcatagwgaatgcacatggcaccgtgggcactgcccaatgccagkatcagagggcaccaggagcagcagtgcaccttccctgcaccttcccagcctgtccccccaccgtgctggrgacagcaacatgtctcaaaccgagtatgaarttgggggttacaaagcagcgttagacatgaacaagaaaaaattataaacaaggatgatcaaaagtggtcctgtttaggtgcttcttttctatttaaattttatttgaagacttgagtttcttttattctatgtgcaaaatttaatttaaaatacaggaaagtgatgcttactggaaatgctttaattggtgtttgttgggtcgttgcagtgggctctcaggagttctttgaagccaatattcctactgaatttagcagcatctgttaag

SEQ ID NO: 92784 - DNA, 600 bp, Chicken  19866894410289_4
gtcagctccactcactgcctggcttgcttggagcgctctgcatccattcacacccgatttcctcccctgctctttccctggcttgcccctgagaggacttgtctgtggctcagctcctccctgaggtgctgtggggtctgggtttggtgcaggatcatagwgaatgcacatggcaccgtgggcactgcccaatgccagkatcagagggcaccaggagcagcagtgcaccttccctgcaccttcccagcctgtccccccaccgtgctggrgacagcaacatgtctcaaaccgagtatgaarttgggggttacaaagcagcgttagacatgaacaagaaaaaattataaacaaggatgatcaaaagtggtcctgtttaggtgcttcttttctatttaaattttatttgaagacttgagtttcttttattctatgtgcaaaatttaatttaaaatacaggaaagtgatgcttactggaaatgctttaattggtgtttgttgggtcgttgcagtgggctctcaggagttctttgaagccaatattcctactgaatttagcagcatctgttaagatcctctctcttttggaaggatgtggagctc

SEQ ID NO: 92785 - DNA, 600 bp, Chicken  19866894410289_5
aaagtgatgcttactggaaatgctttaattggtgtttgttgggtcgttgcagtgggctctcaggagttctttgaagccaatattcctactgaatttagcagcatctgttaagatcctctctcttttggaaggatgtggagctctgtatcaactgctgtgtgcccatttctccgaggcggttattgtcattgatcattaacatccaagagaacacgctgtgtgtttagtcctgctgtgctgcagcccatctgaccagaggtgtgtgccaggctcctgctgcctctgggtttgctctgagasctgtggtgctccccagggctggtgggcacgaagcagtgctgtgcaggaggcagctttggtccctgctgagacatggtgtcagatgtgatgtgaagatgtaaggagtgctttcagttggctgatgaagattgctttgagatccaatgtgtactcttccataggaggtttctggtaatagctgcagcgattcctatgcaaaagcttaatttcttcacttaaacgacaatatgatgcctttctatggaggtcatttccatgttgtgtgtataggtgtcgttccccacaagtgctgttttgggg

SEQ ID NO: 92786 - DNA, 600 bp, Chicken  19866894410300_1
aagacacttaagtctgactcccaaacctgtgcaaacaccagctattgacactgactacacttccagcacacagccagacctatttcaggtcttaaaagcacctggaacatctgtaaattatattggataacatgatagctgctcctatacattagaagttttgatatgactccatgcactgaagtcttcttctgctataactgagaagcacaaaaaacttatcactatttattagattctcagagggttctgtttttgttttgtttgttttgttttagctgtgcctatattaaatctttyagaacaaagttttcttttagatcttttgcaaactgtcaagaggctttagtaatctgatatgcagcagaaacaatctgatacatatttttcaaggatttttttaaaggccattaaatcattgatttttaaagagaaaactgctaggaaagtatctccctgcctgcctcctcatttttcaattaatcctccttcaatatagaaagatgtgacattttgtaaacactttaaaacatacgtatttaagatattatcaatatctttaaattatcaaaatacgtaacwttctacaagctaaatctt

SEQ ID NO: 92787 - DNA, 600 bp, Chicken  19866894410300_2
gcctatattaaatctttyagaacaaagttttcttttagatcttttgcaaactgtcaagaggctttagtaatctgatatgcagcagaaacaatctgatacatatttttcaaggatttttttaaaggccattaaatcattgatttttaaagagaaaactgctaggaaagtatctccctgcctgcctcctcatttttcaattaatcctccttcaatatagaaagatgtgacattttgtaaacactttaaaacatacgtatttaagatattatcaatatctttaaattatcaaaatacgtaacwttctacaagctaaatcttttggcaaaccttccaatagcttggattgaagacagcactgaagcatttaaataccaatcatttccaacaaagaaagaaaataatttccagaggattactgggaatgaaaataactaattgcttcttcttttcaagacattaagaggctccccgaagtatcccttatgtactgatgaaaactgcgtgggtttattcaatccattatgagtgctccccaatgacagcatattcaaaagtctgtaaatacaaactgtatgtcctaaaacaattcttcatgtcttc

SEQ ID NO: 92788 - DNA, 599 bp, Chicken  19866894410301_1
  misc_feature (1)..(9): n is any nucleotide
nnnnnnnnnattaaccacccccctcctttcccccaccctccgcagtcatcgacggtccaacgcagatcctggtgcgggatgtctccgacacggtggcctttgtggagtggacgccgccgcgcgcccgggtggacgccatcctgctgaagtacgggctggcggacggggagggcgggaggaccaccttccgcctgcagccccccctcagccagtactccctgcaggccctgcggcccggcgcccgctaccacctcgctgtcagcgccctccggggtgccaacgagagccagccggccctcrcccagttcaccacaggtagctggaggagccgrcragggggctgaatgctgcagagtggtgttgtgggtgggtgggaaagaccttaaggaaagaccagatccagccatcatcctgacctactgagcgccctacactaacacgtgttcctcagtgctatgtccacacgtctcttgagtatctccagagatggagactcccccactgacctgggaagcccgttctaatccttgcctaccctccccatgaagaaattggtcctaatgcccaacctaaaccttccctggtgcaacttgaggcca

SEQ ID NO: 92789 - DNA, 600 bp, Chicken  19866894410301_2
ccaccctccgcagtcatcgacggtccaacgcagatcctggtgcgggatgtctccgacacggtggcctttgtggagtggacgccgccgcgcgcccgggtggacgccatcctgctgaagtacgggctggcggacggggagggcgggaggaccaccttccgcctgcagccccccctcagccagtactccctgcaggccctgcggcccggcgcccgctaccacctcgctgtcagcgccctccggggtgccaacgagagccagccggccctcrcccagttcaccacaggtagctggaggagccgrcragggggctgaatgctgcagagtggtgttgtgggtgggtgggaaagaccttaaggaaagaccagatccagccatcatcctgacctactgagcgccctacactaacacgtgttcctcagtgctatgtccacacgtctcttgagtatctccagagatggagactcccccactgacctgggaagcccgttctaatccttgcctaccctccccatgaagaaattggtcctaatgcccaacctaaaccttccctggtgcaacttgaggccatttcttcctgtcccatcaattatcccaagaaaa

SEQ ID NO: 92790 - DNA, 600 bp, Chicken  19866894410301_3
accctccgcagtcatcgacggtccaacgcagatcctggtgcgggatgtctccgacacggtggcctttgtggagtggacgccgccgcgcgcccgggtggacgccatcctgctgaagtacgggctggcggacggggagggcgggaggaccaccttccgcctgcagccccccctcagccagtactccctgcaggccctgcggcccggcgcccgctaccacctcgctgtcagcgccctccggggtgccaacgagagccagccggccctcrcccagttcaccacaggtagctggaggagccgrcragggggctgaatgctgcagagtggtgttgtgggtgggtgggaaagaccttaaggaaagaccagatccagccatcatcctgacctactgagcgccctacactaacacgtgttcctcagtgctatgtccacacgtctcttgagtatctccagagatggagactcccccactgacctgggaagcccgttctaatccttgcctaccctccccatgaagaaattggtcctaatgcccaacctaaaccttccctggtgcaacttgaggccatttcttcctgtcccatcaattatcccaagaaaaga

SEQ ID NO: 92791 - DNA, 600 bp, Chicken  19866894410308_1
cggcctgttctgaaagcaccaaactccagctggagggctccagaatgccatacagggagaagtgcattacaacagcaccctgccagcatcacagcctttcccacgccccttcttagttgatggacctgagccacatatgagcaccctcagcagccaccctcccagctgcattggttttgttgacggttcactcagcgcagagcagaggagctgaggggaggcctcatggcggctgcagctcctcacagggagcggaggggcagcgctgagctctgctctgtggcagcgacagggcctgarggaacggtgtggagctgtgtcaggggaggggcgggtgggggtgagggaaagggtctgcaccagagggcacaacggctgtgctccgaacagactaatagctgtacgaatcccaacggccacacgatggcaccacagctttgagaagcgaaagacacagcgacgctcttcagtctcaatacgaaaaccattttcaccaaactaagagtgatgttttaaaatggtaccagcaggaaccttcctaataagtgttgtgtagatggaagggcaaaacccccagcagggaagctgaagtaatacaag

SEQ ID NO: 92792 - DNA, 600 bp, Chicken  19866894410311_1
ctccacttgtgctggggatttgaaagacacatttgtttggtggtcatttggtgagtggatggtttcaagtaggccctgacgtctacttgaatagtgtgtgtaacctactgcagcaggctacacaacattggagaggcctccacatgccaggcagcagacagggcacgcaccagactttgtgcattccttaatgcagagaacagaaatgtttgtgacacagttcataaaggtatttgctccatactgcttatcagaaatactggactgaaaaaattctgtgccttcggttacccagaaaaygtctctcaaacttcctttcctctttttggtattctcccatttcatggctaatgcaccttcccagagtctcagcatcatccatacgtagcactttttgtgttgtcacaatggcattagtattctttttccccttgaaattggggatgtaaccatgggccaaatttacaacagataatataccgatatataaagtctaaacatggaaattctcctttaaaagacagagaacttcagtatttttgtagaactacataccatattctgaatcaaaaacagagctagcaaggtggtgaaacaaat

SEQ ID NO: 92793 - DNA, 600 bp, Chicken  19866894410311_2
ccaaatttacaacagataatataccgatatataaagtctaaacatggaaattctcctttaaaagacagagaacttcagtatttttgtagaactacataccatattctgaatcaaaaacagagctagcaaggtggtgaaacaaataaagttaaagattagcaatattgccatcatgtggctactataagcaaatgctcaggcacgatcctgaatttattaagtatcagaaagcagaatgcatcctctgaatcctgctgttaaaattaaaaagcagtgtttaaagttgctttttattattayagattatcaatagctccttcttacagtagtgatttatgaagcaagaatgtgggtacaacagacarctgcattaycccttccactgtcatccctaccctcatggatttatagctcacacttttaagaattcactccaaaatcaatcttgagttactcaccaaggaattagaaaactgagaatcacctcttactgcagaaagcattaaggaagatcaaatagtcattttacattgtcattttacatacctttcatatctgcaatggcttataagtaaagtgttaaagctcaaatgccgaaat

SEQ ID NO: 92794 - DNA, 600 bp, Chicken  19866894410311_3
cagagaacttcagtatttttgtagaactacataccatattctgaatcaaaaacagagctagcaaggtggtgaaacaaataaagttaaagattagcaatattgccatcatgtggctactataagcaaatgctcaggcacgatcctgaatttattaagtatcagaaagcagaatgcatcctctgaatcctgctgttaaaattaaaaagcagtgtttaaagttgctttttattattayagattatcaatagctccttcttacagtagtgatttatgaagcaagaatgtgggtacaacagacarctgcattaycccttccactgtcatccctaccctcatggatttatagctcacacttttaagaattcactccaaaatcaatcttgagttactcaccaaggaattagaaaactgagaatcacctcttactgcagaaagcattaaggaagatcaaatagtcattttacattgtcattttacatacctttcatatctgcaatggcttataagtaaagtgttaaagctcaaatgccgaaattagcttctctttgtactgttaggaacatttgttcttttcagtgatgttattctctctcttttccc

SEQ ID NO: 92795 - DNA, 600 bp, Chicken  19866894410311_4
tcagtatttttgtagaactacataccatattctgaatcaaaaacagagctagcaaggtggtgaaacaaataaagttaaagattagcaatattgccatcatgtggctactataagcaaatgctcaggcacgatcctgaatttattaagtatcagaaagcagaatgcatcctctgaatcctgctgttaaaattaaaaagcagtgtttaaagttgctttttattattayagattatcaatagctccttcttacagtagtgatttatgaagcaagaatgtgggtacaacagacarctgcattaycccttccactgtcatccctaccctcatggatttatagctcacacttttaagaattcactccaaaatcaatcttgagttactcaccaaggaattagaaaactgagaatcacctcttactgcagaaagcattaaggaagatcaaatagtcattttacattgtcattttacatacctttcatatctgcaatggcttataagtaaagtgttaaagctcaaatgccgaaattagcttctctttgtactgttaggaacatttgttcttttcagtgatgttattctctctcttttcccactccattc

SEQ ID NO: 92796 - DNA, 600 bp, Chicken  19866894410316_1
tctgtccctttcatttatttttaatcaaacttttattctggtcccaagaaatttatttagaccaaaacaacccattcccatgacagtttccatttctaagaattaccatttaaaccaatattcactgaactttcacttagcactgcttcatacagttatcctgctctttgccatggagtggtcattgtcagctgggttcccagtctcttgttgagggaaatgatgcattcttgtaggcatgatacctgcactcagaggtttaggtctagttctggctttgttttcagactactgaaggayttaggctagtttacttcccttgtcatgatgtcctcttggagaatgagaataccagtactgatctcatgcattgtatgcttcaaggtccacagatggcatattttaagtgtatgttttatgcatgttccaaggcagcattttgtttcagtaagatccaaagaatgggcttttctaatcatttaattttataattgaactatgtggaagaagcacattatatattttcttcttgatggaaagaagaacwtgatccatagtactgcatccccyatggctcgtttgcttttagcttggaaaatg

SEQ ID NO: 92797 - DNA, 600 bp, Chicken  19866894410316_2
gcactcagaggtttaggtctagttctggctttgttttcagactactgaaggayttaggctagtttacttcccttgtcatgatgtcctcttggagaatgagaataccagtactgatctcatgcattgtatgcttcaaggtccacagatggcatattttaagtgtatgttttatgcatgttccaaggcagcattttgtttcagtaagatccaaagaatgggcttttctaatcatttaattttataattgaactatgtggaagaagcacattatatattttcttcttgatggaaagaagaacwtgatccatagtactgcatccccyatggctcgtttgcttttagcttggaaaatgacatagtttttccccaaagcagccctttgttactgagtaggcatctggtttgtgacaagcctgttgactgggatctgtcctctaagattcataaaagagttgcatgtccagccaatgaagatgatcagattactttggcttcactcgcagttttgtagtcgtctttgtttgctactgtgaagtgcagctatagccattgtgaacaaggaggctctgtcagcttgcatcaactgatgagtttgcctaa

SEQ ID NO: 92798 - DNA, 600 bp, Chicken  19866894410316_3
tctggctttgttttcagactactgaaggayttaggctagtttacttcccttgtcatgatgtcctcttggagaatgagaataccagtactgatctcatgcattgtatgcttcaaggtccacagatggcatattttaagtgtatgttttatgcatgttccaaggcagcattttgtttcagtaagatccaaagaatgggcttttctaatcatttaattttataattgaactatgtggaagaagcacattatatattttcttcttgatggaaagaagaacwtgatccatagtactgcatccccyatggctcgtttgcttttagcttggaaaatgacatagtttttccccaaagcagccctttgttactgagtaggcatctggtttgtgacaagcctgttgactgggatctgtcctctaagattcataaaagagttgcatgtccagccaatgaagatgatcagattactttggcttcactcgcagttttgtagtcgtctttgtttgctactgtgaagtgcagctatagccattgtgaacaaggaggctctgtcagcttgcatcaactgatgagtttgcctaatgatttccctttcccttctcttg

SEQ ID NO: 92799 - DNA, 600 bp, Chicken  19866894410323_1
gaaccaagtacatttctactgcagcattgagcctttatttcattctgcaaacaactgacccgttactcaaaatatctgacagtggaatctgagatgctcagacagtaactgatacaagatgctggcttaaatggatggcgagaagccttattcttgtcttgttccttgatctgctctgcttcttgcggaagtacatatcaaccagaggattatttgaagagtcaaatcttgccttaggtttatgctgtcttgatgatgcaaatttcatcagatgaaccattaatggttttaatgtgtgcrtatacttaaaattgcagttctgttttatgcagtgtaccaatgatatttataaaatatttgtatagattcatttctgtatgtaattctaatatagttctgttgtttcatgagaaacatctcrctcaaaacsgttttcttttgaaaggtgcagaagacaaagaacaagcatcaacgcggaagcctagcagttcagatgtaacatctgaaaaggtaagaaagcagtcccctgtaaataaagtatcattgctttatggtatttcttacaattttttccaaactgtagtccagaaatatttccgt

SEQ ID NO: 92800 - DNA, 600 bp, Chicken  19866894410323_2
ctggcttaaatggatggcgagaagccttattcttgtcttgttccttgatctgctctgcttcttgcggaagtacatatcaaccagaggattatttgaagagtcaaatcttgccttaggtttatgctgtcttgatgatgcaaatttcatcagatgaaccattaatggttttaatgtgtgcrtatacttaaaattgcagttctgttttatgcagtgtaccaatgatatttataaaatatttgtatagattcatttctgtatgtaattctaatatagttctgttgtttcatgagaaacatctcrctcaaaacsgttttcttttgaaaggtgcagaagacaaagaacaagcatcaacgcggaagcctagcagttcagatgtaacatctgaaaaggtaagaaagcagtcccctgtaaataaagtatcattgctttatggtatttcttacaattttttccaaactgtagtccagaaatatttccgtgatagaagcaggtcattctacaggaacagcacttcaccattagaggagtattttaatcttcttttaaaagtctgtctctacatttcctatgagactttccaaaaagattcacttagtaact

SEQ ID NO: 92801 - DNA, 597 bp, Chicken  19866894410323_3
atggatggcgagaagccttattcttgtcttgttccttgatctgctctgcttcttgcggaagtacatatcaaccagaggattatttgaagagtcaaatcttgccttaggtttatgctgtcttgatgatgcaaatttcatcagatgaaccattaatggttttaatgtgtgcrtatacttaaaattgcagttctgttttatgcagtgtaccaatgatatttataaaatatttgtatagattcatttctgtatgtaattctaatatagttctgttgtttcatgagaaacatctcrctcaaaacsgttttcttttgaaaggtgcagaagacaaagaacaagcatcaacgcggaagcctagcagttcagatgtaacatctgaaaaggtaagaaagcagtcccctgtaaataaagtatcattgctttatggtatttcttacaattttttccaaactgtagtccagaaatatttccgtgatagaagcaggtcattctacaggaacagcacttcaccattagaggagtattttaatcttcttttaaaagtctgtctctacatttcctatgagactttccaaaaagattcacttagtaactgaccga

SEQ ID NO: 92802 - DNA, 600 bp, Chicken  19866894410331_1
gagatctatcttctgtaccaccttgttctcagatgggacagaactaacattcccttcatagtgtccgaaatgatgctacatttttgttttatgagaagtacaagactgacaacacacagatgttttagttgttgctgaacagtgccatggacatttcagcttctcagcttctcgtagtcctgccagtgacaggagctgagggggcacaaggaggtgagaggggtcaggcaaagggatattccataccatacaaaactgtgcaaaaatcaccttgaaaaacagcagagagttgactggggraggagccactgcttgaggactggctgggcatcggtaggtgggtggtttgcacaagcaattgctcacaactgcatggtgcttagctacctgtccggttaaaccacaacatacatctaacaatacctccctttaatttttgaggcatcatctaatttattggctaaaaggaagtataaacaactccacaacatcctgtcctaaccagcaagggctttctgctgcccaggccatcagaatatggcacctcaacacttcaaaaacagaaatgagaaatacgtgctttagctacacacaaatttt

SEQ ID NO: 92803 - DNA, 600 bp, Chicken  19866894410335_1
ttcttccatacctcacgtaggaaaagcattacgtgttcacaggtatttggtacgtctgccttgtatttcagactctgcaattcagactcagaaaacctctgagaatggaagggcagattttcagctcccctcgccacaagatccatcaacagacaagaacagtcatagaagattatgtctaaaaaatgcagacgaaaacacatgggagataaccactggtatgttgctaattttatgttattttacatctcagttctgtgtggggcaggggactatttgttgtaaatttcaaaggactcrgaagcagttcacataaaatagaaatgtgctgtagggattatggaaatcaaacaccctgcaacaaaagtgcttctgagcactgataaagatttgtaggattaagcagagtaccagtgcactgcatggataacaaagaattccatgctctctttataaaagggaaagaactaaaaatattttttttctttaaatctctattaaatttaacactaaagactccaaacattgaatgtacgagaaattttactccagataagagtttaggatctctcttatggtacacatgtaatatcttttttg

SEQ ID NO: 92804 - DNA, 600 bp, Chicken  19866894410337_1
ctccacggccaccttcatgaactggatgaactgccggttgatctcctccacgtagtcctcgccgtaagcctgcagcagctcccggggcaggcgggccaccagctgctccttctgcagcttccagaagtcggggtcgcaggtggctgcaaaggagggaccccgtgagacacgtgtggtacagaaaccccaccccgggcggcccacgctcatagggatgcccacggggagagaagggagcacctgctggggcggtgcctctaaaaccccggtggaggttggccgtgaggtgggagcgatagygggtgttgtaaaagggagagcccaagcacggtgggcatgggttgatggttgggctcggtgatcttggaggcccttcccaaccttcgtaatgctacgattccagccgcagtcccagggcagtggctgaggccgcccctctcacctgttttgaagtacccaggcaggatgaggctgactttgacaccccagggctgcagctcactgcggaacgtgtccatgagcaggctgagcgcagccttcgacgccccgtaggctgccaggcaggggaagggcaggtcacctgtgggaagaagcacaaac

SEQ ID NO: 92805 - DNA, 600 bp, Chicken  19866894410351_1
tgggaaactgacctagagaagagcttgcagcttcaaaagttagtcttagcacattgaaacaccatgattaagcatggatctacaagtcaaggctctaaacaacttcctttatggtcccgaacaagcctagaggtaaacaccacccctaggataccatgaatatcttctagcaataggctctaagtactatatgaagcacacctcgtaaacttgtaatacaaagtcactgatcacgttgaaagtgggcaggagtttcagaaggagatgagaaaagtactcatctcaattaaaaaaaaaaamaacaaaccaaccaacaaccatacagcctgcatgttaggacacaattgttaccttggcgccttacaaagaaatactgaagataaaaacgtatttttatccatcctcttccacaaaacaacaacaaaagaccgaacagattaagctagctgaatattatctcctcttccttatgtacaactcatttcattccttgttttcactgctggggctttgtaagaatgttattcctgtaatttcatgctagaagctgtacttgtgccaactgttcccaagcacttagctcagaagtaatgcagctcg

SEQ ID NO: 92806 - DNA, 451 bp, Chicken  19866894410352_1
tgttttctatactgcaggccaaacccatggggtaatttccagtctctctgcacagggctgagatgacgtggtgagagaagtggagagatgctgaaatttcaatctgccacataatgcgcccctaatgctgatgtccttataagcgtgttgttgacattggtgctgttgctgtagttcttgtcatggctgtcttccctatgtctggtgtgaagcattataaattaagagaaatatttaaatttacaaaggaaactatcgtttctttggaattaaacacgcaggagtcctgcaaatgcacayggaagaggtatgacttcatttaaaatgccaagccttattgacataaagtggtatgctgctggtgtagctgcttttactgcacatcagctttgcatttccccaggccctgggtaacaaggaattgaggtgcacgttttcatagcaagactcg

SEQ ID NO: 92807 - DNA, 370 bp, Chicken  19866894410359_1
gcagtcctaaaaacaactttttctttctttcttttaatggaagagggaagaaaaatccctttacattatagatgctgaaaaattctagtatctcatatggcaaaacctaaactttgacgaagtgctgcctccagcatttgacacctttagattaaaatgacatgaaaatttggttaaatggtactttttcacattttaaaagctacactgtaaggtgtcaacgtttaaatgtgaaagtgttacttccagagcaaaactgttaagtgttgaaaagagaaataatgagagcaaaaatgcccycaaaatatctgaagatggatcttatcaagtttatgaataaaatattgtgtggcgttatttcttgtaactg

SEQ ID NO: 92808 - DNA, 582 bp, Chicken  19866894410363_1
aatagagagattttatgaaagctgagctctcatttttattgtaggttcctggctgcaacgaaaagcttgaaactatggaatgtcagcaaaacaaaaaggcttgatggatcagcaaaaattaaaaatgtatttcaaataccaagcaaacctcagactgattttcaagccacacttagtatccccatgggagctttagctgactaaagtcggtaatgctggtttcccgttaaagctgttttgtcatttatttttgcagcatttatttttgcagcattagcgatgtgtgtgcatttcttcatrcaccagatacacagtgatgacagctattgagtaaatcacaggactcggtgacaaactgcagttattctctagatctgaactttctctccggcattcttcccacttggccatttcttctcctgaaattactttgcgagggttagggtgatgactgtattgaaataagagttttctgttggccttgcaagactgtagtgacacctacactcacaatattcccaggatcacaataccatgcactccagcatgggtaacaaaatcctaatggtgaaacttactata

SEQ ID NO: 92809 - DNA, 599 bp, Chicken  19866894410366_1
  misc_feature (1)..(281): n is any nucleotide
nnnnnnnnnnnnnnnnnnnnnnnnnnnnnnnnnnnnnnnnnnnnnnnnnnnnnnnnnnnnnnnnnnnnnnnnnnnnnnnnnnnnnnnnnnnnnnnnnnnnnnnnnnnnnnnnnnnnnnnnnnnnnnnnnnnnnnnnnnnnnnnnnnnnnnnnnnnnnnnnnnnnnnnnnnnnnnnnnnnnnnnnnnnnnnnnnnnnnnnnnnnnnnnnnnnnnnnnnnnnnnnnnnnnnnnnnnnnnnnnnnnnnnnnnnnnnnnnnnnnnnnnnnnnnnnnnnnnnnnnntcttatttgagaacctgcrgagtagtgtaattgcaaacgccatcaactgattggctatttctctgggaaatgcttttagattgatctctccatggcttaaatggtcccttatgcgtggaccctcctggtggttcaagaaatcccaaagaaattcctgtggagatatacaccaatagaggtaagcatatatacctaaaagttaaaaatgcatttgtgtccataagaaaaggagcctttaggcagagaaaacaacacaatctatgctcataagaaaataaaagggcagctagtccacygtgttagcttgtatgtcagttt

SEQ ID NO: 92810 - DNA, 599 bp, Chicken  19866894410366_2
  misc_feature (1)..(4): n is any nucleotide
nnnntcttatttgagaacctgcrgagtagtgtaattgcaaacgccatcaactgattggctatttctctgggaaatgcttttagattgatctctccatggcttaaatggtcccttatgcgtggaccctcctggtggttcaagaaatcccaaagaaattcctgtggagatatacaccaatagaggtaagcatatatacctaaaagttaaaaatgcatttgtgtccataagaaaaggagcctttaggcagagaaaacaacacaatctatgctcataagaaaataaaagggcagctagtccacygtgttagcttgtatgtcagtttcaagtgtcccgagaagctattccataaagggtaacaacagattttctctgattttatgtcccaagtcctccacagcctcgctgcctctgactcccagcgcaataaactcatatctttctcacagtgtcaagagacctctatattcaacacctctatttttcatgttcactgtctgttcaggtggcaatatgcagggtgtgctctggcaagctagcagctatactgttgtatgatctgtccacctagtatagggtatacccaagaagaaactggaaaa

SEQ ID NO: 92811 - DNA, 600 bp, Chicken  19866894410368_1
tattgcttttcaatttgaacagctctatgcaaattcattgcaacaatcaactggatgtgagaaacccctggttgctgtcagtgtgtgtgaagaatggcggtgtagaggtagggtcactcatccttgtcaaaaatgagtgccgctcagttttccattcagtcttttccaaaaatgagggttttctcaaaaatacggtgacaaagctattggtagtgacaatatttgaatctgatcacacaaaagaagttccaaaatgaaacgttttcagttttattgacagtaaagtaaccctcaacatayctttccttattgtgagcttggcaagttctccatttctggtggcgttatctattgtctcaacatgctgtgaagtctgattaacactgatgtaatagccccaaactacataactggcaaacattggcattaatttgtttcttgaatttgaaattacctcttcaattttgcgttctagtgtgggcacttaaatagccattgccagtttgatgtcatttgtagggctgaatggcatgtggattgctgtgtggaggttcagccccttgtccattgcaatttgggaagtgcaaaccttattcaggc

SEQ ID NO: 92812 - DNA, 599 bp, Chicken  19866894410373_1
  misc_feature (1)..(96): n is any nucleotide
nnnnnnnnnnnnnnnnnnnnnnnnnnnnnnnnnnnnnnnnnnnnnnnnnnnnnnnnnnnnnnnnnnnnnnnnnnnnnnnnnnnnnnnnnnnnnnnnaacaccttcctagaggtgcagtgtttatactttcctttaaaggtggactggaagctacgttctggcaaccctaacttatttcactgtattcaagaataacttgaggacactctgtaaccagtactgtacagaacagtttatacagcaatcatttttatttatttttttcttccccttaatgaaaaggagaaacctgcatttaawttttttcttattccaacttcattaatgcaagacaaagtgtgagtcaagaaaaaatttcatgacaagtgtgggtttgcagtttttttttctttaaaccaggtgataggatatatatatacatcctatatatatagtgtatacagtatatatatatacacactgtaaatatataggatagatataggctatatatagtgtatacagcatatatatgttgtgcaaattgtaatttaatctctcatatgtatgwaagagtaaaccacagtgattgtggttggaaatattctgttctgacaacc

SEQ ID NO: 92813 - DNA, 600 bp, Chicken  19866894410373_2
ttatttatttttttcttccccttaatgaaaaggagaaacctgcatttaawttttttcttattccaacttcattaatgcaagacaaagtgtgagtcaagaaaaaatttcatgacaagtgtgggtttgcagtttttttttctttaaaccaggtgataggatatatatatacatcctatatatatagtgtatacagtatatatatatacacactgtaaatatataggatagatataggctatatatagtgtatacagcatatatatgttgtgcaaattgtaatttaatctctcatatgtatgwaagagtaaaccacagtgattgtggttggaaatattctgttctgacaaccaggtcctgctttgtacatctcatttgttttcaatctacaaaatacaaggcagaaatgtatttaagaaaacaccatctatataattaacaagaaaggatttcatccttcattcatcttaggcctatcacacaggagatgacatcaggctccacttgagaactgcactgtgtcagcactcctcattgatgcaaggcatgtggtggtggtgttatctcccatcaccacgcaaaaagacaacagcacctggaaga

SEQ ID NO: 92814 - DNA, 599 bp, Chicken  19866894410375_1
  misc_feature (1)..(135): n is any nucleotide
nnnnnnnnnnnnnnnnnnnnnnnnnnnnnnnnnnnnnnnnnnnnnnnnnnnnnnnnnnnnnnnnnnnnnnnnnnnnnnnnnnnnnnnnnnnnnnnnnnnnnnnnnnnnnnnnnnnnnnnnnnnnnnnnnnnnnnntgaaagctctcttgtgccagatgagttctctccactggttatccaaactacacaggactggcatgatccttagtgcaccagagaggacagaatatgacagtggtttatttaacagggtaagcagataagtaactgtgagaaagaatagagagaaagatgtgagartgaagttactgagagacggaaagtgtaagagaagagaaaaaagcaaaagaggaaaaaaaaagtaactgaaaagtgaaagtgaaaagcaaactgatggaagaaaggattctaaatcagggaaaaacagaaaggaagagggaaggagagaaggcagagcgataggcaggacggccactcacgagcaggatctggccaggtgacagagtccacatgtgggcttcctcatcaggtatatgggccagccataggcagccagggcaaacagcatgtagtaacacacctctttgtatcgctgcatc

SEQ ID NO: 92815 - DNA, 431 bp, Chicken  19866894410377_1
  misc_feature (1)..(68): n is any nucleotide
nnnnnnnnnnnnnnnnnnnnnnnnnnnnnnnnnnnnnnnnnnnnnnnnnnnnnnnnnnnnnnnnnnnncctaagataaacaaattgtgatagatttcagatatcattttgtatgatttctttcgaagtccctttcaccaacacgtagacttgtgttgtcatactaatgagaaccctcttttgaacattttctcttgtatcctgtggaataatgtcaattcctagaggataaggaaatggtcattcaagttcacaacagataagatttcttcctacatttgctatgcaacattcatgaacraacgtcatggttttgtaactttgctattggctgtgatggtgtagtggaattccaaggtcacagcctgaaccaatgggtaggatacataagtgtgtgggtgcctggagcagggggagagtggggagtggggt

SEQ ID NO: 92816 - DNA, 599 bp, Chicken  19866894410379_1
  misc_feature (1)..(169): n is any nucleotide
nnnnnnnnnnnnnnnnnnnnnnnnnnnnnnnnnnnnnnnnnnnnnnnnnnnnnnnnnnnnnnnnnnnnnnnnnnnnnnnnnnnnnnnnnnnnnnnnnnnnnnnnnnnnnnnnnnnnnnnnnnnnnnnnnnnnnnnnnnnnnnnnnnnnnnnnnnnnnnnnnnnnnnnnnggcttgttttttctggacctactaccccacaccagtaacggtccacctggaggccttcacctaagtatattgttatagtgctccaagcccaaatctataagagacctgccttggactcaacaaaaaacaayggtctgtgttcagcatacaggggtacttcactcttggagaatttccaccagcttggctatgttcaagtcaaggaattgtaattctttactcagaggatggtaaggagcaggaacaggctgcccagggaagctaagaatgccymatycttggagctgttcaaggccaggtygaatggggccctggacacctkgtytattggctggccatcctgcccagggaattgaatctggatagtccttaaggacccttccaacccaagccactcaatgattttatactataatctatactgatactt

SEQ ID NO: 92817 - DNA, 599 bp, Chicken  19866894410379_2
  misc_feature (1)..(27): n is any nucleotide
nnnnnnnnnnnnnnnnnnnnnnnnnnnggcttgttttttctggacctactaccccacaccagtaacggtccacctggaggccttcacctaagtatattgttatagtgctccaagcccaaatctataagagacctgccttggactcaacaaaaaacaayggtctgtgttcagcatacaggggtacttcactcttggagaatttccaccagcttggctatgttcaagtcaaggaattgtaattctttactcagaggatggtaaggagcaggaacaggctgcccagggaagctaagaatgccymatycttggagctgttcaaggccaggtygaatggggccctggacacctkgtytattggctggccatcctgcccagggaattgaatctggatagtccttaaggacccttccaacccaagccactcaatgattttatactataatctatactgatacttcatcaactacagatccttccagtcaggcagaagtttgaattcagtgaaatagaaaaatgcatagctataggtatttaaattagtaatgtatgttgtctgccagattttaagcctagtatataacttttaaaaacaacctgtt

SEQ ID NO: 92818 - DNA, 599 bp, Chicken  19866894410379_3
  misc_feature (1)..(26): n is any nucleotide
nnnnnnnnnnnnnnnnnnnnnnnnnnggcttgttttttctggacctactaccccacaccagtaacggtccacctggaggccttcacctaagtatattgttatagtgctccaagcccaaatctataagagacctgccttggactcaacaaaaaacaayggtctgtgttcagcatacaggggtacttcactcttggagaatttccaccagcttggctatgttcaagtcaaggaattgtaattctttactcagaggatggtaaggagcaggaacaggctgcccagggaagctaagaatgccymatycttggagctgttcaaggccaggtygaatggggccctggacacctkgtytattggctggccatcctgcccagggaattgaatctggatagtccttaaggacccttccaacccaagccactcaatgattttatactataatctatactgatacttcatcaactacagatccttccagtcaggcagaagtttgaattcagtgaaatagaaaaatgcatagctataggtatttaaattagtaatgtatgttgtctgccagattttaagcctagtatataacttttaaaaacaacctgttt

SEQ ID NO: 92819 - DNA, 599 bp, Chicken  19866894410379_4
  misc_feature (1)..(23): n is any nucleotide
nnnnnnnnnnnnnnnnnnnnnnnggcttgttttttctggacctactaccccacaccagtaacggtccacctggaggccttcacctaagtatattgttatagtgctccaagcccaaatctataagagacctgccttggactcaacaaaaaacaayggtctgtgttcagcatacaggggtacttcactcttggagaatttccaccagcttggctatgttcaagtcaaggaattgtaattctttactcagaggatggtaaggagcaggaacaggctgcccagggaagctaagaatgccymatycttggagctgttcaaggccaggtygaatggggccctggacacctkgtytattggctggccatcctgcccagggaattgaatctggatagtccttaaggacccttccaacccaagccactcaatgattttatactataatctatactgatacttcatcaactacagatccttccagtcaggcagaagtttgaattcagtgaaatagaaaaatgcatagctataggtatttaaattagtaatgtatgttgtctgccagattttaagcctagtatataacttttaaaaacaacctgtttatt

SEQ ID NO: 92820 - DNA, 600 bp, Chicken  19866894410379_5
gcttgttttttctggacctactaccccacaccagtaacggtccacctggaggccttcacctaagtatattgttatagtgctccaagcccaaatctataagagacctgccttggactcaacaaaaaacaayggtctgtgttcagcatacaggggtacttcactcttggagaatttccaccagcttggctatgttcaagtcaaggaattgtaattctttactcagaggatggtaaggagcaggaacaggctgcccagggaagctaagaatgccymatycttggagctgttcaaggccaggtygaatggggccctggacacctkgtytattggctggccatcctgcccagggaattgaatctggatagtccttaaggacccttccaacccaagccactcaatgattttatactataatctatactgatacttcatcaactacagatccttccagtcaggcagaagtttgaattcagtgaaatagaaaaatgcatagctataggtatttaaattagtaatgtatgttgtctgccagattttaagcctagtatataacttttaaaaacaacctgtttatttatgttgcaagtttaatgttagacc

SEQ ID NO: 92821 - DNA, 600 bp, Chicken  19866894410379_6
taccccacaccagtaacggtccacctggaggccttcacctaagtatattgttatagtgctccaagcccaaatctataagagacctgccttggactcaacaaaaaacaayggtctgtgttcagcatacaggggtacttcactcttggagaatttccaccagcttggctatgttcaagtcaaggaattgtaattctttactcagaggatggtaaggagcaggaacaggctgcccagggaagctaagaatgccymatycttggagctgttcaaggccaggtygaatggggccctggacacctkgtytattggctggccatcctgcccagggaattgaatctggatagtccttaaggacccttccaacccaagccactcaatgattttatactataatctatactgatacttcatcaactacagatccttccagtcaggcagaagtttgaattcagtgaaatagaaaaatgcatagctataggtatttaaattagtaatgtatgttgtctgccagattttaagcctagtatataacttttaaaaacaacctgtttatttatgttgcaagtttaatgttagacctagcatttagatttattctga

SEQ ID NO: 92822 - DNA, 600 bp, Chicken  19866894410379_7
cccacaccagtaacggtccacctggaggccttcacctaagtatattgttatagtgctccaagcccaaatctataagagacctgccttggactcaacaaaaaacaayggtctgtgttcagcatacaggggtacttcactcttggagaatttccaccagcttggctatgttcaagtcaaggaattgtaattctttactcagaggatggtaaggagcaggaacaggctgcccagggaagctaagaatgccymatycttggagctgttcaaggccaggtygaatggggccctggacacctkgtytattggctggccatcctgcccagggaattgaatctggatagtccttaaggacccttccaacccaagccactcaatgattttatactataatctatactgatacttcatcaactacagatccttccagtcaggcagaagtttgaattcagtgaaatagaaaaatgcatagctataggtatttaaattagtaatgtatgttgtctgccagattttaagcctagtatataacttttaaaaacaacctgtttatttatgttgcaagtttaatgttagacctagcatttagatttattctgacag

SEQ ID NO: 92823 - DNA, 600 bp, Chicken  19866894410384_1
cccagaggtgctgctgaagcctggtcccatcacccccctgatgctggtgccactccagcaggcagcaaggggagcccccagctccccacccatggtgagacacccctgtaactcacagattactcacacttctggaattaatcgtggctgatggtcaacctcagagctaataaaagaattgggaagtctttgcaaaacaagcctccgactcagggctggttgtttctggagttgatgtgaatattgcccatggttacactggatggtggctccctggaaaaaaaacatctccatctcacygggctcatcgctccacggtacaaccaaaagtgacgcagaaagctgcccctggaactgcttcctttcgcaggttttctcatttcaccacccaaagcarcagtacagccacactgacacgtgccagatgtcagctcagttagcagacatgtattttagcacaggaagaagcaccgcacagcgcagcaggatgcagttctacagctatgtctgctgcacccacatggcacccacgctgttcccgcttcagtccttcaaaccagagcaatatcgctcagagggctgaactctccctggatttag

SEQ ID NO: 92824 - DNA, 600 bp, Chicken  19866894410384_2
agacacccctgtaactcacagattactcacacttctggaattaatcgtggctgatggtcaacctcagagctaataaaagaattgggaagtctttgcaaaacaagcctccgactcagggctggttgtttctggagttgatgtgaatattgcccatggttacactggatggtggctccctggaaaaaaaacatctccatctcacygggctcatcgctccacggtacaaccaaaagtgacgcagaaagctgcccctggaactgcttcctttcgcaggttttctcatttcaccacccaaagcarcagtacagccacactgacacgtgccagatgtcagctcagttagcagacatgtattttagcacaggaagaagcaccgcacagcgcagcaggatgcagttctacagctatgtctgctgcacccacatggcacccacgctgttcccgcttcagtccttcaaaccagagcaatatcgctcagagggctgaactctccctggatttagaagatctgcttgttggggtttttttgtttttttttttctttttttggtctgatatatttaggtaaggtcaactgctcaccatgcaaacaagttttaa

SEQ ID NO: 92825 - DNA, 599 bp, Chicken  19866894410386_1
  misc_feature (1)..(26): n is any nucleotide
nnnnnnnnnnnnnnnnnnnnnnnnnncatgatagatgcaagcatagtttcttaacagtaaccactgagagttcctatctaaaatcgtggcaattcatcttaaatgactcatgtgatactactgcacttcaaccagtataggacgctgagtcaacccaagtaacgtcatcacttccacagaaataaagtcctcagaggcagttttccaaaataaatagtctttctcataatttgaaagagcatctcacacaatcacaaaattgtttgaaatttatggatttaattctcactctggaaaackttggtctttgcacattcctctgtataaatataaatatttgtgacaaccttgggaaatcatgcttcctttgggaattatattttacttttagtatatgtgtcttggcagagatgctgaatagagttgaaaattacccaacaactcagcaaaaatatatcctttcttctttacaaatctagaaatatttgtattgcattttccagtggattcaagttcagctcttaaagaaaaagttttgactgcactgcatccaaaatctatcacttctatctatgtcttctatagcatgaaagatgctg

SEQ ID NO: 92826 - DNA, 600 bp, Chicken  19866894410388_1
agtagtgaaatgggctagttacatgagtgccttgaaattcttttggtggaattagcttgttaaaattttaaattcttatgcggtatgttagaatttatctaataatcataacaaggatacagtagttagttaatgtcagaaaaattgagtgattcagaaatgctttcccaagaaactattccgaaattcatagcaagctattagaatagccagctctggccataagccagaaacagatgatgcttctcttagagctaagaaaggcatacatctgaagcttgtgttgaaaattacatacakatatgctgctaatkgtamatgtgtcctgcattatttattagcttccctgttgcttaccataaggaagcacaacagggcaaagaaaattgagaatgggaaaacagtgttgtagtagtatgcagccaggtggcattgtttagctggctgtttccaaggggatttttttagtgcttttttctaagtgtacacatgctaaattatttatggatagaatatagtgatattaagttgaaaatgtattgtgaatgcttgaggatgtaatctgccttcagagattaattttactcctcaagaagtcaa

SEQ ID NO: 92827 - DNA, 600 bp, Chicken  19866894410388_2
ctagttacatgagtgccttgaaattcttttggtggaattagcttgttaaaattttaaattcttatgcggtatgttagaatttatctaataatcataacaaggatacagtagttagttaatgtcagaaaaattgagtgattcagaaatgctttcccaagaaactattccgaaattcatagcaagctattagaatagccagctctggccataagccagaaacagatgatgcttctcttagagctaagaaaggcatacatctgaagcttgtgttgaaaattacatacakatatgctgctaatkgtamatgtgtcctgcattatttattagcttccctgttgcttaccataaggaagcacaacagggcaaagaaaattgagaatgggaaaacagtgttgtagtagtatgcagccaggtggcattgtttagctggctgtttccaaggggatttttttagtgcttttttctaagtgtacacatgctaaattatttatggatagaatatagtgatattaagttgaaaatgtattgtgaatgcttgaggatgtaatctgccttcagagattaattttactcctcaagaagtcaaatgaagtttagaaa

SEQ ID NO: 92828 - DNA, 600 bp, Chicken  19866894410388_3
ttacatgagtgccttgaaattcttttggtggaattagcttgttaaaattttaaattcttatgcggtatgttagaatttatctaataatcataacaaggatacagtagttagttaatgtcagaaaaattgagtgattcagaaatgctttcccaagaaactattccgaaattcatagcaagctattagaatagccagctctggccataagccagaaacagatgatgcttctcttagagctaagaaaggcatacatctgaagcttgtgttgaaaattacatacakatatgctgctaatkgtamatgtgtcctgcattatttattagcttccctgttgcttaccataaggaagcacaacagggcaaagaaaattgagaatgggaaaacagtgttgtagtagtatgcagccaggtggcattgtttagctggctgtttccaaggggatttttttagtgcttttttctaagtgtacacatgctaaattatttatggatagaatatagtgatattaagttgaaaatgtattgtgaatgcttgaggatgtaatctgccttcagagattaattttactcctcaagaagtcaaatgaagtttagaaaaaaa

SEQ ID NO: 92829 - DNA, 599 bp, Chicken  19866894410393_1
  misc_feature (1)..(14): n is any nucleotide
nnnnnnnnnnnnnnagaaaagctctcattttcagttaccaagaaataccctccaacccatccataggagaaatctggaataattcaatgaaataatacagcttttactttttagtgagcttttaattcaggttttatgtttctcagatgttgatttactcatgcttactttaaagttactcctgacaatttactggatcatacagtgagctgcagtgagcactccaagcttaaaaaagcaaagcagtagttgaacgctatggctgtgctagaaagttggcaactctttatcccacattarctcatgctaatcagaggaaactgccaatagcggagatgcaagaacaaaacaactgaaaacaagtcttgaaaacaaatcagtcctgtttgcagaaagcctgtggggaagcatggctctaaaaaagaaagtagactataaatgggaactgaagatgagaggagcgtcatttttcttcaatgatctaaaccacatttggcattaaatcttcagtgacttaaaaaacaaaccaaaaaacacattagggactatttttaactactgtatgctaagccaatatgctcttaactaactacagatgt

SEQ ID NO: 92830 - DNA, 600 bp, Chicken  19866894410396_1
tgcccagtgctctcaaacaagcatcaatgccagctgcattacttgaggtgcaatacttgaggagatgccccgtagaggtttgtcggaataaaccatggggcagcacactggagacagtatactgcagctttacatgcagtgctaccatttcgcctcacccacaactcttggcacagcctaaacaccccccccaaaaccctcttcctaaaagaagaaagcgttctttcaaaaatcagaggagaagctgggtcatcagatgagggtgaaattggtttaaaagccattaagaagaaagcaacycaggcattcaggagcaatcacagctgcttgggctgatcaggagagacagagcagattatttatttatggagttcctgttctccctgggcaggtgtatccgctggggaagcgttaagagaagtagggagcaggatgctgcttggaatcctactgaggttttcctggcctgggtctcaggagagttaaacacaattcatgtctggagcatccaggagacatcaaccatctcccagagcaggaaaggccagaaagagcaccatcacacaggtctctgctgagacagagcacacagagagcccc

SEQ ID NO: 92831 - DNA, 600 bp, Chicken  19866894410396_2
aaaagcacatcagtgtagtctgtatccacagctcaatgaaaggtcctaaacacatgggggagggagggaccagcagatgaaacaggaggaaataactgaattgagagagtcggcatggaaaactaaatcaagagttctttttcaagatactgtacagtatttcctgatacagttccttattgtttccccaaactcgaagatgaagaggtcttactctctaaaataataaaatttccttcgttactcagaaccaatcttccagtactaactaaaaaagagctgcagaaatagtcagacatytggcaactgtcctcttctgatcttggtcagagagccacaaagggaaatcagggcttgaaactaccaaacaccacctgaatttcctgctgaaaaatgctgcagaaatgtttcagaaagagtcactgatggcagctgaactcatatgagtggcacagcctcacactatgtcaattaatgtcttcctgctattcattactgatgagatgccagagattaaaatgaaaggcaggagccgacagtgaactattgctttagacttttttttccagcattcccagttttttcctgctccttctctcc

SEQ ID NO: 92832 - DNA, 600 bp, Chicken  19866894410397_1
tattaggatctcctgtgagcctggtcaattagctttgcagagattttcggatgtctatggtgcagatgcctatattggagctggttgtctcaatggcctcagcagtcagcagagccatttttaagatgtgattcatctcaccctactgaagatgcctaaaacagatcaaattgtgctttgcttctctccattgactcccaacagtttaagcgaatgcctatctggcattccacatcctgtctgtgctctgcacagattcaattgatttccttccattcagagatgcttcttaacatgaartcagcattgccgcatgaggggccacagcartgattgctcttygaaagttttctccttagcagaaagttttgcacaaactcctcattcattttataagaaacagcttatgcttaggaaaaagagatgacttttccgagggaaaaacaatatggcaagataatactgatctactcagcaggctgtgatctgtctgttggctgctagaccatatctgagcttattaaagccatcacagaaagaagttggaaggactttgtggttactcacaggcaggtcctctaagatgttgccaggtagcat

SEQ ID NO: 92833 - DNA, 600 bp, Chicken  19866894410397_2
agctttgcagagattttcggatgtctatggtgcagatgcctatattggagctggttgtctcaatggcctcagcagtcagcagagccatttttaagatgtgattcatctcaccctactgaagatgcctaaaacagatcaaattgtgctttgcttctctccattgactcccaacagtttaagcgaatgcctatctggcattccacatcctgtctgtgctctgcacagattcaattgatttccttccattcagagatgcttcttaacatgaartcagcattgccgcatgaggggccacagcartgattgctcttygaaagttttctccttagcagaaagttttgcacaaactcctcattcattttataagaaacagcttatgcttaggaaaaagagatgacttttccgagggaaaaacaatatggcaagataatactgatctactcagcaggctgtgatctgtctgttggctgctagaccatatctgagcttattaaagccatcacagaaagaagttggaaggactttgtggttactcacaggcaggtcctctaagatgttgccaggtagcatctaattataaatgggtttttaaatgcaatg

SEQ ID NO: 92834 - DNA, 600 bp, Chicken  19866894410397_3
attttcggatgtctatggtgcagatgcctatattggagctggttgtctcaatggcctcagcagtcagcagagccatttttaagatgtgattcatctcaccctactgaagatgcctaaaacagatcaaattgtgctttgcttctctccattgactcccaacagtttaagcgaatgcctatctggcattccacatcctgtctgtgctctgcacagattcaattgatttccttccattcagagatgcttcttaacatgaartcagcattgccgcatgaggggccacagcartgattgctcttygaaagttttctccttagcagaaagttttgcacaaactcctcattcattttataagaaacagcttatgcttaggaaaaagagatgacttttccgagggaaaaacaatatggcaagataatactgatctactcagcaggctgtgatctgtctgttggctgctagaccatatctgagcttattaaagccatcacagaaagaagttggaaggactttgtggttactcacaggcaggtcctctaagatgttgccaggtagcatctaattataaatgggtttttaaatgcaatgtaattaaatcaa

SEQ ID NO: 92835 - DNA, 600 bp, Chicken  19866894410410_1
gccacaaagatggtcagggggctggagcatgtctcctgtaaagaaaggctgagggagctgggtttgttcagtgtgggggagagaaggctgcagggagacgtcattgcggccttctggttctttaaggcagctggcaggcaggacagtctgatggtgacaggacgaggggaatggctttacactacacgagaagttaggttagatgctggaagaaacgttcagagggcggtgaggcgctggcacagctgcccagggagctgtgggtgccccatccatccctggaggcattcggggccaggytggacggggccctgggcactgatctagtggttggcagggcttggaaccaggggatctctgaggtcccctccagcctgagccatcctgtgattggcagcagcctgctaggcctctgtcctttgaagctgaccccaagtcagagtttctcggttctcccgaatacagaagtcccgttgccagggctcactcgtaagtttgctggaagcaacaaataaatcacatccaggattacatctggtttctgactttggagctatggcggtgtgtttgctgggactgtgcatcccatgtggttcttgg

SEQ ID NO: 92836 - DNA, 600 bp, Chicken  19866894410416_1
ctgacccttggtcatgttctctgagctcagggagtcccagggctggctgcactgtttgaatgcttcagtgttagaggagagatgctgaaatgcggaagcagcagtttcacttacacatggctgcaatcacacctggctcacactgctgcccatgtattccttggagcatagcacgcatcttgtggaccttggcatcagatagcagccaggctgaagctatccaagggattttattttactttttgaggttttgacaaggttttgacatgctttcgcatcaaaagacagatgcataattayrggtatcataaacctgagaccactttgatcattttacctgattttaaaacatctaattgctcatcagctttcttgggctgcagtggcaactcactggagataatgtggggatgaaaaagtgtgtatgagcacttggaactgctggggctgggagactttttctatttccagtaatactttcaaaattgtgcctgcagctgctgatccctgctgcctgatctctcytgccttcccagtgcattgggagatgatggtgtagagcaggaggaaacctgcatgcaggtgtggtgtttctcctct

SEQ ID NO: 92837 - DNA, 600 bp, Chicken  19866894410416_2
tgacccttggtcatgttctctgagctcagggagtcccagggctggctgcactgtttgaatgcttcagtgttagaggagagatgctgaaatgcggaagcagcagtttcacttacacatggctgcaatcacacctggctcacactgctgcccatgtattccttggagcatagcacgcatcttgtggaccttggcatcagatagcagccaggctgaagctatccaagggattttattttactttttgaggttttgacaaggttttgacatgctttcgcatcaaaagacagatgcataattayrggtatcataaacctgagaccactttgatcattttacctgattttaaaacatctaattgctcatcagctttcttgggctgcagtggcaactcactggagataatgtggggatgaaaaagtgtgtatgagcacttggaactgctggggctgggagactttttctatttccagtaatactttcaaaattgtgcctgcagctgctgatccctgctgcctgatctctcytgccttcccagtgcattgggagatgatggtgtagagcaggaggaaacctgcatgcaggtgtggtgtttctcctctt

SEQ ID NO: 92838 - DNA, 600 bp, Chicken  19866894410416_3
ggattttattttactttttgaggttttgacaaggttttgacatgctttcgcatcaaaagacagatgcataattayrggtatcataaacctgagaccactttgatcattttacctgattttaaaacatctaattgctcatcagctttcttgggctgcagtggcaactcactggagataatgtggggatgaaaaagtgtgtatgagcacttggaactgctggggctgggagactttttctatttccagtaatactttcaaaattgtgcctgcagctgctgatccctgctgcctgatctctcytgccttcccagtgcattgggagatgatggtgtagagcaggaggaaacctgcatgcaggtgtggtgtttctcctcttttccccctcttgtctcttaacctgaatgttgtttttactttttttaatggatgaggctagcatagtagcctacttcaaaaacaaacaagcaaccacctcccacaaaacctctgaatcactgaaattgtcacaataattaagtatggtacctactgttctggatgcatttcacctgctaagagatgctgcagtcagcaccatatggtaaccttttttttttcttc

SEQ ID NO: 92839 - DNA, 600 bp, Chicken  19866894410419_1
ttattaatctcagaggttgggatctcgatttgtatttttactccttttgaaatgcctttatctgagatatgtttgtgtttttttttttgttggttttttttatttttaaggagaaataaatgagaaatagttttgtaacagataactccatcatgccaaagttgtttgtatcccgtcggtccgtgcgtgtgttgcgtgtgcctgtgttggagacctccgagaaaaagagaacaaaatgataccgcaggtgttgaaataaattgctctttgaaatagaacttttactttctcctctcattygaacgggcggagacaaaagccgacgctgcgggaaggcaataggggccgactttatggccctgagcgtggctgcaaggagggctgcgtgcagcagatagggaaggttaggaggggctgtgcgagcactgcttcctaaacgtgcgctcctggatgctgggaaatgcatgcttgctgcgtgagataatccagcttgaagcttttgctccgtattatggctctgcattacctttccgttgggggtggtgcgtgcaaaagttactatctcggccacaaaagaggcaagagagtctgtccccattg

SEQ ID NO: 92840 - DNA, 600 bp, Chicken  19866894410420_1
tggttgtggtgttcctggattttgtttccacagctgcagaaaggaggatgctggggaggcccggttcccctgacctcccttccctctggtgaccagcaaatgagaggaatttcagagaaaaggaaaaattagaggcggaaatgatttattcagccctcctgctcccagctaacacagccaacaacaccaggattgggctgggattggggcattaaaggagcaaacccagcaggtggtccagcacgagtgtcagacccagtacgccagccccaaataccacagagaagcagtgggcactcrgtgggagcctggctgagttggagtctggctgcagaggagcaaggggcacggcccagcatgcactgccctgaactccctgactccctgagtcacactgcaggcggcagtgaaccctgcatgagttcagccccaggaggagccgcaggtgatggcggggacctgcccggggccgggctgtgtgggagcacgaggagcaggctgtgtcccggccatcgcctcctatgcttctgcccttccccgtgtgctgcagcaggggaggggtgcccaggtaagttctttagtgcttccaccccttcttca

SEQ ID NO: 92841 - DNA, 600 bp, Chicken  19866894410422_1
tttgactcaaagaacacttttgaaagaagtttccttggcaatctttgaacttgaaactatctcataatctaaggcatttcagaggggaaaaagagattctggaccgacctgcaaggaagctatcacactaccctctgaaaaatgagtgttctctgtatgtgaaacagaagagcactgaagagcagaaaagaaacccaacacttactcaggttccaggtttaaagagaatacgagccaagtcaatgtgcttggaaaacagaaacactatttggagacaagtttatttagcactaatctacyagttaataagcactaatctgcaaggaactggctgcaggattgaacccagagagtcgatgactcagtgtcagtggtgagtggtgtctcccaggggtcattgtcgtgaccaatactctttaatatcttcatcaataacattgacagtggggtcragtgytctctcagcaagtatgaggatgacaccaagctgtgtgatgcagttgacaagttgctcaagggatggattgccatccagagacacctagacaggcttgagccgtgggcycagtgggcaagcctcactatcaatgcaagatgaga

SEQ ID NO: 92842 - DNA, 600 bp, Chicken  19866894410422_2
ctgtatgtgaaacagaagagcactgaagagcagaaaagaaacccaacacttactcaggttccaggtttaaagagaatacgagccaagtcaatgtgcttggaaaacagaaacactatttggagacaagtttatttagcactaatctacyagttaataagcactaatctgcaaggaactggctgcaggattgaacccagagagtcgatgactcagtgtcagtggtgagtggtgtctcccaggggtcattgtcgtgaccaatactctttaatatcttcatcaataacattgacagtggggtcragtgytctctcagcaagtatgaggatgacaccaagctgtgtgatgcagttgacaagttgctcaagggatggattgccatccagagacacctagacaggcttgagccgtgggcycagtgggcaagcctcactatcaatgcaagatgagagatgaaaaaggattgagcacagccctactgaaaaggagttggaggtactggtgaatggcaagctagaatgagcagcagtgtgctctcgcagccaagaaagccaaccatatcctgggctgcatcaaaagcagcrtggccagcaggacaaggga

SEQ ID NO: 92843 - DNA, 600 bp, Chicken  19866894410422_3
tgtgaaacagaagagcactgaagagcagaaaagaaacccaacacttactcaggttccaggtttaaagagaatacgagccaagtcaatgtgcttggaaaacagaaacactatttggagacaagtttatttagcactaatctacyagttaataagcactaatctgcaaggaactggctgcaggattgaacccagagagtcgatgactcagtgtcagtggtgagtggtgtctcccaggggtcattgtcgtgaccaatactctttaatatcttcatcaataacattgacagtggggtcragtgytctctcagcaagtatgaggatgacaccaagctgtgtgatgcagttgacaagttgctcaagggatggattgccatccagagacacctagacaggcttgagccgtgggcycagtgggcaagcctcactatcaatgcaagatgagagatgaaaaaggattgagcacagccctactgaaaaggagttggaggtactggtgaatggcaagctagaatgagcagcagtgtgctctcgcagccaagaaagccaaccatatcctgggctgcatcaaaagcagcrtggccagcaggacaagggagatga

SEQ ID NO: 92844 - DNA, 600 bp, Chicken  19866894410422_4
tatttggagacaagtttatttagcactaatctacyagttaataagcactaatctgcaaggaactggctgcaggattgaacccagagagtcgatgactcagtgtcagtggtgagtggtgtctcccaggggtcattgtcgtgaccaatactctttaatatcttcatcaataacattgacagtggggtcragtgytctctcagcaagtatgaggatgacaccaagctgtgtgatgcagttgacaagttgctcaagggatggattgccatccagagacacctagacaggcttgagccgtgggcycagtgggcaagcctcactatcaatgcaagatgagagatgaaaaaggattgagcacagccctactgaaaaggagttggaggtactggtgaatggcaagctagaatgagcagcagtgtgctctcgcagccaagaaagccaaccatatcctgggctgcatcaaaagcagcrtggccagcaggacaagggagatgatcctgcccctctgctctgtgctgatgaggcctcacctgcagtactgcgtccagatgtggagtcctcagtacaggagagacatggacctgttggagcatgtccagagga

SEQ ID NO: 92845 - DNA, 484 bp, Chicken  19866894410422_5
aacattgacagtggggtcragtgytctctcagcaagtatgaggatgacaccaagctgtgtgatgcagttgacaagttgctcaagggatggattgccatccagagacacctagacaggcttgagccgtgggcycagtgggcaagcctcactatcaatgcaagatgagagatgaaaaaggattgagcacagccctactgaaaaggagttggaggtactggtgaatggcaagctagaatgagcagcagtgtgctctcgcagccaagaaagccaaccatatcctgggctgcatcaaaagcagcrtggccagcaggacaagggagatgatcctgcccctctgctctgtgctgatgaggcctcacctgcagtactgcgtccagatgtggagtcctcagtacaggagagacatggacctgttggagcatgtccagaggagggccacaaaaatgacccaagggatggaacacctccctacagggacaggctg

SEQ ID NO: 92846 - DNA, 599 bp, Chicken  19866894410424_1
  misc_feature (1)..(200): n is any nucleotide
nnnnnnnnnnnnnnnnnnnnnnnnnnnnnnnnnnnnnnnnnnnnnnnnnnnnnnnnnnnnnnnnnnnnnnnnnnnnnnnnnnnnnnnnnnnnnnnnnnnnnnnnnnnnnnnnnnnnnnnnnnnnnnnnnnnnnnnnnnnnnnnnnnnnnnnnnnnnnnnnnnnnnnnnnnnnnnnnnnnnnnnnnnnnnnnnnnnnnnnntggaacaattgccacctttaagttctgcagtacattactggacaggcaagccaacaataccaggatatttaggcatgcattgaaacttgcatggagaacwcttgcactcccttaatcctctgtttgttcagtttcaatgtcaccatgacaattgattttcaactttcatcttcctctgtcggtggggagygttccrtgggacatggcagctcctgccaggaggtgcgggctcccagggtttgtgrcatggaagggcgagtaaaagacttaatgccaatggtcccagcagcactcatggcagaggtcctaggagaatagtcttggaaggacaagatggtwttgcaagataaatggaatttcccaccagataagggaattttgtcttttttttaattcctt

SEQ ID NO: 92847 - DNA, 599 bp, Chicken  19866894410424_2
  misc_feature (1)..(110): n is any nucleotide
nnnnnnnnnnnnnnnnnnnnnnnnnnnnnnnnnnnnnnnnnnnnnnnnnnnnnnnnnnnnnnnnnnnnnnnnnnnnnnnnnnnnnnnnnnnnnnnnnnnnnnnnnnnnnntggaacaattgccacctttaagttctgcagtacattactggacaggcaagccaacaataccaggatatttaggcatgcattgaaacttgcatggagaacwcttgcactcccttaatcctctgtttgttcagtttcaatgtcaccatgacaattgattttcaactttcatcttcctctgtcggtggggagygttccrtgggacatggcagctcctgccaggaggtgcgggctcccagggtttgtgrcatggaagggcgagtaaaagacttaatgccaatggtcccagcagcactcatggcagaggtcctaggagaatagtcttggaaggacaagatggtwttgcaagataaatggaatttcccaccagataagggaattttgtcttttttttaattccttttttaaaatctcttcttgttaccaactgttcatgactagaggagctgcaagagtttctggatgattatattaatgcatttaatgatataa

SEQ ID NO: 92848 - DNA, 599 bp, Chicken  19866894410424_3
  misc_feature (1)..(104): n is any nucleotide
nnnnnnnnnnnnnnnnnnnnnnnnnnnnnnnnnnnnnnnnnnnnnnnnnnnnnnnnnnnnnnnnnnnnnnnnnnnnnnnnnnnnnnnnnnnnnnnnnnnnnnnntggaacaattgccacctttaagttctgcagtacattactggacaggcaagccaacaataccaggatatttaggcatgcattgaaacttgcatggagaacwcttgcactcccttaatcctctgtttgttcagtttcaatgtcaccatgacaattgattttcaactttcatcttcctctgtcggtggggagygttccrtgggacatggcagctcctgccaggaggtgcgggctcccagggtttgtgrcatggaagggcgagtaaaagacttaatgccaatggtcccagcagcactcatggcagaggtcctaggagaatagtcttggaaggacaagatggtwttgcaagataaatggaatttcccaccagataagggaattttgtcttttttttaattccttttttaaaatctcttcttgttaccaactgttcatgactagaggagctgcaagagtttctggatgattatattaatgcatttaatgatataacttcca

SEQ ID NO: 92849 - DNA, 599 bp, Chicken  19866894410424_4
  misc_feature (1)..(55): n is any nucleotide
nnnnnnnnnnnnnnnnnnnnnnnnnnnnnnnnnnnnnnnnnnnnnnnnnnnnnnntggaacaattgccacctttaagttctgcagtacattactggacaggcaagccaacaataccaggatatttaggcatgcattgaaacttgcatggagaacwcttgcactcccttaatcctctgtttgttcagtttcaatgtcaccatgacaattgattttcaactttcatcttcctctgtcggtggggagygttccrtgggacatggcagctcctgccaggaggtgcgggctcccagggtttgtgrcatggaagggcgagtaaaagacttaatgccaatggtcccagcagcactcatggcagaggtcctaggagaatagtcttggaaggacaagatggtwttgcaagataaatggaatttcccaccagataagggaattttgtcttttttttaattccttttttaaaatctcttcttgttaccaactgttcatgactagaggagctgcaagagtttctggatgattatattaatgcatttaatgatataacttccatctgttgactggagagaaaatccccactgaaggtgatagagaagatctg

SEQ ID NO: 92850 - DNA, 600 bp, Chicken  19866894410424_5
ggacaggcaagccaacaataccaggatatttaggcatgcattgaaacttgcatggagaacwcttgcactcccttaatcctctgtttgttcagtttcaatgtcaccatgacaattgattttcaactttcatcttcctctgtcggtggggagygttccrtgggacatggcagctcctgccaggaggtgcgggctcccagggtttgtgrcatggaagggcgagtaaaagacttaatgccaatggtcccagcagcactcatggcagaggtcctaggagaatagtcttggaaggacaagatggtwttgcaagataaatggaatttcccaccagataagggaattttgtcttttttttaattccttttttaaaatctcttcttgttaccaactgttcatgactagaggagctgcaagagtttctggatgattatattaatgcatttaatgatataacttccatctgttgactggagagaaaatccccactgaaggtgatagagaagatctgaagaaagatcttaaaataaatctgacaatctaatttatggaattggatttctaatacatggaattatcttcttattagtcttcatattacacaga

SEQ ID NO: 92851 - DNA, 528 bp, Chicken  19866894410426_1
cttggcatgtaaggactgagagtcacaagagcgacccacaagtcaaaagccatctaaaacactgtttctcacctcgcactgagaagagtactgaatatttggagactatgtgagtaccaaaagggtgctctccatcagctgttgccttgcagaaaacgtgctgacctggtgcatcactgaaaaaaactgcatatgtaatagatagacacaggggatggagtgctttacactatttgacttgtctctgctctctgtgcacctggtacaaatgtccatgcctaaatcataagctgcacagcrtggggaacttccctccctgcagtggagtccccgatgccccatattgattcactgacaatggattttggaggctcattggtctcaaagaaatagaagatctgataaagatggaatacatttgtgttaactaatgagtattcaatccacttttgtctggaaattttaaactattcattgtgaaaaatatgcatagggagcactggcttacagataacgggatattcacgg

SEQ ID NO: 92852 - DNA, 600 bp, Chicken  19866894410428_1
ctttggatgtgagtgtgtgctgtggaaactgtctgttttcatacagaggtggcccaagatggaggccgagggggaaacgaacagctctggttgctgcaaaagtagaggtgaagcatttctgttcagtggggaaaagtaaagccactgacaccacttttgatgagatcatgcatcagagtgataggttttggtttagctgtatttttgagcatcttctatttaaaaaaataaaaatctatcctctaaaatgtatgtgctggttctccaaagcaaaaatacaaagtgaacaatgtcctgttyggaaagcagtrtagtctcagtcttggttacttttgtcacttatttttaggatattcttttttgatgttttattttcacctcactaaatccagctgttttatttcaattgcagaccatgactactggtgagaaatagctggtaagaggagacaaagaaataaagaacttctggggcaaagaagagaagtgaagggtggtgtgcttgatagagtcagaatggcaattgctaatatgttagcatagctgcataggcagtgatttgattttactttacatacatgctttgtgtgcatgtgctct

SEQ ID NO: 92853 - DNA, 600 bp, Chicken  19866894410428_2
agtgtgtgctgtggaaactgtctgttttcatacagaggtggcccaagatggaggccgagggggaaacgaacagctctggttgctgcaaaagtagaggtgaagcatttctgttcagtggggaaaagtaaagccactgacaccacttttgatgagatcatgcatcagagtgataggttttggtttagctgtatttttgagcatcttctatttaaaaaaataaaaatctatcctctaaaatgtatgtgctggttctccaaagcaaaaatacaaagtgaacaatgtcctgttyggaaagcagtrtagtctcagtcttggttacttttgtcacttatttttaggatattcttttttgatgttttattttcacctcactaaatccagctgttttatttcaattgcagaccatgactactggtgagaaatagctggtaagaggagacaaagaaataaagaacttctggggcaaagaagagaagtgaagggtggtgtgcttgatagagtcagaatggcaattgctaatatgttagcatagctgcataggcagtgatttgattttactttacatacatgctttgtgtgcatgtgctctcttactgtgat

SEQ ID NO: 92854 - DNA, 599 bp, Chicken  19866894410435_1
  misc_feature (1)..(51): n is any nucleotide
nnnnnnnnnnnnnnnnnnnnnnnnnnnnnnnnnnnnnnnnnnnnnnnnnnntaacccgaagcagggctacctgtgaacttagggttgttcaggcttctaccccataagttctgagtgtctccagacatggagattactcagcctctctgggcaaatctgtcagtgactaatctctgaccctgtttcttgcatccacttagaattttccttgcctcaacctgtgaccacctagtctcatgcactttttgagcaaaatctctagattcccacctaggtacttgcagacagcaattagtattrctttagttgtctttttcccctgtagtttgaacaaactctgttacctgacttgcctgatacaccatgtacttcacgccctcaagcaactcagcagccatccatggatttacatagctttatcagtctgtcttaagcttgtaggcccyatattatacaaagtgctccagatgctgcctccaaataacaactaggggtactaatcactatttttgacctgatgactgcaccacttactgttgtaacctgttgtacagtcaaccttcatcaccacacagaggcactgctcagcttgtctacga

SEQ ID NO: 92855 - DNA, 600 bp, Chicken  19866894410435_2
ctgggcaaatctgtcagtgactaatctctgaccctgtttcttgcatccacttagaattttccttgcctcaacctgtgaccacctagtctcatgcactttttgagcaaaatctctagattcccacctaggtacttgcagacagcaattagtattrctttagttgtctttttcccctgtagtttgaacaaactctgttacctgacttgcctgatacaccatgtacttcacgccctcaagcaactcagcagccatccatggatttacatagctttatcagtctgtcttaagcttgtaggcccyatattatacaaagtgctccagatgctgcctccaaataacaactaggggtactaatcactatttttgacctgatgactgcaccacttactgttgtaacctgttgtacagtcaaccttcatcaccacacagaggcactgctcagcttgtctacgaggactcccacgcctcttccagctgagcttcctggccagtcagtcccagcctgctggtattagatgaggttactctgacccagctgcaggattctgcatttgtttttcttgaactacacaaggcactccattttaaagattgtctaag

SEQ ID NO: 92856 - DNA, 600 bp, Chicken  19866894410435_3
atgtgccagaatgctatgagggcgtccattcctacagaatgacattggtacttgttactcaactggagatgagattactctcaagtatcatctctagtgtctcaagttcttaagataaaaatgaagtatttatgaaacagtgtagctgcaaaggtccatgcagacacctgacaaaatacgaaaaccgtaactaatctagttatgtaagaagtaaaatgcagtgacttacctgctagtgagtattttccaaccctgcttgttctggggcatggttattgtgcacatccaagttggctcatrggaaagttatttgagttaaagaaactagctcctgtattcctgccattgcttgtggtgttcttagcagaatacaaattcccactgcatttcttgggattactatcattgaaaattgtaagacagacaaaccccaaagtctttggcattatcatcttgctggatggatttttccaggactgaaatctactttgaatactgcgtgctctttggacatccctgaatgttactatgcctacttgtctgtcctactgccagggagtcttattattctttttttatttttgctgccgtgttggaatg

SEQ ID NO: 92857 - DNA, 600 bp, Chicken  19866894410441_1
agctaccttctatttaggcagtcagtgctgcattgagagcttgtgtcttagtcttggtaagaacattgtcatggttttctttcttgaggaatctgattgtagcagaagtgctaagtcatgacctgaaacagtgattgagcacctggtgaaaggcagggccaatccaggggagctcaggtgcacacagtgcacctgagtgaccagaataggtggagccgggatccaccccttcccagacctcacttaagggttggcagtggaggtaagggtatctcttcctggagagctctctgtacctawggttttcyaaaggtaagcagtttttcttcctttgtttctgcatctttggatcctgtatttgggcttgttctcatttgcagtagcctaggattgtgccgcactgctactattgctgtactttccatcacattaatagcattgcactgataatttggtctctaagtttctgaagaatatgcttggaggttgtgttcctatttctggccatgatgctcttaaaagagcttaacgttcatgcctggtggaaatctttcccttaatatgaagatttttcgtctgttaaagatcacttgttggtga

SEQ ID NO: 92858 - DNA, 600 bp, Chicken  19866894410441_2
tctatttaggcagtcagtgctgcattgagagcttgtgtcttagtcttggtaagaacattgtcatggttttctttcttgaggaatctgattgtagcagaagtgctaagtcatgacctgaaacagtgattgagcacctggtgaaaggcagggccaatccaggggagctcaggtgcacacagtgcacctgagtgaccagaataggtggagccgggatccaccccttcccagacctcacttaagggttggcagtggaggtaagggtatctcttcctggagagctctctgtacctawggttttcyaaaggtaagcagtttttcttcctttgtttctgcatctttggatcctgtatttgggcttgttctcatttgcagtagcctaggattgtgccgcactgctactattgctgtactttccatcacattaatagcattgcactgataatttggtctctaagtttctgaagaatatgcttggaggttgtgttcctatttctggccatgatgctcttaaaagagcttaacgttcatgcctggtggaaatctttcccttaatatgaagatttttcgtctgttaaagatcacttgttggtgatcagcggt

SEQ ID NO: 92859 - DNA, 600 bp, Chicken  19866894410449_1
tagctcttctgctaacttctcttcatctgttcatcagctcctatataacttgattgtaatttaactctgatttatgatgttatgtgaggtaaggagtaacaatcataaaaccatagaatcatagtttggaaagaccaataagatcatccagtccagccagcaacccatgcctgtgaccttctagaccatgtcactcagtgacacatctccatggctcttgaacacctccatggacactgactccaccattttcctgggcagcctgtgccaatgcatcactgctctgagaagaaatatttyctaatacccagacttgaccttctctaagacaacttaaggccagtatctcccatcccactgctgttaccatggaaaaggggtcaactcccgacctyaycacaacctccattcagggagctggagagagcaataacatctcacctgagcctactcttcttcagactgaacaatcctggttccctcaactgctccccataagaattgctcttcagacccttcacagttcctttgcctttctttggacacagcccaaggcctccatgtccttcttgcagtgcggattcaaaactgaatgcatca

SEQ ID NO: 92860 - DNA, 600 bp, Chicken  19866894410449_2
gtaacaatcataaaaccatagaatcatagtttggaaagaccaataagatcatccagtccagccagcaacccatgcctgtgaccttctagaccatgtcactcagtgacacatctccatggctcttgaacacctccatggacactgactccaccattttcctgggcagcctgtgccaatgcatcactgctctgagaagaaatatttyctaatacccagacttgaccttctctaagacaacttaaggccagtatctcccatcccactgctgttaccatggaaaaggggtcaactcccgacctyaycacaacctccattcagggagctggagagagcaataacatctcacctgagcctactcttcttcagactgaacaatcctggttccctcaactgctccccataagaattgctcttcagacccttcacagttcctttgcctttctttggacacagcccaaggcctccatgtccttcttgcagtgcggattcaaaactgaatgcatcactcgaggtgtggcctcaccagtgtgactgagcagacttggttcccattaccacctccttttctcattatgccttgcagccttggaaatggtcctt

SEQ ID NO: 92861 - DNA, 600 bp, Chicken  19866894410449_3
aacaatcataaaaccatagaatcatagtttggaaagaccaataagatcatccagtccagccagcaacccatgcctgtgaccttctagaccatgtcactcagtgacacatctccatggctcttgaacacctccatggacactgactccaccattttcctgggcagcctgtgccaatgcatcactgctctgagaagaaatatttyctaatacccagacttgaccttctctaagacaacttaaggccagtatctcccatcccactgctgttaccatggaaaaggggtcaactcccgacctyaycacaacctccattcagggagctggagagagcaataacatctcacctgagcctactcttcttcagactgaacaatcctggttccctcaactgctccccataagaattgctcttcagacccttcacagttcctttgcctttctttggacacagcccaaggcctccatgtccttcttgcagtgcggattcaaaactgaatgcatcactcgaggtgtggcctcaccagtgtgactgagcagacttggttcccattaccacctccttttctcattatgccttgcagccttggaaatggtccttaa

SEQ ID NO: 92862 - DNA, 600 bp, Chicken  19866894410450_1
ttgcatgtgttgacttagagcctcggtgcccagagaggctttgtttcctatagaaacaacaagtggaaacaaattgggcaggcagcagtgataccacctacgtggccttaacaccaggtagcactgtctccctcattcaaatccattcaagaccaaatccattcaatccatttccctccatccatcagttcttgtggctgcagcatgatgcaacatgagccatgatctcctttccaacacaagggatttttttctcccctcggtgccagtcctcagtaactgagtctccagagggctacraggctgtgatgtggggaatgtgggcagagcatcactgaagccctttgygcagtgcacagacaatccttaaagactgcggaggaagcaagggaagatctatcacagtctctttgttcccttggaggatgttgtcttattccgccctctctaagcctaaaaggaacaaagttaaaccaagagacaacaattgctcctccagagcccctgtcccatctcatgctgtgatgagagcagtgatcactcagagctggttgagctggagctccatagccacaccaccacagaaaagcccaatcgtgc

SEQ ID NO: 92863 - DNA, 600 bp, Chicken  19866894410450_2
tatagaaacaacaagtggaaacaaattgggcaggcagcagtgataccacctacgtggccttaacaccaggtagcactgtctccctcattcaaatccattcaagaccaaatccattcaatccatttccctccatccatcagttcttgtggctgcagcatgatgcaacatgagccatgatctcctttccaacacaagggatttttttctcccctcggtgccagtcctcagtaactgagtctccagagggctacraggctgtgatgtggggaatgtgggcagagcatcactgaagccctttgygcagtgcacagacaatccttaaagactgcggaggaagcaagggaagatctatcacagtctctttgttcccttggaggatgttgtcttattccgccctctctaagcctaaaaggaacaaagttaaaccaagagacaacaattgctcctccagagcccctgtcccatctcatgctgtgatgagagcagtgatcactcagagctggttgagctggagctccatagccacaccaccacagaaaagcccaatcgtgcagcactgctgctaactgagtagagcaatgtgaagcgtcctggcgcagc

SEQ ID NO: 92864 - DNA, 600 bp, Chicken  19866894410455_1
tgagctggaaaaaatgagggatgggcttttgggagaaggtaaccaaaatggaaaaacctataataattcactgttctttgatctgaaaagttacatctgaaataaagcatttaatgttagccttactaagctctttaaaaaccataaagttcatactgaagcacaagcactgttttaaaaggagagtttgacctttttgtacaattgtcctctccatcttttcttactgaatgcaattgtatatcttcagtaaaacataaagtagtcttgctgttatataaatgaccttatgttactcaygtaatcagaagttaggcaacattaatgtgttttgcaataataaggtgaaataggagcaaaagaaagtctgcattgagacaggaaaatacactttggaaatatagatcaatgagtktaaagaayatattctagcatgtaaactgtctgaaaawgtttagctagcttacaaacagtcytacaatgtgttcacattttgcaggccaacaaacattcatcatgaaatcaatgaggccagtcaagatgtttgtaacacagtaagacacgcagcaaaatcagcagcgatagcagggaacaaacttc

SEQ ID NO: 92865 - DNA, 600 bp, Chicken  19866894410455_2
gttagccttactaagctctttaaaaaccataaagttcatactgaagcacaagcactgttttaaaaggagagtttgacctttttgtacaattgtcctctccatcttttcttactgaatgcaattgtatatcttcagtaaaacataaagtagtcttgctgttatataaatgaccttatgttactcaygtaatcagaagttaggcaacattaatgtgttttgcaataataaggtgaaataggagcaaaagaaagtctgcattgagacaggaaaatacactttggaaatatagatcaatgagtktaaagaayatattctagcatgtaaactgtctgaaaawgtttagctagcttacaaacagtcytacaatgtgttcacattttgcaggccaacaaacattcatcatgaaatcaatgaggccagtcaagatgtttgtaacacagtaagacacgcagcaaaatcagcagcgatagcagggaacaaacttccctccctctgcctgcaaatatcatgaacttttagaacattcattccttgtaggctcttgggaagcacactatctcctgacttttttacagcaaagagaaattgtcttctcaaaag

SEQ ID NO: 92866 - DNA, 600 bp, Chicken  19866894410455_3
tactaagctctttaaaaaccataaagttcatactgaagcacaagcactgttttaaaaggagagtttgacctttttgtacaattgtcctctccatcttttcttactgaatgcaattgtatatcttcagtaaaacataaagtagtcttgctgttatataaatgaccttatgttactcaygtaatcagaagttaggcaacattaatgtgttttgcaataataaggtgaaataggagcaaaagaaagtctgcattgagacaggaaaatacactttggaaatatagatcaatgagtktaaagaayatattctagcatgtaaactgtctgaaaawgtttagctagcttacaaacagtcytacaatgtgttcacattttgcaggccaacaaacattcatcatgaaatcaatgaggccagtcaagatgtttgtaacacagtaagacacgcagcaaaatcagcagcgatagcagggaacaaacttccctccctctgcctgcaaatatcatgaacttttagaacattcattccttgtaggctcttgggaagcacactatctcctgacttttttacagcaaagagaaattgtcttctcaaaagctggtact

SEQ ID NO: 92867 - DNA, 600 bp, Chicken  19866894410455_4
atactgaagcacaagcactgttttaaaaggagagtttgacctttttgtacaattgtcctctccatcttttcttactgaatgcaattgtatatcttcagtaaaacataaagtagtcttgctgttatataaatgaccttatgttactcaygtaatcagaagttaggcaacattaatgtgttttgcaataataaggtgaaataggagcaaaagaaagtctgcattgagacaggaaaatacactttggaaatatagatcaatgagtktaaagaayatattctagcatgtaaactgtctgaaaawgtttagctagcttacaaacagtcytacaatgtgttcacattttgcaggccaacaaacattcatcatgaaatcaatgaggccagtcaagatgtttgtaacacagtaagacacgcagcaaaatcagcagcgatagcagggaacaaacttccctccctctgcctgcaaatatcatgaacttttagaacattcattccttgtaggctcttgggaagcacactatctcctgacttttttacagcaaagagaaattgtcttctcaaaagctggtactttgatcacactcagaaataaagatcagat

SEQ ID NO: 92868 - DNA, 600 bp, Chicken  19866894410455_5
aaaaggagagtttgacctttttgtacaattgtcctctccatcttttcttactgaatgcaattgtatatcttcagtaaaacataaagtagtcttgctgttatataaatgaccttatgttactcaygtaatcagaagttaggcaacattaatgtgttttgcaataataaggtgaaataggagcaaaagaaagtctgcattgagacaggaaaatacactttggaaatatagatcaatgagtktaaagaayatattctagcatgtaaactgtctgaaaawgtttagctagcttacaaacagtcytacaatgtgttcacattttgcaggccaacaaacattcatcatgaaatcaatgaggccagtcaagatgtttgtaacacagtaagacacgcagcaaaatcagcagcgatagcagggaacaaacttccctccctctgcctgcaaatatcatgaacttttagaacattcattccttgtaggctcttgggaagcacactatctcctgacttttttacagcaaagagaaattgtcttctcaaaagctggtactttgatcacactcagaaataaagatcagatgatgactaagggtcttgggaattg

SEQ ID NO: 92869 - DNA, 600 bp, Chicken  19866894410456_1
cacactgaacttgttctttgagaaaaccttgctttgccgaagaacttaattggaaaaatttattctctatgaaatgccttgaaagtgcatagaggtttcctacagcgggcttcattttaaggcatatttttatacaggagatgagccctcctccggttcttcaggcctcccccctgccctcccagccagttcggagcagggtgtttcccacacaggccctgtgctcagcgctgcttcaggcgggtcgctgcaggttccctacacatccgtgcccagcagagcaggctcccgatgctttgygtttctttccgtaggctctgcttttgcttccatyctggggtaggcacagacagaggcaacggagttgtgctggaaaatgtttcagttctgattctcaacttcacttattttccccagtcaagaagaacagaaagctaagttgcctatgaagcagctgtgctgtggtgcggtgggcggactgctggtagctgctggtgcgaatgcaaggagagcttggttgcctttggtgcattaatcttttcttcttttcccatatgtgtttgttatttttttaaactctgaattgcaccactatggatt

SEQ ID NO: 92870 - DNA, 600 bp, Chicken  19866894410456_2
tgccgaagaacttaattggaaaaatttattctctatgaaatgccttgaaagtgcatagaggtttcctacagcgggcttcattttaaggcatatttttatacaggagatgagccctcctccggttcttcaggcctcccccctgccctcccagccagttcggagcagggtgtttcccacacaggccctgtgctcagcgctgcttcaggcgggtcgctgcaggttccctacacatccgtgcccagcagagcaggctcccgatgctttgygtttctttccgtaggctctgcttttgcttccatyctggggtaggcacagacagaggcaacggagttgtgctggaaaatgtttcagttctgattctcaacttcacttattttccccagtcaagaagaacagaaagctaagttgcctatgaagcagctgtgctgtggtgcggtgggcggactgctggtagctgctggtgcgaatgcaaggagagcttggttgcctttggtgcattaatcttttcttcttttcccatatgtgtttgttatttttttaaactctgaattgcaccactatggatttatttgcagaatggtactccatatgtatgtggga

SEQ ID NO: 92871 - DNA, 600 bp, Chicken  19866894410461_1
gggttttcagaactcagagcccataaaattgtatgtcaaatttgcagcgtggggaggctttgataatttgagtagaacccacgggatgtgcttgcttgtaccagttgtgaactggccttacaggaaaacgtgtgatatccttgttggtatgtgctttatttctgtcataaatgatgaattaaatggaatccatctgttttacagtttttgtttgagttactttcttggagttatcctgtagttcactgctttgttcctgagtactcacacttgctccagataactcattttcattaggamggttgatctgctcgccattaaaacactttataattgaataataggcatggctggtaagatttgagctcttgcagtatcacagcctcttcaattgggctcctaacgattagctaatctgactttcttacgcttcagagaggctttcagtcatcgcttcagataatgctcgttttgaagtagcgctgaaccttgggtggtctttggagggcaccaggtgcccttgtttccctgaacaatcagtggtactgaggtgctgaggatgatggtgatcctctgtgtgtagcctcctgagaacagcat

SEQ ID NO: 92872 - DNA, 599 bp, Chicken  19866894410480_1
  misc_feature (1)..(81): n is any nucleotide
nnnnnnnnnnnnnnnnnnnnnnnnnnnnnnnnnnnnnnnnnnnnnnnnnnnnnnnnnnnnnnnnnnnnnnnnnnnnnnnnnaagaaaactttgataccgtgtaagcatgtagatactttacctaagtgctccccttcaggtagtgatggtggcagaatgtctcttaacacttgcttgaatgtctgtgaaaatgaatttggaaaatcctttctcaagaaagcaaaagaaaatgatgttcctttaagaacctgtctaccaggaccaggaataggaaatatagactcaaagctaaaaagtcckattccagaaatgagggaccataaagtttcttttaaaccagaatttaaactgtgtgggctgcgtcctcctctactacgagctgtatcgtgggatagtttagagcctggacrgaaagataagacacccgtaaagttaccatccgaggaagataaaagctttgttgttggtaataaatccagcaatcaaataaaagcattcaaagacctccaaatccaagttcaacctgtacggatgcagaaattgacaaaactcagagaggtgagtcctgattgtatcctttaacttaagctttaaactta

SEQ ID NO: 92873 - DNA, 600 bp, Chicken  19866894410480_2
agatactttacctaagtgctccccttcaggtagtgatggtggcagaatgtctcttaacacttgcttgaatgtctgtgaaaatgaatttggaaaatcctttctcaagaaagcaaaagaaaatgatgttcctttaagaacctgtctaccaggaccaggaataggaaatatagactcaaagctaaaaagtcckattccagaaatgagggaccataaagtttcttttaaaccagaatttaaactgtgtgggctgcgtcctcctctactacgagctgtatcgtgggatagtttagagcctggacrgaaagataagacacccgtaaagttaccatccgaggaagataaaagctttgttgttggtaataaatccagcaatcaaataaaagcattcaaagacctccaaatccaagttcaacctgtacggatgcagaaattgacaaaactcagagaggtgagtcctgattgtatcctttaacttaagctttaaacttatttttatatcttactgaactttcaagttgcttagccttatttttttatcatttcaagaaatgtacaccaatataatgggtagcagtgttagcaaaatcaacatattgtatt

SEQ ID NO: 92874 - DNA, 600 bp, Chicken  19866894410487_1
gaataaaagaagattttcatctagcccatctgtgtcagggacctaaaggccccctgactgaagaatgatcctgggatggaacaaagtattttggcagttttaagggaactggtatttgtggctgtaagctgcaaatttcttgttttgtagagagagctgactttgttgatcttgtttttgcaaagacatgttttgcaagcaggtgttccacttgggctctgtatcatgcattgactgtgtgggtacagtgtgcaagtggaaaaaaccctgaagaccctggggagaataaaagcaggagakaagctgcagtrggagagagaggaaaagtgcaccttaaagcaggggataccctattggcactacctatcaaatccactgccagcacagtccttctctctcctgaaaggtttgctgtctctcaagggtcggtaagtaatagtgcacttgctcagggagtttccgcttcctgctcacggggattatctaaaatggatgcctgtgtgtgtgtgtgtgtgtatgttgagtgggacccatagccatctgtgttgctctgaaggcatgttttgcttgcctctgctcctcagacacccgtctctcaga

SEQ ID NO: 92875 - DNA, 600 bp, Chicken  19866894410487_2
gattttcatctagcccatctgtgtcagggacctaaaggccccctgactgaagaatgatcctgggatggaacaaagtattttggcagttttaagggaactggtatttgtggctgtaagctgcaaatttcttgttttgtagagagagctgactttgttgatcttgtttttgcaaagacatgttttgcaagcaggtgttccacttgggctctgtatcatgcattgactgtgtgggtacagtgtgcaagtggaaaaaaccctgaagaccctggggagaataaaagcaggagakaagctgcagtrggagagagaggaaaagtgcaccttaaagcaggggataccctattggcactacctatcaaatccactgccagcacagtccttctctctcctgaaaggtttgctgtctctcaagggtcggtaagtaatagtgcacttgctcagggagtttccgcttcctgctcacggggattatctaaaatggatgcctgtgtgtgtgtgtgtgtgtatgttgagtgggacccatagccatctgtgttgctctgaaggcatgttttgcttgcctctgctcctcagacacccgtctctcagatccaaatgtac

SEQ ID NO: 92876 - DNA, 600 bp, Chicken  19866894410490_1
gtggttgctgttttttcccctgtcaaagtcaactgatacgattttatcctttaacaactgatctgcgtttctgtgctgtgttagcagcctttaaggagaaaaagaagactttaatgcagctttatacagagggtgcgctgcagtaacacgaggactctttcctgcttaacgtgattaaaacatcagcagcaccttcctggcaaaccatgtatttgtcagtctggctctggtttttggctgcttatgcacagtcatgttccagttattgaactgacagaactttgtttctctagctcacartttctttgtgtgattgtttttgcactgctgctgatgcttattcagtctaccacacggccagccagggaactttgaaggtttgttcagtgcaytatttccttccttatggtttctgtcagtgacaatgtctgtcaatgtgtctatctgggtgatatttccttccctggtgcaagtaactttgctgttgataacctgttatttgttaaaaagtgtaaagaatttctggatcatgggtacataaacctgtttgtcacacattttctacccaaaacattcactgcctgcaaaggcatctaataa

SEQ ID NO: 92877 - DNA, 600 bp, Chicken  19866894410490_2
aaggagaaaaagaagactttaatgcagctttatacagagggtgcgctgcagtaacacgaggactctttcctgcttaacgtgattaaaacatcagcagcaccttcctggcaaaccatgtatttgtcagtctggctctggtttttggctgcttatgcacagtcatgttccagttattgaactgacagaactttgtttctctagctcacartttctttgtgtgattgtttttgcactgctgctgatgcttattcagtctaccacacggccagccagggaactttgaaggtttgttcagtgcaytatttccttccttatggtttctgtcagtgacaatgtctgtcaatgtgtctatctgggtgatatttccttccctggtgcaagtaactttgctgttgataacctgttatttgttaaaaagtgtaaagaatttctggatcatgggtacataaacctgtttgtcacacattttctacccaaaacattcactgcctgcaaaggcatctaataataattccaaagtacagaaagcaatattttccagataaatgttatagctacaaccatgcactgttctgtaaaatgacaaatatttattatttt

SEQ ID NO: 92878 - DNA, 600 bp, Chicken  19866894410504_1
agcgatcctgttcattaagcacttgtcttcgggtttctatccattcattaggcactgtatattgtgtatttccttttagatccccaaaactctatttggaatcacagaatttcaactatcacagaatatcctgagttggaagggacccttaaagatcactgaatccaactcctggctccacacaggcccacccaaaacttaaaccctatgtttgagagcagtgtccaaacactccttgcactccagcacttgaggctgtgcccacagccctgggcagcccgttctatgcccaccagcccrtggtgaagaaccttttcctgatgatccaacctcaatcttccctagtttcaatacattatctcatacatatmattcactacttaaacagctactctagtttttttttttwwwaaaaaggtattactgacttatctaactttacctccaatgattccttgttttactctcccaaacatttaaaacaaattgattaagcaaaatctcattaaacttacacaagccccctttggctttgcaaggctcttaagctctaaaggctcaggatgtggctcaatacaagccaaggaaacaaagaatcag

SEQ ID NO: 92879 - DNA, 600 bp, Chicken  19866894410504_2
ccttttagatccccaaaactctatttggaatcacagaatttcaactatcacagaatatcctgagttggaagggacccttaaagatcactgaatccaactcctggctccacacaggcccacccaaaacttaaaccctatgtttgagagcagtgtccaaacactccttgcactccagcacttgaggctgtgcccacagccctgggcagcccgttctatgcccaccagcccrtggtgaagaaccttttcctgatgatccaacctcaatcttccctagtttcaatacattatctcatacatatmattcactacttaaacagctactctagtttttttttttwwwaaaaaggtattactgacttatctaactttacctccaatgattccttgttttactctcccaaacatttaaaacaaattgattaagcaaaatctcattaaacttacacaagccccctttggctttgcaaggctcttaagctctaaaggctcaggatgtggctcaatacaagccaaggaaacaaagaatcagtatgctggcctgtttaaaagataagagggcctccttatctccacaaaggacatgcatcagtgatttactga

SEQ ID NO: 92880 - DNA, 600 bp, Chicken  19866894410504_3
tttcaactatcacagaatatcctgagttggaagggacccttaaagatcactgaatccaactcctggctccacacaggcccacccaaaacttaaaccctatgtttgagagcagtgtccaaacactccttgcactccagcacttgaggctgtgcccacagccctgggcagcccgttctatgcccaccagcccrtggtgaagaaccttttcctgatgatccaacctcaatcttccctagtttcaatacattatctcatacatatmattcactacttaaacagctactctagtttttttttttwwwaaaaaggtattactgacttatctaactttacctccaatgattccttgttttactctcccaaacatttaaaacaaattgattaagcaaaatctcattaaacttacacaagccccctttggctttgcaaggctcttaagctctaaaggctcaggatgtggctcaatacaagccaaggaaacaaagaatcagtatgctggcctgtttaaaagataagagggcctccttatctccacaaaggacatgcatcagtgatttactgatgagactgagccagctttaaaaaaaaaaaataccaaaa

SEQ ID NO: 92881 - DNA, 600 bp, Chicken  19866894410504_4
ttcaactatcacagaatatcctgagttggaagggacccttaaagatcactgaatccaactcctggctccacacaggcccacccaaaacttaaaccctatgtttgagagcagtgtccaaacactccttgcactccagcacttgaggctgtgcccacagccctgggcagcccgttctatgcccaccagcccrtggtgaagaaccttttcctgatgatccaacctcaatcttccctagtttcaatacattatctcatacatatmattcactacttaaacagctactctagtttttttttttwwwaaaaaggtattactgacttatctaactttacctccaatgattccttgttttactctcccaaacatttaaaacaaattgattaagcaaaatctcattaaacttacacaagccccctttggctttgcaaggctcttaagctctaaaggctcaggatgtggctcaatacaagccaaggaaacaaagaatcagtatgctggcctgtttaaaagataagagggcctccttatctccacaaaggacatgcatcagtgatttactgatgagactgagccagctttaaaaaaaaaaaataccaaaaa

SEQ ID NO: 92882 - DNA, 600 bp, Chicken  19866894410504_5
tcaactatcacagaatatcctgagttggaagggacccttaaagatcactgaatccaactcctggctccacacaggcccacccaaaacttaaaccctatgtttgagagcagtgtccaaacactccttgcactccagcacttgaggctgtgcccacagccctgggcagcccgttctatgcccaccagcccrtggtgaagaaccttttcctgatgatccaacctcaatcttccctagtttcaatacattatctcatacatatmattcactacttaaacagctactctagtttttttttttwwwaaaaaggtattactgacttatctaactttacctccaatgattccttgttttactctcccaaacatttaaaacaaattgattaagcaaaatctcattaaacttacacaagccccctttggctttgcaaggctcttaagctctaaaggctcaggatgtggctcaatacaagccaaggaaacaaagaatcagtatgctggcctgtttaaaagataagagggcctccttatctccacaaaggacatgcatcagtgatttactgatgagactgagccagctttaaaaaaaaaaaataccaaaaag

SEQ ID NO: 92883 - DNA, 600 bp, Chicken  19866894410507_1
aacaggtaaaaataagcagtcaacccaagcccaaaggtaaagagctaatcccagacaacgggaaagataatcaaggaataactaacacaggtaatcagcaaatcagtcaaatgaattgatttggctttggctggcgtccctgcttctgcctgagagctccagtgaaatccaaataagtggcagttatcttccactctcttcctgttatctggttctaatgacagcaggggagaggggggaaattatggctttgaacaggatcgtggcctttcatttaaagtaaatactgcaatgaaatgraaactgcttgaagaatgagactgccctggctttgttatgaacagattaagttatgtattaaaaccagctagtatcagattcttacaatggcttcagcaccttcactacaaataatgtgcagagaatcagaaagtgctgcttatagtgacctgaaggtatccagraatacggtgtgaggtagctgtgaagagccaacctccagccaaagatctgtattttatgtttcagtaaatgtatttaacattaaaaagtacagtaggaaaattcaaagggagtgatgcttattccagatttatcaat

SEQ ID NO: 92884 - DNA, 600 bp, Chicken  19866894410507_2
aaatccaaataagtggcagttatcttccactctcttcctgttatctggttctaatgacagcaggggagaggggggaaattatggctttgaacaggatcgtggcctttcatttaaagtaaatactgcaatgaaatgraaactgcttgaagaatgagactgccctggctttgttatgaacagattaagttatgtattaaaaccagctagtatcagattcttacaatggcttcagcaccttcactacaaataatgtgcagagaatcagaaagtgctgcttatagtgacctgaaggtatccagraatacggtgtgaggtagctgtgaagagccaacctccagccaaagatctgtattttatgtttcagtaaatgtatttaacattaaaaagtacagtaggaaaattcaaagggagtgatgcttattccagatttatcaatgcatttggagcatccaagttaaaagcacaacctcctcaggtttccacataggggatggagggaaccaagcagggcaccaggtgctgagtttccctgaggttccaatacccagcttcaggcagagaaacctgtcacacttgctctcctagggcccacagcaaaca

SEQ ID NO: 92885 - DNA, 600 bp, Chicken  19866894410511_1
gtacatagagatgatgggtgccatgaggaacatgtgcaacacccttcctccacttcttttctcaccccggcatggtgcctgttaacagcattggtgtgcacatttcctgagcagctactgctctactgtgaaattcataacccttccctgccttgtacctgttgccctcagttaggtatatgaagactgacgtatttacaccatgaatcctccgaaaatcctttttcactgaatgctgagaagcctggccttgggttgtccttgctgccttggatcttacagctgggtgtgaatcatttygggactgatactccatcaggagtgaaaagaaaaccattcatcatttcccatagcatttaaaaacaaaggttaacaatgtggttattgattttccactttgaagcaattagtttctaaaacagagagaagggagggctgcagaactcagaaatgggcaggctactgacacaagttagaaatggattggaaaacctttcccttcccaaaataaaagatttcatactgcattaatgatgtcctatctgccctggtagcagcagaggttacaaaggatttgatgaaaagtggagattggacaag

SEQ ID NO: 92886 - DNA, 600 bp, Chicken  19866894410514_1
ccattccgacagtgttgaaatgtcttgttttcacaagttttcctcccctgattgctttgcagtgaaggattcctgtccccctccacccctcctgcccccagattgctccactcggtgtctggcactgatgccacttgtgcccccaccacgtccccagaggcatcaaatccccacatttggcaccatggagatgttgttttagcaagtggggctggaaatggtggggagggcaaggagaggcgggcagggagctgggcaggcagcagcagtgtcctggtggggctgggcacattgggatgkgtatgcgaggtcagggcacagccagccatgaggctactaatgggtcattaacctgctgcctggggatcgggacccccttggagattggggtgctgctgagggatgaggttcccattgtaggttggggttttgccatggggtggggatcccctcagaggtcggggtgctgctgtgggatggggatcccctcagagactggggtgttgcagtggcatggggactcccttggaggtgggattctccttgcaggttggggtgctgccaagggataaagacccccctcacaggttgtggttctgc

SEQ ID NO: 92887 - DNA, 600 bp, Chicken  19866894410519_1
catgagctaaattccattatatatcagcaattagaaatccaaatgatttagaatgctgcagttcttttcacagacttgcttaaaaatagaaagagaaacctctgcctatagagagctattatttttacgtaggatagttagttcagtaatgaggaatatttaaggaaagccatagcaaacttctcaatggaaattttaattgcttcttgataaaacactgaaaatacacaaacacacaggaaggtgcacattcaaaagtcattagccattcaaagaatgcagtacataaatttcagttamataaataaatataattctattatgaccatgtatagtactatcattttaaaataacattcaccttaattttctaattatggctatatttagatgaagctggtaaccacaatatttaactctacaagtgycttttctattacggactttatggctccatgccagtccctcggaccgtgtcactgtccccagagagcagagctcagcgctgcccctctgctccctgtgaggagttacagccaccatgaggcctctcagctcctctgctctgagctgagccaacccaggaacctcagctgctcc

SEQ ID NO: 92888 - DNA, 600 bp, Chicken  19866894410519_2
gtaggatagttagttcagtaatgaggaatatttaaggaaagccatagcaaacttctcaatggaaattttaattgcttcttgataaaacactgaaaatacacaaacacacaggaaggtgcacattcaaaagtcattagccattcaaagaatgcagtacataaatttcagttamataaataaatataattctattatgaccatgtatagtactatcattttaaaataacattcaccttaattttctaattatggctatatttagatgaagctggtaaccacaatatttaactctacaagtgycttttctattacggactttatggctccatgccagtccctcggaccgtgtcactgtccccagagagcagagctcagcgctgcccctctgctccctgtgaggagttacagccaccatgaggcctctcagctcctctgctctgagctgagccaacccaggaacctcagctgctcctcataccgcttgtccattagatcctttttcttctttctaacaattttggatgctgtctcatagttttatgtccttcttaaattctggtgctcaaaacaacacacagtactcgaattgaggtaggctta

SEQ ID NO: 92889 - DNA, 600 bp, Chicken  19866894410531_1
ataaccagacttctgaagctcagagctgatggaaaaatgtgcaagggtaaggtatggtctaggaaactgatatgctgacagaactctaacgttggtcctgacatccaagaatcataagccttgaaaatgaatgagcaggcatctgcctgtggcaagcagcctgattgtgccagtgtggaaattcacagaggttagaggacaaacaatcaaaagctccaaactgcagtgctaccgcctgtatcttcattgtcagagtagttccaaatcttacaaacacctacagctgcctgccaagaagaratgcagggtcataacactctcagctcacaatgggatctcacaattacaagacctaatgagaaaagtaagaaaagctctcactatcctacctttttctcaccagatgacgatctttcatttctgaacgttcaaacaaaacatgttgactggtttgcatgcaagatttctgaatcagtcccagaagccctccatgtacctggccaacctgcaaggcaaaaactgaaaatacttataaggcaaaaatacacacgattatttaaattgactcaattctaactaaagatgcatcaacttctaaag

SEQ ID NO: 92890 - DNA, 600 bp, Chicken  19866894410533_1
caagatcccaacagtaaaacacccatgtctgacagtaactctaaaaatagaacactaccgggtcacagcctttaccacaactaaagctgcttgatttattatactctctcctccttctgacttgaataatgcttgaattgatttttaaaaagctaataattacatccagtcaaaaaataatgagcagtgcaaagaatggccctaaggtgaatgttactgcttctgctctctccaagacaagaaacacagacactatcctcttagaggaattaaattgataccatcagtatggtcagtaawttttttatttcgcagtaagatttacgtagtctgattcattgaactacttttgttacctccaaacacgattatttatattattaaaaagtatgtgcatagcattactaacaaaccagcacaacaataactgaaaaaagrgtgargttgaaggaaagccattatttaaaattaaagtggaactgaagatacaattactgtattcacagacttttatggattcatttgatacatctgaaccagtgaaatgtaatatgaacacatcaatgctattaaagcagaaaaaacagacagcgactccag

SEQ ID NO: 92891 - DNA, 600 bp, Chicken  19866894410533_2
tgatttttaaaaagctaataattacatccagtcaaaaaataatgagcagtgcaaagaatggccctaaggtgaatgttactgcttctgctctctccaagacaagaaacacagacactatcctcttagaggaattaaattgataccatcagtatggtcagtaawttttttatttcgcagtaagatttacgtagtctgattcattgaactacttttgttacctccaaacacgattatttatattattaaaaagtatgtgcatagcattactaacaaaccagcacaacaataactgaaaaaagrgtgargttgaaggaaagccattatttaaaattaaagtggaactgaagatacaattactgtattcacagacttttatggattcatttgatacatctgaaccagtgaaatgtaatatgaacacatcaatgctattaaagcagaaaaaacagacagcgactccagagcctcatttaaatttaacaaagaatataaaaattttctctaggtcacttcctgctattgctggaaacattccctcctttaagcagagctggatttcaaggtactgtacttggtgttgttttcagaacacattcagaa

SEQ ID NO: 92892 - DNA, 600 bp, Chicken  19866894410533_3
tttaaaaagctaataattacatccagtcaaaaaataatgagcagtgcaaagaatggccctaaggtgaatgttactgcttctgctctctccaagacaagaaacacagacactatcctcttagaggaattaaattgataccatcagtatggtcagtaawttttttatttcgcagtaagatttacgtagtctgattcattgaactacttttgttacctccaaacacgattatttatattattaaaaagtatgtgcatagcattactaacaaaccagcacaacaataactgaaaaaagrgtgargttgaaggaaagccattatttaaaattaaagtggaactgaagatacaattactgtattcacagacttttatggattcatttgatacatctgaaccagtgaaatgtaatatgaacacatcaatgctattaaagcagaaaaaacagacagcgactccagagcctcatttaaatttaacaaagaatataaaaattttctctaggtcacttcctgctattgctggaaacattccctcctttaagcagagctggatttcaaggtactgtacttggtgttgttttcagaacacattcagaagaaaa

SEQ ID NO: 92893 - DNA, 600 bp, Chicken  19866894410535_1
tacgatgattgctctccaagacagtaaacatgactgctatgcacagacgaggcggttttttggttttccaagaagacagatctcaactgaacagaagctttgtcttgtaaccgaactgctttattaaccctcacctcaaaaaaaatccacctatgacctctgtcataacattacaagttcagacttgcttgcttaaactaagggcttagcctagttccattataatccccctactaccatcaacagatgttacagcatcgtaagaaaatgctcagtttcaaagtttcagcacattatgcraaactgccctaggacttaaacaaatgaggtgaagattctaaacagcattaaaactaagtcagagttgtatttaaggccaagtacagtatgcagcaagtaaaaaaagaacatacgacttttcattcaaactcttacccacaaatcacttatcctaacttacacacaatgtactaaatattattgcatcagtgatgcattgtgtaaaagcagaccatagccatgcgcttcctctgcagtgtttggaaaagcatctctagagatctattaagacctatcctatacgaagggctacacatcact

SEQ ID NO: 92894 - DNA, 600 bp, Chicken  19866894410536_1
cctttccctttgtgctgggctgtaaatcacttgtaggagactcttaattgttttctggcagccgcaggctgcgtatgagcatttcagaccctgtcagggattaagatagtgaagctggagttttgattttgatgcctttaactttctggtgtcctacctggggatttcctctgaggtgcttttgctgtgaggatatggtttacccgatcttgtctgtttgcttgctttcacccgtggctacctattatcgtacttggcaatgccatgaaacagaaagttgaccgtgacatgttcaggacrcagagcatgggcagcaggcagggggcttattctgctcctggatgaactccacagaagcaggcccatgagtctataatctcctgctaaaacctcaaagagctctgagcagacctgtcacgctgcagaggacgaaccctcctgttcaccgttcaacacagatagtgtataatctaacagcctgcattcccctatctgcaaagcacctgcctctgaaatgcaggggatagaaagatgatgcctgtgccagtttgggagcagacagaacttcagactgtgtttaattaagtttgctggtattga

SEQ ID NO: 92895 - DNA, 600 bp, Chicken  19866894410541_1
ccaacccggccctgtttgtgctgtcacacagtgccatgcagggttgcagggctcggctgcagcgtggggtgtgatttgggtgagttctctgcaagccttccctgcagcaagaagggaaatgcaaggaaaattaccagatcttcacctggttggacaagttgagtatttgttcctgatacataagacaaagcagggataaagggtcatgtttccattaagtcttattaattaggcttttccctgtgcacacaaaatcaatacggccgcctgcacgcaccccataacccatttggggctccygtaatagggccagtctgcacgtgtggatggatggggccaggacagctcagccccacagctcctgcaggctgtrtgtgagcaacacccccatcagccctcagccaacacctggcagtcggtgaggagctggccacctccaagtaacccaagtgacaaamtagagcagattagaaaagctaaactcaaactgagatggaaaaaaaagaaggccattcagctcactgaaaacattatatgccctaattggaagctttgtttaatttggctttgaaattgaattccttttccttcctggagaac

SEQ ID NO: 92896 - DNA, 600 bp, Chicken  19866894410541_2
atttgggtgagttctctgcaagccttccctgcagcaagaagggaaatgcaaggaaaattaccagatcttcacctggttggacaagttgagtatttgttcctgatacataagacaaagcagggataaagggtcatgtttccattaagtcttattaattaggcttttccctgtgcacacaaaatcaatacggccgcctgcacgcaccccataacccatttggggctccygtaatagggccagtctgcacgtgtggatggatggggccaggacagctcagccccacagctcctgcaggctgtrtgtgagcaacacccccatcagccctcagccaacacctggcagtcggtgaggagctggccacctccaagtaacccaagtgacaaamtagagcagattagaaaagctaaactcaaactgagatggaaaaaaaagaaggccattcagctcactgaaaacattatatgccctaattggaagctttgtttaatttggctttgaaattgaattccttttccttcctggagaactgttattaccttaatctctgctttgaataaggccatttatatggtcaaatacatctcgttttcagcacggcac

SEQ ID NO: 92897 - DNA, 600 bp, Chicken  19866894410541_3
ttgagtatttgttcctgatacataagacaaagcagggataaagggtcatgtttccattaagtcttattaattaggcttttccctgtgcacacaaaatcaatacggccgcctgcacgcaccccataacccatttggggctccygtaatagggccagtctgcacgtgtggatggatggggccaggacagctcagccccacagctcctgcaggctgtrtgtgagcaacacccccatcagccctcagccaacacctggcagtcggtgaggagctggccacctccaagtaacccaagtgacaaamtagagcagattagaaaagctaaactcaaactgagatggaaaaaaaagaaggccattcagctcactgaaaacattatatgccctaattggaagctttgtttaatttggctttgaaattgaattccttttccttcctggagaactgttattaccttaatctctgctttgaataaggccatttatatggtcaaatacatctcgttttcagcacggcacacacactgagtgcagcagtgattgccctcccctatggtggttggcattgggcaagccaggttggtcagctcctcaatatggatgc

SEQ ID NO: 92898 - DNA, 600 bp, Chicken  19866894410545_1
ctagtctgtattcttatctgcgattgccctgacccaagtgcaacactttgtacttggccttattgaacctcattaggcttatgagggctctctgaatggcatcccttccttctattatctcaactgaatcactcagcttggtgtcaccagtaaacttgctgaggatgtacttcatcccactttctatgtcactgataaagatgttaaggagcactggtcctaagacagacccctgggagatgcaatttgtgactggccaccacctgggcatagagctgttgaccacaaccctatgacagygaccatccagccaattmtttatccactgaatagtccactcttcaaatccatacctctccaatttagaaataaggatgtggtgctggaccatgttaaagtctaggtagatgacgtcagttgcttttcccatgttcaccagtgccatcactccattctagaaggccttcagataagtcaggcatgatctgcccttggcgaagctatgctggctgtctcagatcgcctcttctcacatatgccttaacacagcttccagaaggatccactccatgatcttctcagccacagatgtgtagctca

SEQ ID NO: 92899 - DNA, 600 bp, Chicken  19866894410545_2
ctgcgattgccctgacccaagtgcaacactttgtacttggccttattgaacctcattaggcttatgagggctctctgaatggcatcccttccttctattatctcaactgaatcactcagcttggtgtcaccagtaaacttgctgaggatgtacttcatcccactttctatgtcactgataaagatgttaaggagcactggtcctaagacagacccctgggagatgcaatttgtgactggccaccacctgggcatagagctgttgaccacaaccctatgacagygaccatccagccaattmtttatccactgaatagtccactcttcaaatccatacctctccaatttagaaataaggatgtggtgctggaccatgttaaagtctaggtagatgacgtcagttgcttttcccatgttcaccagtgccatcactccattctagaaggccttcagataagtcaggcatgatctgcccttggcgaagctatgctggctgtctcagatcgcctcttctcacatatgccttaacacagcttccagaaggatccactccatgatcttctcagccacagatgtgtagctcattgatctgtagttcttc

SEQ ID NO: 92900 - DNA, 460 bp, Chicken  19866894410548_1
ctctgcttccactgtagctagtcagaaaattagaactccactcccagccatgcctgttatcctacccgcctggaggggttcaaataaaattaatttaaaaatgcatgaagccagattccagtcacccatagcaattaagaagttctgttactcagattccagctcaggtacactgactgcacacaatacataagccttctttctccagtatctgaaatacaatttaatgcaattgggtagtgcatctggttgtatgcattaaactcaagttgaaagaaaaatgaaattcttagccttttkgggccttcattaccaccaagggaatatggaactgccactgcaaaactacttcactttcctctgttggatatgtgtgtgtaggcactgtggcacggactcctactacgcactacacagttttctgttttctctcaagctgactgtcccatgacaaggttag

SEQ ID NO: 92901 - DNA, 599 bp, Chicken  19866894410551_1
  misc_feature (1)..(59): n is any nucleotide
nnnnnnnnnnnnnnnnnnnnnnnnnnnnnnnnnnnnnnnnnnnnnnnnnnnnnnnnnnncttacagccacagcaaaagcgctggtgccctcatgtgcctgcgtgcacaaagcccagagggtcctcagaggctgtcgcagggctgcatcttcccatcgtggtgtggacaaggccacccagatgccatgcatgtcccagcagaaggcagagggaagggatgctcatgctccagtgcggtcactgcgggatgatgtctctccttgacaactgggggaggatgtccaggcagggagaccccacrgaacacctttatgacctgtgacacagctgatggagtgagggcagcgggtgcagagcagggctggatctggaccatgcaatgctaggattccgggaaagaacaggcgggtgtggagcagggagaagcctccgactcgctctgcagcacaagctgctccttctagcctggaggtttgagcccacacctacagaggtgcacagcagctctgccaagcagcctggctctgaagcccttgcagcctcacaaggcgtgtgggagcttgccggagagcaacagcaatcacgtagcagaggccctgg

SEQ ID NO: 92902 - DNA, 600 bp, Chicken  19866894410551_2
ggctggatctggaccatgcaatgctaggattccgggaaagaacaggcgggtgtggagcagggagaagcctccgactcgctctgcagcacaagctgctccttctagcctggaggtttgagcccacacctacagaggtgcacagcagctctgccaagcagcctggctctgaagcccttgcagcctcacaaggcgtgtgggagcttgccggagagcaacagcaatcacgtagcagaggccctgggaacagcctgcgcccagcttggggccgcttggctgcccgtgtgctcagcacgcagctcyttcctgcagcagaacgcattcattgctcccctcctcttccacacagggcttgtgctcckagggctggggagatggtaccactggtcccatgcccacaccagcaccatgacccccccatggacctaagctgctccttgggactccagtggaagaagccaccttggtggcagtgggaagtggtggctccgtgcctcctcacagtgccagaggagcaggggatgggctggatctctcagagagaatggaaagccaccgtgttggtcaccttgctgggcagccataggacagcccaggctctct

SEQ ID NO: 92903 - DNA, 600 bp, Chicken  19866894410551_3
gggagaagcctccgactcgctctgcagcacaagctgctccttctagcctggaggtttgagcccacacctacagaggtgcacagcagctctgccaagcagcctggctctgaagcccttgcagcctcacaaggcgtgtgggagcttgccggagagcaacagcaatcacgtagcagaggccctgggaacagcctgcgcccagcttggggccgcttggctgcccgtgtgctcagcacgcagctcyttcctgcagcagaacgcattcattgctcccctcctcttccacacagggcttgtgctcckagggctggggagatggtaccactggtcccatgcccacaccagcaccatgacccccccatggacctaagctgctccttgggactccagtggaagaagccaccttggtggcagtgggaagtggtggctccgtgcctcctcacagtgccagaggagcaggggatgggctggatctctcagagagaatggaaagccaccgtgttggtcaccttgctgggcagccataggacagcccaggctctctggggtgggcaagaagctctgcttgcagagctacgcaagcttgaggccaagggatgggca

SEQ ID NO: 92904 - DNA, 599 bp, Chicken  19866894410557_1
  misc_feature (1)..(24): n is any nucleotide
nnnnnnnnnnnnnnnnnnnnnnnnacatcatattatgcaaatctgtcatgctcttaaaatccacatacagaaagtatccttgggagacatgcactctaaaaggctccagatttataacaaaaacccactagaacagtaaccctgcttaaggaaggcaacaaaaagctttgagataaaatggttgtctcagataaaacatttgggaatccagacatcctcattcaggagaacaaaaagtttcttcagatgctggaagaaaggaagagatacaacccactcacatgagtgataccatcagckgggctacagcacagtarctatctctggagctaaagacagtagtttgtttaacagaggctctaaagaaaagaatatacatgtcatctgcaaaggaacagaacaacaaatgctggtaagcagactgattaaaatgagtgcaagccttgctgctattttcctgatttcttttcttcacaaaaacaggtttcagcgttgcagatttaacttctcctcctcttgtcttggagtttcccaagttcactagaaatcaaagcaaattgggactgcatctgtgtggacctttacaaactacaatcttt

SEQ ID NO: 92905 - DNA, 599 bp, Chicken  19866894410557_2
  misc_feature (1)..(7): n is any nucleotide
nnnnnnnacatcatattatgcaaatctgtcatgctcttaaaatccacatacagaaagtatccttgggagacatgcactctaaaaggctccagatttataacaaaaacccactagaacagtaaccctgcttaaggaaggcaacaaaaagctttgagataaaatggttgtctcagataaaacatttgggaatccagacatcctcattcaggagaacaaaaagtttcttcagatgctggaagaaaggaagagatacaacccactcacatgagtgataccatcagckgggctacagcacagtarctatctctggagctaaagacagtagtttgtttaacagaggctctaaagaaaagaatatacatgtcatctgcaaaggaacagaacaacaaatgctggtaagcagactgattaaaatgagtgcaagccttgctgctattttcctgatttcttttcttcacaaaaacaggtttcagcgttgcagatttaacttctcctcctcttgtcttggagtttcccaagttcactagaaatcaaagcaaattgggactgcatctgtgtggacctttacaaactacaatctttggtgatgcaaaaccaac

SEQ ID NO: 92906 - DNA, 600 bp, Chicken  19866894410557_3
gctctaaagaaaagaatatacatgtcatctgcaaaggaacagaacaacaaatgctggtaagcagactgattaaaatgagtgcaagccttgctgctattttcctgatttcttttcttcacaaaaacaggtttcagcgttgcagatttaacttctcctcctcttgtcttggagtttcccaagttcactagaaatcaaagcaaattgggactgcatctgtgtggacctttacaaactacaatctttggtgatgcaaaaccaactgggagactgaggtaatgccagtcatcaggagaactaagwwgttagttctaaaaactaagaagtttycctctaacaccagagataaagagacattaccatccattcagaaaaagctgcagtgagatggagaaagatttgtatgagctgtcttgtgtttattaagttgttttgttcatacataaacgtagagatcagggtgttctgcaatgagggtctgagtttaacaagttgtggatggaggaacagactgccaaattcaaacatactggcaatcagttgatttactattgggtaaatatggctgcttccacactgaagttgctgagaagtagctcatcc

SEQ ID NO: 92907 - DNA, 600 bp, Chicken  19866894410557_4
ctctaaagaaaagaatatacatgtcatctgcaaaggaacagaacaacaaatgctggtaagcagactgattaaaatgagtgcaagccttgctgctattttcctgatttcttttcttcacaaaaacaggtttcagcgttgcagatttaacttctcctcctcttgtcttggagtttcccaagttcactagaaatcaaagcaaattgggactgcatctgtgtggacctttacaaactacaatctttggtgatgcaaaaccaactgggagactgaggtaatgccagtcatcaggagaactaagwwgttagttctaaaaactaagaagtttycctctaacaccagagataaagagacattaccatccattcagaaaaagctgcagtgagatggagaaagatttgtatgagctgtcttgtgtttattaagttgttttgttcatacataaacgtagagatcagggtgttctgcaatgagggtctgagtttaacaagttgtggatggaggaacagactgccaaattcaaacatactggcaatcagttgatttactattgggtaaatatggctgcttccacactgaagttgctgagaagtagctcatccc

SEQ ID NO: 92908 - DNA, 600 bp, Chicken  19866894410557_5
tctgcaaaggaacagaacaacaaatgctggtaagcagactgattaaaatgagtgcaagccttgctgctattttcctgatttcttttcttcacaaaaacaggtttcagcgttgcagatttaacttctcctcctcttgtcttggagtttcccaagttcactagaaatcaaagcaaattgggactgcatctgtgtggacctttacaaactacaatctttggtgatgcaaaaccaactgggagactgaggtaatgccagtcatcaggagaactaagwwgttagttctaaaaactaagaagtttycctctaacaccagagataaagagacattaccatccattcagaaaaagctgcagtgagatggagaaagatttgtatgagctgtcttgtgtttattaagttgttttgttcatacataaacgtagagatcagggtgttctgcaatgagggtctgagtttaacaagttgtggatggaggaacagactgccaaattcaaacatactggcaatcagttgatttactattgggtaaatatggctgcttccacactgaagttgctgagaagtagctcatcccgttcccagtgaaggaggacctacctc

SEQ ID NO: 92909 - DNA, 600 bp, Chicken  19866894410560_1
aaatagctgatttggaataatacctggtgcactctttttggtcaaaatcaagtattgttttgttagatttttaatgtcagatttgtacattttagtttattttattattttttaattaaattgttagtccaattttcatgtttcacattccattaaaacatttcttgataacatttgctgtgtagggtatgtaatgtgtggaatagtttggaggatggaaagattaatctggcacttccagactggtgccttttacatttgtcatgggaactatcctcgcagggactgttgttcaagatrtttcctctgtagagagttttacagtgactactgcatattttggcaaagaaaagccagtgataactctcctgactttggctctacatacaaatgctaaatatctgtctgaagtttagactgggaactctcattaaatttgtagggatctgggagcttttccttggtactagatctgtctatcatggcaatttatggtcttagaagcctttgtgataataactgcaaaacaaggtgaaaatgagtggaaataaaaattcaggactcaggctgataattgctgattaacacctcatctgtgag

SEQ ID NO: 92910 - DNA, 600 bp, Chicken  19866894410563_1
attggtcctcctctgctctctggccttcatctcttttctctccgactttctttggggctgttcatgccataaaactaggttaaatctggggcggaggggaggggagagcaaaagaaactcaagtgccttcagcatctcattcagaatagtgtggcactgtgcagctacagaggtcctatgtgtaactctccgtcttggagcttggagaagagagcaatgatttagagctcgtgttaacccttcttttatcttttctgctatgcagaaacgtgggtcattcaagaaacacctcacacaccracaccagtctatatgaggcagcctcactgcgtacatcccgcctacatccttgcagatcctcccgaggacagtcacagccaagctgtacacccaacacagataacagcaaagttaattgctgtgcccagtcacaggcatctttcaagctggccaaaagcctggcgtatccaaacaccgcttcagtgcctgcctgcacactgcttgggcgagcaaaaagtagggctatctgtcatcagatgggggtaagagggcttctgtctgcatgggtaaagttcagctgctccctgcttgattagtgaa

SEQ ID NO: 92911 - DNA, 539 bp, Chicken  19866894410563_2
accagtctatatgaggcagcctcactgcgtacatcccgcctacatccttgcagatcctcccgaggacagtcacagccaagctgtacacccaacacagataacagcaaagttaattgctgtgcccagtcacaggcatctttcaagctggccaaaagcctggcgtatccaaacaccgcttcagtgcctgcctgcacactgcttgggcgagcaaaaagtagggctatctgtcatcagatgggggtaagagggcttctgtctgcatgggtaaagttcagctgctccctgcttgattagtgaaaycttagtctaaataatatatttttaaaacctatcagaggtgagtggcagcgtgttccggcattcctgctggtgcggcagaaatgcagccgcactgcccaccgtgccagcgtctgcaygagatagctgcagccactgccacccgcacagcgagtctgccaggctgctgaagcctcaccttccccacacatttctggtcatggtcatttcaagagtgtttcaggtgggttttgtcaccttgg

SEQ ID NO: 92912 - DNA, 423 bp, Chicken  19866894410563_3
ctgtgcccagtcacaggcatctttcaagctggccaaaagcctggcgtatccaaacaccgcttcagtgcctgcctgcacactgcttgggcgagcaaaaagtagggctatctgtcatcagatgggggtaagagggcttctgtctgcatgggtaaagttcagctgctccctgcttgattagtgaaaycttagtctaaataatatatttttaaaacctatcagaggtgagtggcagcgtgttccggcattcctgctggtgcggcagaaatgcagccgcactgcccaccgtgccagcgtctgcaygagatagctgcagccactgccacccgcacagcgagtctgccaggctgctgaagcctcaccttccccacacatttctggtcatggtcatttcaagagtgtttcaggtgggttttgtcaccttgg

SEQ ID NO: 92913 - DNA, 600 bp, Chicken  19866894410565_1
tccactatgaaatgaatcttgctttccagattatatgtggtttacttgtatttacaacaagtcaacagtgaagttccatagagcaactgcctttggaacctgaaaatctggaggttttgaactaatggggagaaactaagacttctttcttgtcacagtgaactttgcttcatgctgtggcagtgtatcggatgaagtggttgtagtatggcttcagttttgttttgttggtggttattagggtgcctgcaaggataattcaacagtgaactaagagcttgtggtaatgtagacgaggasaaatagatttacctgatggaagaggagcatggggagaagaagtagcagaacacttgaagaagggaagaaaatggtggagggaaagcacacaactgttctgaggaaatcttatgaatcagtggttttacaatatcttctatgactacttctggtgctagttggactgttggggggtgcggggagcctcttctctaggtgcttaaaaatagctaactgtcatagtttagtcccttatataaggaaacgtttggtcctgtaaaacactcatggttaagtatgcttgtgtaaaacaaattgaat

SEQ ID NO: 92914 - DNA, 515 bp, Chicken  19866894410565_2
aatcaaatttgtgtgcgtgtttcaggatgacggtaattatttttgctgggagcatctgttaatgtggaatattttcccccccccttaggttcacgtgaaaatggcggacgaagctgtctgtgttggcccagctcccaccagcaaaagctacctcaacatggatgccatcatggaagtcattaagaaaaccagggcccaagctgtgagtctgaatgagtctatctgctgcagctgtttcatatatagaatgcagaaaagccagagtttgtattttttttcttttaaggtgtgtgtgtgtgkgkgggggagagggggtagtgattgaatatgcgattccagttagttcatgtcacatgagttaaatgtgtccgaaatcgctactggaaatcaaaggctttgtagcatctggcagcactggtcgctgatcctgcaggtggctgctggattcagctttcacaccagggagcagcttcagttcatttccaaatttgctgggggaaaaaaaaaaatcccaa

SEQ ID NO: 92915 - DNA, 513 bp, Chicken  19866894410565_3
tcaaatttgtgtgcgtgtttcaggatgacggtaattatttttgctgggagcatctgttaatgtggaatattttcccccccccttaggttcacgtgaaaatggcggacgaagctgtctgtgttggcccagctcccaccagcaaaagctacctcaacatggatgccatcatggaagtcattaagaaaaccagggcccaagctgtgagtctgaatgagtctatctgctgcagctgtttcatatatagaatgcagaaaagccagagtttgtattttttttcttttaaggtgtgtgtgtgtgkgkgggggagagggggtagtgattgaatatgcgattccagttagttcatgtcacatgagttaaatgtgtccgaaatcgctactggaaatcaaaggctttgtagcatctggcagcactggtcgctgatcctgcaggtggctgctggattcagctttcacaccagggagcagcttcagttcatttccaaatttgctgggggaaaaaaaaaaatcccaa

SEQ ID NO: 92916 - DNA, 599 bp, Chicken  19866894410573_1
  misc_feature (1)..(84): n is any nucleotide
nnnnnnnnnnnnnnnnnnnnnnnnnnnnnnnnnnnnnnnnnnnnnnnnnnnnnnnnnnnnnnnnnnnnnnnnnnnnnnnnnnnnaaaaatttgttctcctaatgagtggtcaggtattggaacaggctgcccagggaggtggtggagtcactgtttctggcggtgttcaaggaaagagtagatgttgccttgagtgacatggtttagtgggcatggtggtgatgggttcatggttagacaagatgatcttagtagtcttatccaaccttaatgattctatgtaggactgtgggacagctrggrtgaactagatctttactataaaatgtgkagagatgggagctttaatctgagagatcaactgccatcctctgattcccgtgagtgccaaagccccatcttcccctccaggttttaatcatatcyaggtttaaattcaccataggattcaatcacaccacataccgaatctcaccacacacyattaaayagtagtagaggaaactcctccctgcaaactgcatcaggctgggttggacccttcaggggccttactccaactccaatcacagcttcctctgttctcctgcccagagtga

SEQ ID NO: 92917 - DNA, 599 bp, Chicken  19866894410573_2
  misc_feature (1)..(81): n is any nucleotide
nnnnnnnnnnnnnnnnnnnnnnnnnnnnnnnnnnnnnnnnnnnnnnnnnnnnnnnnnnnnnnnnnnnnnnnnnnnnnnnnnaaaaatttgttctcctaatgagtggtcaggtattggaacaggctgcccagggaggtggtggagtcactgtttctggcggtgttcaaggaaagagtagatgttgccttgagtgacatggtttagtgggcatggtggtgatgggttcatggttagacaagatgatcttagtagtcttatccaaccttaatgattctatgtaggactgtgggacagctrggrtgaactagatctttactataaaatgtgkagagatgggagctttaatctgagagatcaactgccatcctctgattcccgtgagtgccaaagccccatcttcccctccaggttttaatcatatcyaggtttaaattcaccataggattcaatcacaccacataccgaatctcaccacacacyattaaayagtagtagaggaaactcctccctgcaaactgcatcaggctgggttggacccttcaggggccttactccaactccaatcacagcttcctctgttctcctgcccagagtgaccc

SEQ ID NO: 92918 - DNA, 599 bp, Chicken  19866894410573_3
  misc_feature (1)..(53): n is any nucleotide
nnnnnnnnnnnnnnnnnnnnnnnnnnnnnnnnnnnnnnnnnnnnnnnnnnnnnaaaaatttgttctcctaatgagtggtcaggtattggaacaggctgcccagggaggtggtggagtcactgtttctggcggtgttcaaggaaagagtagatgttgccttgagtgacatggtttagtgggcatggtggtgatgggttcatggttagacaagatgatcttagtagtcttatccaaccttaatgattctatgtaggactgtgggacagctrggrtgaactagatctttactataaaatgtgkagagatgggagctttaatctgagagatcaactgccatcctctgattcccgtgagtgccaaagccccatcttcccctccaggttttaatcatatcyaggtttaaattcaccataggattcaatcacaccacataccgaatctcaccacacacyattaaayagtagtagaggaaactcctccctgcaaactgcatcaggctgggttggacccttcaggggccttactccaactccaatcacagcttcctctgttctcctgcccagagtgacccaccagcagccttgttattgccaggctgc

SEQ ID NO: 92919 - DNA, 600 bp, Chicken  19866894410573_4
ctgcccagggaggtggtggagtcactgtttctggcggtgttcaaggaaagagtagatgttgccttgagtgacatggtttagtgggcatggtggtgatgggttcatggttagacaagatgatcttagtagtcttatccaaccttaatgattctatgtaggactgtgggacagctrggrtgaactagatctttactataaaatgtgkagagatgggagctttaatctgagagatcaactgccatcctctgattcccgtgagtgccaaagccccatcttcccctccaggttttaatcatatcyaggtttaaattcaccataggattcaatcacaccacataccgaatctcaccacacacyattaaayagtagtagaggaaactcctccctgcaaactgcatcaggctgggttggacccttcaggggccttactccaactccaatcacagcttcctctgttctcctgcccagagtgacccaccagcagccttgttattgccaggctgcctcagccttttcccagctcatgctgttgggcagcctgcagtcctggtgtgctcccagagctccatcgatgccaggatgcctctgcttgcagtggtt

SEQ ID NO: 92920 - DNA, 600 bp, Chicken  19866894410573_5
gttgccttgagtgacatggtttagtgggcatggtggtgatgggttcatggttagacaagatgatcttagtagtcttatccaaccttaatgattctatgtaggactgtgggacagctrggrtgaactagatctttactataaaatgtgkagagatgggagctttaatctgagagatcaactgccatcctctgattcccgtgagtgccaaagccccatcttcccctccaggttttaatcatatcyaggtttaaattcaccataggattcaatcacaccacataccgaatctcaccacacacyattaaayagtagtagaggaaactcctccctgcaaactgcatcaggctgggttggacccttcaggggccttactccaactccaatcacagcttcctctgttctcctgcccagagtgacccaccagcagccttgttattgccaggctgcctcagccttttcccagctcatgctgttgggcagcctgcagtcctggtgtgctcccagagctccatcgatgccaggatgcctctgcttgcagtggttgggaggtgatgaatttgccttcaggggtccctcagctctgctgcagatcatatcaag

SEQ ID NO: 92921 - DNA, 600 bp, Chicken  19866894410573_6
tgagtgacatggtttagtgggcatggtggtgatgggttcatggttagacaagatgatcttagtagtcttatccaaccttaatgattctatgtaggactgtgggacagctrggrtgaactagatctttactataaaatgtgkagagatgggagctttaatctgagagatcaactgccatcctctgattcccgtgagtgccaaagccccatcttcccctccaggttttaatcatatcyaggtttaaattcaccataggattcaatcacaccacataccgaatctcaccacacacyattaaayagtagtagaggaaactcctccctgcaaactgcatcaggctgggttggacccttcaggggccttactccaactccaatcacagcttcctctgttctcctgcccagagtgacccaccagcagccttgttattgccaggctgcctcagccttttcccagctcatgctgttgggcagcctgcagtcctggtgtgctcccagagctccatcgatgccaggatgcctctgcttgcagtggttgggaggtgatgaatttgccttcaggggtccctcagctctgctgcagatcatatcaaggtcttcg

SEQ ID NO: 92922 - DNA, 600 bp, Chicken  19866894410578_1
ttccgtgctgagcttccttcctaatttctccgggcatgtcctcctcccccagtcgtgaagcagaggacaaactttcccttcaaagagagtgcagcgggactgacctcgtctgtgtttgtacagcccttatagtctctaagtatgaaggaactgtaagagcaaggatttcctcttcatatttcaacacctgacctttgctagttaattgatgagcacaggaaaacagaaagactgcaggcaagcaaaggtgaagccatcctagttagcaaggggtcaagggcaggcaggcagaagtcgctrgcagctttggggctctccacgctcagcctgctgcaggtggtttttccacagtccttctctcaaacagatctcagctcccggaggaactctgccccccgtcagcaccctgactgccctgcacagcctggagcaaaacccccacgcgctgggccagcaaactcagaacctcatcatggcctcactgcccggcgtgatggcaatcggagccggtgagacctcatccctggcacccgcgttcaccaacaccggcggctccaccctggtgataggtgagcagtgtgtttggttggctgttttctc

SEQ ID NO: 92923 - DNA, 600 bp, Chicken  19866894410578_2
tggcctcactgcccggcgtgatggcaatcggagccggtgagacctcatccctggcacccgcgttcaccaacaccggcggctccaccctggtgataggtgagcagtgtgtttggttggctgttttctctggtgactccgctcatcagcactccggtgcagagctacgggggaattacctccctgcccctcagagataaaagcactaatctggcactgacacacacctgggggaaacggccacaaactctaaggatcttcaactgcactactgacaggtacctgtgaaatcaagggacagaygttccttattcatcttagaattcagttgcacagaagcccaggtcttgagagcgagggattctgatctgttcctatgccaatggtttttttctactgctgtgcaccttcccaaatataaacataacgccagctctaagctaagggaatttaagcatgttcacagtacctgaaagacaaggcaccccgttctactccctgcaaaaacaacatgcggtcaccactcctttttttgaatacgtttctttttttttttaacctcaagagtttttctggactgctgtcagatttcttttcactcca

SEQ ID NO: 92924 - DNA, 600 bp, Chicken  19866894410582_1
aacaactactaccaagtcaacagcactgctgtgtgatatccagtgctattccaaagcactgtttcttccttgttattcagaagaaaaagtgcaaaataagcaactaagatcactttctccccccccccccaaagactgtctttatggagacctccatctgatactctcaattttaaccttcaatttttagatttgatgtgatcagagactaaaatgaaactgttacaggtctaaaaacatcaaggttactctcaagagcactttgtaaaataccttaaagcttgtaggtaagatctgtamcttgcagttttcttagaggtatttccttactgtttgtaccaatacatctaagcaacatgtgcaagtaaacgccactcttgcctatgagacaacacagctttccaaatgctgaatgacaaagcaaattcctttgagtttggaggaaggacaagctgaaaaaaaggcatcttccatactaagaagcagccaagaaaacaggtatgccagaattatatctgctgttccgggctaaaaaggcttctaacctgccacaatttatcaattctgttgtttctgatttcatcccattgctcaatagag

SEQ ID NO: 92925 - DNA, 600 bp, Chicken  19866894410591_1
acagaattgtgttacttcgaggtaaacttacttgatggatgcaattattgggctaaaatggaaccaagctccaggagacagtacattagcctgtaaatggaaacctagcttctgcccttaacacattcacccctgctacgtgactttaccatcccttaggttcccccatgagtaattggtgtatacctctctctgtcaggttccaagatggagggaataggacttccttgtttcataataatcctatttcagtttcctattttagttcaggcctaaggcaactagtatggttcctgactraggtacctacgcttgaaaatcttaaacagatccacagagagaaacaaaagcctctacaacaggagttcagtttaaggtatgacttcatgtacagcttagagtgatcatatttctaatgtggagagtccaagtagatgctgaatgcaaaatttggtatgaaatttctcccaawcatcaggttgcaccttttcacgacattccccagaactgctttgtaagctatcaaccaagagagccttggctactaccacagaagaccctttttatgtcatcaaaacatttcaaggaatgctctacaaa

SEQ ID NO: 92926 - DNA, 600 bp, Chicken  19866894410591_2
taattggtgtatacctctctctgtcaggttccaagatggagggaataggacttccttgtttcataataatcctatttcagtttcctattttagttcaggcctaaggcaactagtatggttcctgactraggtacctacgcttgaaaatcttaaacagatccacagagagaaacaaaagcctctacaacaggagttcagtttaaggtatgacttcatgtacagcttagagtgatcatatttctaatgtggagagtccaagtagatgctgaatgcaaaatttggtatgaaatttctcccaawcatcaggttgcaccttttcacgacattccccagaactgctttgtaagctatcaaccaagagagccttggctactaccacagaagaccctttttatgtcatcaaaacatttcaaggaatgctctacaaagtttattccatactcatctgttgctaggacttgaaaggccaaaggagaggaacccaaaatgctcaaccaaataccarcacagaaagaaaaaaaaacacttaaagcacagctagctagttgtatgtacagctggaattattactgtaatgcctggaagctcttttgatcaaat

SEQ ID NO: 92927 - DNA, 600 bp, Chicken  19866894410591_3
tatgacttcatgtacagcttagagtgatcatatttctaatgtggagagtccaagtagatgctgaatgcaaaatttggtatgaaatttctcccaawcatcaggttgcaccttttcacgacattccccagaactgctttgtaagctatcaaccaagagagccttggctactaccacagaagaccctttttatgtcatcaaaacatttcaaggaatgctctacaaagtttattccatactcatctgttgctaggacttgaaaggccaaaggagaggaacccaaaatgctcaaccaaataccarcacagaaagaaaaaaaaacacttaaagcacagctagctagttgtatgtacagctggaattattactgtaatgcctggaagctcttttgatcaaattaccattctgttacagactgtacaaacactagacaagcaatttctgtcctaaggcacttaggagagacactgcataagcacagactacatacataaatgagactacagtaccttacatccaacacatcatcttaccagtcatcaagacttctataaatactgtgcaacccatgcaagaaagaaatcagatagctccccagatgtt

SEQ ID NO: 92928 - DNA, 599 bp, Chicken  19866894410595_1
  misc_feature (1)..(67): n is any nucleotide
nnnnnnnnnnnnnnnnnnnnnnnnnnnnnnnnnnnnnnnnnnnnnnnnnnnnnnnnnnnnnnnnnnnaagagcattgagacaccacgcagccagccctgcacatcccagcagcaactctgcgcagcgcagcacaggcatcaaatgaggggacccttgcagaggtgagcagagccagctcttcatgagctgtcggaaggctccatcccacctctgtaatgctggagcttgtgcagttcttcaccacttcaagggtgccttggaaaagaactgctaccttaaggcctccaaaacccctaacrcaggacatgggtgagtaggctctgacctccaccaggacactggcttcactcagcagagaaaacagaggatggcaagaattctagctttggtgtgtgattatttgcataaaatttgcacagaastttaatttttattaatgagattgggtatgtccctggggtactgcaaacatttagagaggcatttatttttgcagtcacaattaacaaacacagaaacttttccaaaatgcattggttttggccctgcgtagctgacggcacatgggcaggttttatggatttacaatccttgtttc

SEQ ID NO: 92929 - DNA, 600 bp, Chicken  19866894410595_2
agcgcagcacaggcatcaaatgaggggacccttgcagaggtgagcagagccagctcttcatgagctgtcggaaggctccatcccacctctgtaatgctggagcttgtgcagttcttcaccacttcaagggtgccttggaaaagaactgctaccttaaggcctccaaaacccctaacrcaggacatgggtgagtaggctctgacctccaccaggacactggcttcactcagcagagaaaacagaggatggcaagaattctagctttggtgtgtgattatttgcataaaatttgcacagaastttaatttttattaatgagattgggtatgtccctggggtactgcaaacatttagagaggcatttatttttgcagtcacaattaacaaacacagaaacttttccaaaatgcattggttttggccctgcgtagctgacggcacatgggcaggttttatggatttacaatccttgtttctccctatttttaaaagcgctttaatcaaaataattagagagtaccaaaaaaaaaaaaaaccctgaacttcaaggcctgcctactgctgttactggcgacaggccccatcctgccatgcaggcag

SEQ ID NO: 92930 - DNA, 599 bp, Chicken  19866894410596_1
  misc_feature (1)..(104): n is any nucleotide
nnnnnnnnnnnnnnnnnnnnnnnnnnnnnnnnnnnnnnnnnnnnnnnnnnnnnnnnnnnnnnnnnnnnnnnnnnnnnnnnnnnnnnnnnnnnnnnnnnnnnnnnacatgtaattgtcagcatattttaagtggataaaattatctcctttaccaatcatgtaagtttgattctcccccttaataacatttgtacttttctattcacgtcgaatagtatcatcttctgagggaattcatgagtatagctaggtgatattttaggatgaattctgtctttctgagccaagtacatttggackaagactgccgggctactctcaacttctgcaaacacagaatgcaaaatagaccacgcacaggaactatacagagtgttacaggaatttcatcctgaaggcctgattgtttttcacagtgaatttttacatttgataaagcttctaggcttgaaattttccagccctttgttttcatctggaagagttttaacaattagcagatggaaacttcaagggctgtcatttgttttgaaataaatgagttaaacctatcataattatgataattacagcacatcatatgaaattatatttatggg

SEQ ID NO: 92931 - DNA, 600 bp, Chicken  19866894410612_1
tctagttgctattactgaaatgtgctgggaccgctcccatgactggagtgctgtgatggatggctacaagctcttcagaagggatagatgaggaaaaaagggtggtggtgtggccctttatattaaagactgttttgatgttgaagagcttggggttgagaatgataaagttgagtgtctatgggtgaggatcagggggaaggcctgtaggggcaacattttggtgggggtctgttacaggctgccttatcaggatgaagagatggacgaggcattctatgagcagcttgcagaagtcaygcaatcaccagcactcattcttgtgggagacttcaacttccctgatatatgttggaaatataacacagcacagaggaagcagtccaagaggtttctagagtgcatggaagatagcttccctatgcagctggtatgagagtctaccaagggtggtgctctgctagacctgctcttcacaaacagtgaaggactggtgggagatgtgaaggctggggactgttttgggcagagagaccatgaaattgttgaattctctattcttggagatgtcagaagggtgactacaaaactgctatcttg

SEQ ID NO: 92932 - DNA, 600 bp, Chicken  19866894410615_1
tataaaatcaaatggcatagttaggtctgcactggagaaatcttgggtgttttacagtgtttgatttcactagctacctctttaattacgaaatgatattttaattgatttcaatgtatgattgatgttgtagttagctcatgcagatcaagaaaggaaatgtacttgtggcttataactagaaatgtaatgcttgtattttttcattactatcttcaatgaaatccatctttatgagctaatagctggtgcaatactgaagacttagtcaaacttctcttcagtacttggaggtttttyagtagtttttcaatgaaataggtttaaaattaattactttagaagtggcagtcatgaaaagaaattttaaaatccatattgcctagaggttattcttactgcttgcagacattgcacagtcttacaatacacagcctacagcatgatcaataactatttgctaatttgatctgaagactgtaggcaagcataggtgctggcacttcattttgtcttctgggaaagtattaaacttgattgggatataactagtaagtttatgtaaagttctgtgttttcacagacattcctatagaaaac

SEQ ID NO: 92933 - DNA, 599 bp, Chicken  19866894410629_1
  misc_feature (1)..(201): n is any nucleotide
nnnnnnnnnnnnnnnnnnnnnnnnnnnnnnnnnnnnnnnnnnnnnnnnnnnnnnnnnnnnnnnnnnnnnnnnnnnnnnnnnnnnnnnnnnnnnnnnnnnnnnnnnnnnnnnnnnnnnnnnnnnnnnnnnnnnnnnnnnnnnnnnnnnnnnnnnnnnnnnnnnnnnnnnnnnnnnnnnnnnnnnnnnnnnnnnnnnnnnnnnatttgtctccaaaagcaacaaaaaaaaggaaggcagaaacatctagggtatgctttcaagaacaaagtcagagcatctactgtggtaggcatatttttrggaagtggaaagaattaatcatcttattcttttaggctgtgttttgtttgtaagacctccttccgagcctgtttgttgaatagtctagtgcagttaaaacataagacaagtcagtttggacttttgatttcagagaatttaaggacaggtaaagacatttctattgcttttacaagatgtagctaacggcagagtcaagagtgctaggatgcagggaggttctgcgactacaataatgcaaagctcaaagaaaagccattccaagagcacaaacacagccaggtggtctgaagaacaaa

SEQ ID NO: 92934 - DNA, 600 bp, Chicken  19866894410629_2
gtctagtgcagttaaaacataagacaagtcagtttggacttttgatttcagagaatttaaggacaggtaaagacatttctattgcttttacaagatgtagctaacggcagagtcaagagtgctaggatgcagggaggttctgcgactacaataatgcaaagctcaaagaaaagccattccaagagcacaaacacagccaggtggtctgaagaacaaaccagaatcttaaaacagagaagagttatgatgacagcagtacacatttcttggagctaatatacagtatttcacagctgcttraaaaaactacacaacactggctagctaaatattaaatctagaaattaataatgacatggtgcattccagccaaaaataagattcacatttgaattttatttgtatttcattgttaatatttaatgcttatttcaatacatgaatacattcactgaaggttatagactctacactgactacaaaagatccaggtaagttttcactcaaaaaaaaaaaacaacctagaagtttatttcagtgcttggatccaaaagaaatcaccaagagtcagagaaggcactcctgctcagatgtacagag

SEQ ID NO: 92935 - DNA, 600 bp, Chicken  19866894410642_1
ttattaacgatgcttagtcagccatgcttccacagtccctttcttttaagtctaatctgagtcctctcatatcagaacgagataaaagcaacaggacacatttataagcaacaaggtagttgaatgctttttgtttcactgctcttgtaggaagtcacagaaaagagaatagaacgtctacagtaaaagtactttgaagccagttacactgaaatctaccatgtcacctacagacacctacatagaacctggaaacgcagtttattccacagtatctgatgtccattgctgcaaggattrtaagtgattgacctggtagatttcaacagtcaatatcaattctattgatataatatattttatatagatagatattattgatataatgcaattaatcaacatttactctgaataatcctgctctttaaggaagtaaataagtacagacaagtatcataacatagtacatcgccgtcttttcatcattgtgaagacacatggcaagctaagctcccagtttgtattctgcaaacagacacctaaataaatgaactaattcatatcactcagaaagaggaaaggataaggttgaagaaggca

SEQ ID NO: 92936 - DNA, 600 bp, Chicken  19866894410652_1
ctcgtcttgggaaggctgaaaccctgagttctgagctgctgctctcgtggttctccctcaaatgtgatgtgcaagtcacaattactattgcgtataatgggatgtcaggagatgtagactgtgagcttggatggatcacatgctctcatgtgaaatagaggtattatctgggtaatgaagtaaccttacctgggtaaccttagaaaagttagcacttcttatttttaaatggtcaatttaaaagtatgagatgctgagtgggggatttaggtatttgtacagaatgttttttagtacttktattcatttagtgacaaaaatgttttttataaatagaggaattcttaaaccctgtgatcaagtcttcctgtatgcttggtgcttgccagctgtgctcacagctctgagtgctctcaccttgcttagcatctgggtaagggcaagaggctttcacttgctgttccacttctgttgtggttcttccctcttcctccttacaaaaaatgatttatttttttgaacagcatcagtattttcctgctttgtcacttcttcctgggagcatctcctgagaacacagtctgtagcactctcattatc

SEQ ID NO: 92937 - DNA, 600 bp, Chicken  19866894410658_1
ggtttctaatcttgtgtttttccatttgtagagctaattcttcagctttcactattgattctgtaaaacatctgaccagcggatgttttaagacttcatctaagcagttgctattaaaaaaagtgaagctgtgatgtgtgaaagatgatctgtattcactaaagatacaaagtggtgtgaagggcatgactcaatgcaaagacttttgctatctcgtgttttaccaaggacacttgaaaagagatagtcaactaatttattaatgcaagtcccattttcctaatataatcggttccttcrgggactgctggtgatctgctgctgcttaagcaatttgcacctggtgctggagctttttaaaggggcaggatggttttcctctgcttcactgtatatttcctgtcatttctctccatgggggctcaggaaataattgcttcccaggtttttcagtctcatctggattttgagctggatgaaagaagaaaagcagcaaataaaactgcragggcttgttcaggcttttcagtcaggtgaggcgttgtgtataaaagctaagggttcatccttggaaaagttttttgttttttgaagtcagct

SEQ ID NO: 92938 - DNA, 573 bp, Chicken  19866894410658_2
gctatctcgtgttttaccaaggacacttgaaaagagatagtcaactaatttattaatgcaagtcccattttcctaatataatcggttccttcrgggactgctggtgatctgctgctgcttaagcaatttgcacctggtgctggagctttttaaaggggcaggatggttttcctctgcttcactgtatatttcctgtcatttctctccatgggggctcaggaaataattgcttcccaggtttttcagtctcatctggattttgagctggatgaaagaagaaaagcagcaaataaaactgcragggcttgttcaggcttttcagtcaggtgaggcgttgtgtataaaagctaagggttcatccttggaaaagttttttgttttttgaagtcagctttttatcaaaagacacaaggcagctaaaagcttataaacggtgacaatgtaccagttataacaggaaaggatatttagttatttttgctgaaattgttaccctttggggtggttttttttttatgtgcagcattcctgcttcagcagagtgggaccccacacgattctcacagttacccg

SEQ ID NO: 92939 - DNA, 600 bp, Chicken  19866894410666_1
aaagacattgtcaatattggcatctttactagtatctgctgccctactgacttacttaattgctttaatgagagaatgtgaagatgagaaactccttcagaagaattcaggaaggagaaagtcaagccacctccttttacctgtccaaacagatatctgtgtactttctggagataagaaattatggttaaggatttgaaggcacttgggtagtaagcacttagacctgcacttctgtgagaagttgtacttactgtttttctatttggaaaaatgtgaactcctgggacccactgttcmctcctttaatgtaactgtaggaaataaagtctaggttgttctttttccattttttggcatttctcctttgactcactgtgtgttctggttcagtggatgaggggggcacatgatcatacaataaagctttggcttctcctgacctgaagctcttcaggggaaaaggtgctctgtgggtgtatgggttttttccaacaccagtcccagtatgaaygcagccttcaatgctgtttagaagcttaaaaattagcctttctgtctcccagtgggatttcaggccgtgcaraagtccatcgccca

SEQ ID NO: 92940 - DNA, 600 bp, Chicken  19866894410666_2
aagcacttagacctgcacttctgtgagaagttgtacttactgtttttctatttggaaaaatgtgaactcctgggacccactgttcmctcctttaatgtaactgtaggaaataaagtctaggttgttctttttccattttttggcatttctcctttgactcactgtgtgttctggttcagtggatgaggggggcacatgatcatacaataaagctttggcttctcctgacctgaagctcttcaggggaaaaggtgctctgtgggtgtatgggttttttccaacaccagtcccagtatgaaygcagccttcaatgctgtttagaagcttaaaaattagcctttctgtctcccagtgggatttcaggccgtgcaraagtccatcgcccatctctgcacagacacagatcaaaagtttctatatgttacaagtactaaggtgtttaatttgcatgtatgagtataagcttatctacccattattattttttaaatgagaagaatgtaggcttggcactgtgcgtttgtcatcttcatgttccttttcatattgcttcctggatcggttctgctgttactacttcatcttttcagaattttgagt

SEQ ID NO: 92941 - DNA, 600 bp, Chicken  19866894410666_3
ggacccactgttcmctcctttaatgtaactgtaggaaataaagtctaggttgttctttttccattttttggcatttctcctttgactcactgtgtgttctggttcagtggatgaggggggcacatgatcatacaataaagctttggcttctcctgacctgaagctcttcaggggaaaaggtgctctgtgggtgtatgggttttttccaacaccagtcccagtatgaaygcagccttcaatgctgtttagaagcttaaaaattagcctttctgtctcccagtgggatttcaggccgtgcaraagtccatcgcccatctctgcacagacacagatcaaaagtttctatatgttacaagtactaaggtgtttaatttgcatgtatgagtataagcttatctacccattattattttttaaatgagaagaatgtaggcttggcactgtgcgtttgtcatcttcatgttccttttcatattgcttcctggatcggttctgctgttactacttcatcttttcagaattttgagtaaggaatatgctgaatatgggaaatacttgctttttatatattggatgtttgtcacagaatagttaagatga

SEQ ID NO: 92942 - DNA, 600 bp, Chicken  19866894410673_1
gacaaacaggctttgtatgacatagaccaacaccccctatttccccataaagaatcatctcatggcatatgcctacccatatgcataacacaaatgcacagatagcaaaataggtccagcgggaagagaggcgcagaggaaggccctaacactacctgcaagctgacaggctggctcagtgtttaggcactgctcctcttagacagcctcgctttgcagaaaccactgcagccttccaatctgcaaaacaacctatcaacacgaggtttaaattctcaacactgatctgctggaaatttyttagaaaaagagaaaatcaaactgttgctctggttctctaaacactgcagttatgtgggtttttcaacagttacctgtgccaacagctgttccacgtgcatcaccaatgatctgackaaggttcagccaggacatcagaggatgtgtaggtgctgacacaatcaaataagagaaccacctaccatcatggagaggcacgtgttacctgggctgcaactatcactgagtttttcccaagatccactactgcagaaagggtcttttgctgcactgggatgtacagaatacaatattactgac

SEQ ID NO: 92943 - DNA, 562 bp, Chicken  19866894410673_2
agcgggaagagaggcgcagaggaaggccctaacactacctgcaagctgacaggctggctcagtgtttaggcactgctcctcttagacagcctcgctttgcagaaaccactgcagccttccaatctgcaaaacaacctatcaacacgaggtttaaattctcaacactgatctgctggaaatttyttagaaaaagagaaaatcaaactgttgctctggttctctaaacactgcagttatgtgggtttttcaacagttacctgtgccaacagctgttccacgtgcatcaccaatgatctgackaaggttcagccaggacatcagaggatgtgtaggtgctgacacaatcaaataagagaaccacctaccatcatggagaggcacgtgttacctgggctgcaactatcactgagtttttcccaagatccactactgcagaaagggtcttttgctgcactgggatgtacagaatacaatattactgacagatctatgaaaaccaggaggcatgcaaaattcaactcctactttattatttttaatgccctctgcctgtttttcaaaa

SEQ ID NO: 92944 - DNA, 600 bp, Chicken  19866894410678_1
aaggaaacagctgtttcacttgacagacaaaaaattagaagaggtaggaaagaagtctgaactgttattccaggcctgcttttctaatacaaccaagtgccaaactgaattaaggaatatagtgcttaacagataaagggtggttttgtatgtaaagtaatcacagaaatggattgttcgtagggacgctcattttaaatgagcttaaggaaagaggttatggcagaaaaagctattatttgttttcgtctttactgtgtgttgaaatggcaagcaaacaaagtcctgtttgtgaagtgyatgacagttatctagcatggccttattacaaggactgwtccttatttgtgrctattttgaatcaaacagtgcttactttattataggaacaaacacaaaatttctgtgagtacccattttggcatctccactgcttcagaaagcagaggcacaaggctataatatagatgtagttaacttagctttatattatcctatctgatactgagacagcaaaacaggagcagcatggagctatatgaaaagggtaaattgtgccatctaaacatgtcattggagtactgctgaagagtgatgttg

SEQ ID NO: 92945 - DNA, 600 bp, Chicken  19866894410678_2
aagaggtaggaaagaagtctgaactgttattccaggcctgcttttctaatacaaccaagtgccaaactgaattaaggaatatagtgcttaacagataaagggtggttttgtatgtaaagtaatcacagaaatggattgttcgtagggacgctcattttaaatgagcttaaggaaagaggttatggcagaaaaagctattatttgttttcgtctttactgtgtgttgaaatggcaagcaaacaaagtcctgtttgtgaagtgyatgacagttatctagcatggccttattacaaggactgwtccttatttgtgrctattttgaatcaaacagtgcttactttattataggaacaaacacaaaatttctgtgagtacccattttggcatctccactgcttcagaaagcagaggcacaaggctataatatagatgtagttaacttagctttatattatcctatctgatactgagacagcaaaacaggagcagcatggagctatatgaaaagggtaaattgtgccatctaaacatgtcattggagtactgctgaagagtgatgttgcaattttataatgctccatgaaaagaaaggttgtttgc

SEQ ID NO: 92946 - DNA, 600 bp, Chicken  19866894410678_3
gaagtctgaactgttattccaggcctgcttttctaatacaaccaagtgccaaactgaattaaggaatatagtgcttaacagataaagggtggttttgtatgtaaagtaatcacagaaatggattgttcgtagggacgctcattttaaatgagcttaaggaaagaggttatggcagaaaaagctattatttgttttcgtctttactgtgtgttgaaatggcaagcaaacaaagtcctgtttgtgaagtgyatgacagttatctagcatggccttattacaaggactgwtccttatttgtgrctattttgaatcaaacagtgcttactttattataggaacaaacacaaaatttctgtgagtacccattttggcatctccactgcttcagaaagcagaggcacaaggctataatatagatgtagttaacttagctttatattatcctatctgatactgagacagcaaaacaggagcagcatggagctatatgaaaagggtaaattgtgccatctaaacatgtcattggagtactgctgaagagtgatgttgcaattttataatgctccatgaaaagaaaggttgtttgccttatctcagcag

SEQ ID NO: 92947 - DNA, 600 bp, Chicken  19866894410697_1
ggcgctttccagtgcaaccagctgtagggaagcagattgagcagaaggggtggatttgatgaactccagaggtcagttccaaccccacgcttctgggattctgtgctatggcctgtcacagaatttgggctaaccacggggtttgtggcaggggttgaatcagccacagtgtttggtgcagggattcaacactgtccatctgctctctgtgcttgtgtggagcggagagtgcccgtgtgaggagttcctgcagtgaggttcctgcagtgcaagagtgatggcactgctgagcacaaggarcacattgcatccatggctgcagtgccatgagcacacgctgcaggccaacgggcagaagcatccagaattgcagggcagcccttggagaggagaagcagcgccagcgcagggaaggaaagagccctgagagctgtgatggcccagagggaaggaacagctcagcgctgtgagcagcagctctgaggctgctgtactgctgagagcagttgtgttggaacacgctctgctcacagctgtggggatctgcacactttgtgccccatgttgggcaccacaaggactgcggtgctgtcacccggc

SEQ ID NO: 92948 - DNA, 599 bp, Chicken  19866894410698_1
  misc_feature (1)..(119): n is any nucleotide
nnnnnnnnnnnnnnnnnnnnnnnnnnnnnnnnnnnnnnnnnnnnnnnnnnnnnnnnnnnnnnnnnnnnnnnnnnnnnnnnnnnnnnnnnnnnnnnnnnnnnnnnnnnnnnnnnnnnnnnaaaaatgagagctttgttattcagctgtgccagagaccaaagaaaaagtcattttgtccagacgcttgaagacttacttgaaggtaataacaaactgttctgcaaattgtggcttagaagaaacatgaaaacaaaatccgagatagttaatgtgattattttgtagagactgtgatttctyttgccatgttttaccaattccttggttttagctttccacctttgtgccatctgagattacaaaatcatgttatctagacaagtctgaatgcggacagctactgcagtcatgatccatgatgatatcatgtatgtaacctgtcctgattcagtctaaccagaaaaatgaaactgaggcatctccttgttcaacctatgaacacctctggtaatcaccctacttttgctgactatcctttttggaaaggacacttggaaaaggtggaactaggaagtactagtgcaagcatatactggtgc

SEQ ID NO: 92949 - DNA, 600 bp, Chicken  19866894410699_1
gagaacttctcagaccagaagggaacagaattgaagatatttctcatcatgacggtcttgcagagcagtttcatagacatgtttttccatcccaagcatgtatctcctgtcctgaattagagctcaagagcacattaaaatacctgctttggctctaattcaggagataaactagatggagaaactcctcagtcctgtcaacaattgccccttggcaaacaccttcaagtctgtgatggtgtgtctcaccatactggacatgcatgcttttctatatctcttgaccacagcatgttccartactcttttaattcgtgctctttggtccaagtcttttgatacatacaaagtgacatggggaatttcactcagaagcgtatccaatgggatcagtgccgcaccctctctgttacccagttgtttaagctcatcatctttcaccacctttgtaatagctctgatttgtagttcatctcttcacagatgctgtgaagcatgtaacacaacttttcaaacatcctttatgccattagcctaaagttaaggctaaaagacaaacagagcccatgcaaatactgaaataaacacatccactcactt

SEQ ID NO: 92950 - DNA, 600 bp, Chicken  19866894410703_1
gtacaagctgtatataaactctcctttatgactgttaagcagccttgcaacttccacccaatttttacaaaacaagtcatctccatatcttgaggcagttacgtaggtactagatttagttgtcagagcagagttttgtttacatgatcaagtgattcactatgtatttgttgacatcagtgttaccaagggattatggactccaagacacggggcttctgatcttccaagagacatcctgtacagcagtcccttgagaaagcagaagggtcagctgtaagtttaagccactttgatgtwgtagtaaattctcatctcttctgcactaaaacaggaccgtgtacctcagctcagaaggctgatgagattacagtaggcttccttcctttacaggaggcccttccctcttaaagctgttatcaggaaaaacaaaaggtgacgcagaactacaaggtgcaataataatgcaakttttataacttagaaaactcaaaataagtttaaccacttctttgtaagtttgaattgacctgttgtggaaatacaagaaataaagtgtaactgctgcaaaagtagcactaattgtgcttgttcagagta

SEQ ID NO: 92951 - DNA, 600 bp, Chicken  19866894410703_2
tgacatcagtgttaccaagggattatggactccaagacacggggcttctgatcttccaagagacatcctgtacagcagtcccttgagaaagcagaagggtcagctgtaagtttaagccactttgatgtwgtagtaaattctcatctcttctgcactaaaacaggaccgtgtacctcagctcagaaggctgatgagattacagtaggcttccttcctttacaggaggcccttccctcttaaagctgttatcaggaaaaacaaaaggtgacgcagaactacaaggtgcaataataatgcaakttttataacttagaaaactcaaaataagtttaaccacttctttgtaagtttgaattgacctgttgtggaaatacaagaaataaagtgtaactgctgcaaaagtagcactaattgtgcttgttcagagtaagctgaaatttaattaaaaaaaaaaaaaaaamamcaacaacaaatggaaaagggagaattgtacagtttgctaatttgtaccttaaataacttcagtgggacctggatgtggtacagcttcatctgtgagaaagaagcaaacagttcagccacttcctcatttcccctgaa

SEQ ID NO: 92952 - DNA, 600 bp, Chicken  19866894410703_3
aggaccgtgtacctcagctcagaaggctgatgagattacagtaggcttccttcctttacaggaggcccttccctcttaaagctgttatcaggaaaaacaaaaggtgacgcagaactacaaggtgcaataataatgcaakttttataacttagaaaactcaaaataagtttaaccacttctttgtaagtttgaattgacctgttgtggaaatacaagaaataaagtgtaactgctgcaaaagtagcactaattgtgcttgttcagagtaagctgaaatttaattaaaaaaaaaaaaaaaamamcaacaacaaatggaaaagggagaattgtacagtttgctaatttgtaccttaaataacttcagtgggacctggatgtggtacagcttcatctgtgagaaagaagcaaacagttcagccacttcctcatttcccctgaaagccaaggtctgatagggacaggctggccttcctccagcattacacctcccttgggtgcatttttgtcttgctcaagctctgagactggagaaagcccttgactctgtagtttgtcccctccattgaccagattttccttcttttctccttctgttaaagc

SEQ ID NO: 92953 - DNA, 600 bp, Chicken  19866894410703_4
gaccgtgtacctcagctcagaaggctgatgagattacagtaggcttccttcctttacaggaggcccttccctcttaaagctgttatcaggaaaaacaaaaggtgacgcagaactacaaggtgcaataataatgcaakttttataacttagaaaactcaaaataagtttaaccacttctttgtaagtttgaattgacctgttgtggaaatacaagaaataaagtgtaactgctgcaaaagtagcactaattgtgcttgttcagagtaagctgaaatttaattaaaaaaaaaaaaaaaamamcaacaacaaatggaaaagggagaattgtacagtttgctaatttgtaccttaaataacttcagtgggacctggatgtggtacagcttcatctgtgagaaagaagcaaacagttcagccacttcctcatttcccctgaaagccaaggtctgatagggacaggctggccttcctccagcattacacctcccttgggtgcatttttgtcttgctcaagctctgagactggagaaagcccttgactctgtagtttgtcccctccattgaccagattttccttcttttctccttctgttaaagcag

SEQ ID NO: 92954 - DNA, 600 bp, Chicken  19866894410713_1
cttggttggctgtgtgtctccttcggggagcaccgaggccccgtagagccgcctccgctctgtgctctgccgtgcacggtagctgtggagaggcgatccggggattaagcttccaggaattggcagagcccggctcggtgctgagccaccaaccccacccgattaaaaataaacaccattaggggcgggctgcgctcggtcacagctgatttttattgaccccggccgggcgctgggctggagctgctctttttccattcctgaccccaggaggatttgagaagcagaaagttcaggtckgggctgctgtgaaagtctggctgctcccggattttcccatcagccatacggctcattcactgcktgtagttgtrgggctgtttgtagggctgtagggctggttgtagggctgaccggctcattgygcagtgcctgccttctgcccccagctcccatttcccatcccagtgctgaagagtgtgttgggatggaggaaggggaggggggacgcccaccccgtgccatactatgggatgctgccccagtattcgccgtttggttgagttttcccattccaacagaccaattttgaaggagaat

SEQ ID NO: 92955 - DNA, 600 bp, Chicken  19866894410713_2
ctctgccgtgcacggtagctgtggagaggcgatccggggattaagcttccaggaattggcagagcccggctcggtgctgagccaccaaccccacccgattaaaaataaacaccattaggggcgggctgcgctcggtcacagctgatttttattgaccccggccgggcgctgggctggagctgctctttttccattcctgaccccaggaggatttgagaagcagaaagttcaggtckgggctgctgtgaaagtctggctgctcccggattttcccatcagccatacggctcattcactgcktgtagttgtrgggctgtttgtagggctgtagggctggttgtagggctgaccggctcattgygcagtgcctgccttctgcccccagctcccatttcccatcccagtgctgaagagtgtgttgggatggaggaaggggaggggggacgcccaccccgtgccatactatgggatgctgccccagtattcgccgtttggttgagttttcccattccaacagaccaattttgaaggagaatggcccaatgcacatgttgggcgcagagagcccatcggagccagctccaggggagcagggcccca

SEQ ID NO: 92956 - DNA, 600 bp, Chicken  19866894410713_3
cacggtagctgtggagaggcgatccggggattaagcttccaggaattggcagagcccggctcggtgctgagccaccaaccccacccgattaaaaataaacaccattaggggcgggctgcgctcggtcacagctgatttttattgaccccggccgggcgctgggctggagctgctctttttccattcctgaccccaggaggatttgagaagcagaaagttcaggtckgggctgctgtgaaagtctggctgctcccggattttcccatcagccatacggctcattcactgcktgtagttgtrgggctgtttgtagggctgtagggctggttgtagggctgaccggctcattgygcagtgcctgccttctgcccccagctcccatttcccatcccagtgctgaagagtgtgttgggatggaggaaggggaggggggacgcccaccccgtgccatactatgggatgctgccccagtattcgccgtttggttgagttttcccattccaacagaccaattttgaaggagaatggcccaatgcacatgttgggcgcagagagcccatcggagccagctccaggggagcagggccccatcccgctgcc

SEQ ID NO: 92957 - DNA, 567 bp, Chicken  19866894410713_4
gagcccggctcggtgctgagccaccaaccccacccgattaaaaataaacaccattaggggcgggctgcgctcggtcacagctgatttttattgaccccggccgggcgctgggctggagctgctctttttccattcctgaccccaggaggatttgagaagcagaaagttcaggtckgggctgctgtgaaagtctggctgctcccggattttcccatcagccatacggctcattcactgcktgtagttgtrgggctgtttgtagggctgtagggctggttgtagggctgaccggctcattgygcagtgcctgccttctgcccccagctcccatttcccatcccagtgctgaagagtgtgttgggatggaggaaggggaggggggacgcccaccccgtgccatactatgggatgctgccccagtattcgccgtttggttgagttttcccattccaacagaccaattttgaaggagaatggcccaatgcacatgttgggcgcagagagcccatcggagccagctccaggggagcagggccccatcccgctgccatgctctgggcacagcat

SEQ ID NO: 92958 - DNA, 599 bp, Chicken  19866894410721_1
  misc_feature (1)..(223): n is any nucleotide
nnnnnnnnnnnnnnnnnnnnnnnnnnnnnnnnnnnnnnnnnnnnnnnnnnnnnnnnnnnnnnnnnnnnnnnnnnnnnnnnnnnnnnnnnnnnnnnnnnnnnnnnnnnnnnnnnnnnnnnnnnnnnnnnnnnnnnnnnnnnnnnnnnnnnnnnnnnnnnnnnnnnnnnnnnnnnnnnnnnnnnnnnnnnnnnnnnnnnnnnnnnnnnnnnnnnnnnnnnnnnnntctgataccaaagcactgttttagacacactaccaatttacagaattctcagactgatagatgagtggattatattkctgtagtaaaagtcttaatgaaaacacttctaaaatcagactataacccatatttagggttattaaaatgacagcagtaaaacttgaggtttattccaatattatctgcaggtatatcattcaaagcaaagacyagcctgttgaaggctaatatttgccgactgtcaatgtaatgaagaccataggaacgagtgcagttttgcaatcagtttttttttttttattattttttttttttttcctggaaaataaaaaaaatggggaattctgcctgtgtagtaacagcaggaaaatttatt

SEQ ID NO: 92959 - DNA, 599 bp, Chicken  19866894410721_2
  misc_feature (1)..(89): n is any nucleotide
nnnnnnnnnnnnnnnnnnnnnnnnnnnnnnnnnnnnnnnnnnnnnnnnnnnnnnnnnnnnnnnnnnnnnnnnnnnnnnnnnnnnnnnnntctgataccaaagcactgttttagacacactaccaatttacagaattctcagactgatagatgagtggattatattkctgtagtaaaagtcttaatgaaaacacttctaaaatcagactataacccatatttagggttattaaaatgacagcagtaaaacttgaggtttattccaatattatctgcaggtatatcattcaaagcaaagacyagcctgttgaaggctaatatttgccgactgtcaatgtaatgaagaccataggaacgagtgcagttttgcaatcagtttttttttttttattattttttttttttttcctggaaaataaaaaaaatggggaattctgcctgtgtagtaacagcaggaaaatttatttctgtcctacttatgtcaaagagcactgcctcaccactaggaaaaatacctttgccttctctctctttactgtattgagctgggtattctgtttttgtctgtttattgttttataactaccagatgggtgtgag

SEQ ID NO: 92960 - DNA, 600 bp, Chicken  19866894410724_1
ctaaggcaactcattagtagatcgtaatgtacacccccctaaagggcactgtggcaattataaaacactgacttctaaggaggaaaaggcgcacaaggagggagaaagttcttctggtgtaaaaataaaaaataaaggagtaagaagtttcacatagagcttttcaatgatcccagccacgacagatcaaagggcaacatttacagcacgatcatacaccgctccagaaatcaaggactccggagagcctcctgtgatggatggtcatggttcactgcttaattataggaattcctggcrcagccaagtattaaatcggatcctttccgtgtggcaaacagtgcaaagcaggactctgattcctagcacaccaacatggcccactgactacagagctcaacataggcacgccatgacccgtccacaccaaagcagccgcagcgctgcattacaaccttctcaggtttgtatttgcatagatttgtatttgcagcacaaatacaaacctatgcattgagttacaacttccaacacaacgccatgctgctcctcccgtcctctcccattagagcccaggcaacagaaacagacagattttta

SEQ ID NO: 92961 - DNA, 543 bp, Chicken  19866894410724_2
aaagtacagagggaagcttcttactgtaaaaataagaggatgaaaacatgtttttcctgaagattttcaacaccaggagtgacagatattccggggtaaagcacgagtgacaaatcgctgtgttgtgatctgcagcagcactgctctgagtctgtgctgggagggaaggagcacttttttagggctgggatgcccagcagtgatggcttccagggagctgcctgccaggtggcagcagtttggggcttctgtcctcgtcccacagagcctcagcttgtgctctgctctccaaggcccacyaaagaaaggggctccccagatttcccttcagatcttggatgaggatttcctctcccatggcaaatccgcactgcatgctgcacaggatgtgggccccccaatagtacactgcatctcaaggcaggaaaggaaagggagcagaaggaaaggcattcaaagcccagctggatgtggctctgggcagcctggtctagtggttggcacccctatacacaacagcagagggttgaaaggagatggtca

SEQ ID NO: 92962 - DNA, 600 bp, Chicken  19866894410726_1
catgctaataagcccagaggctgtgaaggtgctcacacacagctttctgcagccccgttatactctgagtgtaccctggctgtgcaattgtgctgctacacacatagtgtggaaacgcatctgagatgacagagtcagtctggaagtcctggttgaggaacacacttgccacaactgtattccaccatgggaaggaaagagttttcattctttttaaccaaactgtaacataaatacacacaatccagtcctttctactcagttgctatactttcagttactctctaaaatacccatccrtataatgaaatcagcattcaggtaaagtaatcatttctcagttttacttcattcttcatagctggacattcttgggagaactattttaacatatacctcaactgacattaattctttaaactcattcctgtcagcactctccaaaaacagccaaaatatttctgctccttatatgaaatcaccgcttcaaaatttatttgaaacaatggtttctaaggcaatggctagaaagaatatttagtttataaactcaatgcatttgatcactgttgacacaagaaaagatacttcaccaaactc

SEQ ID NO: 92963 - DNA, 600 bp, Chicken  19866894410728_1
atatcgaattttgtgctgcattgtgtgttcattataaagagttctctactaacctgaaattcttgaatattttttttaagattatcttctgcaacaaaacccataaaagcattaaaaaaaatgaagcaggagtgagttgtgcagagtaaagtcaatatgaagcatggaaaaatgaggaggctggtttaagaaacgtagattgaaatacctttcaaaaattattgtgctaataaactttagctttggcttgccttgtagtttcatactgttcttatcagctgttaatgcttgcacgttttygttgtttctgacttttactgtctaggagaaaacattttaggaaaaatacgtatcttcaggaaattcacagttaaatgggtagtcttaaattggtgtaggagaggagaatatttataactccctcttgtttccagattagcttcgtactcaacgttgtaaagcctgtcccaagggctctgcctgctcccagcctctcttgtgagggatgctcactggtggcaaagcagcatcctgtggtccctttcactcagggactgcagctctttgcctggctttgcaggcagcccataaggcaagtga

SEQ ID NO: 92964 - DNA, 600 bp, Chicken  19866894410730_1
caatggcatccagagactggtagataaaaagtcctaatgcacccaggatgtatgcccaaaaaggtgcctgaaaagagattcacataaaaggtcactaggtggttcccagtttctcagccaatcacctatttaattaaaggtaaaatactgcgcagcacaaaattatgctacattctatatacaatacattgtattatttgtgctgaaaaaaaaatgtttgaaaaaattaaactaatcttaaaaaaaaaaccaacaaagtagcatgaaggcacttaggaacatcctcagcagctgaaatgytggacacttaggtcatctgctcagatttacaacatgcaggtactaaaacacatcactaaataaaggcctcagttcttatggaaagaggtttttttttttttccaacatagaaaagcattttagaaattggattaaagaaattaaaccactcactaaatttgacagagcaaacctctagttaatactgactcttactttcaaagcaagctgtggatcacatgtattaacaccactcttaggtttgaaggagctgtcctacacaaagtagctttcagaagcaccattttcgtacacaaagtc

SEQ ID NO: 92965 - DNA, 600 bp, Chicken  19866894410731_1
cttcatctagagttgcagaggatcacaagagtgtttggaagtgtttgactttcctcagggaacttcatgaaactcgagttcactctgctcaaagtgactccttaatctcaggaccaaataaggaggagttcacagctccagatacttccttgctgtgatagcaaatttcaaagaaatatgttaaaaatccagctcgtcaacatgtcgtattattcatttcacctagaaagaacatcacctttctttttaattttagaatatgaccaaactgaatgataatggtcccaactctggcttatmgtagctcatgagtgtgcagttataatgggacatgactaacttgcccacttcaaattcagatctcttttttaggatcctgatgctctactgtagctctccaaaagcaaagcagcctttgtttcctagtcctgttgaatgtcactgaagcatcattgcacatgttgcaccacgatcgcttaggacagagttctgcagctcagataaagtgactttagtcatacgtgggttgagatggatttaggaagagaacagacgacaatgtatggatcagttagccccttcctctggaatatgcttgtt

SEQ ID NO: 92966 - DNA, 600 bp, Chicken  19866894410731_2
tgcttgtttggtctagaagggaaagccttttatgtagactgttaaggaccacaactggaaaagcacctgtccctgacatactttcactccgtatttgtgaccgtatagggtcagtcaagaggaagaagctcttggttttggttaaaattctctgaatctacagcacctgatactttatggatgctaccagagacaataaagccatcataattaaggtggtattgtgtgtaggttaaattgagtcttacaagaaatgctttgcaattgagttttcaaacatgctagcagttctgaataaayatctgggatctttaaattgcttctgatagtaatactaatgcttaactttcaggtaaggctctgaaatgtgagactttacaaagaaggccagaatcactgctccagtttcagagatggagaagtcaaaaaggtgagggaaaaagagttatacagaatttgacagcaggctaagtttaaagtaagacycagtctcttggcacccacaggaacagcttaagtccatttctttgttggggaagggcaacttagaatagggctgtctgaaacaacactgagaaaagtccctgaaattgatggtca

SEQ ID NO: 92967 - DNA, 600 bp, Chicken  19866894410731_3
ccagagacaataaagccatcataattaaggtggtattgtgtgtaggttaaattgagtcttacaagaaatgctttgcaattgagttttcaaacatgctagcagttctgaataaayatctgggatctttaaattgcttctgatagtaatactaatgcttaactttcaggtaaggctctgaaatgtgagactttacaaagaaggccagaatcactgctccagtttcagagatggagaagtcaaaaaggtgagggaaaaagagttatacagaatttgacagcaggctaagtttaaagtaagacycagtctcttggcacccacaggaacagcttaagtccatttctttgttggggaagggcaacttagaatagggctgtctgaaacaacactgagaaaagtccctgaaattgatggtcaagatcgtgacataagtaccagaaggattaaatccaagctgctggtgctcattgctgtttctgatgttgcaagttctcttcttgaccacagctaaacagagaaggaaaaaaaagaaagacaccaaaggacctggaccagtccgaatggaagcattagctggaccactggaggtgagcatggaaggca

SEQ ID NO: 92968 - DNA, 600 bp, Chicken  19866894410738_1
ttctctgtcttctcatttttttcatcactttttcttatttatatgtgggatattatagctgtgcttttattttcttaattatgaaagcaatgataatcagaggtaaagtttgtcttcctcctgtatgaaatgagacaaaacctcctgcaagtagctgtacttcagaaagcacacttaagtcctagtagatgttcttgtggcatctccccaagcttcactgctgtagaaatgcataacccaagctctagcgctgtgataacctccctcatacccagctgcaaggttggcctttcttcttartctcataaaaccttgtaaatctttayaccctgttctgctgcacatttcagcttcacaaacattacgctgggatgagggtgtgacacttcaatgttggcattaacaaaggaaaaatcaagttttgcctttgaatttttttctccctctgactgtgctatagccatgcttttagcatgaaattaagagtaattccaaataactcactgaggtgatgctgttgtaaatgctgctagcaaaagcacaagtggagtgcaaaacagttacataggagcattttccgaaattacagctctgaatggg

SEQ ID NO: 92969 - DNA, 600 bp, Chicken  19866894410738_2
actttttcttatttatatgtgggatattatagctgtgcttttattttcttaattatgaaagcaatgataatcagaggtaaagtttgtcttcctcctgtatgaaatgagacaaaacctcctgcaagtagctgtacttcagaaagcacacttaagtcctagtagatgttcttgtggcatctccccaagcttcactgctgtagaaatgcataacccaagctctagcgctgtgataacctccctcatacccagctgcaaggttggcctttcttcttartctcataaaaccttgtaaatctttayaccctgttctgctgcacatttcagcttcacaaacattacgctgggatgagggtgtgacacttcaatgttggcattaacaaaggaaaaatcaagttttgcctttgaatttttttctccctctgactgtgctatagccatgcttttagcatgaaattaagagtaattccaaataactcactgaggtgatgctgttgtaaatgctgctagcaaaagcacaagtggagtgcaaaacagttacataggagcattttccgaaattacagctctgaatgggttctttaatgtactgttttaattact

SEQ ID NO: 92970 - DNA, 580 bp, Chicken  19866894410740_1
ccctgttcactacagggagttggactagataacctttaaaggccccttaaacgattttaggattctgagaaattgttacataacttgcctcggtgtctaccatttcttcagtctcagtcaggactgaaaacctgttatatgcctcagaactgtctgtgtagcagtgattcccttgtctgtgttaaactgaagtttaataactctatcttatttctgacatcatgctatgcacattatgttttcttttgcaaactgtctctgacattcccatagttatctggttgggcaagcaaagagggragcaaatccagctgttaatcaagagccaggaacttgtttttcacaatagctagcgttttacctgtactgctgtttgaggcttccagctgtaatggagaggttgcctgctgctcacgaggaaggaggggggaaatccctgcrgtctttgaatatactaccataggaaacaggagcttcattttaagcacagtctgtttggttttcttaattatcagaaagctcaacaggttcagagtgccattattagctatttggcatagacacaagagagagatttata

SEQ ID NO: 92971 - DNA, 439 bp, Chicken  19866894410740_2
cctcagaactgtctgtgtagcagtgattcccttgtctgtgttaaactgaagtttaataactctatcttatttctgacatcatgctatgcacattatgttttcttttgcaaactgtctctgacattcccatagttatctggttgggcaagcaaagagggragcaaatccagctgttaatcaagagccaggaacttgtttttcacaatagctagcgttttacctgtactgctgtttgaggcttccagctgtaatggagaggttgcctgctgctcacgaggaaggaggggggaaatccctgcrgtctttgaatatactaccataggaaacaggagcttcattttaagcacagtctgtttggttttcttaattatcagaaagctcaacaggttcagagtgccattattagctatttggcatagacacaagagagagatttata

SEQ ID NO: 92972 - DNA, 600 bp, Chicken  19866894410744_1
ggaaattagcgaaatgaaggaactagataaacaaaagaaaaaatgctggagaatactgtaatatgtaaatctgggactagttctattttctaccaatctattgtataaattctacaaaaatgtaggtgtggtaatagcttctatacaaggatgtgataactctattaagagagattaatacttctagtgatggatgagatttatttcatttgtttacaaatgtaagactagagtctaatctttgaggagtctaagtgaataagaacagaaagtcgtttcttttgtgttgtagtgtactgsatacattatttgactgcaaagcatatattattgccttaacaaagaacaatgttattaaaagtcagttgaacctggcagttggttggcaggcccagggcaaaatctgaagtaccttaattaattccccyaactcgattattgcagtcccttaaaattgcactgcctactgtgtcagtacaaatggcaagatagttaagtacctcagaataataacccaaaaatactacataagatgctgaagaaattagctaggaamggtaaacttgagaagtgccaccctatggccagtcagtaactaac

SEQ ID NO: 92973 - DNA, 600 bp, Chicken  19866894410744_2
tggtaatagcttctatacaaggatgtgataactctattaagagagattaatacttctagtgatggatgagatttatttcatttgtttacaaatgtaagactagagtctaatctttgaggagtctaagtgaataagaacagaaagtcgtttcttttgtgttgtagtgtactgsatacattatttgactgcaaagcatatattattgccttaacaaagaacaatgttattaaaagtcagttgaacctggcagttggttggcaggcccagggcaaaatctgaagtaccttaattaattccccyaactcgattattgcagtcccttaaaattgcactgcctactgtgtcagtacaaatggcaagatagttaagtacctcagaataataacccaaaaatactacataagatgctgaagaaattagctaggaamggtaaacttgagaagtgccaccctatggccagtcagtaactaactccaccatgtgagagcagaacacaagggctgtgtacatactacaggtaatgtattctaactgacactgctggagcctggttcttgaaagattttggtgcctgagatcttctgaatgcttgtttttcca

SEQ ID NO: 92974 - DNA, 600 bp, Chicken  19866894410744_3
gaataagaacagaaagtcgtttcttttgtgttgtagtgtactgsatacattatttgactgcaaagcatatattattgccttaacaaagaacaatgttattaaaagtcagttgaacctggcagttggttggcaggcccagggcaaaatctgaagtaccttaattaattccccyaactcgattattgcagtcccttaaaattgcactgcctactgtgtcagtacaaatggcaagatagttaagtacctcagaataataacccaaaaatactacataagatgctgaagaaattagctaggaamggtaaacttgagaagtgccaccctatggccagtcagtaactaactccaccatgtgagagcagaacacaagggctgtgtacatactacaggtaatgtattctaactgacactgctggagcctggttcttgaaagattttggtgcctgagatcttctgaatgcttgtttttccacatatatgcaatcttaggacaccaactaggagctttagatgttcagttcatttatttcaaaagaaacagaaaaaaaagaaaaaaaaaagaaaagtaaaaattacatcttgagcacagatatattactt

SEQ ID NO: 92975 - DNA, 600 bp, Chicken  19866894410744_4
gtctcagtagtgtcctctgtaaaatattcatgttccattagttgttacttgaggtgcatcagtgatttaaccggcctcaatatcttgccagttgtagatgttcagtgacatgatttgtacattccccaggtttaaccattcctgtccgggaaatcacaaaaatctctgacagctgcttgggaattctcaagagcacccacggtaaaggggaacttatgctatacttagatatatacgatatagatatatcctattctgtcacatcagtattttgtagaaatgtgaccacttcttgtagtygctgatatgcctaagactttatttcaggcaaggacatgtggagaagtgttatgcagaagatacactactgtcctttccattgctatcttttgtcttgtacttttttctagctttgatgtgactcaaaccattttggtacatgttaagacgtcttaatgtcctgagttctttctaatgtaaaactgcatactggagccagtaatcagacataagaatttaggcattttacagggcttcatgtacaagactactgattattatctagttgttttattgggacatcacttatatccaccacac

SEQ ID NO: 92976 - DNA, 600 bp, Chicken  19866894410744_5
atttttttgtgtgtcttcatttctccatcagaagctatgttgacacatggcagtcctggagtagcttctctgaaaatggtgaacagaaagaaacagaatatagctatatctgtaagttactttggatgtaaacttagttttactaacctgttgttgaggaaagctattgtgcaaagaactttagaatgaactgatttgactgtcatcttgttcaaattttgaaaatagattcagctttgttacagaaattgcaaaactgctaattccattagttggttacattgaattattggaacaagwtattttytgtggatacttaaggaaacttgtctgtttagtatcagcctagctgaagggaccacaaatgtcagagctcagctctggacctgcctggcacatttatatttatctatgttgagggcccaccgcacagagtagagtacagttgtcaaatacctggcagaatactgagtttaccttcattttactttgtggtgtaaaaaaaatggagacctcttttatttcactgaatgtgtatcggttccgtactgcttgcatatcttgagcttttggcatcaaatgctggagaaatactgaggg

SEQ ID NO: 92977 - DNA, 600 bp, Chicken  19866894410744_6
tgtgtgtcttcatttctccatcagaagctatgttgacacatggcagtcctggagtagcttctctgaaaatggtgaacagaaagaaacagaatatagctatatctgtaagttactttggatgtaaacttagttttactaacctgttgttgaggaaagctattgtgcaaagaactttagaatgaactgatttgactgtcatcttgttcaaattttgaaaatagattcagctttgttacagaaattgcaaaactgctaattccattagttggttacattgaattattggaacaagwtattttytgtggatacttaaggaaacttgtctgtttagtatcagcctagctgaagggaccacaaatgtcagagctcagctctggacctgcctggcacatttatatttatctatgttgagggcccaccgcacagagtagagtacagttgtcaaatacctggcagaatactgagtttaccttcattttactttgtggtgtaaaaaaaatggagacctcttttatttcactgaatgtgtatcggttccgtactgcttgcatatcttgagcttttggcatcaaatgctggagaaatactgagggagtgtca

SEQ ID NO: 92978 - DNA, 514 bp, Chicken  19866894410744_7
tttgtggtgtaaaaaaaatggagacctcttttatttcactgaatgtgtatcggttccgtactgcttgcatatcttgagcttttggcatcaaatgctggagaaatactgagggagtgtcaagatgccacactatcactttctaccttcagggcattttgttttgtgagacattaataattcagtaaatgcactatataagcataaagtaacaaatataatttgaaatcagattttgcagagagtagaaattcagttagtagtcacatgctaaccactgtaaaagtttgtagttcaacacasctaccatttgccattctgcctacaaagagtaatttgcagctatttcttaggattatgtacgcagcatgcatttagaaaattttgaatggatgaggttcaagctcttacagtttaacactgagcttattactacagcatttattaagaagttttgaaactatctaaacctagctgatccagtacagctgctttgtatgtctctcataataataaa

SEQ ID NO: 92979 - DNA, 600 bp, Chicken  19866894410761_1
tttacccctgagggagtctgatttcctgatcatctatctagccatatgccgtagctcttgccaggatctcctaacagtgtcattgccagctaaaattacttgttttctgagaactgaattacgttaagaatcgtcttaaattgctgcattggcaacatcacaaagttttgtttacacacaggaaaaataaaaatatgttgaagcaaccttgtcttgaaatttagattggaaacagcttcaagcattgaacttgatccagatattgagaggtgttctacacctgctcaggcacatcgcttwttctttgttctgtttccagtgcttttctttttttgtttgtgctctaacgcagcacaatattgatgcatacaaatcaaacacttgaaaaaaggcatattgtctmcatctttttagtactggttatggtaaagactcggcgtaactcataaaaatttctcatattttgtgttaactttgctacttttttttcctcttgcaacaggatggagctgaaatatggatatatgttgactaaggagtcggaataagactgagtcctgctctgtgatctgcgtgtacttggaccatgaacttgctctt

SEQ ID NO: 92980 - DNA, 600 bp, Chicken  19866894410761_2
tttctgagaactgaattacgttaagaatcgtcttaaattgctgcattggcaacatcacaaagttttgtttacacacaggaaaaataaaaatatgttgaagcaaccttgtcttgaaatttagattggaaacagcttcaagcattgaacttgatccagatattgagaggtgttctacacctgctcaggcacatcgcttwttctttgttctgtttccagtgcttttctttttttgtttgtgctctaacgcagcacaatattgatgcatacaaatcaaacacttgaaaaaaggcatattgtctmcatctttttagtactggttatggtaaagactcggcgtaactcataaaaatttctcatattttgtgttaactttgctacttttttttcctcttgcaacaggatggagctgaaatatggatatatgttgactaaggagtcggaataagactgagtcctgctctgtgatctgcgtgtacttggaccatgaacttgctctttggctttgtgctttaggaacctttgtactaactgtgagaagctgttgggaatcatggcattctctccatgggaagctgtcctctcagaaacttggcttttttc

SEQ ID NO: 92981 - DNA, 600 bp, Chicken  19866894410764_1
caaaaaaatattgtggatttataaatttctagacttctgcctggtcatctgcaccttcgaggaacccaccaaagcagtgactgccatgctaggcccaacaaggagatgggaagggggctatcgtagaacaacactgaggtgcgtctgtagtccctacccttgcagagttttccagaaggctgctgcaatatgaaggacatctcaacaaaataataacataaatgtttagttatcttaaagatagatagaagttggttccttctttgctgttatttttcacctctctagaaaaaaataatwattattattgtatttcatttttatatgcactttctgaagagtaatgcatttccaagaaaaggattaaatctcytgaagtgaggtaataaaactgaagctgtaatgaaactcactggatatacaaggagatatttcacttaggcagtggaataaaaatctcgttacattcctgatcagaataattcacgaccaaaatggctcatcctatttttaattgtccttgtttttcaaataaaagttacagatggtttggataaatcattgtctgtctaacttcggttatgaatggctcagagaatc

SEQ ID NO: 92982 - DNA, 600 bp, Chicken  19866894410764_2
gcagtgactgccatgctaggcccaacaaggagatgggaagggggctatcgtagaacaacactgaggtgcgtctgtagtccctacccttgcagagttttccagaaggctgctgcaatatgaaggacatctcaacaaaataataacataaatgtttagttatcttaaagatagatagaagttggttccttctttgctgttatttttcacctctctagaaaaaaataatwattattattgtatttcatttttatatgcactttctgaagagtaatgcatttccaagaaaaggattaaatctcytgaagtgaggtaataaaactgaagctgtaatgaaactcactggatatacaaggagatatttcacttaggcagtggaataaaaatctcgttacattcctgatcagaataattcacgaccaaaatggctcatcctatttttaattgtccttgtttttcaaataaaagttacagatggtttggataaatcattgtctgtctaacttcggttatgaatggctcagagaatctcaaggggcactttcagtttttagggctattcatttatttattgggctataccaataaagcctaagtccagag

SEQ ID NO: 92983 - DNA, 600 bp, Chicken  19866894410764_3
aatgaaaaggaccatcaaagagacactgatgatgaatgaaatctttctatttctgctcttctacaagatttttctttagcagttggactgttgcgaaagatttgtcataacatttgagagcaacttccatgcagttgtggtgatgagagtacatttgctcttcattactcaatacatcttaaattgcttcctgctcttggtaactctgatggaccattgtgcagaaccatattgttatgtataaactgtcagcttgaataatgagaaactcacaatgggacactgaagttattctcttcrtaactataaaataaaaacaacaacaaaaacaaactaaaaacaagcagcatgaagtaccagcaaggatccaagaagactgatcatttcagatgctaaacatcttgccaaacatctgttaatctcagactatgaatgaaagcagggggaggtttgcacaagaaatggctctgccgctgagcaaggaaagccaacacaccactgcaaagtaaatacaaatctgttcccacttgccaaattaatcaagttcatgtaatcttatttgtcagcttctccaaagataagtttgtcagatggaccaaa

SEQ ID NO: 92984 - DNA, 599 bp, Chicken  19866894410780_1
  misc_feature (1)..(79): n is any nucleotide
nnnnnnnnnnnnnnnnnnnnnnnnnnnnnnnnnnnnnnnnnnnnnnnnnnnnnnnnnnnnnnnnnnnnnnnnnnnnnnncagacagcacagggccaggcagctttcagaactgagacagacaggaggatacagcagattctccctgcgcagcagtggctgcagagctgcgtggaggtccagagtcaaggtgggcatgctgtgggccaacagcagcaaatgagatatctgatgtttctgtgattaaaagtgcagggctaacaaaaatacgattatgggagaaggggaaaaggcaaggatgragctcacaaacccacaccacgttccaagcagcacccttttctcctgcgctatatactcttgggagagcagggaagactaagtcgcatggataggaatctgggggggttagaagctctaaattcaaaggggatgtggaaagcaaaatgcatatgaaaacctgtgtaacctcaccgctgtcacatacttcctgggaatgttttacttatttgtgtgctttccagaaacttgtgttctcagaatccaggactttctgtagagcctgatctgatattaaccaaattactcctcccctcctgtt

SEQ ID NO: 92985 - DNA, 599 bp, Chicken  19866894410791_1
  misc_feature (1)..(82): n is any nucleotide
nnnnnnnnnnnnnnnnnnnnnnnnnnnnnnnnnnnnnnnnnnnnnnnnnnnnnnnnnnnnnnnnnnnnnnnnnnnnnnnnnnagctggggatattattaatgtaataactgctaatgtattacgtttgatttgcataccgcccagtgacatctcccatgtagccaggtgaatgggataactagataaagaaaagcatgggttgccgtatgtaaattaagctgtatattagcttaagagaacgcagcatgagaacatctgagtgtaacaaggaaggaaaggccctcctggctgcagagagyggagctccactggcatgaacagattcagccagtgggaccaaggcccagcgcagtgagccacaacgagcaagtggggagaagaaagcatcaggggacctgagccttggttagtctttcactaacagctgctcttgtctgctctcaaacaattaaatcccaaattttgggaaattaatagaagaacttcagagaagtcaacaaggctttgaatcaatccatatctacatatgctgtgagtgcagagcaagctgcttagaactggtcagatttggccaattgctttctcacatcagaccctg

SEQ ID NO: 92986 - DNA, 600 bp, Chicken  19866894410793_1
cttgttatgtgtcactgttacaaaaacaaaacaaaacaaaaaaacacttgaggtgaaaaggtttgggccgtttaagaaataatgtcagcgtttcagctgtcttttgcttaattgtttccctctctcagctctgccacctgaaccagtttagataagatgggagcacggataaggaggaggagctgtgccctcccgggctgataacaccgcctggctctgccttcaccagcagccaacctggaactgagcacttgggaagccgtgcagtgctgctggcttggaaaggaacacagtggtgargaatgcactgaaagttctcagagtcagcccaaaacagcactgagaggggcaggctgctgggagcaggttggaaaaggcctcttaagtcatcgggtccaaccaccacagccccaggaggtgcctgctctgctggaggagcccccggacccgcacagctctcagacttccctcctcccaagctgctttcatgccaacgacgatccctatttataaccttctcccctcctgttctgctgcgtgcagctttatgacagccagggttctcctttttatgacattgttgttcttaaagtggtttta

SEQ ID NO: 92987 - DNA, 599 bp, Chicken  19866894410819_1
  misc_feature (1)..(88): n is any nucleotide
nnnnnnnnnnnnnnnnnnnnnnnnnnnnnnnnnnnnnnnnnnnnnnnnnnnnnnnnnnnnnnnnnnnnnnnnnnnnnnnnnnnnnnnnttagttgctgtgttttttgtgagtccatttggcactggtgatttttttttcctggatttgattttcgaaaaaagtaaatgcctcttcaacagactgccaagagtagttgaatatgcattgtgcactcacctcccttctaaaataaaaaatagtcctaatttattcaatttgataattgttgggctttctcttttcttgactggtttagtttygtgggtttttgttgttgttatttttccctgagtgagatatgaataagattctgtgcatctaatgtaggaaagaaatatccttgcttcccttttaatgcttaatcaaggtctaccttcagggtagtcaattttggtttgtattttcagaggcactgactaggaaaggccgttccagaatgtcattgcttcagtgctcaacacttagaaacgttttcttgatgttcttttcatatacatgtggtcatgagaaaagtgatttgcatagaaatttggtatttccagtagataaggtaaagcgc

SEQ ID NO: 92988 - DNA, 600 bp, Chicken  19866894410823_1
aacacaagattacaacgtcttgaactgcatttcgcatgttctttgagctctctcataccaatagtggaattaacaaagccgtgactgtcagtagttacagatattaattccccaacatcattgtatttgtgttccatttcacccatgcggtatttctgttgtcattctaggccctgtgtttaactgtgtcttttcagggcccaggccttaaaggtctatgaacacttaaacagtgttagccaaccaggatagaaagaaatgctcaggcattgcctaaaaacaatctgaagtggtgctctrtgcatccaaaggaaaggtcagactccacttctcactgtgaactggaggatttcgaaaggaaagcacgtaasaatttggagcagaaggcggtgaggctttgcacagagatgaaggtaagaaaaacaactggttgttgattgtaatgaacttgtagataatgttaaggatttgttgtctgtgctgctctggagaaacatgctttcccacagctattgctgttgtctcctccatcttccctggttttgtgctgtgtccccatccttgtgcttctccaccctcctgccctttctgcctttctca

SEQ ID NO: 92989 - DNA, 600 bp, Chicken  19866894410823_2
aacaaagccgtgactgtcagtagttacagatattaattccccaacatcattgtatttgtgttccatttcacccatgcggtatttctgttgtcattctaggccctgtgtttaactgtgtcttttcagggcccaggccttaaaggtctatgaacacttaaacagtgttagccaaccaggatagaaagaaatgctcaggcattgcctaaaaacaatctgaagtggtgctctrtgcatccaaaggaaaggtcagactccacttctcactgtgaactggaggatttcgaaaggaaagcacgtaasaatttggagcagaaggcggtgaggctttgcacagagatgaaggtaagaaaaacaactggttgttgattgtaatgaacttgtagataatgttaaggatttgttgtctgtgctgctctggagaaacatgctttcccacagctattgctgttgtctcctccatcttccctggttttgtgctgtgtccccatccttgtgcttctccaccctcctgccctttctgcctttctcaggtgcttcaccagtcttctctttaagttttcaccttcctgcacaaaagatgtgaaatagttaacttcaata

SEQ ID NO: 92990 - DNA, 600 bp, Chicken  19866894410834_1
ttgattttgtcccttggtgactcgagggcattagggtacactgtgcaccagtgccttatatttctgtggttctgatgtgccaggccatctaatccacacagtccaatacactctattatacctttccccctcctggctgggggcagagcccctctatttgttacctctgttgtcctcccgactattgcagtgtcttgcatcagctggagcaaccacctttttggagaaattcaccttggtggttgatctatcttctaactcttttacctgtgcttgaagtgcagaaatggatttcttatrccactccttcatatcttctccatggtcacgcaggtaatgccacaaggcaaaatgcaacctagtcctactgttgtcacttgcttgaacaggaggatgtctcctgttgatagccagtctaatagctgagacattggatgacagaggttggcatagagggattaaatgtaactcgaaatcttggagtttattaatcagttcatttataaaaggtctttctccccctctgtcatacattgctgcaaatgtactggcatatttctctggtgcagtctttgtgaatatacgccacakatgtggtgt

SEQ ID NO: 92991 - DNA, 600 bp, Chicken  19866894410834_2
tttcttatrccactccttcatatcttctccatggtcacgcaggtaatgccacaaggcaaaatgcaacctagtcctactgttgtcacttgcttgaacaggaggatgtctcctgttgatagccagtctaatagctgagacattggatgacagaggttggcatagagggattaaatgtaactcgaaatcttggagtttattaatcagttcatttataaaaggtctttctccccctctgtcatacattgctgcaaatgtactggcatatttctctggtgcagtctttgtgaatatacgccacakatgtggtgtacacctgacgttctcaggatcatgctcttggtcaggctcttcaggaatgaaagtggggctatgtaatatttccatcacggcgtgttctctcaaataatggatgcctttttccatatcagtccatttccttttctcaagcatcaggtcatctttgaaggggtatctttctttcacagctaacagcatccacttccagagggtgaagtcctggttctggcatgtgctaatacctcagtcaatggctgagtccctagcaatgccaccgagctgatgagcttctctactatccag

SEQ ID NO: 92992 - DNA, 599 bp, Chicken  19866894410837_1
  misc_feature (1)..(189): n is any nucleotide
nnnnnnnnnnnnnnnnnnnnnnnnnnnnnnnnnnnnnnnnnnnnnnnnnnnnnnnnnnnnnnnnnnnnnnnnnnnnnnnnnnnnnnnnnnnnnnnnnnnnnnnnnnnnnnnnnnnnnnnnnnnnnnnnnnnnnnnnnnnnnnnnnnnnnnnnnnnnnnnnnnnnnnnnnnnnnnnnnnnnnnnnnnnnncttatgtgggtccttatggcctcacaggcgaaggggtgaagtcctgagagcattgctgggcaccggtgttgtccaaggtgagatgatgatccagcagtcccctgaacagargagtagaagttctccgttacagttatttgaggttaccctgtaactgtcagcaggcaaatttaggtctccaggtcagatgaatctttttcactggtatttatggaataaagtggaaggcagttttgtttctgccttatctgtggccccagagactgatatgtctgtttgtacagaatcttttaagcatttttaaggacttgtattagcagtggctgtgctctggagcatgcttactatgctccctgtattgtttatttttcacaatggtatttccagagttttatttactctgggataaa

SEQ ID NO: 92993 - DNA, 600 bp, Chicken  19866894410839_1
cagcgcgtggtgttgatctgctgcgaggggaggatgccggcgaggctggcggtggggtgacagctgtgttggtgtgaggacctgccgggcccagccctgaagacggccggtcgtgtccccagctcaggacaagggctgcccaggcgcttggggccaacgtatttaacttatgcttcaaacaattaaatgcagcagcacggactggagaggcacggggtcggcaggatgcggaacggcagtgtttacacaaatatagacagtgagcattgctgctgggcccagagctgcagcagagcacgygccgtgctgtgggctgcagctgtgctgagggcagtgcggtgttagcacggggcctctgtcccagggggaagatgagacttgagagcagagtagagaagtgctgacgtggcaggtagtgtaggagacaggaaagggtcgatgagaggagggcggatgggcgcaggacagctctgctctctgtgtcctctgactttgcgtgtgtgtgcagttcctgcatcacccctggtggctgctgagccggggcaggcctggccagcggatgggcagcttcacctgaggcacagagactccgtgtgcctg

SEQ ID NO: 92994 - DNA, 600 bp, Chicken  19866894410843_1
gcaccagaattatttcagtgtcagtgcaggactgctctgtggtcttacctctccaaaagctgttgacccatatttgttgtattttatgaagaattaatggtcgcagggttaggacaggcatcctgtctgggaagagggaaggagttgttggccacttggggtgcaaaactttactgcatgcatacaaggctgaattcaggctctcttcatctggacacctaccgactatgccgcataaaagagatgaaggacttcccatcttgttcgcaccactccaccatattgtgtttctttatcctwatgtgtttaaggctggatgagtgaatgctatcccctttgaggatgctcacttctcttttggctgtggatagtgtcattgcagtgtggtctgttctttttctgtgacttatccaagatggtgatgcttgtaagtgtaaatccagaatattttttatagggaagttttctctataactcagctaccaggcctggcagtgacgtccagttttcagagcacagcctctaaaaggcaggtagcccatttatggacctgctgggcttctccactgtggagtttaattcaatttaaccacagtggtg

SEQ ID NO: 92995 - DNA, 600 bp, Chicken  19866894410851_1
ttggccaaaacaaccccccatcagtgctacatgcctggggcagagtggctggcaagctgtgtggaggacaaggatctggggttgttggctgatctcagttgaacatgagccagcaatatgcccaggtgaccaagaaggctgatggcatcctcgcttatatcagaaatagtgtttgcagcaggagcagggaagtaattgttctgcacaggtgaggctgcacctgagtgctgtgtttggttttgggcccctcactacaggaaagtcattgaggccctggagcatgttcagagaaggacatcraatctggtgaaggatctggagcacaagtcttacggggagtgcagagggaactggaattgttcagtctggagaagaggaggaccagaggatactttatcactctctacagctgcctgaaaggaggttgtagtgagctggggggtcagcctcttaagtaacagcaataggatgagaggggatagcttcaagtttcaggggaaattcaagttggatattagaaataatttcttctctaaaatagtggtgaggtgctggaagggtctgcctaaggatgtggtggagtcactgtctctagagaca

SEQ ID NO: 92996 - DNA, 600 bp, Chicken  19866894410857_1
ttaaagtttcagacagagggcgtcaggcaatagggaagacttgaactctggagaagttcttggataaatcctccattgagacaggagagttgaatttgttaaatgaaaatgagaaaaaactatttgggttattcagagaagcagatactctgcatcaccattaagcaaaaaaaaagaaaacactttaggttttcccatagagtctacttataaagcttcttcctgaggacagttccatcactcttacagctatagcagccagagtttggtgattcagtttaaaattgaatagcaagcaayraatacagagctgcaatgaagcttttctagactacatctctgagtctagaaaaattacaaagggtttaattyratctttactggaaacagaattcactgggttcattttctgcacatttcctcatggtagacttcagcatgtctgcatttgctgaggatattttacctggggctaggtggagctactccctacgtttggtaagaaggcagtgctcatcatgtcctccactccagtaaatcctttccttctctgctatcaaactgatgcctagtaggtaattatttcatcaggaagaactg

SEQ ID NO: 92997 - DNA, 600 bp, Chicken  19866894410857_2
taaagtttcagacagagggcgtcaggcaatagggaagacttgaactctggagaagttcttggataaatcctccattgagacaggagagttgaatttgttaaatgaaaatgagaaaaaactatttgggttattcagagaagcagatactctgcatcaccattaagcaaaaaaaaagaaaacactttaggttttcccatagagtctacttataaagcttcttcctgaggacagttccatcactcttacagctatagcagccagagtttggtgattcagtttaaaattgaatagcaagcaayraatacagagctgcaatgaagcttttctagactacatctctgagtctagaaaaattacaaagggtttaattyratctttactggaaacagaattcactgggttcattttctgcacatttcctcatggtagacttcagcatgtctgcatttgctgaggatattttacctggggctaggtggagctactccctacgtttggtaagaaggcagtgctcatcatgtcctccactccagtaaatcctttccttctctgctatcaaactgatgcctagtaggtaattatttcatcaggaagaactgt

SEQ ID NO: 92998 - DNA, 600 bp, Chicken  19866894410857_3
ccattgagacaggagagttgaatttgttaaatgaaaatgagaaaaaactatttgggttattcagagaagcagatactctgcatcaccattaagcaaaaaaaaagaaaacactttaggttttcccatagagtctacttataaagcttcttcctgaggacagttccatcactcttacagctatagcagccagagtttggtgattcagtttaaaattgaatagcaagcaayraatacagagctgcaatgaagcttttctagactacatctctgagtctagaaaaattacaaagggtttaattyratctttactggaaacagaattcactgggttcattttctgcacatttcctcatggtagacttcagcatgtctgcatttgctgaggatattttacctggggctaggtggagctactccctacgtttggtaagaaggcagtgctcatcatgtcctccactccagtaaatcctttccttctctgctatcaaactgatgcctagtaggtaattatttcatcaggaagaactgtacaacttgctgtgcaagattctgtaactaagcactaataaatagctcatatgaccttaacccttggggata

SEQ ID NO: 92999 - DNA, 600 bp, Chicken  19866894410857_4
cattgagacaggagagttgaatttgttaaatgaaaatgagaaaaaactatttgggttattcagagaagcagatactctgcatcaccattaagcaaaaaaaaagaaaacactttaggttttcccatagagtctacttataaagcttcttcctgaggacagttccatcactcttacagctatagcagccagagtttggtgattcagtttaaaattgaatagcaagcaayraatacagagctgcaatgaagcttttctagactacatctctgagtctagaaaaattacaaagggtttaattyratctttactggaaacagaattcactgggttcattttctgcacatttcctcatggtagacttcagcatgtctgcatttgctgaggatattttacctggggctaggtggagctactccctacgtttggtaagaaggcagtgctcatcatgtcctccactccagtaaatcctttccttctctgctatcaaactgatgcctagtaggtaattatttcatcaggaagaactgtacaacttgctgtgcaagattctgtaactaagcactaataaatagctcatatgaccttaacccttggggataa

SEQ ID NO: 93000 - DNA, 600 bp, Chicken  19866894410857_5
ccctacgtttggtaagaaggcagtgctcatcatgtcctccactccagtaaatcctttccttctctgctatcaaactgatgcctagtaggtaattatttcatcaggaagaactgtacaacttgctgtgcaagattctgtaactaagcactaataaatagctcatatgaccttaacccttggggataaaaggcagcctccctgactggctgcgtttcagtgccatctgctaatgggagaaaaacagtcctgacaagaagaccagagagcaaaacaggcaagaaattctgctgccctttctcyttccctcctgctgtcacaggaattacctgcagtgacacagttattccatcatgttgcatgttttcyctaatgatacaattttcctactggtggaagccccccaatcagagtgccatgtgtaacaagctcaaatccttttgttccatggctttcatggctcagcagtacttactttatgatagcaaaccttctccagcaatctcatcaatgtaattgcagtaaactatccctgttctgtctaacctttgagtctaccttaaaaaaccccaaagggaaagcattacctattctgtcgtaaat

SEQ ID NO: 93001 - DNA, 600 bp, Chicken  19866894410857_6
ctatcaaactgatgcctagtaggtaattatttcatcaggaagaactgtacaacttgctgtgcaagattctgtaactaagcactaataaatagctcatatgaccttaacccttggggataaaaggcagcctccctgactggctgcgtttcagtgccatctgctaatgggagaaaaacagtcctgacaagaagaccagagagcaaaacaggcaagaaattctgctgccctttctcyttccctcctgctgtcacaggaattacctgcagtgacacagttattccatcatgttgcatgttttcyctaatgatacaattttcctactggtggaagccccccaatcagagtgccatgtgtaacaagctcaaatccttttgttccatggctttcatggctcagcagtacttactttatgatagcaaaccttctccagcaatctcatcaatgtaattgcagtaaactatccctgttctgtctaacctttgagtctaccttaaaaaaccccaaagggaaagcattacctattctgtcgtaaatgcatacgttcaatgatttggcctgataaagctctgcagctgaagtggcagtttaggtatrgatatc

SEQ ID NO: 93002 - DNA, 600 bp, Chicken  19866894410857_7
ttttcyctaatgatacaattttcctactggtggaagccccccaatcagagtgccatgtgtaacaagctcaaatccttttgttccatggctttcatggctcagcagtacttactttatgatagcaaaccttctccagcaatctcatcaatgtaattgcagtaaactatccctgttctgtctaacctttgagtctaccttaaaaaaccccaaagggaaagcattacctattctgtcgtaaatgcatacgttcaatgatttggcctgataaagctctgcagctgaagtggcagtttaggtatrgatatcaaatctaaatgcgcttaaagagaacacaacttggagaaccagaaaggtgaaccttctcttgctgaaattccagatgtcttcatgttaattcattgaaataatgtagtggtgagcataggggataaagatttatgggcatctccataaatataatrttctgcagaagtctactatggcattacccacttaatgggagaaaatggtctcagtcctctcaaaaaatacttaagaatcctattaaaacaacaacaacaaaaaaacagaaaacattaaaactgaagctaaggggagaat

SEQ ID NO: 93003 - DNA, 600 bp, Chicken  19866894410857_8
aactatccctgttctgtctaacctttgagtctaccttaaaaaaccccaaagggaaagcattacctattctgtcgtaaatgcatacgttcaatgatttggcctgataaagctctgcagctgaagtggcagtttaggtatrgatatcaaatctaaatgcgcttaaagagaacacaacttggagaaccagaaaggtgaaccttctcttgctgaaattccagatgtcttcatgttaattcattgaaataatgtagtggtgagcataggggataaagatttatgggcatctccataaatataatrttctgcagaagtctactatggcattacccacttaatgggagaaaatggtctcagtcctctcaaaaaatacttaagaatcctattaaaacaacaacaacaaaaaaacagaaaacattaaaactgaagctaaggggagaattagtgtgacataataatgatttaatatcacatgtctatttctgtatgtttgaattgtattagttggaagtgtattagtactataatgagtgtgtaatcaaaatcctgttactgatcatttttctttctttagaaagagtttggtttcagagtttctttctc

SEQ ID NO: 93004 - DNA, 531 bp, Chicken  19866894410858_1
cagttcattgcatgtacctgagctctcctggattggccctgccttcccagcaggtgctcaatcactggttcatgccatgacttaacatttctgctatatttacatgctttctaaaaataatactacaaatcattaaactgaactgaatttaaagaaaagtttttgatgcaataataatgctgttgaaaaatatccactatcatttgtaaaattcatgacatatcttccttgatgctattgagaagctgatttcaaataaggcactacttccactaatcagatgaacaattaaatgagtcragctatatagagacatctagttaatattatgtttatcttttattaataagcagagaaaaacccagccagctgtactgtgtgccgaagataaagagtagatagtcagactgtgcaaagttgcatcattatcagcagttaataccaaacactatcagtcattttaagttagtcatcttttgagcgggcaccattttaggaaattctaaataaattcccttgcctttattattt

SEQ ID NO: 93005 - DNA, 600 bp, Chicken  19866894410860_1
tcccaaccttgacagacacagtaatagttggtcttggcattcaccgttgtatgtctccagctcagatgttcattcatgagctctgatttaagaaattccctctagctgttagtgcttttcagcaggattctgcttctatgtactgcttgctacctctgcctgtgtctatggaaaagaaccatttttgccagaaaccaaagaattttattacagaagtacaagatcaacataatttgatacttcacatgataattctgtatcacttcttcagatttataaattctgaagaagtttttcttyccttcattttactgcaattttcctttatgtccagttccatgccctgtcttaaatgatcatatgcgcctggaatccctcctctgatctgtacatttgctatctcctgccctttaaaatatttttattatcagctccataaacgcatttgtagttccaagagacatacagctcctcaccatctttcacagtatgcaatggagatctatctttattttgcccaccaggatacgcttttcttttagttccatactgagctgatgacactacatttataacacttgattaaaacaaacaaacctc

SEQ ID NO: 93006 - DNA, 600 bp, Chicken  19866894410878_1
ttatgtatttatagaacctatctgatggaagagcacaatttactgtccacggcactgcctttgctattgctcccacagcaatcaggccttttggcagaactgcgctagtttttaagagagcaaaagaactgtagagtctgttagggcaccatccgctgaccacactgctcaagaactggactgatgacatacaaggttatgcatgccagggacactaaaacaataactgctctcagcatggaaccaagaatttcatttctcttagtgatatcttgaagtgtagggtggcaactcccagcyatatgcctgtgagcctgatggagccttttaaaatagacatctgtgacagaccagaaggatgagcccagccagcccaatgcctttttcagcttgccttgtaaatgaggagagaaccacaacagaggaacacccagttacagattgcacatctcagagccaagggtaaagccactgaatccttcccatcccattgcagtggaggccaccaagaagyctgaagatacacagatcttactggtagtggatttatctcactcccatttctgaggtttcccaatcagcatcaaataaggataattt

SEQ ID NO: 93007 - DNA, 600 bp, Chicken  19866894410878_2
ctaaaacaataactgctctcagcatggaaccaagaatttcatttctcttagtgatatcttgaagtgtagggtggcaactcccagcyatatgcctgtgagcctgatggagccttttaaaatagacatctgtgacagaccagaaggatgagcccagccagcccaatgcctttttcagcttgccttgtaaatgaggagagaaccacaacagaggaacacccagttacagattgcacatctcagagccaagggtaaagccactgaatccttcccatcccattgcagtggaggccaccaagaagyctgaagatacacagatcttactggtagtggatttatctcactcccatttctgaggtttcccaatcagcatcaaataaggataatttaacaaagagtcaaatggaaattkaccttwttttctgtattggaagcacggctactgtcttttagtcaaggtcagactttccccagattgctaaaaatgcaggagacacggagtcctccccctgtcccaggagaaatactggtttatccatgtaattaggaagaaaagcggaacactgcagtcctcagtggtttttacatcttttaaagtcctgt

SEQ ID NO: 93008 - DNA, 600 bp, Chicken  19866894410878_3
ccttttaaaatagacatctgtgacagaccagaaggatgagcccagccagcccaatgcctttttcagcttgccttgtaaatgaggagagaaccacaacagaggaacacccagttacagattgcacatctcagagccaagggtaaagccactgaatccttcccatcccattgcagtggaggccaccaagaagyctgaagatacacagatcttactggtagtggatttatctcactcccatttctgaggtttcccaatcagcatcaaataaggataatttaacaaagagtcaaatggaaattkaccttwttttctgtattggaagcacggctactgtcttttagtcaaggtcagactttccccagattgctaaaaatgcaggagacacggagtcctccccctgtcccaggagaaatactggtttatccatgtaattaggaagaaaagcggaacactgcagtcctcagtggtttttacatcttttaaagtcctgtcttaactggagagctaaaacagggatttaaaaaaaaaataaaaaaggaattagagagaaagaaaagtcaaaactggtcccaaagcatctggatgaactttgtgatagct

SEQ ID NO: 93009 - DNA, 600 bp, Chicken  19866894410878_4
aaaatagacatctgtgacagaccagaaggatgagcccagccagcccaatgcctttttcagcttgccttgtaaatgaggagagaaccacaacagaggaacacccagttacagattgcacatctcagagccaagggtaaagccactgaatccttcccatcccattgcagtggaggccaccaagaagyctgaagatacacagatcttactggtagtggatttatctcactcccatttctgaggtttcccaatcagcatcaaataaggataatttaacaaagagtcaaatggaaattkaccttwttttctgtattggaagcacggctactgtcttttagtcaaggtcagactttccccagattgctaaaaatgcaggagacacggagtcctccccctgtcccaggagaaatactggtttatccatgtaattaggaagaaaagcggaacactgcagtcctcagtggtttttacatcttttaaagtcctgtcttaactggagagctaaaacagggatttaaaaaaaaaataaaaaaggaattagagagaaagaaaagtcaaaactggtcccaaagcatctggatgaactttgtgatagctagcaaa

SEQ ID NO: 93010 - DNA, 600 bp, Chicken  19866894410884_1
aatgtgtgtgagcagagctgaggtctcaacaacagatagtctgtgggttttctccaggagaagaaaggaactggggacaagttttaacacttgttcattttagacaacgaatgtacggcctaagtgaaaatatcctatcccctctccctgcctttgcagaatcagtcactaattcaacttaaaattaagttttccattttggtggtggaactatcatttcttctatcggaagactacctcacagttccatatatgtgtctgtaaaggtgaaaagccagtacacagcagtgcatcttagtratgttatattctacatgtgagttactgaagtcttccatcttattctgatttaagtctaaaagttttggtttccacatgcaaaataactgcacacagcataatcttttcagcattgactgatgtgctgagtgcgattgtcacagcagaaatkattgttgataaccayctgcaggtgcctaatttgaaagcaagcataaagagagagatgtagaactgagtttgtgattgtgaagaaatcatgtgcttgcttttttcaccttggggccgtaaaactacttggatgagtaaagaaagctgatg

SEQ ID NO: 93011 - DNA, 600 bp, Chicken  19866894410884_2
ctttgcagaatcagtcactaattcaacttaaaattaagttttccattttggtggtggaactatcatttcttctatcggaagactacctcacagttccatatatgtgtctgtaaaggtgaaaagccagtacacagcagtgcatcttagtratgttatattctacatgtgagttactgaagtcttccatcttattctgatttaagtctaaaagttttggtttccacatgcaaaataactgcacacagcataatcttttcagcattgactgatgtgctgagtgcgattgtcacagcagaaatkattgttgataaccayctgcaggtgcctaatttgaaagcaagcataaagagagagatgtagaactgagtttgtgattgtgaagaaatcatgtgcttgcttttttcaccttggggccgtaaaactacttggatgagtaaagaaagctgatgaatgcttgaatgatctggtattttctgtctttataaatctggtgattctgtgttgtatgtgtggatgtgcatacgtgtttatataaaagtagtcatgaattggttttgaagactttctcaagatccactatccayracaagctgttccttc

SEQ ID NO: 93012 - DNA, 600 bp, Chicken  19866894410884_3
cactaattcaacttaaaattaagttttccattttggtggtggaactatcatttcttctatcggaagactacctcacagttccatatatgtgtctgtaaaggtgaaaagccagtacacagcagtgcatcttagtratgttatattctacatgtgagttactgaagtcttccatcttattctgatttaagtctaaaagttttggtttccacatgcaaaataactgcacacagcataatcttttcagcattgactgatgtgctgagtgcgattgtcacagcagaaatkattgttgataaccayctgcaggtgcctaatttgaaagcaagcataaagagagagatgtagaactgagtttgtgattgtgaagaaatcatgtgcttgcttttttcaccttggggccgtaaaactacttggatgagtaaagaaagctgatgaatgcttgaatgatctggtattttctgtctttataaatctggtgattctgtgttgtatgtgtggatgtgcatacgtgtttatataaaagtagtcatgaattggttttgaagactttctcaagatccactatccayracaagctgttccttctcttttcaaagggat

SEQ ID NO: 93013 - DNA, 600 bp, Chicken  19866894410884_4
tgtcacagcagaaatkattgttgataaccayctgcaggtgcctaatttgaaagcaagcataaagagagagatgtagaactgagtttgtgattgtgaagaaatcatgtgcttgcttttttcaccttggggccgtaaaactacttggatgagtaaagaaagctgatgaatgcttgaatgatctggtattttctgtctttataaatctggtgattctgtgttgtatgtgtggatgtgcatacgtgtttatataaaagtagtcatgaattggttttgaagactttctcaagatccactatccayracaagctgttccttctcttttcaaagggatattgtycagttgcctaaggctgtgtatgtggacgcacagtctgatcagaatctgtgtctagaacagaaaggttagcaggtcatcttttgcaactatgatatacgaatgcttaattttcctctttgcatttgaccttgcttcagatacccacgcatcattgcttcaaccagcaatatagcttgtcttaggagaatttttgtactttataggaagaaactcttttgatttggaaagctragtaacaaaacagtttgaatgtcagaaaaaca

SEQ ID NO: 93014 - DNA, 600 bp, Chicken  19866894410884_5
gtcacagcagaaatkattgttgataaccayctgcaggtgcctaatttgaaagcaagcataaagagagagatgtagaactgagtttgtgattgtgaagaaatcatgtgcttgcttttttcaccttggggccgtaaaactacttggatgagtaaagaaagctgatgaatgcttgaatgatctggtattttctgtctttataaatctggtgattctgtgttgtatgtgtggatgtgcatacgtgtttatataaaagtagtcatgaattggttttgaagactttctcaagatccactatccayracaagctgttccttctcttttcaaagggatattgtycagttgcctaaggctgtgtatgtggacgcacagtctgatcagaatctgtgtctagaacagaaaggttagcaggtcatcttttgcaactatgatatacgaatgcttaattttcctctttgcatttgaccttgcttcagatacccacgcatcattgcttcaaccagcaatatagcttgtcttaggagaatttttgtactttataggaagaaactcttttgatttggaaagctragtaacaaaacagtttgaatgtcagaaaaacat

SEQ ID NO: 93015 - DNA, 600 bp, Chicken  19866894410884_6
gtgcctaatttgaaagcaagcataaagagagagatgtagaactgagtttgtgattgtgaagaaatcatgtgcttgcttttttcaccttggggccgtaaaactacttggatgagtaaagaaagctgatgaatgcttgaatgatctggtattttctgtctttataaatctggtgattctgtgttgtatgtgtggatgtgcatacgtgtttatataaaagtagtcatgaattggttttgaagactttctcaagatccactatccayracaagctgttccttctcttttcaaagggatattgtycagttgcctaaggctgtgtatgtggacgcacagtctgatcagaatctgtgtctagaacagaaaggttagcaggtcatcttttgcaactatgatatacgaatgcttaattttcctctttgcatttgaccttgcttcagatacccacgcatcattgcttcaaccagcaatatagcttgtcttaggagaatttttgtactttataggaagaaactcttttgatttggaaagctragtaacaaaacagtttgaatgtcagaaaaacatgaaaggaaatatccaaatgttcagtaatcttgaaaa

SEQ ID NO: 93016 - DNA, 600 bp, Chicken  19866894410884_7
ttttgaagactttctcaagatccactatccayracaagctgttccttctcttttcaaagggatattgtycagttgcctaaggctgtgtatgtggacgcacagtctgatcagaatctgtgtctagaacagaaaggttagcaggtcatcttttgcaactatgatatacgaatgcttaattttcctctttgcatttgaccttgcttcagatacccacgcatcattgcttcaaccagcaatatagcttgtcttaggagaatttttgtactttataggaagaaactcttttgatttggaaagctragtaacaaaacagtttgaatgtcagaaaaacatgaaaggaaatatccaaatgttcagtaatcttgaaaaaaggtcatattgggaaaaaagatattgggaaaaagaactactctattttttctggcagaactaatcttttgctcctctagaatgctcagtacttggtttaaattgaaggaagaatctgccttgctgcttttctttttcatcttcatctctattacatctttcttctttcttagcaagccattttggaaggttggggcacaggggaaagyggagaaggaaaataggaatatt

SEQ ID NO: 93017 - DNA, 600 bp, Chicken  19866894410884_8
actcttttgatttggaaagctragtaacaaaacagtttgaatgtcagaaaaacatgaaaggaaatatccaaatgttcagtaatcttgaaaaaaggtcatattgggaaaaaagatattgggaaaaagaactactctattttttctggcagaactaatcttttgctcctctagaatgctcagtacttggtttaaattgaaggaagaatctgccttgctgcttttctttttcatcttcatctctattacatctttcttctttcttagcaagccattttggaaggttggggcacaggggaaagyggagaaggaaaataggaatattttttaagtcaaaatatcacttatttataatggagtaggagcactgaaaactgcacagcttctctcactctcagcagcgggaagtcagttatctaatctggttaaactcccctaccagctctctgcgctgcctctcccccttggctgttgttcgaggaatgcaagacatatgtgatcatgctgtctcactgtctacccccacacccaaaactgtagaagacattggctcgtttcagctgaatttgagaaacaggcagaagtttcaaaatattaagtttc

SEQ ID NO: 93018 - DNA, 600 bp, Chicken  19866894410885_1
taccaagcaaaacagaactgatttcagtaaaggaaatttaagaaactaattcagatttgtgaaggcttacagccaaatctggaattaatacatattttttgaagaatgaagattcagtactaataattccagtatctcaggaaaaatataaggggcaaaactggagtcagatcctaccaaaaaaatcagtatgtaagtgtgcagatgtgaattgtccccctgatttcaacagcattgttattaatcaataatactactattaacttgatgtacaattattttgttaattcttctgttttyactttactagtttcaagtcattaaaatgatcccaatttgagtctctagagcattaacaatgctgaaaaggaatacagacataacatgatccttctcttccttgctttccactgttacatcacagtaatagagccctgaatattcacacaagacatctctagctacagtcctgtctaaataaatgaagaacctaaaacagactacactgagtagtcctggttttactgcagtaccttgtgttcacaaaagcaagaaagcccaaattgtttgatatcctcttgcagttcatcattcaaaaat

SEQ ID NO: 93019 - DNA, 600 bp, Chicken  19866894410896_1
ttcagtgtctgtgctggataggtagggcatccacttagcctcgtcatagatagcaagcatttctgacatgcctgcagaagatctgcctaaaggatggcagccctgtgggtccagcattcctacttttcgagtcaattccttcatgacagagcagtgccagctgttcagctgctcccatcagtgcatttgctctgcagacagtcactttacaaaggaattgctctagcgagagagtaggatgctcagcagtacagctgcctatggctgtgcacgctgaaatgagagagctgcagacagagrtctcaagagtttggttaagtcacaaaagctggtggtggtaccyratgtgcaygttacagtttggrgctacacaataygggtctgaggcaggaataggtctccacagcaaagacgttctggatctgaggagaacaagtgtggtaggttcccaagtcttaacatggtgtttgctctggcagcagctgtcagtatactcatggttaccctttgcctttgttgtatagcagtggtgactagcagtaggcacatgcccaccttccgacacgcaagtctgcacgtatgttctgtaacaaatgtgaa

SEQ ID NO: 93020 - DNA, 600 bp, Chicken  19866894410896_2
tcatagatagcaagcatttctgacatgcctgcagaagatctgcctaaaggatggcagccctgtgggtccagcattcctacttttcgagtcaattccttcatgacagagcagtgccagctgttcagctgctcccatcagtgcatttgctctgcagacagtcactttacaaaggaattgctctagcgagagagtaggatgctcagcagtacagctgcctatggctgtgcacgctgaaatgagagagctgcagacagagrtctcaagagtttggttaagtcacaaaagctggtggtggtaccyratgtgcaygttacagtttggrgctacacaataygggtctgaggcaggaataggtctccacagcaaagacgttctggatctgaggagaacaagtgtggtaggttcccaagtcttaacatggtgtttgctctggcagcagctgtcagtatactcatggttaccctttgcctttgttgtatagcagtggtgactagcagtaggcacatgcccaccttccgacacgcaagtctgcacgtatgttctgtaacaaatgtgaaatgtgttctgtgactgaggccagctgtgctagcaacatgctca

SEQ ID NO: 93021 - DNA, 600 bp, Chicken  19866894410896_3
catagatagcaagcatttctgacatgcctgcagaagatctgcctaaaggatggcagccctgtgggtccagcattcctacttttcgagtcaattccttcatgacagagcagtgccagctgttcagctgctcccatcagtgcatttgctctgcagacagtcactttacaaaggaattgctctagcgagagagtaggatgctcagcagtacagctgcctatggctgtgcacgctgaaatgagagagctgcagacagagrtctcaagagtttggttaagtcacaaaagctggtggtggtaccyratgtgcaygttacagtttggrgctacacaataygggtctgaggcaggaataggtctccacagcaaagacgttctggatctgaggagaacaagtgtggtaggttcccaagtcttaacatggtgtttgctctggcagcagctgtcagtatactcatggttaccctttgcctttgttgtatagcagtggtgactagcagtaggcacatgcccaccttccgacacgcaagtctgcacgtatgttctgtaacaaatgtgaaatgtgttctgtgactgaggccagctgtgctagcaacatgctcag

SEQ ID NO: 93022 - DNA, 600 bp, Chicken  19866894410896_4
gcaagcatttctgacatgcctgcagaagatctgcctaaaggatggcagccctgtgggtccagcattcctacttttcgagtcaattccttcatgacagagcagtgccagctgttcagctgctcccatcagtgcatttgctctgcagacagtcactttacaaaggaattgctctagcgagagagtaggatgctcagcagtacagctgcctatggctgtgcacgctgaaatgagagagctgcagacagagrtctcaagagtttggttaagtcacaaaagctggtggtggtaccyratgtgcaygttacagtttggrgctacacaataygggtctgaggcaggaataggtctccacagcaaagacgttctggatctgaggagaacaagtgtggtaggttcccaagtcttaacatggtgtttgctctggcagcagctgtcagtatactcatggttaccctttgcctttgttgtatagcagtggtgactagcagtaggcacatgcccaccttccgacacgcaagtctgcacgtatgttctgtaacaaatgtgaaatgtgttctgtgactgaggccagctgtgctagcaacatgctcagaagtgcca

SEQ ID NO: 93023 - DNA, 600 bp, Chicken  19866894410896_5
acatgcctgcagaagatctgcctaaaggatggcagccctgtgggtccagcattcctacttttcgagtcaattccttcatgacagagcagtgccagctgttcagctgctcccatcagtgcatttgctctgcagacagtcactttacaaaggaattgctctagcgagagagtaggatgctcagcagtacagctgcctatggctgtgcacgctgaaatgagagagctgcagacagagrtctcaagagtttggttaagtcacaaaagctggtggtggtaccyratgtgcaygttacagtttggrgctacacaataygggtctgaggcaggaataggtctccacagcaaagacgttctggatctgaggagaacaagtgtggtaggttcccaagtcttaacatggtgtttgctctggcagcagctgtcagtatactcatggttaccctttgcctttgttgtatagcagtggtgactagcagtaggcacatgcccaccttccgacacgcaagtctgcacgtatgttctgtaacaaatgtgaaatgtgttctgtgactgaggccagctgtgctagcaacatgctcagaagtgccactggaccactacc

SEQ ID NO: 93024 - DNA, 600 bp, Chicken  19866894410896_6
aagatctgcctaaaggatggcagccctgtgggtccagcattcctacttttcgagtcaattccttcatgacagagcagtgccagctgttcagctgctcccatcagtgcatttgctctgcagacagtcactttacaaaggaattgctctagcgagagagtaggatgctcagcagtacagctgcctatggctgtgcacgctgaaatgagagagctgcagacagagrtctcaagagtttggttaagtcacaaaagctggtggtggtaccyratgtgcaygttacagtttggrgctacacaataygggtctgaggcaggaataggtctccacagcaaagacgttctggatctgaggagaacaagtgtggtaggttcccaagtcttaacatggtgtttgctctggcagcagctgtcagtatactcatggttaccctttgcctttgttgtatagcagtggtgactagcagtaggcacatgcccaccttccgacacgcaagtctgcacgtatgttctgtaacaaatgtgaaatgtgttctgtgactgaggccagctgtgctagcaacatgctcagaagtgccactggaccactacctagtggaaaaat

SEQ ID NO: 93025 - DNA, 600 bp, Chicken  19866894410900_1
tcatctttttgcataagtaactgggatttgctctgttggccacacaaaaggggacctgtccaggtgcagaaggatagatggcatgtcacggactggaaagtaccaagtttcctccaccatttatgtatactgcatgggaagcacatcaaagcagtggcccacagacattcaaacatctctcagtgtgggaggagagactctgcacaatctgcgaggtcacttcaagtaaaaatgctgcagaccttcagaaatggccactcactacaaaagggagtgaccagaatctgcaaagcatcacakggaagaggctgctccaagggttgttgctgtgaagactcagagmagaggtawcaggaatgascctcctaagtaatgccaggattcatcctcatggcaaaaagaccctgagcagtcctcctttccgaacagctgctgcacaggacaggacatctggccaaaagcagctgccagcaggaaacaaactggcaacagcaaatcatgaaasaactgacatgtgcactaaagctggcaaaaatatgggaaagcagaaaatacgagaagctggataactcctgagtgacctaaagcatcccagtcagc

SEQ ID NO: 93026 - DNA, 600 bp, Chicken  19866894410900_2
acaaaaggggacctgtccaggtgcagaaggatagatggcatgtcacggactggaaagtaccaagtttcctccaccatttatgtatactgcatgggaagcacatcaaagcagtggcccacagacattcaaacatctctcagtgtgggaggagagactctgcacaatctgcgaggtcacttcaagtaaaaatgctgcagaccttcagaaatggccactcactacaaaagggagtgaccagaatctgcaaagcatcacakggaagaggctgctccaagggttgttgctgtgaagactcagagmagaggtawcaggaatgascctcctaagtaatgccaggattcatcctcatggcaaaaagaccctgagcagtcctcctttccgaacagctgctgcacaggacaggacatctggccaaaagcagctgccagcaggaaacaaactggcaacagcaaatcatgaaasaactgacatgtgcactaaagctggcaaaaatatgggaaagcagaaaatacgagaagctggataactcctgagtgacctaaagcatcccagtcagccttatgatgggacacagccagagccaaaacaatggggaaaatg

SEQ ID NO: 93027 - DNA, 600 bp, Chicken  19866894410900_3
ggacctgtccaggtgcagaaggatagatggcatgtcacggactggaaagtaccaagtttcctccaccatttatgtatactgcatgggaagcacatcaaagcagtggcccacagacattcaaacatctctcagtgtgggaggagagactctgcacaatctgcgaggtcacttcaagtaaaaatgctgcagaccttcagaaatggccactcactacaaaagggagtgaccagaatctgcaaagcatcacakggaagaggctgctccaagggttgttgctgtgaagactcagagmagaggtawcaggaatgascctcctaagtaatgccaggattcatcctcatggcaaaaagaccctgagcagtcctcctttccgaacagctgctgcacaggacaggacatctggccaaaagcagctgccagcaggaaacaaactggcaacagcaaatcatgaaasaactgacatgtgcactaaagctggcaaaaatatgggaaagcagaaaatacgagaagctggataactcctgagtgacctaaagcatcccagtcagccttatgatgggacacagccagagccaaaacaatggggaaaatgctgctcct

SEQ ID NO: 93028 - DNA, 600 bp, Chicken  19866894410900_4
aggtgcagaaggatagatggcatgtcacggactggaaagtaccaagtttcctccaccatttatgtatactgcatgggaagcacatcaaagcagtggcccacagacattcaaacatctctcagtgtgggaggagagactctgcacaatctgcgaggtcacttcaagtaaaaatgctgcagaccttcagaaatggccactcactacaaaagggagtgaccagaatctgcaaagcatcacakggaagaggctgctccaagggttgttgctgtgaagactcagagmagaggtawcaggaatgascctcctaagtaatgccaggattcatcctcatggcaaaaagaccctgagcagtcctcctttccgaacagctgctgcacaggacaggacatctggccaaaagcagctgccagcaggaaacaaactggcaacagcaaatcatgaaasaactgacatgtgcactaaagctggcaaaaatatgggaaagcagaaaatacgagaagctggataactcctgagtgacctaaagcatcccagtcagccttatgatgggacacagccagagccaaaacaatggggaaaatgctgctcctgaggaaacaa

SEQ ID NO: 93029 - DNA, 600 bp, Chicken  19866894410900_5
aatctgcgaggtcacttcaagtaaaaatgctgcagaccttcagaaatggccactcactacaaaagggagtgaccagaatctgcaaagcatcacakggaagaggctgctccaagggttgttgctgtgaagactcagagmagaggtawcaggaatgascctcctaagtaatgccaggattcatcctcatggcaaaaagaccctgagcagtcctcctttccgaacagctgctgcacaggacaggacatctggccaaaagcagctgccagcaggaaacaaactggcaacagcaaatcatgaaasaactgacatgtgcactaaagctggcaaaaatatgggaaagcagaaaatacgagaagctggataactcctgagtgacctaaagcatcccagtcagccttatgatgggacacagccagagccaaaacaatggggaaaatgctgctcctgaggaaacaaaaccaacaggcaccaaaaagctgctcagtgccctatggtaytagacrtaagagaagggtctttgtcatttgggtgggtcacaccaaggaggaatctccaaaatatatttataatgcctttaatagggagctaaatgaacccaaa

SEQ ID NO: 93030 - DNA, 600 bp, Chicken  19866894410900_6
ccctgagcagtcctcctttccgaacagctgctgcacaggacaggacatctggccaaaagcagctgccagcaggaaacaaactggcaacagcaaatcatgaaasaactgacatgtgcactaaagctggcaaaaatatgggaaagcagaaaatacgagaagctggataactcctgagtgacctaaagcatcccagtcagccttatgatgggacacagccagagccaaaacaatggggaaaatgctgctcctgaggaaacaaaaccaacaggcaccaaaaagctgctcagtgccctatggtaytagacrtaagagaagggtctttgtcatttgggtgggtcacaccaaggaggaatctccaaaatatatttataatgcctttaatagggagctaaatgaacccaaaccttaactgtcacatcttgctgactcagtctgttaaagctctgacagggatcagccatcatcagcctgaacttctcattatcactatgaagggatatagatttgtggaagtgattttgcacgtgttatgaaaatgcactgtgtgtactgtgaaaaaataaagctttttttccccaaaaccataatgatgactgcaga

SEQ ID NO: 93031 - DNA, 600 bp, Chicken  19866894410900_7
gcagtcctcctttccgaacagctgctgcacaggacaggacatctggccaaaagcagctgccagcaggaaacaaactggcaacagcaaatcatgaaasaactgacatgtgcactaaagctggcaaaaatatgggaaagcagaaaatacgagaagctggataactcctgagtgacctaaagcatcccagtcagccttatgatgggacacagccagagccaaaacaatggggaaaatgctgctcctgaggaaacaaaaccaacaggcaccaaaaagctgctcagtgccctatggtaytagacrtaagagaagggtctttgtcatttgggtgggtcacaccaaggaggaatctccaaaatatatttataatgcctttaatagggagctaaatgaacccaaaccttaactgtcacatcttgctgactcagtctgttaaagctctgacagggatcagccatcatcagcctgaacttctcattatcactatgaagggatatagatttgtggaagtgattttgcacgtgttatgaaaatgcactgtgtgtactgtgaaaaaataaagctttttttccccaaaaccataatgatgactgcagagggact
